United States Patent Application Publication US 2015/0052636 A1 - sequence listing, part 6

SEQ ID NO: 17522 - DNA, 436 bp, Glycine max
  Intron number 2 from transcript Glyma13g23300.1 (locus Gly ma13g23300) derived from phytozome v7.0 (chr-ID Gm13; pos 26721923 to 26722358 reverse strand)
tcactaaaacacttgattctcttcccttcatcttggtaacttcatcttcatctctttttaactttcatctcatcaatttttctgtctttttcttcttctgggagcatagagttgattctgttctttttattggttgtttggtatttaatatcttatagacaaacttgatctgggacaataagaaaggaattatgtagaaccgggacttattattcgagaataattgtagtatcaaacattttcaaacttgtctgaaattgagaatccttgtttttttttcatatatatatatatatatatatatatatatatatatatatatatataattattctgttatccataattttcttttaattgtattatttgattcattttatgattgtattggaatggcctatttgattcacctctttctatctatggtgctacagct

SEQ ID NO: 17523 - DNA, 925 bp, Glycine max
  Intron number 1 from transcript Glyma11g11820.1 (locus Gly ma11g11820) derived from phytozome v7.0 (chr-ID Gm11; pos 8436366 to 8437290)
ctcgctctcgcacgctttctttcaccatcccacgtgtgagttctccaggaacttgttttgctcatgttttcctattttcatgaacaatgttagatttacattgttttttatttattttagtttttatctgaagatttgatttgattctataatcggcatttgttagtgattgattatttcttaaattttttggtgaactcaagtaaagattccatttttgtcaatgcttttcttccaaccctaatgactgcatattgctataatagcccttccttcgtccccgaatgaccctgataggccagggactataccaaaggagatggacctgcaggatacaggaagcagcagttacccaagcacccgaaggacgtgtgaagaaactctaaattctgttagaagttggattagctggcaagataggactggtagcacctagtaggagactatgcttgttagaataattcggttataggagaatttgctgatttggttgttttctgttgtcaagttaaataaggaaaagaaaaaccagaaacttttactttctgcagtggcgaagagaatgaaaattgcacttatccacgggaaacttaaaacctttatgcaaggaactgaaattctgaaaagccttataactacccactaaagctacaccacgatcataaactgaacaacaattaaaaaaataaccaaatctaaataacagtaaatatttaaaaacctttgacttagtaacgagtaacaactactccacatcagcagtcttaaacgcatcatctaacactagctatgtatactttcattttgtctttactgctgccaaatgaatgtctcttgttcattaaggtctggggtggtgtgtttggaatgttggtaataaagtagctgtgcatgactaactttgcagtgagttactgttccttct

SEQ ID NO: 17524 - DNA, 943 bp, Glycine max
  Intron number 1 from transcript Glyma08g05040.1 (locus Gly ma08g05040) derived from phytozome v7.0 (chr-ID Gm08; pos 3600229 to 3601171)
ttgctgccaagcgtggcaatctaggttttttttttttatttttcatggaataagttcttcttacggatgttgctattaattcagttaaatcatttacatatgatagaatcggaaagtcctaatgtttcaaccagaattgcatagccatactagctcatgtgcctctaccccagtatttaacatcataccctagatggagaaatatttgtgtagcaccaattcagaaaaaagataataaaaaagcagttgaggtagttcggacacgtacaaaggaggtcaccaaaactgccaattagaaggggaattgcatgtttggtttgcagtggaaatgttggggcacacgttccaatgtaaatccaacgggtaaaaacaaaataaacgcaaagagaagagtcatcatgaccctttgacaaaattacttttgcctcaaacgtaattttgctacgaattttgaaacatgctctaagttgcacaaaagaacttaaaaggatatgggagagggatcacataggaaataatatatgtgaaaaattggttacttttgttgtttctttctttggataaggaccaactatcaaataccaacgcaccaaaatcaagaaccactatggatgtgtcttcagtgttgattttttctctttctggcttgctttctgaatactcgagtctgttttgattgccatgtacctgatgatgacacatgtgtaagcttttaggatagtagatacctgcagagtgacatgtaatcatctatagtactcttggatgcaatttttgttataatgtttgaagatccaacaatataagatatcagggacaaggtgaatggagtattatcatgtttcaacatttgattgtaaataaggatttcgattatgatatatttatcattgtcaatctttttccagatattgtgagggagcttttgaatatttggcctgag

SEQ ID NO: 17525 - DNA, 390 bp, Glycine max
  Intron number 4 from transcript Glyma06g08190.3 (locus Gly ma06g08190) derived from phytozome v7.0 (chr-ID Gm06; pos 6020651 to 6021040 reverse strand)
ggtgtttctctggaaaaggaaaacctacaactcaggtacaggctgttataattttcttattcagttatttttatcgttaatgtcaagtttttgtttattctatcaccttatcaagatagtttatgtaaggtgcacagcgatcaaatggggttcttagaaaagaatttgtagcatttaaagagggagaaaagccactggtaacagaatttaaatgataattgaaatagttgttgccttttgcataggagtcatttgattagcctggggtgctaattataatgattggtagcattttattcttttcctttctggagctgagacatctttatatacataattttctttcaaatttcaggtggctctttcagtgatattgactgctgctggagt

SEQ ID NO: 17526 - DNA, 448 bp, Glycine max
  Intron number 2 from transcript Glyma11g04530.2 (locus Gly ma11g04530) derived from phytozome v7.0 (chr-ID Gm11; pos 3083486 to 3083933 reverse strand)
cccaggttggtgcttgcacctcttcttaagtgaaaatttgttcctttacgagtttattcacatcacctcacttagtgagataagactatatattgttttgctcctgcttgctaacccagtaataaagcaatatttttgtttttgggttgtttgtccttattatgtgctagtatcaactatcaaatgttattgtgtaacatcctttttaataacatcatggttagtaggcaaaggttgctaattcctgtttgcttatgttagtggttagaactttattctttacaatttaatggaaaacatttgcacatgtttttgggagggtctatgtatacagtataaaactatacaagtgtgctgaattaaagtttaactacatacttaaataatgttagcacaaaagtgaagactgaaggtgtcgaattgcaggaccatcttggagaggttgtgt

SEQ ID NO: 17527 - DNA, 942 bp, Glycine max
  Intron number 1 from transcript Glyma12g29450.1 (locus Gly ma12g29450) derived from phytozome v7.0 (chr-ID Gm12; pos 32898793 to 32899734 reverse strand)
aggtataaatacacgcttctcgcaaaattccttgctagttcgtgttagttccgttcactcactcactcactgttatgaacgaacgactgattattgatctagtgatttgattacagtttcatgtagaattgtgtgaccgttgtaattgttctcgtcataatgcaaatacggcttgtctaatgattgattaggaaacctacatttggatattttttcgggctatcatcgactatgatgaagtagtgtttgatgaatggttttaaaattctacacgcacacttagaacaaaacgagtgataaatttgaaacttatttctttgcgttttcagttgctccttagatttcatcgacgaagattaaatgctgcagtatagggtttattccaagacagttccgttattaactttgcattcattcaactttttgtgccaagtctatgatgatcaagattttgagtttattacataagtagaacctgtgctgagataagcagttgtgtagaatcataaatgcgccgttgtggccctcgggaggggggctagcatctgaggattttctctcttacttaggattctggttgcaagtgacaattaaaatgctttggtagaaatgaaaatgatacgattttctcttatacttagaattctggttgctatagtcacaaagtaaatgcttgagtagatatgaaatgataagaaattgcatgggaaaatgggaaacaaaattgaataaatattgttttggtttcaatcattaacttttgaattccaacaaactgttgttgtggatattatgagatatttggaaattccagtgaagtactttatattttctgatacagacgtttattttttaaattcaagcaatatgagggcattacactgaagatatctgtaaaggctgtaatatcatattctgtttgattaatgaataaagtgcagg

SEQ ID NO: 17528 - DNA, 779 bp, Glycine max
  Intron number 2 from transcript Glyma08g45770.1 (locus Gly ma08g45770) derived from phytozome v7.0 (chr-ID Gm08; pos 45043651 to 45044429 reverse strand)
cagaagaagctcgagatcgacgacgatctgaaactgtaattatttcactcttttttttaattataaaatatttcgtatttctacttgttcttggtggtgttcgtgtgttgtgctttcaaagaaagttgatttattttgtgaaacgatgaatcgcattaccagtaatgcattcacccttggatatttttttaatccccaccttaaggttgtactaaaccaaatcttggaccttacgaaacttttcaatacttttgtttcgttcgtatttatttcattgtggcattttatttttgttatcgaggtagcactagctgcacctgataaaaatttattgtgtttttaatcagcaataaaaatttattattggaagcacaacatattaattctccttatacgtagtacaaaaagtattaaaaaatagcatttaatttaatatcttggaaacgtaaaatgctttaaatattttctacttcatatgattagaaggagagttagtgggaagctggttttgggggatttagaattattcataaatcaccatctctcttctatatgagatttagaagcattggaggagccacctgtcccaatattcctctgcctttggcttgcaacattcttaaaacttttgtttgactttaatattcatgaagattaaatgatttgttcctaagaagccaattttacgtgttcttttgggcaatgaattagtcttgttaaaattttcttaactttgatttttaggcgagcattttgggacaagaggatctcacaggagg

SEQ ID NO: 17529 - DNA, 211 bp, Glycine max
  Intron number 3 from transcript Glyma08g39770.1 (locus Gly ma08g39770) derived from phytozome v7.0 (chr-ID Gm08; pos 39286570 to 39286780 reverse strand)
ctgcttctggtgagtgtttattttgttaatcttaagcctttcgatccttcctctccaggattttggtcataaagttgagtttttgacttaataataagatgaaaaagcaaaagaagagagagagattttgatgtgtttttttggggtatcttactattgggattcttgtggatcaggtaaaacttttcaaactttagatcctaggacaggt

SEQ ID NO: 17530 - DNA, 946 bp, Glycine max
  Intron number 1 from transcript Glyma09g07530.2 (locus Gly ma09g07530) derived from phytozome v7.0 (chr-ID Gm09; pos 6439886 to 6440831 reverse strand)
tctctccgatcaactacctctttcgtcgccctaaggttcctctctctctctctctctctctctctcttcttttctcttatccgattcgacgctacctctctgtctgtattttttttcatatttaatcgatgtagttgttatcgctattttacgattggatctgcttatgccgctctggcttgttagcttttgttcgttttgaaccctatgaacgtttaggaagttacttttactatcgtttttttttcttcctttcgataaggaagacatcatatggagatttagatttgtctcctttgctctcgtgatatctagtttattgtcgttgatcttaggttttgctctgactgtgttcttttacgctgatgttttttttgttcctttattttttattttttggtgctgatctgcttaacgtgtgttttggctcggattggagtttacgaagttggttttatttggaagtggtttcgatgaaatggaatgaccttcgatatatgttgagaatataaattactttttgatgtgttgttaagagaaagggtatgagctatgtcttgagtttgattgaaaataatttgatgttaaaaaattagtggtaaaaaagtttaattaaaaacttgtttaggtgatattaaatagaatcagttctggagtagaactacaacatgttgaaaacgttagagttatataaagtaattagtgtattttgtcattttacagacaaacaagtgtttttgtgctccttaatgtccaaagcaacaaaatttgttgcctctttggctgctgtggccagtgagagaataatgttagagtgcaaacatggatttgcctttgccttggcagcatttatgtggtgcatttgagccgcaaatggactttggataggctgaacgccaaaccaaaagcatgcctttataatactatttcttttcatcttgcagtc

SEQ ID NO: 17531 - DNA, 672 bp, Glycine max
  Intron number 2 from transcript Glyma13g00370.1 (locus Gly ma13g00370) derived from phytozome v7.0 (chr-ID Gm13; pos 103500 to 104171)
attttcaaggaagaagaaaggtgtgttttgtccccgtttgaataagcttcttcatttacacttgtaggataagaaaaatgaaataagattatctcatgaactaaaattagcttttgaagtcaagatcagttttttggagaagctaagtgacaaaagcttctacagaaagttgattttaacttatgcataagctaattttagcctatgggaaaagtttattttattttacttccctattttcttctctcacaggtagttatgaagaaatttattcaaacgcaacctctgttcttgatggttttctcgttaatagctttggttcctagcataagtgcataatcatttcatcaattttaaagacaattcaacaagtcaagcagagaagtcaacctgaatttgcatccaatctatccccaattacaacatagaagaaactccctggtattagcaagagttcatcatgaaatgtttgatccattcaagatttaaaacttttgcatcttagcatcatttgttacttttcatgacaaattttgtcttcttgttacaatgtatcagggagtattcagttttctgctggtctcagcaacacaagattaatacagaatggcaattctacttctcttgggcgtagcagccactctggaggaatcagcaggttctttgggccaa

SEQ ID NO: 17532 - DNA, 461 bp, Glycine max
  Intron number 2 from transcript Glyma06g33970.1 (locus Gly ma06g33970) derived from phytozome v7.0 (chr-ID Gm06; pos 35167333 to 35167793)
atattgtaggccaggtactatttcatttttgctttgctatttttcttttcttttccttttttttttcttgcttccctcctttcctttgtcttacttttcatttacataattcttgtatgaaccttttttggaaatggtaacaatattattaagaattcaattctttgcaaatattgtggttatatttgaggatttgtaaaagtgtaatcaatctatcaattcttataggattttgaaatgattgcttttcaattattctttagttaaagcattctgaaccagggggtgttttaaagaatttccttttgcttgaattgaacttttctttacagattacagtattccaattgttgctttgattttttctcagtttcttttactggtatattgcatgtttgaggttgattacattacaatctttaagtgctgttgttattttctctttattggttgtattcagg

SEQ ID NO: 17533 - DNA, 912 bp, Glycine max
  Intron number 2 from transcript Glyma11g33340.2 (locus Gly ma11g33340) derived from phytozome v7.0 (chr-ID Gm11; pos 35130050 to 35130961 reverse strand)
ggggaactgttacccggcgtgaggtgtgtttgagttggttttctatggtttttcgttgtttcatcaactgggttggcaattttacttttttttatctgttgattacgaaaatttgcacttttcagactgttgaagaaaagattgctcgacatgataccaataatacagtcaccacaaggtgttgtttttttcttattagatgttatatttttacgagggcgagccctggtgcagcggtaaagttgtgccttggtgacttgttggtcatgggttcgaattcggaaacagcctctttgcatatgcaagggtaaggctgcgtacaatatccctcccccataccttcgcatagcgaagagcctctgggcaatggggtacgaagaaaaaaaaaaaaaaaaaaagatgttatatttttaccatcaatcataggattaattttttcttcaggttgattgttgtatggttattagaaatagctgttgatttccctagaaattttgaaagaaaaaaattcattatttccctgttcctcacatggtggttcaatttctttgagctgctttgtttccttcatttatactgtgcattcatataagatagtacttagacaaaaaaaactaagcaaatgaaggaaaacttaaaaatatatttgttcagctttatgctgtaccagaagattactccataaaacttgcctattctgaaccatcaacagtagtacctttaccttacttttgatatgtcaaaggaaaattaattaatgatttaataagagataagcttacaactttacgagaaattattcaataaacctccattccggtgtggtgttttggaagctagcttttctgcagttgtaactattattgggttgatgagtttttttcttttacagggaaattgtggtccagttca

SEQ ID NO: 17534 - DNA, 550 bp, Glycine max
  Intron number 1 from transcript Glyma13g04740.1 (locus Gly ma13g04740) derived from phytozome v7.0 (chr-ID Gm13; pos 4999485 to 5000034 reverse strand)
cattctcctcataggtaaacattttttgtgtcttgtttcgtgttctcgaccatgttgttgcactagaatttgcttaatagttgttgttgtagagattagagaatcattcttggatgggaagaggaaagtacaccaatcccattgatcattttctctatagttttatgtatatatgtatcctaattaccatcttttgagagtaagaataacttctatcgggagatatcaaatgaatcttaatacattgaaagattagtgtttgactctcagttatccttgttttttttttataaaaaaaaacctttttgagagtaagtgaaaatgaaaaaaaaaaaaaatccaaagcatagaaaagcaatcatattctagcaatcttatagaatatcagaaaaagagccagagtcaagaatctaaccaatattctacttctagtgttcttgccccttagattttctgtaatgccatttttgggattaaaatataactttgacttgtttgcgggtgaactttggcagccattgcaggaatagaaaggtttgcattcaagggg

SEQ ID NO: 17535 - DNA, 1014 bp, Glycine max
  Intron number 2 from transcript Glyma12g00780.1 (locus Gly ma12g00780) derived from phytozome v7.0 (chr-ID Gm12; pos 393543 to 394556 reverse strand)
tttgttggtcttatctgcttcagatcctaacggtacgtctgttcatttgccaactagtctttatatttatttatttttggcttagttcttgacttctttaattatctttcaaaaatgctgttttgctggtatctcttgaattataatatctgcaaacatatatgaaataagaattttgattatagcacgagttaaaaaaaatattaattaactataaatatagtattgaattagctttcattgatataattaatcagctggttcggccaacgtaagaggctatgcctctatttgggattctgggtgcatatagagtcttatgatttggaatttcataaaattaatctgaatcacatatttacatttaaagatgtacttttcgtttaaaaatacgagaaaattttttccaactttaaaatgaatgaagacttttttggttaactataaatatattaaataagcttaatgattaagtttatattaatagtatagtatatcatagtgatagacaattttgctggtatataaaattcaatttaataacgcaactaaaaccgtgctcatttcattcactgctttgttaccttcaaattcgtaagcttggaatccatcgtgttgacaagttatactttccttcttatgattaaaattatgaaattttgaatttcataactctgaattgggcaacgttaatgtcaagggataaacttggaagtttcagtgaaaaaaatgaacaaaattatattaaaagctagcatgatttagagtttgacctcggcttttagtttggctagcagctctgggcatgcccaacacgttgttttcagctgaagctatcatgcatgggtccatgtttttataagaaaaagtcaatatcatatgggtgtcaaacattgggaaagcagtttattattcccatgcattgcgcatttgttaaaagatattgattatgataaatttgtaatattgttaagacaagattatatatcctttgttgcaggtccattgttttac

SEQ ID NO: 17536 - DNA, 680 bp, Glycine max
  Intron number 1 from transcript Glyma12g00780.1 (locus Gly ma12g00780) derived from phytozome v7.0 (chr-ID Gm12; pos 394499 to 395178 reverse strand)
aacggtaagctacctcaacttttctaatgtcgacgccacgtcaaaatacatacacgtccagctattaatttatttaagtgcttacagtacacacgtgtttaaccaagacttacatttttttctagctttaatgatctttaaatgaatttttgacttaaatacgtacatttttattatatgaaatatataagtttttaatttacttttaatatttcataattaataaaatatatactacattttagttcctgattcatcacagtctaaaaacacattgccttaaaaagagagtctagaaacacattattttaaaaaatttaattaaaaaatgtcatgttttaaatgattgaaaatatatatttaaactcgtattttcagtatagggtaattttttttttataaagtggactcttgttatttaatgaaatttctattttgtaacacccagattaaatcaaccagaaaataaaaagtatatcaaagaatatattgttgatatttttatgactaattatctcttcaaaaattgcaccttattccatttttcccctcatttcctttcgttttctgaagaggctaattaacaatgtcttcttgttctattggggttgctgtgcgcatgtttgttggtcttatctgcttcagatcctaacggtacgtctgttcatttgccaactagt

SEQ ID NO: 17537 - DNA, 226 bp, Glycine max
  Intron number 1 from transcript Glyma11g19890.1 (locus Gly ma11g19890) derived from phytozome v7.0 (chr-ID Gm11; pos 16670847 to 16671072 reverse strand)
ctcttcttagttgggcttactactgccacggcaaggtaactaactaactaataactacctacaaaagtttttttttcttcatttttccccccttagtcgaacattttagtcataagaaaaatgtgtaatgagtaatgagaaacgaccctttattatggactaattgttgattaatcacataactttgatgttggcacagtcagtggaggagctgaagcagtctctg

SEQ ID NO: 17538 - DNA, 519 bp, Glycine max
  Intron number 2 from transcript Glyma09g29060.1 (locus Gly ma09g29060) derived from phytozome v7.0 (chr-ID Gm09; pos 36022059 to 36022577)
ggttgggttagtaaaattgcaatctcattctagttgatctgttcatgccaagtggctatagtttgtccataatttcttgattattttttgcttttaccctatggatttaatgaactagtagagtagagttttgcttttgcatttacgaccaagagacagtttgaattctcgacttgtccttactggagaagaaaataaaatgaatgaaggagataataacaatcaaatttctcctcccacaggttaaaagctacttttccgcctaaatttttttatgagccctcatcttgctactccattagttgtgtataagttgattttatctcacgggagaagtttgattcattttacctccttgattcttcttgttttctttttctttaagtgtttgttcaaaagtttatccaaactaagttgtctagcaaaaatggctaggaattatattttagtttgttctcactcattctatgatgcacctttcttattttgtcctccttagttacattgcaggccttttgg

SEQ ID NO: 17539 - DNA, 859 bp, Glycine max
  Intron number 2 from transcript Glyma08g22520.2 (locus Gly ma08g22520) derived from phytozome v7.0 (chr-ID Gm08; pos 17099007 to 17099865 reverse strand)
ctaaaactcaagatagaagaccttttgatcttttggtatgtttagatgtggagaaaaggagattattctatttaaatttatagttttgtttttccctttaggtctgttactttaatacatcattcattagttctcttgaggcaggtgatcctgaatcccaagctagagaagaagggcaagaggactgctctgttttttgaagggtgcttgaggtgtccttctttgttaccactcattgctttgtcagactatcaattcactttttgtgctcgttataattcggtttttgagatgagaagtagaagctattgcatacctgttattacttaagaaatttctacatgtcttatgttcaacattttactgctctgactctcactaggctaatttccctttcatgagtaatagctaaaattcctctaaattttttgtctgagaccaagatcataccctcttcgctcaattaccataagacctacttggaacatgcactctctagggcggtcaaacagtttgacactatcttatgattttctattaaaccattccattaaagtgcatatctgcctttgtttaaacaattgcttctgagatgatgtactaggggatcattatgttttgcttaatggctgaagagtattaattcctaaaaatttgtctcaacatggtgactgcatggttagcatccttgtaatgaatacatagcaatggtggttttgatagaattaacttaaagatgactgattgtctgcatatgctgtattccttaaatactgtcggaatttttataaaatctagcttactttccttatgtattctgtctgatgtgaacctttatttgttttctttttatagtttg

SEQ ID NO: 17540 - DNA, 668 bp, Glycine max
  Intron number 2 from transcript Glyma10g34380.1 (locus Gly ma10g34380) derived from phytozome v7.0 (chr-ID Gm10; pos 42535452 to 42536119 reverse strand)
gtagctgcaagtaagtttcttttgtaagggtttcgggattgaaacattcttctatatgtattcatccatttgaatacttctatgacgtgtctcaacttgcatttataaaattagcagttactgccactttcaataatctaagaaccagactccaacattttatcgtcctttaaatattcaaagtacaagataaaactgtaggctcagttttaccaaatttatttctgacagtttcttgttcctttttttcccctaggaactagggagtgtttgacacaatagttattgttgtttcttaagtatagatagatgaatttttccttgagttattttcatagtatgatttgtgccatccttggatactgtgttaagatcctccatcagttaggtttatggccgaagtacacttttataatgaccttggcattaacttttgaggtagagttagacttatttctttctcaattctatatgatatcaaagcgtatacggtcctgatgtttgaccacctgcacatgtctggtgcagcctacaaacttcatgctctagcctctggatgtctagtcctggacatgatatcctcccatggttcttaattctaatttatactgaactgaacatatatagattgaagtatttccccatggcttgtagattgtttgagctgt

SEQ ID NO: 17541 - DNA, 934 bp, Glycine max
  Intron number 1 from transcript Glyma14g02970.4 (locus Gly ma14g02970) derived from phytozome v7.0 (chr-ID Gm14; pos 1874780 to 1875713)
atatttcaactaccaacgttctgcctgtaacatattatgttcgtttacttatttgttcatggctggttcatggttcactagataatgatggaaaataaaggaattcatttgaattcagttatgtttttctcgacacatgggaattatttgggagttagatatagctaagtggggaaattgaacttatgtttctcatcttttgctaactggcccttgttctccttttcatgtgaacagaaaaaaccatctaataggaatcttcatttattgtaatcataggacaatccaactgcatattatttgagtattgtataaagtggactagcacttccttcattttttattggctaaaggatgaaagtagctagactgctcattggttttgaatacaagaaaatatgtcctttcatctctgacagctagcttcgaataaattctgaaatatcacctattcagtgtctgattttctatatatagtttagccctgttgatattgcatatttgcgttaaattatgagacgtattagcttgtactgttgatgtcactatttattatggtaaagtgtttattgatcttgatgttcagcattggaaatttaattgtttaagttggctttttcttttatgattggcttaggcaataataacttgaacactcttatcaaatcaatgcatttttgtaggctacaaacaacttcaaagttttaaaacctaagtgtttccttcatctttgtccctttttgatacttaatgtgtccctttttgatacttaaagtgttttcttttatagcttttgttttacaatgtctaataaactaatctgtacgtgctatccttttttttttcttgaatatttgtttgtaattcattttgttcatcaattttcctacccccatcagaactgcagtggcagtctgaactctgtactccggag

SEQ ID NO: 17542 - DNA, 490 bp, Glycine max
  Intron number 3 from transcript Glyma06g13210.2 (locus Gly ma06g13210) derived from phytozome v7.0 (chr-ID Gm06; pos 10368213 to 10368702 reverse strand)
tggccaggtgagtgtaactcatacatataagttctgcacagttcatgtacatttgctttattgcagggagagtatgatagtttgatgcatagctcttttatgattatttgatagccttaattgccaatattgcttttaaaaaacaaccatatttttcttttggtagctttcacgtttagtgtaaattttagatacattgaatcttcatatagaaggttgaatggggaaaatcatcttgtttgacattgaaaattacttttggccaaggagactgacctaaatgtttgatgtaacatttgaacctgtctcccttctttttttatactataaatcatgataaccaaagtccatattttacagtcatgtataaaagctctcactttggttgttgagcatcttatttgtgtattgtgtatgaaatgattgcatctgatggctttagtatctataattaggagaagcccattcaatcaaagtagaaaagatctta

SEQ ID NO: 17543 - DNA, 1002 bp, Glycine max
  Intron number 1 from transcript Glyma06g13210.2 (locus Gly ma06g13210) derived from phytozome v7.0 (chr-ID Gm06; pos 10369055 to 10370056 reverse strand)
cgccttcactctccgacattcatatcattcatcaggcaagcaacgccccttctctttcatccccatttcttcttccttctactgtttcttttctccactttatgtttttttcgccttttattcttctattcgtttattttcggaatctgaaccctagcgtttctttcgcgtcgttttcttgttttcatagctgcacgatagatagtgtcatgtcatattcttcttcttcttcttcttttgctctgcctaacttacgtttagaactttcttgcgaaactgcctattcttggttgttattattattatttgatttgattatgttatcattttgattattatttgatttggtattatggaaaagaaaacctggaaatggaaggaaagacaaatttacggattatgatttgtttctttatttagagcgcataatcagaggtagccaggcttaaatacggaaagaataaaataaatttgtcagagatttgattgtctcttctattttgtacagtgattgtttgatacttgtaaatattatattttattattgcttttttttcgaaactgataccaagctgcaaactcttcttattgttgctcagagataatacataattatttcatgtaatttatcatctatcggctatatgttgtgcccaaagtggaattgtaatattttttttcctttttttcggtggcttattttattaatcaatatttgattgacgatatgttccgtacttaactctgacagtgaataacagaccaaaacctaatgataaaatcaaataaaatttatgaaaaggccaaataaaataggaaaggcagtccttataaattgagattcttcttaatttgccattgtgcttccactttactctgtaagtgctgcgatttttttttttttttaatttatgaacttaaagatggtgggataattttcttttcgtgacaactcatgtgcttatagtatacagagactggagcctgagaagaaaaggagaa

SEQ ID NO: 17544 - DNA, 662 bp, Glycine max
  Intron number 1 from transcript Glyma06g05420.1 (locus Gly ma06g05420) derived from phytozome v7.0 (chr-ID Gm06; pos 3857244 to 3857905)
gaagccatctctcctccacctgaggtacgtaaccaattccttcctcgctcgcttcattaagcaaaaacgactttcttcttttgcttttcatctacttgcacttctatatatcacataatgttgtttctttctgaattcagtctatgcgcttactttagtttctgttttagctgggacctgactttggaaactcgccatgtgaatttcggttattaattcttcacttctcaaagcgtaaatgtttttgagttagtgaagacattattattctagttaaataatttttaatttttcttttattgtcctactttctatcactgctaagattctggcccctgctgattaatatagttttttaacctcttcgaatgcagaaagttttgcacttttttgttaacttctattttttgggtttctctctctctctctctctctctctctttgaatgcgaactctgaagggccagaggatttacacgcttctgttacccatgctgaaagcatacatgtggttgagtaaagaatgattatttatttggcccctttttcttgttgtgtaaacatgaaggagatggtttttcatgttcatatttggttttcttgtctattctggctaacgagctgctgagatatttttgcaggaacatataataagaactcgtc

SEQ ID NO: 17545 - DNA, 642 bp, Glycine max
  Intron number 2 from transcript Glyma06g05420.1 (locus Gly ma06g05420) derived from phytozome v7.0 (chr-ID Gm06; pos 3857949 to 3858590)
agcgctaatcacgtatcctgatttggctttaaattgtaagttaaatgaattttactttttctgtatgattcttcttcgagctaatgataccttttggccatgattaacgtcattttaatacattttattgcacgcttataattacttcaaaaagaattattaaatcattttgtgtttttaatataataaatgttttattttctattattaatttttagattcagtttctttactagctagtgtagttctagttagcattttcctttatatataataataataataataataataataataataataataataataataataataataataataataccccccaaagtcaaaagattgtttttttaaaaccaaaaaataattggcatttatagatttgttttaatcattaagttgaaaacgctgtctcatttctttaaagtagattcaatgctagagttttgaataatggtagttatgtacttatgggtaattaaattatggtttagctagttttctcttaaaagattttatgctgagaatataaaaaatatagaatgatgttttatgactttgctaacactgtttgttttgttgacaaaccaataatctaaccatttgttttcctgcatgtggtttcatcag

SEQ ID NO: 17546 - DNA, 813 bp, Glycine max
  Intron number 1 from transcript Glyma09g01870.1 (locus Gly ma09g01870) derived from phytozome v7.0 (chr-ID Gm09; pos 1220962 to 1221774)
gcaacatccagaagtgctagcaagagaaacagtgtgtatgttcttatctccctatttcgttccaatttatgaaatttgtaactttagttcacaataaacaagtgattcatttcggcttcaactttgtaaatagaagttccaaattagcataaattgaataactttgctccgatctattcctatactatgtattagaattctcaacttggagattgagggtctcactctcttgattaaacattctcagcactctctcttttctcctcagaaagtgcattttacacactactgccgcgactagcaaaaaaacctcttcaaccatatcaaattacctttcttgtatctttgtttgcatactatatcacttgaattattcattatacattcaaaatatttatttattataaattataattataattttaattatataaaaaaatatccatctcactctatgtacaggctaaaatactagtttcacattttcttttttggttttcatgatcttttagaaggcattcactgaaaatatttaatggtggccttacgttattgaggatcaaaccagttaattgaaatgtagataaaaaaatttaggatgcagtaagattttaggatttataactaaaaccaactaaaagtggtaataaaaatagaggcgttctgaaggcctttgaagactttgtaaactgttatgtaggaatgaatctgcttagttttaccatttttcagttaccaaggctcttattaagacttggaacataacttgttttattttcactgcagttagtgtaagtgagattgaagcactgt

SEQ ID NO: 17547 - DNA, 519 bp, Glycine max
  Intron number 3 from transcript Glyma06g02850.1 (locus Gly ma06g02850) derived from phytozome v7.0 (chr-ID Gm06; pos 1972627 to 1973145 reverse strand)
cgtgacagaccaactgttgtgtctgaactttctaagtgagttaatgatttgttgtgggtgtatgctgtttcggttttcaccagcttcttttgcctttgttggccatgaacattgtgcttccttgtttggtgttttgtgtgtgtgtgtgtcagcaagagtatatgctcagtcttttatcgtgtatggtatctgtttggcttctggggttatcaatggtctgtaaaagttcttagcgtgtttgtctattatgaagaagcaacaattgtaaaagttgttgcttttggttgattgtctgtttggtgatttgccaatggataaaacagatttgctctttaatttttctctttgattttgtattggatgttgattttgacgtttgtctttctctaactttttcagcttaagggttaattttgtatgaatttgtagtctgttctgtcattgttccttgtaacgctaaatttctttgatatttaaattgaagatacaaaattgtcaaagctggatcagggaggagcc

SEQ ID NO: 17548 - DNA, 549 bp, Glycine max
  Intron number 2 from transcript Glyma09g41670.1 (locus Gly ma09g41670) derived from phytozome v7.0 (chr-ID Gm09; pos 46341376 to 46341924)
tttcaagtggtgagcagtgtttttttttttttttttggcaccatttgaattaaacaagtatattattgtgtgtgtctttttggtattatttcatcatcaaagacacttggaggccggttcttatttgctgttatctacatatttggactttttttcttctattattagcttcttctgacttgtatgtcttgtggggtcagtttcttgtttttaatggtccattgaattgtcttcttcttttctttgttcatctcctttttctattttatttttgttggtataaagacggtttgaagggctaaaacaaggttcataacttgcctagcatattccaagttgaaaaagtctaacctacaagtatgtcaatgtatttttatgttttgacaaacaataaacttcattgtaatgttataatcaagatgcataattcatagtaaacaaggtttgattaattgatggcttgaaacatgtcattcttgtcattatttggatttgtattctaaatactttgttctacttggacaacaggaaccgcttaagaaacaagac

SEQ ID NO: 17549 - DNA, 395 bp, Glycine max
  Intron number 2 from transcript Glyma11g22530.1 (locus Gly ma11g22530) derived from phytozome v7.0 (chr-ID Gm11; pos 19785391 to 19785785)
aaatccagagagggacaaaccaaccttcctgaaaagtgcgtgccctaattcagctctttgcattttttctttaaaatttggtagaaattttgcttttttagtttttgtatgctgagttgtattttaattttcttttttgcagatagtctatgtttgctgatttgtttggtcacatgagttgttcactcagattgttgcatctgtgtaaaaaggcttcaatttttcaaaatgtttgccgccaggttgaagttctttcgaagaggtgattgttttttttcttttaaaatctttaaatgccctaaattaattaatggttatgaattgccattctcttggagtttttgattgatgggtgaggaattgagtttagtgttttgtttttaggaaattctccc

SEQ ID NO: 17550 - DNA, 811 bp, Glycine max
  Intron number 3 from transcript Glyma13g42070.1 (locus Gly ma13g42070) derived from phytozome v7.0 (chr-ID Gm13; pos 42163122 to 42163932 reverse strand)
gggcaaaggtatttatatgacttttatgctgagatttattatactttgtattgatattctccgtgtatttttggtgacatcattttataataatataataaagatgatgatgactatgacaatgatcataacaatagtagtactgtttaaaatagcagatcaaaagtgaggtttacactttgctctgtttgtctttctaactttttatcatttccatggtactggtatcttttatatcttcccttggcaagtagaaacatcttttggtttttaggattaagacttaagagattattacctttaccttttaaaggagaagttctcttggtactttgtccaatctagcattcatgttagacaataataactgtgaaattcagcaaaataattttttgcaaatttcatctgattatctattgaaaattttgacatattaggcactttgatgattgatgaagcactttagaacttagaagagttgaatagttgattgctcttagggtgtgtttggtttagaggatggaaatagaagagaaattttttaattaaagtagagtgtaaaaggtgtgggtcccacaaaaaagtacaaaaatgctctcaaatattatttctcttctctctaccaaacacaccgctagagtgctactttgtgtatttttattatgcctattcaagcaaaaggtctgaattttcgaaaagcagtttttgatatattttttatatgcttactagttactactttgtgtagatgttaacacttccatgttgcattacaggtgattggttcaggaactgacaaggaaaggattcc

SEQ ID NO: 17551 - DNA, 337 bp, Glycine max
  Intron number 2 from transcript Glyma07g05840.1 (locus Gly ma07g05840) derived from phytozome v7.0 (chr-ID Gm07; pos 4534824 to 4535160 reverse strand)
tcacaagaggtttcatcatcataacgctctgaaaggtttgattgacctctatgtataacttctctcatttgcaatttaaaaaaccacacccttcacaagctacaaatatatatggtgcctttaaacaaatcttcatgatatgtatatactgttttttttttcttttttttcgagagcgtaacatcttctcttctttgctaaaactttggtatttaattaatcgagtcaaatgggatcatgagatccatgtagtccacctgacctaatcagataaagttttgtttttgttgtagtactgtcatgttttcttctaatgaatcttttggttttcatacag

SEQ ID NO: 17552 - DNA, 971 bp, Glycine max
  Intron number 1 from transcript Glyma12g07690.2 (locus Gly ma12g07690) derived from phytozome v7.0 (chr-ID Gm12; pos 5311231 to 5312201)
agaatcattgcacgaggttttttttccttatccgttttggcgtttttctattctgcaatgcacatggatagaacatgctttgttataaaattatcttgtttgttttctcattgaagcaataatcatgtggaaaatgtcaatgggttacagcctagtgtattgatcattttggcttttgcgtttggcagacagaatcagaaggtttgagcgtttttagataaatggatatgtgttcatatcacaccaacttcacatcctaaactctcgttgaatggaccgtgccttctttcaaggctaaaatgggggcttagaaaatttcattcgtgttttacaataataccccttgtaaatgtatgcatgagaaagaggtgtaaaaaccggtcccatgctggttgctagttatagtggattggggcaaccaacatggtgtgacatggttagtatataaccttgtcacttgagcatgtggtcaaggattcaatgcctcactggtttgtatggataaatacatgttggaagagttcagcctgttaaatagatttcagtagcttgaggtacccaccaaaagaaaatgggttggggcaaaaaaaaaaaaaaagagagattaaatttgggtatctaaaatgaagctcaaactcaatgaaagctcggtctgttcaagcttttggtgggtttttgcggtctatgtctagattgagtcttgatcagatcagactaaaaaagtctacttttaatttggactcacaatttaaagctcaaatccttcatttctttaggcagatttgggccaagtcaggcgatccattttgctacctctagatgagaatgaaattgattcattagcacataggggtgaattggtattttcctcgtttgagatggggttgatgttaggcccctgtgtaatttcatcattttctgttgttgtaattgtaggcccctcttgatcattaccgggtgctgttaacctg

SEQ ID NO: 17553 - DNA, 1069 bp, Glycine max
  Intron number 1 from transcript Glyma08g32090.1 (locus Gly ma08g32090) derived from phytozome v7.0 (chr-ID Gm08; pos 28223414 to 28224482)
cgcacttcgaaattgaagtgaacccttcggacacggtttgccccctaacactctcattcttcaattgaatttcgatcgtgacttgtcgctttttttccccccgctttgattgcgcgagcagaaaccttgaatttgaggattaactagggttttaccttccttgttggtcgattttttttttttgttgattttgagtgatggcaatttataattccccgatcaatcttttatttttggtaattgagtgttaaatttaggttctgaatttagtgctttgtttatgtgcgtgattttgtgtggaattaatatggcctgccctgtttatttgttgtgtattaggcaagagtgtaagaccaattgctagtaagtggttgcatgattggagcatgataatgaataagtttcactctttgatattgtttggaacttttcttgggaatttaaaaaaggttatgctaggatggaaattctggtttaatactggttttgattactattgggagatcatgcccatatgggaatcattatccattgtagttgcacatgactgacgttgtatacactgctacatcatacactttggttgataactaactgaactatgacctgttggaattaacattgtttaagacttgagcttgttgttgttaaaccatcatggataactgaaattagggaatttggcttctctgagtgaaggtggtgtttcagaggaaacttatggagttataactgttgattaagacaaatggttgagaatgtgataaaatgcatacaaattttaagtataacaaatgatgaaattgttaagttccactcctttgagttttttaaacatgactgtctttttttctctctaaagcacacccctcactttagagttatatatgaaataagggtgtttaagagtgtgttaattcttcttttaattatgtgcttcatacttctctcattatgtttctaccatattctgttctttctgaactacagtaattagtctgtaatatttgattaattgtggatattatttacagctttctgaagtgaagaaaaatatagaaactgttca

SEQ ID NO: 17554 - DNA, 730 bp, Glycine max
  Intron number 2 from transcript Glyma08g20730.1 (locus Gly ma08g20730) derived from phytozome v7.0 (chr-ID Gm08; pos 15730655 to 15731384)
gcagcgttgcacgccttgaatgtgagtaccgtcagagttaggaatttagtgcatgtttggtttgcaattggaaatgctgcggcacacgttccaatgtgaatccaaaagattaaagcaaaatgaacacaaaaacaagggtcctgatccattggcaaaatgatttttgcctcaaacgtaattttgcaatgatttttgcctcaaaacgtaattttgcaacggaactgataagtaaattttacgattttgatttttgttccttagaattaacatattcgactaagggtctgttttcacacacttcttattcctaacttgagaagaaaataagaaggtaaaatgaattaagtttctcctcacttaaaattagctagtgcataagtcaatttctacaaactctctcatttagcttttccaaaaattgattttaacctatccgtgagctaattttagcttataagagaagtcattttatcttgttattttcttctcatgtaagtgtatattgagaaatttatccaaacaaaaatttaagtgaaaattgcagtggccttgtgcaaatactcaaggaaatccttagagttagtgggatttatggagtgtgaaaataaattgttgatcatattttacggagaagatgtttgcagttaatagaaattggtcttttaactaattccttttttcgttgatgaaatcagggtgtgaaatttgatcctcaaactggatctgtttt

SEQ ID NO: 17555 - DNA, 965 bp, Glycine max
  Intron number 1 from transcript Glyma13g06840.2 (locus Gly ma13g06840) derived from phytozome v7.0 (chr-ID Gm13; pos 6998676 to 6999640 reverse strand)
atttatctactctctacccactttctcagttccaggttcctctctctatcttcatgttacttttttttttaaaaaaattcattctttctccgttcccctcttacccacttcaatttttagcttccaattatcgttttgatccttctgattacttcttactttgataatcgaaagtgggtctcttccttttctccaattttgggtcgattctctgttttttttattgaaattctgttgtttgcacacacacactttgggtgtgatttatgtcttttttatgttctaaaattatgatcacgatttttcatcttatagtaatgatgttcatgttgttggttgagtcatttgcatagcttgatagtaaagaaaataattttttttcttttttggtcctaaatttgaagttgagatggtgcaagggaagttgtcggcgagtggcaaaagactaaaaactgaaaagttttgccatttgaataatcaaattttggcatattcttatttgaattttatattagttattttatgttacactcgtgaactttgtgttgatcttacgttatggttctgattttgctgttctgaaatgtgtacatgttgcattggactttggagcatgagcattagctgcattgaccagatattcatgtgcactaagtcaagacaaatgatcaatcattattttaaaatataaaatatttatgtggctccaaaatttttgttgtcatttaatagttaatactataggataataggaattggtctaaataatacacacacacgcacataatttcttgtctagctgattaaagcttatttgttttaattgctcaaataatggcatgacatgaatgataacttcagcgaacttcacatgtttttcagtgttgttattattgttcttctttaatgctgttttgatgtaatttgcaggtaagcaagagaaacaatactcatctttattacag

SEQ ID NO: 17556 - DNA, 884 bp, Glycine max
  Intron number 1 from transcript Glyma13g10510.1 (locus Gly ma13g10510) derived from phytozome v7.0 (chr-ID Gm13; pos 12395817 to 12396700 reverse strand)
acaattttgttttggtgtgatatttgtcaactaaggtacatagcttttgtgtgtatcattgtttatgatgagggaagcccacaggcctacaggtaacttacgggtaaggctcatatgacggggatcaagggattgctaggtgtgacattataactgcggaagaaaaaaacttatttcgtggaagctcacggaagatgtctttcgcgagattccacggaagaagtcttccgcgacatttcatggaagaagttttattccgttgttgtaactacaactgcggaagacagtttcttccgtggattaatttgttttataatttttagttttaagattattttgaatgttattttggttaattttatttgtaatttatgtgaaacataaaaatatatttcttggttgaagtgttgatttttttgcctaggttgaagtattttttggttaaatgaactttgtatgttatatttttgaaattatgtaattaaaagttgaatttggttgttaaaatattgatgtatatgtaaattaaatatttgtgtgaggttgtcaaatgttgaattagttcgatattcatagtttgtaaatttttttgggttgctatattattcaaattatttagttgaatgttgaattaggtgatacttatagtttgaattaagatggacgaagatcaatggacatattacagtacgatgtccgaagaagttgatatgaattttcaagatgaacaagattgtggtgtgaatgaatgacatgttgattgttcagatgcttttaatacttaggtaatcatgtcgatcaatttgagttgtttggtttaatgtatgatttgtgtaaaaattaatatgtcgtggttgtgttttaggtctttgcaacccgagaaa

SEQ ID NO: 17557 - DNA, 451 bp, Glycine max
  Intron number 3 from transcript Glyma06g07800.2 (locus Gly ma06g07800) derived from phytozome v7.0 (chr-ID Gm06; pos 5721383 to 5721833)
aggcaaaagtgagttaatttcccagtattatggttgttggcttgctgacataaatgataaagttccttcttatgtcatatttcaagatatgccttagaaaatccttttctttttctttgattccttgtaatcgagacaatatgcatagtactaaaggaatagtgtgattttaatttatattgtttcttggccttttatttctggggtcattttgtggcccttcttagagaaaaggtcatctaaactggaacagcaaatttagttgattcaagttactgcttgttttagtgcatgattcttttataatagggtctccataagctatgtgcaagcagactcagattatttacggcttagaatttagagcgaaatggcactgtttttaattttggtttttattatctattttttggtagaataatatcaacattgaccagaagcatagacacga

SEQ ID NO: 17558 - DNA, 419 bp, Glycine max
  Intron number 1 from transcript Glyma09g08000.2 (locus Gly ma09g08000) derived from phytozome v7.0 (chr-ID Gm09; pos 7030314 to 7030732 reverse strand)
ggctgcaaactttcagttgcagtacacggtaaaactaaaatctgcttattgaatacatgagaagtgagaagtagatgtttgttatacactaaacaataaagaaatttaagttggttgatactgttggatttttggtccttggattttaatgcttttttttctttgttcttcctttagcggtttggccctagcatcagttacttgaaaattcagttgtttcccctttcaccttagatcatagctacacgtgtttgttcttgttacatgtcattatcagtgtttttagttttgtgccttttattttgaaagcacaaaaactcatactaattccttggaattggattcttctcggacactgatacactctcatatttgatttcacaggaccataagtcttggaaggagccaacaaagctgtt

SEQ ID NO: 17559 - DNA, 599 bp, Glycine max
  Intron number 2 from transcript Glyma12g11130.1 (locus Gly ma12g11130) derived from phytozome v7.0 (chr-ID Gm12; pos 9137740 to 9138338 reverse strand)
gaagaacagccattgaggtgaactatataaatcataattaacttttgtataactaatgtttattttttcaactcgatttccaagcaaaaaatgaccacactattgaacgtatcatctgtagatttgccttccttaaatgcatgtgaccataaggtgctgatcttatctgcctcataatccagttttcgccaacatgctgcattacaacttagaaggatagtattattgatattaatatactaaataaactagagaaactgattcagtctatcaggtagatcgtgtcaggtgtaggtttaacttcaataatcctaccccaaaaagatgctaactaaatcagccttggtacataaccctctcttcatcatatatcacatcaatcacatgtattaagtataatatcaaatatcaaataataaaacaagaaacagattcagtatcatatagtaaaacatgagaaacagattcattctgagtcattgaacaaccatttactgtgtaacatgttacaaacttcaacatgtacactacaagaagaatgatcttggttactaaagcatgtttaaatttgttgctgtatgcagatatacagtgactac

SEQ ID NO: 17560 - DNA, 848 bp, Glycine max
  Intron number 1 from transcript Glyma10g01200.1 (locus Gly ma10g01200) derived from phytozome v7.0 (chr-ID Gm10; pos 885094 to 885941 reverse strand)
cctccccttcgcatcttcactttccaccatttcaggtactcatcgatctatcatatcacacgcactcttcaatgtcacttttgcgttcgcctttcctttttatgttatttatttatttttatattcctgcaaaatttacctttctgcctgtattaaccggttcgcttccgcgtttcactgatctgtgactgatagcttggactttagttgtactttgctctgattggctgaaaccgtttcgatccgtttccttttggattgagattttgctgaccaaagcgttgagcttacattagtattgtctgatttcacggcagtgaagttttcacgcatcgtttgttgtccaaggatgatggaattatgcaaataaaaatttagaatgtaataatctcggttttctatttgatggtttttctgagttatttggctaggctatattgcttgttttaattaattattaaataaatgagttgcttctattcatattttcatatcatgccactgaaatgaagcctgaaacggccgttgagtccaataaccctagactcatggattgagttgaatgtggtttggaatgtgtgtcaactgaaaaccaaacacccttcgaagtagaactcatcgtaattggaaagaaaccacaccaaatagcactatttccttccttctttccttttgaattgatgaaagttgcagttgccaccgggatgtatcttcttttgtaggaatgaacatcttcatggatgcatttttttattttatttatagagactttgtattcaagattaacaattaacagttgttagtatatgatttaatggtctattgaattatttcagtgggaaagaatc

SEQ ID NO: 17561 - DNA, 790 bp, Glycine max
  Intron number 1 from transcript Glyma10g37900.1 (locus Gly ma10g37900) derived from phytozome v7.0 (chr-ID Gm10; pos 45787212 to 45788001)
ctacgacggtcgcggtgctctcatcgctatcttcggtacccatttcgtcaagctcctcctttttttgtttttctggtatatattgaacatgggttggtgttgctgttccaatttgagtactgggtagctgaggatacggttgaagaacatctgggtggttgtgtttgaacttcgaagtgagatatggagatgtgagtgttgcccacgattttcaggttgaaggagacttgaaaagtttgcgtttttagcttcgtggatgtctatgtatatacttgttgggcgttggaaattggaatgagttggtttgatttttaaattatagtacttgttttttcttgcttatttattggtcaaatttggtgacttggttggagtcttaatccaagtggagatctttcatttggtttggatgggttgcgtttcatgatatatataatgattgaggcgctattcccagaaaatggttgcggcgatggtagagtaattaatataagcaaaaaatattcactatatgtccttgtttgtattcattgtttccttagtctcagccctgtcttttcttgtgtttacagccgagggggagtataattttttcatggatgctattttcaccatgtagttctttcattggcatagtgctggtctaatttgtttctttaaaaaaagtttcattcactaatgttacattgtaattgggactgctgtactggttcatatgataaatgagtttaatcataagagctgcatgttttcagattctggggtagacccggctgctgctggattacag

SEQ ID NO: 17562 - DNA, 734 bp, Glycine max
  Intron number 3 from transcript Glyma09g07730.2 (locus Gly ma09g07730) derived from phytozome v7.0 (chr-ID Gm09; pos 6667762 to 6668495 reverse strand)
caaaattgtcagtgttcttatccatcttttacctggtatgatatacctttattttttcagcagtcctctctttttttttacaagataataaaattttggaaaaccttactcttctatgatcattatagactcatgctttccatagtcaaatattgagaatatctgacaaaataattatattgggtcaatgtgttgttaatgtatgcttatcagggaatttgtattgtgtaagaacaatatgaaggaccttcaaattgatatcatcaagggtcatctacataaaatcaaaacacatcaatatttttatcttattttatacttctgttcatgtcacagactgggtgttgctacccctcccccaaagaaaaaaaaaactatcttctgtttcttgcatgagtcgcatctattttcagatgtcttcatttcttgatgtgcttgtatgatttaatatctgctagatataaaaccatttacgagccttcatctaacaatatccacctaaatccgcatattcaatcactatatttttttctgtatattatgaaaatatgtaattcttgtttatctatggaacaacttgaacttctacttagacatcacaatattagagatgctacaattggactggatttgtgataggcatgtcaactttaggtttcttgttgcatccattttggttattattatgcttttaatgcaattttttttccaggattggttttctttaccattcg

SEQ ID NO: 17563 - DNA, 402 bp, Glycine max
  Intron number 2 from transcript Glyma09g33690.2 (locus Gly ma09g33690) derived from phytozome v7.0 (chr-ID Gm09; pos 40144466 to 40144867)
caggtcagaggtcattgatgatcttttaattgtcatgatttagttgcatttcctgtattttctttctatcaacttctatatctattgtttcttttttctacttgtattttatttttgtagattttgacctcttaacttttctagctagaactaagtttttttcccttgtttataaaaagtttcttctttaatttctcatcctaatcaaattcaatcatgtatcttgtggttgacttgaaattagatagtcgtgagaataagctgaatgaattgtaactgaattcatttttcatattactattattttaagtaatcaactatgtatttatttgatcttctaaactttttgtttcatggtgaatatcagattacaggcacaaagtgtgctagctggtactggaa

SEQ ID NO: 17564 - DNA, 977 bp, Glycine max
  Intron number 2 from transcript Glyma11g28420.3 (locus Gly ma11g28420) derived from phytozome v7.0 (chr-ID Gm11; pos 28556769 to 28557745 reverse strand)
aggaaaacttgtcgtcacattcccaggtgtgctcttcaattctgcaaagacatgcttttatgagtgcagcaataattaaatattagattttgatgttaattcctagtacatttcaaagtctatttaaacttttgttgcaaaccatgcttgggtgcatttcagctttcaattttgcattctcataagacttgatccagggataagttttgtgattgcattagttgttttaatctagaattgtcttttggaaaaaatgagtattggttgaactccatttgtctttcattaatatgtctacgactttgtgatcattgttcttttcctgttttttatccctgcctcctccccctcttaaaattaacttctgaaaagatgctgttgaaacgtaacatgcctaaaattggtactttttcccttgtggctatgatcgacagtgaaaaagaagattaagatcaataatgaagggagcaataatttaataaggcaagaagaattgtgaattcattagattgtttctcattcatttgattgtactgccgaacattgcttttcctgcaagttgttggagcagattattctttgggatataacatgataaaatttcagtggttgcaaatgtatattttaatactccatttataaaggataataataccatggtgaatatattatgataattatcaaataaattgaattgtttaagccttagtcccttacacaacccttatatacttttgtgacttatgcacttgtccttcatacgcacttttgctgcaagtcaatactttgtacctgtagatactagatatccttgattaggtggagtttctactttcactgtttgtctagagtctagagaaatatgaaaatccatgtcccagcagagatgccatgatttcaatttttatcatcaatgggtatcatcattcagttgtttttatttttttgcttttcatttttttccttttcagagaaag

SEQ ID NO: 17565 - DNA, 476 bp, Glycine max
  Intron number 1 from transcript Glyma11g28420.3 (locus Gly ma11g28420) derived from phytozome v7.0 (chr-ID Gm11; pos 28557760 to 28558235 reverse strand)
agtcttctctcgctgtggttcagatttcagagcaggttcgtctctcatctctgcggtttaggtttcgattttttattccgctaatttgtgttttctttcattaatttgcatttcttttctttttcttttaatttgcatcacctaaattttgttactttatgaaactgaagaacatgaaagacggaaaaacaactttttatgaaccaatcatatttggaggggaaggatccttaagccagtggtttggttcataatagggttgaaattaacagctcttttgtttttgaggataggctttaccaatattgtagatatcaacattgtttccttttgttattattatcttttttttttggttcttttgttcttgtctttaatttatacttccatgaagctttttgtggacgtttctgactttcaccagttattggtgtaaattaggatccaaaagccttgcttggtcaagactcattcat

SEQ ID NO: 17566 - DNA, 600 bp, Glycine max
  Intron number 1 from transcript Glyma12g22230.1 (locus Gly ma12g22230) derived from phytozome v7.0 (chr-ID Gm12; pos 23982414 to 23983013)
aaagtaggtttaatttttgctgcaaacataatatgtgtgtgtatgtgtatagcttttatattaaattgactcattgacactggaccaatgattggatggattattatattgctatttatattcaagcactggtgagtctcgcatttctggcatttgtttatgtatattttactatataagtgggatagtgatagcaattcaacaacagaacaccacacaggccacattgcagaagctactaacaggccaagaagagtgagtaagaagcccacttacttgctttgcgcgaaggctctaagtgcttgtagaatcttcctgagtttgttacagcattccactagtttgttggtagtgataattcttttacagcaatttgaatttctgttagctatagtagtataaatatgtaaaagaagtggaatgaaaaatcaagcagaacaattatctccattagtttccttcctagttccttagaagtagtatgtagaatagcgttcgtaacagatagtgtaatgagagggtcaataatttaagtggtccaacacccttgaatgcttgcttgcagttttcttttgaagttggaatcctcacagtttttgg

SEQ ID NO: 17567 - DNA, 528 bp, Glycine max
  Intron number 2 from transcript Glyma10g04410.1 (locus Gly ma10g04410) derived from phytozome v7.0 (chr-ID Gm10; pos 3393847 to 3394374)
gggtgtgtgattgaaaattgaagttggaatgtctcatcgagttcagtcttatgaaaatatttgtatttgtaactcaaatttgatagttattgtctttatttccgtgaggaggtttgaatgtttttgggaaatttggaggactatccatacaaagagtgagttacttgttttttttttcttcatgaaactagtatgtgaacttgcatctactgagtttgaagaatcactattatgttcttaatgggaaggtttaatgagatccaaggtcattggctcataacacaagctcttatactgtggaagctataaagttctaataatttacttgattggaaatgtactatagtgggaaatggtttcctctctctactttttgttgaggtgcatgagaaaattgcagaattggaagtggcatctttgcttcaatgttaatgtgtactgtgttagctgttttggcaaatatgtgataaacttttataacatcacttgcttataacagtcgaaccatcttggaaaagaagttggctg

SEQ ID NO: 17568 - DNA, 436 bp, Glycine max
  Intron number 4 from transcript Glyma13g37450.1 (locus Gly ma13g37450) derived from phytozome v7.0 (chr-ID Gm13; pos 38525608 to 38526043 reverse strand)
gctattcctgctgcttggggtcctggtagtcccatgtgggatgatttggatgccaccaataatcttctttgccaatcacacattcctttttccaatcccaatcaacaacagttcaatgatgctgatgatgctcagagacaggaacaaaacacaggaccaggttacctatggaaggatcaggattgaaactttaagttcattttctatatactttgatggttccttagttacttctcactcactagtagcacatattttcaccacacaacctatgaaccttgcctactactactactactatattcatttcctttttaacttcttttctgctgaactaaggctccgtgtatttcagggtcttgcagcatttttttccttacttgactatttttgttgttttttttaaaaaaatatttaatgtatttggtaaaggtag

SEQ ID NO: 17569 - DNA, 1035 bp, Glycine max
  Intron number 1 from transcript Glyma09g06920.1 (locus Gly ma09g06920) derived from phytozome v7.0 (chr-ID Gm09; pos 5769799 to 5770833)
tttgcaagttggacctatctaataacaatctccaggtaagtctcaagataaattcagtcatatatttcgatttgttcaaaataatgaataattttagaacccttatagatatggagtttcgtataatctttagtcttaactctgcaaaatattcatcttataactcataataactctactttatatctctattttataaagggtaaaaaaattaataaatttttggttatcatcatctgcgcttatctttctttttgcccgattgtgattaattatcaaatagtcaacttcatgagaaaggttccatttctttagtcatgtttgaattaatgattatacgaaaaaggatttcattgagaaagatagcctacttatccctcagagggatttgtttctgattgtaggagataatcttaattcacacacacacaaaatacataatatattttatactaaatatgaacttgctgataaaaataaaaataaaactaaatatgaacttggatataatcgagaataaggaagagaacgagaaatgaataagtgagttccagaaacatggaataagtgcatccacttataattcaatctatcccatatctcttttttccttctcattagacggtgcagtcataggaaagtttagaaggatattaatgagtatttatactataagaaaagaagaatcaatcttttttttcattctatgggttgatatacgaattaaacactaccattttacttagttaatttgttaaaatccaatttttgatagaaactatttatatcttaatctggatatataataaccgtgtgatgagtgtatgatttatattatacttgaaaataacaagagggagttatagatctattttacaattgataatttgttggttcctcctgcttataatataattgtcctccaagttgtttatataaatgttttcttagatattatataaatttttgtgtatatataaaaaaatattttactctgaaggaaattccggaatccttaacggcaagacttctaaa

SEQ ID NO: 17570 - DNA, 710 bp, Glycine max
  Intron number 2 from transcript Glyma11g32210.1 (locus Gly ma11g32210) derived from phytozome v7.0 (chr-ID Gm11; pos 33637006 to 33637715)
ctcattaattggtccactcaaaattactggttaatgtaacttctattctttttttaactgcattgtataataaatttcattgacaaaatagttattgtgtaaaaattggtaaaacatttttctcaaattttttttgataaaacattgatatatgaacagtttaaaaagaagagtaatactatcatttatctttaataataatttttttcctaaaaaaatctacaactacgctgttgttagtactatgaaggtggataccagccaattaatccgtgtgatgactgttgactacgcctcataggtgcaggatgattcgatgtcatcataattaaatccttcgtgaaaattggaagtttataaccagatatttgtttgggagttagtaaaacattgaattagttgtatttttgtcttctaatttagtcatttcatgacaggtaaaagaaaagtatagtcatttcatgattttggtttcacatttttaatttcacaacttagtccattatttttaaaattgaagaaatttagttcttttgtatatttatcatctattaaacttcttccttcttatatatagctaacacaaatttatccttagtcgtccatggtccacccatgcatggacatcatcaaaaactacttttttttcattaagacctatatgaaactcatcttttgaaccctagtttgagaatcacaagagtaatata

SEQ ID NO: 17571 - DNA, 887 bp, Glycine max
  Intron number 1 from transcript Glyma09g28660.1 (locus Gly ma09g28660) derived from phytozome v7.0 (chr-ID Gm09; pos 35601948 to 35602834 reverse strand)
tcagaaaaactcacaccagcttttgcaagtcacaggtaatttggctgctgttcgttgattatgacattgcattcaagtaaattcttttttccctctaaatgtacacttcactttcaataggtatgttcatcaactgcttaagttgaatacttatgtttgttagaagcagaggttacaaacaataaagcaaactgaaatgtacttaattactttttttacatcattagtttttaggtcacatgtatatgatgatctggcgaagcagtcaaatttgtctggattgaaaattttggactatttgcattgatgacaatgaacaaagttgtctaatcctataacatcacactggttgggattcacataagtgaagccaatcccaatgtgcttattattttgtactctattttggcattattaggataggtcaaggccagacatggttagtcctaattgaatgatttggactattcacaacgaaagacaatgaacaaagcaatctaatccaataaacctcaagctgggtgggatttaaataactgggaaaaaattgtacttaatcatttactgctttttgacatcattaatataggtcacgtgccagttatgattcattctagttgaatactttagactattcacaatgaataactatgaacaaaaaaactactccatttggttcccaattaattttctatgggctccttcccaaaattatttctcttattgttttgtattaatctattatttgtttatgaatttggcatgcaattgacaattgaatatgacagatgtagaaaaattaggcaatgatatttaattcttctaattagctgaagtactgttttttctggactactgtccaggtacgaagaagagttctgaagtaa

SEQ ID NO: 17572 - DNA, 295 bp, Glycine max
  Intron number 1 from transcript Glyma10g32700.1 (locus Gly ma10g32700) derived from phytozome v7.0 (chr-ID Gm10; pos 41127124 to 41127418 reverse strand)
ccgccgctccttcttcctgccaacgccgcctcctggttccctctcttccccaacccctaaccacatcttttcacccaattttttctttaattattattattaatttgttaccgttttcactttcattatctaatatttttatttttttaattgcatgctgcaaccctttagttgcggacccggtttatgatgattccttggcaaacaacaaacggatactgaagaaatttgtggtttcgcaattttaccccctcaaaatcaaaagtagctagagtctacgctttacaaccctacg

SEQ ID NO: 17573 - DNA, 475 bp, Glycine max
  Intron number 3 from transcript Glyma11g13380.2 (locus Gly ma11g13380) derived from phytozome v7.0 (chr-ID Gm11; pos 9496728 to 9497202 reverse strand)
cgtgtggtgagctatatcattctttgtctaacttggttttctttttcgttattaatcagcattggttctcacattttgggttactaattactagatcatgaagtaattttgggttgtatgatcttgtgttttgatgttggtaataatcacaagtaactgagccatgtgagacaagatgcaatgcaacagaaactgggatagtattaatcttcatagttgggattatagatccattatgaaacatcttgtttttaggagtacttgttcttccaatcagcatctggaaagggagtgttattttatgtccttttctttttttggcatattctattcactgttctcattctttgccattacttgtctctctttttacccttccccctggaattgtttcatatatatgggtttttctattgtactttattgacgaaaacattgctttgcatatgttgaatttatttccctttaattgcag

SEQ ID NO: 17574 - DNA, 1021 bp, Glycine max
  Intron number 2 from transcript Glyma13g27240.1 (locus Gly ma13g27240) derived from phytozome v7.0 (chr-ID Gm13; pos 30409189 to 30410209 reverse strand)
atacgaccgtcacaaaaaattcatcgacgactacggtaatgtttctcttacaaaatccttaaatcatttattattcactacctcttttttaaaaaataaaatataaatataaatttcctgtttcatgataaatgtcgttttgtttagggttgatggacaataaggaattgatcaaacttgtagctgctggtttggttggttccttataataataataatgtcctatagcaaatggatgatgaacagtttcctccactgagatggaaggaggctacaatcatcctcacatataatcaaatatggatctaacttctctaaagtgagaaattcacttcataggataaagtagtaatttcagttgttgatgaggaactcaatggttgattaactattgattttcgctttagattgattacttacttcacctcttggtcactttagaggagttgaatccttctaatgtacccctctattagtaactgtaccgctgatttttcttttgttacttgctagttctgtttattcaaagcaaaaaaaagaagtgttgtagagtctagactctagagacaagtttgtttgtattcttcttgttctgtcttcctcgggttagtagtcagaatttgttaatgggtttgtaaccaggaggcttaattcgtgttatctgctggaagtttgacggagagataagaaaccagtaaaagataccttgatctgaatggcctattgggcaattaatttttttttggcaaactttaacagcattgtttgattggtgtaactaaccccaactagtgaaaaaatggcttttgctgttgccgttgtcattgttgctctgatggatgttattatctcattgtagtttactgattttcttaatgctcgtagttattttatcatcttggtcctgcaggagaacatttcagtttccaatgaaatttcagtttttttttggtttaactatattcttttcctgccagaaattcttctaagatttttctttttgtgtctacagttaaatttt

SEQ ID NO: 17575 - DNA, 735 bp, Glycine max
  Intron number 2 from transcript Glyma08g21290.2 (locus Gly ma08g21290) derived from phytozome v7.0 (chr-ID Gm08; pos 16162154 to 16162888)
tttttgccgccagaattgtgagatcatgctctatttatgttacatttcttcattgtttttaggttaggtagggttttttttttgtttggaatgatttacttgcatgaaacttgagatatggttgttggtgattgtgtgatgtagaaccatagaagataaaagcatgttgcagggctattgtgtgtgttatttagggattgttatattattataagtagaaacttaagagatctttcattattttgtgggaattttatatataaacttgcttgcatgagacttgagaatcagatatggatgttggtgatcgtgtgatgtagaacagaggaggagcattttgtttagggattatcctgccaagaggagtcatattattcttggtatctgttaatttaaggagtatttctgtttgcctatcctacattattgtgaaaattagagaaaagccttttcaatcccgaaatttaacatcttgttttctgtacccaaactgtattaggttttaactgttttgaaatttgaagtgttgaggctcaccattttgaatttccagctgcactacatcaagatattttatgattagtttttatacttaaaaggctttattccacaaactttgtgttttgcttttagccagtgcttttttattatgggagagaaggttttgttcaatatactggttttgtcattgattttgcagggaagggccctttattacatacaaaaggcttttac

SEQ ID NO: 17576 - DNA, 492 bp, Glycine max
  Intron number 2 from transcript Glyma11g08730.1 (locus Gly ma11g08730) derived from phytozome v7.0 (chr-ID Gm11; pos 6177828 to 6178319 reverse strand)
agcgttgctgttccacctaagtttccaagcttccggtaagcgtgaagaaagtgttagtcatgaatcatgatgattcataagcttctagaaacgagtgttttgttttttctccttctgtgggtggaattaaattattagattgaagtatggaacataacgtaataaagttatcatctcaatgttttcgtgattaaaaaaaaaaaagatccattaccctgaatagaatcagaagataagcataatatggatcatattctaatcgtggtaggctgctaacgtgctaaagtctaaactactctaaacaatattattatatttcattccattttacttaacttctttttttttaaaatctcttttcatcaattcaaacgtagcttgtgacacgagtagtgattagtaatttagtaatagtatgtggtaactagcgtgatgtgaatggatggtgtaattgaaggagggaagcagctctgcaggggaatttggaggctg

SEQ ID NO: 17577 - DNA, 812 bp, Glycine max
  Intron number 1 from transcript Glyma10g30010.3 (locus Gly ma10g30010) derived from phytozome v7.0 (chr-ID Gm10; pos 38703805 to 38704616 reverse strand)
tcagcatccttaatcttctttggtgcttttcccaggtcaacctatttttcccccctatttctttaatccagcaaaaattaaaaattgctgatagtttagttctcatgtctcaatttagtgtgcatgtttggatgattcggaatattcagaaccgggttaaaatattagcttgcgtgattttaattaaatgttcacatgtttggtttcagcctgaagaatggattgattttgagttgaaaaaacttactaactttctcttggatattatagagttttgctgctgacctgtttttagagtaaaacatctaaacataaatcacatcactacaaaatcaatttcattcaaaatcaattttgtaaatgccaacccaaaaagcttagcagtgtttttttttttttttttttggctgaacacttagcagtgttatcaatggcagaatatggtggaaccatggaagcccaaaattccgccatataaacatgccattgcagcctatagtgttgccatagcgggcctcccttcacaaactgtctatggtggttggcaaaaatctgcaatggcgctgccatttaacaacattgacacttagtagggtaaacttgttagtaatttgtataaaggtacgattttcggatctaagccgcaccagctgtcacatttgggatcataattggatattatcattaactatatcttgttttgatattttggcttaaaaaaaagctatatcttattttattgtataatggtgttaattattttcgtgatttgctggtgttggtgaatgttttattttttggttgatgcaggc

SEQ ID NO: 17578 - DNA, 651 bp, Glycine max
  Intron number 1 from transcript Glyma08g06810.1 (locus Gly ma08g06810) derived from phytozome v7.0 (chr-ID Gm08; pos 4885503 to 4886153 reverse strand)
ttgctggtgcagctcttgcttacactcttggaaaggtagagaaggcttttatttcctgcacatgtttgagtttgtgtgtttcatcatcagcatgatggtttctcttgtgttatatatatagatctgtttatgtgctcaaatgaagaaaattgttgccaagttaaaaattgtactaataaataaaaagaagcttcaagagggtgaaagaaaacaagagtgaattttatgttgagtgaaattatgtctaggtagaaatgtagaagatatggctattggctatacttataggcactcactattgaacatttattgtacagataaaatgttcatttcctctttttcttccattttctcagcaattagacaaataaagcatgaagttgtgtaaaaagtctatatagatctgtttatatatagacttttggaccagtgtcattgagaaagtactacttatgtaagaatttaaccagattcaattttgtgttataaggtccgtgtcatttaatttatctatggcatggcactgcaacagttgctttctgataacttttatgatatagaagatgttttggagaaccctcttaatctttgagtgaatgaagcatctgtttgtttggagaaggatcaataattttgcttctttattgtagg

SEQ ID NO: 17579 - DNA, 640 bp, Glycine max
  Intron number 1 from transcript Glyma06g07570.1 (locus Gly ma06g07570) derived from phytozome v7.0 (chr-ID Gm06; pos 5503945 to 5504584)
gttgcaagaaacacagtatgtaactaaccatgtactagtagtgtatacacatgtactcttgtttcccatgcatgtttttctcatttgggtaactacttaaaatatgaacaaaacctagatgcagttacttaattaattgtttttcaatcagatttgaagttttatttggacaatttgtattgatctttaataaagatatctttgataaaggtttgcattaaatatcttcattattcactttatccgtctaaatgtaattgttatataagaaaaaaatattctaaaacaattatattttaattttttaatataatattaaatattttttttatttatattttttatgatacacaataaaatttataaattaattaatgatgatataaggttaatttttttaaaaaataattattatttatttattagtttttcttaataaaatattttagacaataattattttaagatggagggagtagtatttacattaaagatcaatctttatatatgcatgtttatgcaggtgaaactctaactttgactaagaaactacatctaagactccaagttttgccgttaaaatatgataaataatggtcaaaagtgtgtgtgttgactcatggttttatggtacaggtac

SEQ ID NO: 17580 - DNA, 650 bp, Glycine max
  Intron number 1 from transcript Glyma13g25600.4 (locus Gly ma13g25600) derived from phytozome v7.0 (chr-ID Gm13; pos 28818482 to 28819131)
caatatcatcgctctatccattcctttatttcgtgagtttaactatcaacagtgatttactgttaccttttcacttgatgtattttctgatttttgacattgtcggaagttgtcagagcacatatttatttattttgagtgcttcaagttaaatttcagtttttatttatttataatttaattaagtctttgttccatacttccagtcttaaaaggaattaaaaatgattgaagaagaaagtcctcttccagtagtagttggtttccacttagacaaattgcaattttggcatgtaaacaactgattaatgctctaaagaactgcataattttcaatctaaatagtttaaaagccattccgagtcattaaccagaatattttcttcaatatacaaagcacccttcatttctgttccctctcaacctcataattttgctgagactgataattgcaacctgttagatgagccacagtcaatttttaattacttattgctcttccttctcttttgtcatttgccatgaaatactcaagaaatcaaatctttaattaatgtttaactttatgctgatgcacataaaatggatccttagtaatgcagcacttgttttcaggtaagggattttaatattgcgaaaacagaagctga

SEQ ID NO: 17581 - DNA, 542 bp, Glycine max
  Intron number 1 from transcript Glyma13g09340.1 (locus Gly ma13g09340) derived from phytozome v7.0 (chr-ID Gm13; pos 10478799 to 10479340 reverse strand)
tatttgcaacaagtctcttgattggcatttagttggtaagtactaaagttgtttttttctttttacttgtttttgttgaaatataaatttgattttgaccctcatttatccaaacagaagatcaattcttagaaacatatataacccaaaatctaggagcatgatctagagaaatctctattagaagataattctaaagtagcatatagaattagttagaatatgtgaataggtttgcatcaatgaagaaaattctaggagggtcagtagtataaatctggatgatgtttatgaagaaaattctaggagggtcaatagattaaatttgtgttcacaaaatcacacccattagtttaggaagagtcggtagtataaatctgagtgatgtcttagaatttgtattaagccaaatataaaaagtgatcaatatacaagcagccctcttcctccaaagccttgatcatttcggctctccaaaaatatattatttccactgatttatattttatgaatctggggaaacatttttgtagataataaaa

SEQ ID NO: 17582 - DNA, 601 bp, Glycine max
  Intron number 1 from transcript Glyma13g01600.1 (locus Gly ma13g01600) derived from phytozome v7.0 (chr-ID Gm13; pos 1302353 to 1302953 reverse strand)
ctccttcaacgacgccaaataaatacctcaaaacggtaaccctcatctctccatcttcattacgatcttttttcgttttaaattaatctatttgattttgcatcattaactttggttgtgatctttttatttcacatcatttttccatgaattctcattctcttcgttgctggctacacacagattcgatttgatattcttttgcctatttgattggtatttattatttctgtaaaattgagcaccgcaccattcagttctgaaatgtttctttaaatcaaggacttagtaccgattaacttttctgtatgtatgacgcacatcatttgaaaacctaagatgatgcgataaagccaatgactttaaagggagtgaaaaatagtagctgttatattctgtaatgtgtgctctgaccttgaggccatatactaatgaaataaaaccatctctggagagttgaattgtaggaacttgttttgcactgttgaaaatttgattattgacatggatatgcttttgggtctctcttgattggagtaatgctgtaatggttatttgcattgcagataccttgacagagttgggtattgatatttgcatt

SEQ ID NO: 17583 - DNA, 910 bp, Glycine max
  Intron number 3 from transcript Glyma11g37330.2 (locus Gly ma11g37330) derived from phytozome v7.0 (chr-ID Gm11; pos 38482217 to 38483126 reverse strand)
ggcttgcatatttactctatcggagacgtagaaatgtaagcatattgtccttggtttttgtatttatttccatggttctttcacgatcagtgcttgaattgcatctatttggctgcactaacaactaaatttgggggatattattttttaatccatttgcagaacaggaaattcccagctctatgaacaaattcttctgcatataataaagaaaagtgcacagaaataaggaagataataatttaactccactaatctgtgtttgggagggcagttgcaaactttattttttgtcactttgatattttaaaattgattttggttattgaatttgaattgaagtgatttatgcttgaaacttttatctcaagcaattttgtggtaaaatttagtgtaatttttcaactaaatgcaaaagctgcattcatttacttattgtcatatgtaccttttaaggcataatctagaaacatgatgttttgaacaaattcgcatcgatgattgatgcttgttgaatgtgcttttggttcttcccaacttattcccaagcataacgtaaatggtgtttgcatatgcctccttatagatcacatcataatgtaattgtggaagtaaatgattttgtcattgcatctgtaccaacttcaatctgttgtcaacctccttcccttttttccttggaattgcctttgctcttttgtctaccccttttgtttgatataaaagcacatgcatattggtatattaagccaagtactctggttctagtggtatttgattttcactgtgtcctgtatggttatgtagttgataaggccaacaactgttttttgttagtttagaagaagtgctattgctattaaccacaatttattataatgaaaactccttatatgcaggatcttaaata

SEQ ID NO: 17584 - DNA, 673 bp, Glycine max
  Intron number 2 from transcript Glyma11g37330.2 (locus Gly ma11g37330) derived from phytozome v7.0 (chr-ID Gm11; pos 38483204 to 38483876 reverse strand)
ctcgtttcaagctgggaagtttattacctcaataggtttgcgtcttattctgctgttttcgtttagcattttcactaagtgttatgccctcgcagtttgtgattctttagtttagaagaatatatactctgtgatccgtgttacgttgctaacgagtttccggagacaataatgcgtcgtttatttaacatgaaatcaaataaacatctcaaaaaaactgtattaatagaggaaatgttgatttaacgattctattcgaaattctccaaaaaaaaaatgattcggttcggagataggtgtttcgctttgctagataatctgtagtttgaaataatcatttcaaagaactgtgttatgtcatgcgcactaactccaatactttactttttcaatatgaatttctctattattttttttataagaggaagtgttgatttaatgattcggttctgagataggtattttggtttgctagataatctgtagtttgaaataaacgtttcaaagaactgtttatgtcatgcgcactaactccaatatatactttttttataagtggaagtgttcatttaacgatttggcttggagataggtgttttggttttctagataatttatggtttgaatatggacgattattttgacagacagctgaacgaaccagtagtacaaa

SEQ ID NO: 17585 - DNA, 895 bp, Glycine max
  Intron number 1 from transcript Glyma13g03280.1 (locus Gly ma13g03280) derived from phytozome v7.0 (chr-ID Gm13; pos 3224867 to 3225761)
gcgctccaggttcttctgctgctgcttactccatgctttcctactcttacaaattaatgggccaaaaaaattatttttgtttaataattaataggttaaattatttttttttctgatttattatttaagttcaattttgctctccaattttcaaaatgtttcgatttgatgctttcgtctacataaattttttgacgcctttagaaaatgcacctaaatcgccacttggtgaaggttgtaaaccgtcgagtgtaattttttaaatttagacacatctggttttttaaaaatcagaggaataaattaaaaccttaaaaaattaaagaataaaatttaatttaacctaattaatatattaaaattggcttaattctacttttttgagtttcttttctttctatttttcaatttcgttaatttcattttttcatttgttattgaatttgattcttccacgattctgattgaatgattttgttttatcaattaacttagcatatactgcatttaagaaaataaaatacagtgatatttaatgaaaacattgatgttgcgacacactaagttttaatgtcaacataaatgtattggtgcgacagtgtattaatgtcatgttaatatttttgtggtttattaaattaattgatgaactaaaattacgtagtgggacaatcaaattcttagaaaaagattatgggatttgattcacgaaattgagaactataagacataaagtgtaatttgttttaattgagaactataagacaatcaagttattgataactctaaaaatacttataattatccaattttgaaataaaaatatttattacgtctaattggagggagaagtggtttgacgtacttttgcttcttcagggttgtttcaggcgaa

SEQ ID NO: 17586 - DNA, 869 bp, Glycine max
  Intron number 3 from transcript Glyma13g29660.1 (locus Gly ma13g29660) derived from phytozome v7.0 (chr-ID Gm13; pos 32533238 to 32534106)
gttggctctctggtgttgacatcaatacacagcaggttcagcttcatttctttctttcttgtttgttgattcttgtgtttctgcacattgtttccgtatctacctctcaattaaaaggatttgtatggtgggtgatgataatgatttttctagtttttgatattgtggattagagttggatgctttactttcgttgtcaggtttatgtgaatcttgtagtgtgaatagatttcacactgtttctgttctctctagtttcctatctttttttaacactccttggaatttataatgatggcatgcaaagtattctccctgctatcttagcagaaagaataatattaaatgagtttgaataatttgaggactaaatcatacacccaaattaaatcaggggtcaaaattaccagctagatatgttaatattgccatgctgctcttttatttttaaaaagagatctgagattcatttaatgaaaaaatcttagatttgtttctgatgttcctagaatgtcaatatttgttagtatggaagcttgctttgattctctcagtagtgaatggggagctgttccttttgataaaaggtttctttaagatatcagtggaaccaaacctttttcttgcttattgaaaacagtgtcatgatatccgctttcaagtgccaactgttgtctatttcttaaaatttgaattgtaggtaattgaaatttccatccaggcttaggcattataattaaatccattattagtattaactattactttggttcatattagtatgttgctgctgattagtatgagtaacttgctcttctatgttacatcatgcagagttttgaggctttgaatcagcgtgcagtggctgt

SEQ ID NO: 17587 - DNA, 619 bp, Glycine max
  Intron number 1 from transcript Glyma08g04850.1 (locus Gly ma08g04850) derived from phytozome v7.0 (chr-ID Gm08; pos 3436301 to 3436919)
atccagaagttagaattacatataagcttgaaaaggttggatatcattgtgactgtaatttttagtttaaagttttctttcctgtaactgttgtatcttgcttcttcaatgttgttgataatttacttttatgattttatcatctatgttttttgacatcctccagttttttagcaagtaacaatggtatggacattgttctggtattcactaaattaatgtgcttccccttttctttgatgtatgggcattgaaaaaaccagaatgttgctacatatggatttgtatttgaaatacctccatgaaattctattttctatttggggaagtttctgttaagttatatttttaagacattactatgaatattattttttatctcgttacctggcttatcagtataaaatcgcaatatacatcagcttggataatagatatctttctgtttttaacttagtcattcccctcataagtacagacatgatttagtgcctcagataggctggaaagaggctttgttcctttcctccttaatttttccctttctaatttgcggtcttttattttaacttataattctacaggccaagcgaaaggaaacttggttggttgagaagct

SEQ ID NO: 17588 - DNA, 835 bp, Glycine max
  Intron number 3 from transcript Glyma13g20450.1 (locus Gly ma13g20450) derived from phytozome v7.0 (chr-ID Gm13; pos 23909403 to 23910237 reverse strand)
ctatactttggagtcctaaggaaataatgtaagtccctgtacattttactatgtatctgtgtggtagtgtttgaaatggctagatttgttagtcctagttagagaaaaagcagagaagatagggtaggcaacatttcattttccactgaagcagatagaagagaggtaaaagggaatcaatagtattaaatttgggatccatgcttgtgtcattgatttgaccagctcttacaaaaggcagcacagtgtaggcacaattgaatgagagtgatattttggatgatgaaaaggaaagaattccgtttttcctgaaattgaggataaaggaaaagaggcacttggtgacagggttaatcatataaaatcaagatcacctgaacagcacacaaagtatgaaaacagaactgttagaagtgtggggtaaagtaaaaatctggtcactctaacaaataaagtgacattaatttagtgatatactttttggccacggatataaaattagtttcacactttcattataatattagagattaattttcatccactatggtttgtgaacttgtgaacctattaaaagttgatatgatttttaaaataaatattataataatcaagaaatttataatatatgaccgtattagatggcagagtaaaaatcctttatattataagggcatggactatttcctcataactaacattgagtttaatttctatccctcacacggtcaaccaatcaaagtgcatggcattatacaatcacagccacattaaaagtgatttacattgactgcttttactgacattatgaattaatatatcagattccttgtgg

SEQ ID NO: 17589 - DNA, 636 bp, Glycine max
  Intron number 1 from transcript Glyma07g30740.1 (locus Gly ma07g30740) derived from phytozome v7.0 (chr-ID Gm07; pos 35682979 to 35683614 reverse strand)
gtttgaagatcctccaatttgtaaatctcattctggtactacatcatgtcctttctctctactacctctaattggatgtcattaattgttgcatggcaatttgccctgagttctttaaagcatttcattcacaaagaaattattataggatttgagaccatcgaatgttaatgacctcggccaatttctaaatgatatattatagtcaaaattttcaatttgtaagaaaaaagctagtaaacttgattatatattatgtggagattggttgagatcagattgatttcaggccattatatattcatgatctcggtcaatttttaaatgatatttagtgaaaattttcaattggggagaaaaagttaataataaacttgactaaatattgcatagactggctgagacccttgagactatataataatttctcctcatttctaggttttgattttaagatgcaatgcgaagataataggcttgcaagtttaatctcaaacattatttttcaggataccaaccagtgactaaatagtgattactgtgtttctgttctcataattcatttttctctttatttttgtattttgtttaatatgtagagttttgatatcgaaattggatgtgggtgcaggtctt

SEQ ID NO: 17590 - DNA, 1005 bp, Glycine max
  Intron number 1 from transcript Glyma08g16180.1 (locus Gly ma08g16180) derived from phytozome v7.0 (chr-ID Gm08; pos 11791772 to 11792776)
tgaaacagcaactgaagggagccaacaaaagcaaggtgaaatgggcttgacacttttatacatttgcattgccatgtttagtagttaaggtatttaagtgtatttttgaagaaaaaacagtcctattttaagtgcatctttgaaaatgatttttaattgtggttctcaatagcaattatgtccaaccacattgtgactgcagttgtggccgcattggtgcgtttgtgtgaaattgtggttgccataataaacttgaaattacaaccacaattacaatttgaaaccataatttgagtgttttttggaagtcccaaaattgaattctgttgccattccactaagtatattgactactccttgtgctagcttgagtgtttgttgctttacaattcatgctgtgctgtagaagctgccatgtcattggacaaaactaaataaaaaaaaattaatggcatgaatccccactcataagttttgtggaagtaaccaaatttgtcctatggttattaaaaaatggtgttattttcatatcatctgcagaaataatttatgctattagtgtaacagcaatttcacctgtggataatactcccaagtcccaattgattattccaaattcaaaagtcaaagtcaaccaattcttgcaaaattgtgtctctttgaaatttaaaatatcagcaattttaagcacgtgccgagtcatttgtttttcactatgggtagtttttatttgaggaggaaacaattggtatattcattcttgccaactttagatcatagctggcaatagtggcctgccataaaggagaggctgggatgttaattgtgaggcattgataatttgttgttcaaatttagtcatggtgaaaattgtcaatttaatcaaactgatttcattcttttatggttatggatatgccagaacttcaactacctttaatgaccaacatttcccaacttgatcatgcaggtgatcttcaactttaccctgtttctgttaaaaca

SEQ ID NO: 17591 - DNA, 339 bp, Glycine max
  Intron number 2 from transcript Glyma09g41960.1 (locus Gly ma09g41960) derived from phytozome v7.0 (chr-ID Gm09; pos 46657834 to 46658172)
aaaaaggtatctcacatgacataacttaactacatctacacatatgtcggtcaaaactttcagaattaaccatatcttatcatattaagagcacgctacttagtcgtcttcatggtggaaatttgaataatatgcatgagctagcttataaattttaatcctagtttgacttttgtgtaccaagaaatattaagaatcacgataaatattaacttcattttggttggattatagtagaaagaggaataagaagaaaacgaaaatgtgataaaaaaaagtatttatttcattatgtggatttagaatctcaataaattttcttggtttcatttaattagt

SEQ ID NO: 17592 - DNA, 883 bp, Glycine max
  Intron number 1 from transcript Glyma11g33670.2 (locus Gly ma11g33670) derived from phytozome v7.0 (chr-ID Gm11; pos 35517172 to 35518054 reverse strand)
ctattgccaaggcaagctcaaaaaacgtggatgcttatacatgtgcttgagaatctgatatgctaaataatacccaattatgagacgattcagcattatagaaactcaaaagtcaaaagcaagtggaatccccttctttagtatttgttccatggagaagctcatgctcgatcattttgcatcatcaatgcctttgtcatagttccataatgtcacaattaatatgcacctaagagttgtttgcttttgttttggggggctttgctacagatctctgatgtgtgcaggagttctttggtgattcctggcatattatgtgaaggagcttcatttggtgaatttcaaaatggagctcttaccagtagcacaaaaaacttataacaataagtggggttaaattctctaatccatgctaatccatttcatttacatgagatgactttaaatgtttggctggttttgtgtggaccggtgttctgttggatcctcttgctaagttgggttctacagtgcaagaattcagtatacttccctaattcatggtattttgcaaaggagcttttcgcatagaaccagaactggagctctcactaatagcatagcaccggtttatatgcagagggttgaattcttactcccgtttaccatcttacacctagaacattgatgtttgagtacaagttctcttttaaatatatgttaccatggtcagatctacttcgttaatagcgtgttttgttttgttttttttttatggggattttcctgctgactgatgttgaagaatggtgaatatcttttttctggtcataatctgatgttttgccactttggaaactgttctgttctttggccagtctattcgcagagctaggccttttcc

SEQ ID NO: 17593 - DNA, 1025 bp, Glycine max
  Intron number 1 from transcript Glyma10g27870.1 (locus Gly ma10g27870) derived from phytozome v7.0 (chr-ID Gm10; pos 36681081 to 36682105)
tttagaagtgtttctataaaagtttacccaaacaggtccaatatccaaaatcaagaacggagcttcaacatcctaatttttgtttgtgttcaagacaaagaaatgatgaataatgtgaaatatatagagttgtacgtgatttttttttccaatctaatcacaaatattaaaaaaaggccattttttgaagaagggatagaagtcacaccgtaaattggcattgaaatgacatgaaggttggtccatccaatgcagcatataggtggcaaattgatcaaagggggtttcttttagaaatttattcccaaaagtggtatgttttgaaacatattatggaggggtccctttttgtaagcatttcgttagtcctgttggcgaaacagaacacgtggcgtggatttcgctagtcttgttggcgaaacagatgacacgtggcgtattttgtcattcctgttggtgaaatacttctggctgttcggaaattataaacttcaaacggttgtaacttttgataaaaatatccatttgagacccataatatgtcaaaacgttcgaaattgaaggagatcgaaatcccctggcaaaggggattaggtcaactcatttttccaaaaaatgcctctaaatagctcaaaaataagatttaagattaaaaaaaataggtgattgaatcttaaatccgtttttaagggatttggtcaactcatttttccaaaacacttattagcatttatctcatttttaatatgcaaaaattcaactttgacgttttccactaaagatggtgtctataaaagccttactccaggtttttctttatcacaaaacaaaacccaattgttagtagcatactagcatctaacttttggtttagcaaatggcattctcattcccctcaaagggtatattaagctttgttattctgcttcactccttgtctttgggagctgaagctcgttgatcaccatcacccatctcttctctcattagcaaagagctttttgactccattttcatccacaaag

SEQ ID NO: 17594 - DNA, 636 bp, Glycine max
  Intron number 3 from transcript Glyma07g00660.1 (locus Gly ma07g00660) derived from phytozome v7.0 (chr-ID Gm07; pos 343564 to 344199 reverse strand)
aagttcaatttgaagataggttgttcacattgcaggtgagagatacacgaacatactttttccttttgggataaaaaatatgtcgtcttttgtgatgtgttctccagttaattacaattacctgctgctgctgatctgttttgaattgagctgttatgttattcaatctcatatcaccacctatataatttaaatcagtttttgcacagctcatcaatttattttttattagctctataaaaacttttatcccatagattcactaagtggctcatggtgctgttcaagtgaatgtaactagagtgtcttctattctcacaagtatttgaatttctttttaaaccttactattcttagttaataatataaatgtcttcacttcttcctcctatattcttgtttttttccatacaattcatttgacggcatctgatgattgttgggactagtacttgacactttcttcttgataaaaggtcaatattcggttgtattttttgctgtcatattgattaagcagttctgtattctgtgatccgtttgaagtttatggaagagagattaatcatttaaaattgagatgttctcaccatacatgcagatttgggatactgctggtcaagagcggtttcagag

SEQ ID NO: 17595 - DNA, 640 bp, Glycine max
  Intron number 3 from transcript Glyma12g15800.3 (locus Gly ma12g15800) derived from phytozome v7.0 (chr-ID Gm12; pos 14794559 to 14795198 reverse strand)
acagcttagtggccaaaccccagtgttttccaaaggttatttctcaaatctttgtttattaggagcattttttttttgtttttttagttaatttaatcattttttggacactatcaaatttattttaaaatatagatttctggtgaactgtttttgaataacctttttcccccagattttgggtaatatattttagggtttctaatggaaggttcgttttctttttttatttatttgcaatgttaagactcaggcctgatggtagggttgtaattgtagtttgagttctgtattatttgttaactgcaataattaagtgtgaacctgttcttgtgattaaaatcacaatatggcgggcttaatgaaagcattaaaatgtcaaattttcttcagaaacttgattcagaggttcaaaagatggaaagtgtatggcttttttctgcttaatataatttaaaccttgttttcaaatccaaaagatggaaagaataatctattgctccgattttagtatttgtttagtgtttaaatactggatatttgtagctgtttttcagtgttaatttaattgttaagaaatgttttcctccacttggttttgacagcaaggtacactgttcggtcctttgggattagaaga

SEQ ID NO: 17596 - DNA, 186 bp, Glycine max
  Intron number 1 from transcript Glyma12g15800.3 (locus Gly ma12g15800) derived from phytozome v7.0 (chr-ID Gm12; pos 14795369 to 14795554 reverse strand)
tcttccctctgccgccgcaccctgcaaattcagtacaacacttcttcctttcttctcttcttcttttggaatcaaatcatctcttttcacaaaacctaataatctttacgttttctttaattttgtttttgttgtgaattggaatgttccgaacttcaggcttcagagaagaaactatcgaaccca

SEQ ID NO: 17597 - DNA, 590 bp, Glycine max
  Intron number 1 from transcript Glyma11g07370.1 (locus Gly ma11g07370) derived from phytozome v7.0 (chr-ID Gm11; pos 5171201 to 5171790 reverse strand)
tcttgggctgattgggctcaagacaagttctccaagtatttttctttttcactcttaattatccaatctcacataattaatgatattccattgttaataaattttggtgacgcaagtccaccatgcatgcttggttaacaccatgtttgtaagggagcaatctttttaattataagaaccaacgtggatgtgctaagcggaagaaattagtccccccgaaccatgtttaatgtgggtaatgtctccaataggagttatatgagagggaggatacaaagaaacaaaacaaaattataagcatataataatcatattaatttgaaagtgggcattctttttaaggctattaagcatgtaatatgtgggcgatgtcatatacctgtggatgatgggattgatgaggaaaatttgagcaaatgtttccaactttccacaaaattctatttaatttatcatgcttcaccagaatttcgctttgtcacgcctaagttgcttgttcttgtgcatttatatggccaaatcttaaatgttgtcattttgttcattagttcacaattattgtggcagaagtttcggggccgaagaggatc

SEQ ID NO: 17598 - DNA, 853 bp, Glycine max
  Intron number 1 from transcript Glyma11g37090.1 (locus Gly ma11g37090) derived from phytozome v7.0 (chr-ID Gm11; pos 38324908 to 38325760 reverse strand)
aagctgaaatcaccgagcaggattcacttcttctcgtacttaaccttcgttctgcttcatgcatttcttatattactcatttttcttcaatcgtatggatctgaatatccgatacttctattttttccgttcgagttttctttttcttcttccactgctgtatttccttttgatcatttatcgcttttatttattttacatttcttcgctaaattcactctttctcgtacttaactatcgttttgcttcatgcatttcttatattactcattttaatctaattttccttaaatcgttgggatctgaatatctgatacttctatttttgttcgttcgagtcttctcttttctcttccactgctgcatttcctgttgatcatttattgcttttatgcattttacatttcttcgctaaatttagttttcaatattatatagtagttgtattcctttcgttatcaaattctacacctgagaggatttcatttgccgatagaatctgtcactgaagatttttggttcagtaaaaataacctgattcatcttttacagaaacttgctattcagctccatttattatcattattcattaggatcaaaccagatctcaaactgaaagttggttagttttaatttcagcatctagttgccttttatattagagaaaatgtaatgtttgctatacgaagtttaatttaatcaagtcatatggagaaatgttcgtccacatgttacttcaatttgagaggatttagtaaacgaatccagactctgaatcaacgtattttcattatctgatttgaaatttcatttgcaagacgaggatcctgctccgaattgccatattcaacat

SEQ ID NO: 17599 - DNA, 258 bp, Glycine max
  Intron number 1 from transcript Glyma12g01890.2 (locus Gly ma12g01890) derived from phytozome v7.0 (chr-ID Gm12; pos 1149084 to 1149341)
aagacaaatccaaaggaacagcaacatcaattgttagtaataatacgataccactcaatcaatgcatatatcaaatatccaaccaccctctcatatacaacacacatgatgttgttctttttttttttataaaaaaaacctcaatcaacccttttggtgtttatttttattattctgtgcttgtcttcaattatttaccaattgacaattttgtgtgtttttttttgtttctgggtctatgggatcagggaggtttca

SEQ ID NO: 17600 - DNA, 524 bp, Glycine max
  Intron number 2 from transcript Glyma12g01890.2 (locus Gly ma12g01890) derived from phytozome v7.0 (chr-ID Gm12; pos 1149516 to 1150039)
gtctcgcttcccacaaagaacacagaataattcaggtaccatatttaacagaaaaaaaaaaaaaggaattgtgctttgatgttccattttctatcactcaatttgatccaattctgcagggatttgaatccaaacggtcaaaaatcaaggatttggttgtgtataatcatattttgtagcttgttcctacatttttaggactttggatccaaacccttttgatcggtccaaaaaaaattgtctcttgtattggttttatcggttacacgtgccatttaatgctgaatctgcagtcttcccaagtcagagttgaatagtgtttttttttatcattgaaaaattgtttatcactcaattatatgatcagttggttctgcctagatagataattttgttgattttattaatttcggtattttcttccagctagaataaataatgtggttattatcatctgatgacgatttttttctattttcttttaaaattttattaattttcaaagataaggaggtcttcgtacc

SEQ ID NO: 17601 - DNA, 540 bp, Glycine max
  Intron number 2 from transcript Glyma09g37800.1 (locus Gly ma09g37800) derived from phytozome v7.0 (chr-ID Gm09; pos 43292330 to 43292869)
ggcgcagcttgatcgcagcttcaagcaattgagaagtaaattcccccttttttttaagtttcttaacacacttgtttttgctgctgatgctcttcttctatcattttaataccttatgcattaattttgcaaacacaacttagatgttgctacttatcactttctctaatcacaattggaatttcacccagagaatctgggtaataaagattttcaaggtaaaacattatttttaattagagagtaacatcaaaagtgtctaagaaattgcatttaagttttttcctgatgcaaagttttattaaaaaacactaattactatttttaattggggggttttatggggtttgagattggttattgggggaatttattttttttcttctttttttgcgtcaatttcggatgatgattatgttttttttttttttttgaaacagtggaatggaaattgtgggtaggtttgaattgaattttgatgggttttttgtttttttttttgcagaaaccgtgtatcactcgagtagcatattgagcaac

SEQ ID NO: 17602 - DNA, 1052 bp, Glycine max
  Intron number 3 from transcript Glyma09g37800.1 (locus Gly ma09g37800) derived from phytozome v7.0 (chr-ID Gm09; pos 43292985 to 43294036)
tggcgtgggagaagaagctctacgaggagattaaggtaattttagcttcattttttttggggggggtgttctgtttttgttatttgggataataaggcgcttcccttttaagaaaaattatttatatttttcgagacgataaaaaggtgaagggaaaaaggaaaacgagtaagtgagggtatgcggagtaggttatgttggactttggtagcgtaaggtcacagcagaatttgactgttaattgtgaaaatgacctcttttttccttttttatcccttgcgaattgaccaaaatggcctcggttgttgggaccaacctttattattgtggtacaaataatgctccatgataggaacatacttatcccgaaaatacttttacacatgtcttgtaatgatttaagtgtctgttaggtcttacggttagcctaagaatttttgatggttttagataatttcctgatttgacatgaatttgggcaagttttgaggtgtaaatatgataatgtcaatttattgtgtgaaatgaccgaaataccctcactctttaactctttgccccaatgagacaaactgactagaagggaaaatagcaatgaaggaatgaagaacaaagtaattaacagatttaagttacttgagcacttgcctgtttcttcaaattttgtcctacatgtggttgactgttcacactcaactgggtctagcttaccattttttgttgtctgcaagctatgtatgaagggcaaacattttctgtcacatacacgtgtgtttagggttacttactgaaaaagccacgtttctttggacatacggcactaaaagaaaaaaaaaggtaatgactaggatattgttatggatgtttgaaatcaaccataaatgttgtgtccaacttgactgcctttttaccaaactgaagtcaggtggttctgttgcattaattttgagccaaaagcctaaaaccatgtggtttgggaacgaggtatgctatgctaacactttctacaaattgtgcttgaatttaggctagagaaggtgtgaagattgaac

SEQ ID NO: 17603 - DNA, 649 bp, Glycine max
  Intron number 5 from transcript Glyma06g11810.1 (locus Gly ma06g11810) derived from phytozome v7.0 (chr-ID Gm06; pos 9117845 to 9118493 reverse strand)
cctcctcagcctcgggtgtgtatttgcgtgattaaccgccatgctgttattacatggggttttatgttatacttgaatatgatataagttgcaacttgctactgaagcttagtcaactatggttgacttttgccttttttactgcattaatgagcatcattgtgggtggtcattggagtttgaaaatgatatgcgtgtcctgtgtgtcaactaaatgttgatattgcggggttttggctctgacacactcttctttctggtcttggttgtttgaattcattgatgctaattaattttgtttagtattattttcgcttgtttgtagaatgattgaacataaagattgtgtcctcgataaactttcctatgggtcaatattgaattggatgctccaagttatgaattatttttaatatctagtttatttggaactggtttaaactggagatggtttttgcaaacttcctgctggaaattcgtttacgtgattggtctcatctttgtttttaatgatatattggctattgctgttataggaatcttgtattttcagttgatcaccattttgtttttttttttggatttctttcctacttgtggattttaaataattgttattttactaactgatttattatgaacagatttt

SEQ ID NO: 17604 - DNA, 1011 bp, Glycine max
  Intron number 1 from transcript Glyma08g28230.1 (locus Gly ma08g28230) derived from phytozome v7.0 (chr-ID Gm08; pos 22547308 to 22548318)
accttaatttttctctcattcgcttcaaatttcaggtttgcccttcaagtcccccccttctttttttatcttttaaattttgggattcactttgactcagtgttggtggtttatgtgaagttaaggtgtatgccctcaaaatctaattgcaactattatcttaattatgctggatttattattctgtttgttgtggtttatgggaaatcaatgaggcactgtgattgctctttttctgggttttatcttatgagtgttgctgatctgtgtttatgttcctagtttcttgctgattggtacccttaattgttgtggggtgagtttgttggaccatgatattcttggtgacactgatttacttgcagtggatactctgttgtgattgttaattcatatgatttgtaggcttactctctgtgccttaagattttgtaagatcttgtagaacttggctatcttctgtatttttaggtgaacaaataattgctttggattgcaatttgaatatgtaaaaattgtttgtgtcatggcattttgtgtgatttcgagttttaggctgtagctatatgtgcaaatctagacaaaaaaacttaccttttgtttggtagttgggtttaatagttcacactaatcttttagatgagtgaagagaatagaagagccttaaggtactctgatgtttctataacatgaccgtatagggtctttttgtaatctcactttttttttaaaaagtttagtaattttaataccttttttattgttgaatatcttagaaggcaccctttctatttcttccttacattctttattattggaatatgttgaagtttgctgtactcgatagtagttttgttgatggcatacagagtcaccaatcaagttctaattgtcttaagttatcgtagtttacagctttttgttttccttcaatcagaagattattccagtttttgtgtacctcgttcttattattgtgttcgttatcaatcattgaacaggaaatcaatt

SEQ ID NO: 17605 - DNA, 584 bp, Glycine max
  Intron number 1 from transcript Glyma08g18320.2 (locus Gly ma08g18320) derived from phytozome v7.0 (chr-ID Gm08; pos 13767844 to 13768427)
aagaaggcagacacaacgaggtaaaatttgggttaccacaaaattatatatatatatatatataaaagcccttcttgaagcttggatgttagttgtttgtcaatatcttttttccccctcaaattttgagcttgattaatctccaattttactgaaatttatacaacttcaaatttttatttggttattcctgacacagttaggttcctatccatatgcagtgtgtgtatgatcatagtgttgtctcctgtgcaatagttcagcagaagaattgataattcaggtcccagcctgatttttgaacctgctatttttctttgtctcaacttaactcaatttaatgttttatgtttgcactgtcttgtcagaatttgaggacccatatgatgatggtttcgttcgtttggctccaaagcttttagtgctcatgttacactcatacatacagatttaacttactagatgaagcattgcttatattttttttttatctcagatttgctgcttttttctttcttttctgtgctgacagtttgttggttgcacctgtctagattaaggtagctggcagactaaagggtttc

SEQ ID NO: 17606 - DNA, 766 bp, Glycine max
  Intron number 1 from transcript Glyma10g01010.1 (locus Gly ma10g01010) derived from phytozome v7.0 (chr-ID Gm10; pos 724443 to 725208)
ccccctgatttcctttggtccaataatactattaggtttctttaatattctctctttttttaattattattattttttcttgattgcgtctttcttctttttgggtttctttgttgatctttgtggtattcatttggtgaaaaataagactacccctttgatatggtaatccatttgattgattcattgttcgttgtattgtagagtagttcaagttcaatttttttaaaaattaaaaaaaaaaatgttattgattttgacatgtatgatgatttttattttttttttattttggtgttgcatggttggattcttattttctcgtgtacccaattctgaaattttatttgaatgcttcattagctcccagatgttaattgttgttgtattattgtattttttgttttattagttggagggaaaacgagggttttcatttttgtgtcattttcgttatttccctaatgtatggtaatcaataggttgattgttcttttgggggtagttcaagttcattttttttttataattttttattttgaatttagttgttgcttttgttctgtgggaaatgtgaggtactgaaaagttagatttttgatagagctaatggtgtctatggatgcatgtagccaaatcacatggtaggacaagagatggtgggtgttgtctttgttaatgtttttctgtggaaacatgcatggctgataccttttctcttttgctgtatttgcaagtgtgaacaccgaagttgacattccaggtg

SEQ ID NO: 17607 - DNA, 623 bp, Glycine max
  Intron number 2 from transcript Glyma09g32660.2 (locus Gly ma09g32660) derived from phytozome v7.0 (chr-ID Gm09; pos 39163083 to 39163705)
gagagggaagacttgaatcaggattcaggggtgaggtgaggtcttttttttttttttttttgttctgttttgagtctattttgaatatttgttattattctaatctgctgtagattttgaagttttatttaagagtgtttgctggatttttttttaaattactattgtttatttgactataacataccctagatggtgtatgatgattcaagggagtcttcagcttccacatggagttttatattaaatgaaatctgtcccatccttgataatatagataggaatgagttctttgtttttatgtcccttaccttaagtgaaagaagaaaacctagatacaattctttaggtgttgttttgttgttctctccaatcagaattggaatttcaccttgataatcctggcataatcctttaatgtaaacttttattacatgaattgctaaggtggaacttcaattctgattgaagaacaacacatacaatacttaagaaactgtatctatgttttatcctaagtgaaaaccatgattttattaatatttttcattccgtaaacctgtgtgatgccactgataatggcttgctttgtttgactgcaaacttaatgcagatatttgagg

SEQ ID NO: 17608 - DNA, 959 bp, Glycine max
  Intron number 3 from transcript Glyma07g32750.1 (locus Gly ma07g32750) derived from phytozome v7.0 (chr-ID Gm07; pos 37654798 to 37655756 reverse strand)
aaaacgttagtgagtgataatgaattatgatgatgtttgcatttttagtgttgtttcatttggtttggttttgtatgaactgaatctcaatctcttctctgttgtgtggtgtaattgtctgttgcactttagatcctctgattttgtgtgtgaaggcttcaaattcaaaggccattttgtccgtacagtgcgtttgtttttcagctgtgaaacactttgagtttgagggagtgaataacgattgctgctcaatgatggggggtgtaaacattgtaggagacatcgagaccaaaatgctgcacctgtgttagttttatgtggcatacttgcattggcttactgttaaagaacttaataagggcgacaataagttgcaattgaagttgccaagttgcaggatggtaattcttaacgttttaagggcatggtggagttgtgtacgagaggaaaattgtttttttatttttgtttgatactcttgcgcaatgtttttgattagtttgttgccctatcctgaatcttgttgcagttcttttccatttctgtcctgtattaattaatgaatgcattttttattttcttaaattgatttggaatttggttacttatgctttgctaagatacgtgttacacgcgttacttgttttattggtgacacggaggtgcttctctatgttacggttaaaaacgttgcacttactgcagggctgcttctttttgtcttgttgtagttctaataacgaacaaaaaggtgttcatccttaggccatttaaagcctgtggaaatcatatatattccttatattttgtggggcaaatacggggagagggggtgcccaaataactttgtgatgggatctgccacaacttcagagcatcaggaaaaattcttacatttttttgcctattgtaattattgtctaggttgttgcaatcagggatatagtgccaccacctca

SEQ ID NO: 17609 - DNA, 699 bp, Glycine max
  Intron number 1 from transcript Glyma07g14480.1 (locus Gly ma07g14480) derived from phytozome v7.0 (chr-ID Gm07; pos 13934885 to 13935583)
cgttgggtcaataagcttcgaccaaacctcaagaagtgagtcaatgttttcttcattttctcctctaattgtgaatgtgcatacatataaccatgcatgtatgcttgttattacttacttgcactggtgtttgtttgttgaaaagttacaaaattgaggaggttgcttcacattgatcctggtcttggattatatatcactttttttgatggggtttgtatagtttgtcttagccttttggggtttaatttgtctcaagttcaagtttttactagaagttggtccatgttagtgtgtccaattatccatgaatggtttatggttgttacttgcatttgtgtttgacgattttacaatgatggggtggcttgaatgattctattttttggttaatggtgcttttcgttcctgaaaagccattttttgctttagtcaatgacttttaaaaccacaattttgttgatgtattttatcaaaactttagctcttaaagctaacactgcaagggacgaaaatttatggttttagggtctaataattaagttttagggtttcaagaatacatggtcgaaaagctattattttaagtctatgaaggaaataatttgatgcttctttttatctgattgttgtcttttggtgtctctccctggccttgtcaaagtggttgcaagttttcacttgaggaagagagggttg

SEQ ID NO: 17610 - DNA, 556 bp, Glycine max
  Intron number 4 from transcript Glyma08g39380.1 (locus Gly ma08g39380) derived from phytozome v7.0 (chr-ID Gm08; pos 38926031 to 38926586 reverse strand)
atcctgacaataggagagttttcaaaaatatcaaagtaggtgactttaatcatccataattctgctctcagtgtgtttggttacaaccttcctcaaaaatagtacttcaaaaaacattgatgcattctgtttcttcttagcctagatttgttttaggtttagttactcatttgatctctatagttacgaaaaaatcccttttagtccctgtacggctatacttaaacatcctcttttagtccctacactacacatacttcttttaattccttagtccctacacatcattttaattctatcccttttagtccctgaggactaaaagggattagaaatggtatgtgtaggaataaaaaggtgatgttttaagtatagggactaaaagggaaagtttttgtaactatagggacctaattagaattaaaccttttttttattgaacttctagcttgcatatttgtctgctacattattttcctagtctctcagttttctgcaactcaacttggtgatttctttctttgtcaggaagtggtatccagaaaagtgttggttg

SEQ ID NO: 17611 - DNA, 640 bp, Glycine max
  Intron number 1 from transcript Glyma08g39380.1 (locus Gly ma08g39380) derived from phytozome v7.0 (chr-ID Gm08; pos 38927504 to 38928143 reverse strand)
ggaatattccgtggggtgatcatagtttttaccctgtgagttcaatcagttcatttttaatctctcctctgcaaagtttgcatttttcaatttattatttcactgatctttatttctttgttctgaatttgttttgtcttgcctttccattgtgttttctgatggatcatgcctgttctaaatttgggttgacttcaattcactgtcttgaattttctgcagtacttgatgtatggtgcattgatactgcttagtttgcttgtagcaatttgtcttttcgttatcaagtttttgtcttgttgataacatctatctagattctgtaatttattagtttttttcaatttggattctgtaattctgatgctgatcacttgttgagaaccaatttgtggttcacaaggaaaattttcaccttttgttacaggaacatttttttaatgtttatttgcatttaaaactcctgaatcaacttattactggtccagagatagattctgtaattttccttaacctccatcaagttgggaacatagtggtagaagcttgaatgtctgaagagattgtgaattgcctttaagaaaataatagttttgaatgtatgaattgtcttaactgttttagaaaattccaggttctt

SEQ ID NO: 17612 - DNA, 758 bp, Glycine max
  Intron number 1 from transcript Glyma08g03460.1 (locus Gly ma08g03460) derived from phytozome v7.0 (chr-ID Gm08; pos 2434503 to 2435260)
ccgatccgaagctctatcgctcatctcttccacgtgttagcttctgaattctcattttcctttgtattttgttttctttcaatcagaatttgagtttcgcgtctttaatccgtagtttgtgtcttttcttgtattttaaatattcaaaattagagtttgtagtttgtattaaagattagcacacgtttactttggttgaaaaatagtattgaaagtacccaatggtatgtttggtatggtgaatggaaattgaggaaagtaagaaaggatccatttgtttaggtggaaaaaatgagagagaatcaaaatttcaaagttgaattcaagagaaaatggaagaaaggaaaactttgaatttttgtttcaagaagacaatttttctctctttttttattttctctccaattaagcacaaggaaatacagtgctattctgttttctttcttctctgttttcttttcttcatactaaacataccaaaaatgtagaaatttgaatagaacggaaagaggaaagaaagaaaaaattgaatttttgtttatttagaagtcaacatttttttctctcactttatcttcaatcaagcaaaataatatgcactgtattcctctgtattttcttttcttccatccaaacataccataagtatatgtgtctaacttttgtcattttactttttgtcttcctggtctctcacggacatgtgtgatgtattttctgcaggtcgtaatcttgtgaaattggttgtgaggaacgcg

SEQ ID NO: 17613 - DNA, 798 bp, Glycine max
  Intron number 1 from transcript Glyma09g18450.1 (locus Gly ma09g18450) derived from phytozome v7.0 (chr-ID Gm09; pos 22823818 to 22824615)
tattccgttacaccaagcgagcctcgtgcaggtgagtgagtccctcgctctctttcttctttccttttaattacagttccattggtcgagttgttcttgtagatacaagcaatgttctatctaaccttttacaattccaaacaaattgatcgggatcttataattttcaaaaacctcaatttgtctttgtaaaatgtaaactaataatcaattcggacactgctttcctgttatcaaaggtgtggaaaatgatcaaacggttcacatttgtgatcaaaattgcagaatcagtttaccaagacactgtagggggccaaataagtaatttaatcccctctgttatttttctccgtgcttcaagttactgatctgagaattttgggtttctttctagctacaagtgattcttcgagcactcagttcaattttgtgttctctgttaaaatgttcactgtgaattttgtggctgaagtactcaaatatgcttgtgtgatatgtagttgtatgaaaaaataaaattgtgtaatgagatcctacggttaatctggcaatgccaatgatattatattataaatatcattcaggcatgagtaaggggcacagtattatctaaaagactgaaactaatagaattgaaattagggaattacactcagattgaaattgtattcatctcgtccaggaacactgtgaaaatgaactaagttgtactttttttactggcattgtgtttctttaatatttttggtgttttgattttcaattagcattgctaattttgtcatttgcagcagaaaa

SEQ ID NO: 17614 - DNA, 808 bp, Glycine max
  Intron number 5 from transcript Glyma09g18450.1 (locus Gly ma09g18450) derived from phytozome v7.0 (chr-ID Gm09; pos 22825388 to 22826195)
agggcacaaaagttttccaagtggacatacctcttgtaagtacccagaacaaacttgagggtctctaggaccttattagttattattttgatgtatggtatatatcctccatgttccacatttcgttgaaacaatggtcttattgcctcttgaagtcaacataattgataaattggtaatcttaagcttactttcacatagcataccaggttctagaaaaaacagggttccaagttgaaggaagaattgaatactcgttgatcaaagttcactccatcatagtatgatagatcttttgaagaactgaataattaaatgataatatcaatcgagtcccattctacatgtctatattgacaacaataaaatttaaacagtgaaacggaaacccattgaatttagaaatcttgagtttccaaatcctatatgtcaacgataaagtttttctagggaaatataatagttacatagcctgaaattttcattaatgtgtcaggttcaatgattttttttaattaaatacctatttatttaatcttataccatttttgtaagtttgaaggatttggtgcttttggaaatacttacttggtctctcaaccttggaaatttaatttgtctgctgcatgactaacaactatatcaggactagaatttgcattattatttttttttttttttgttattgggcatttggggtttgtaagtgagacctatgtatatttttgttctcgttttataataaattatgttaaaaaatattcaactattggtatgcagggtcctttgctggacttggttttcttgc

SEQ ID NO: 17615 - DNA, 628 bp, Glycine max
  Intron number 2 from transcript Glyma08g06110.1 (locus Gly ma08g06110) derived from phytozome v7.0 (chr-ID Gm08; pos 4331059 to 4331686)
gattggcttggtaagactctattacaattcaactttatcatcttctcattattaacctttactgccattttaaaccaatcaattttccattttcctattcctcgtcttctccttttcaaattcgccatcttgcatcattcatgcttttagtacgcaatataaatttattatattagtgtttctttaggggatctatctctggatttatttatatttttttaatatgaaatttatctagtgtaatttttatgtcattacttccatcaggcattcaatgcaagacggtgatctttctttcatatacatttgagatcattaattgcacttcaacattcatctatatttggatgttgcaggaatcagctatttggattccatttatgcaataaaatgtaatttgtcaaactcctaatcataagtaagcttagtgtttgacttgtatgtttagtattcatatacaagacaatgcatttcaaattaataatttaacatttctgcaaactcatacgagtcttattcttatgtgtcatgggacttgtgctgttttaaaatctttttcatctcctcagtatgtttctcaactctgatttttatctgttctttttacacctaggccacggtggaagtg

SEQ ID NO: 17616 - DNA, 722 bp, Glycine max
  Intron number 3 from transcript Glyma09g15820.1 (locus Gly ma09g15820) derived from phytozome v7.0 (chr-ID Gm09; pos 18810995 to 18811716)
tttacctgcctcgagattattatactgggtatgtgttttttcattggcctaaacatagttccttgtgtgttgaaagatttcttagccagccactttgataaattgttctagtagtgtttatttaactaagaaatttccaactctgaagttgtgttaagttatctcctgaattgggatttcaaaattttttgtagtggctttttacctaagtattcagttttgtcacttctttctcagtaacaattaatactccaattatttttatggaaatttggttgttttattgaaagagttgaagacacaaatgaagtaatataagagtactgtgttgaagagaagaaagaagtaataaagagtgctctgttgaagaaaagaaagaagtaataagagttctgttcaaggtgatgttagtgtccttgaaggtttggaaggttgagtttgaattcattgtgaagaagttgaagtcttgaagagttcaatctcaattaatactttggcttctacgaggttagcaaatccatgtggtgtttataattgatttctatggagtgttgagaaagtgacttgtgatagtttgggagtcaggatcatatttgtggatatctgcaatcaagccaccttccgtatgcaggtgtgtttacttattaaaccatgcatatggtgtaacttatgacttcaaattttatggtacagggagccaagaggttttgggtttgtccaat

SEQ ID NO: 17617 - DNA, 532 bp, Glycine max
  Intron number 1 from transcript Glyma08g00770.1 (locus Gly ma08g00770) derived from phytozome v7.0 (chr-ID Gm08; pos 403139 to 403670 reverse strand)
aaatacatcgagcgtggccaaaaggtttctttctcttttcaattatgtatttgttaatttttttccttttttttaatctttgatttattaccactctaaagtttttcatttgagattatcaatgaaggacttgtgaggttggagctctgatttgtgaaaagtgaaaaatctaaacatgtgcatttgtcacagtttcgttacacgtgattgaaagaaataatgtaggaggaaatggaaataaactacttagtttttagatacgaggcagctccttcccggagagagttgattgtgattactgattagaattaagaaataaaaaaaaattatcacttaatctttgagttagtaaatccaacacatggcttgttcctttgcttgtattcttctgtaaggccgagcaggctagatgggaaagcatgatcctcctatttatttcttgtttatattttttatatatgaaattgaaaagctattgttttggttatctgtgattataagtttttttgtcccctcctccaattccagattg

SEQ ID NO: 17618 - DNA, 495 bp, Glycine max
  Intron number 2 from transcript Glyma13g29940.1 (locus Gly ma13g29940) derived from phytozome v7.0 (chr-ID Gm13; pos 32755512 to 32756006)
gccgttgctaccgcaccatccaatatcctgattcggtttgccttccttccccttattcgttttttttttcttttcattttgttggtggtactggtacttcaaaatgtatatgacttttaggtttctcaaatcaaagctataacaagtatttttctgaacactagatgatgagactttatttctgaacgtttccatgaaattggagaacaaagttgaacttgcataaacttctttaagtgaatagctcttctgttgaatgtaccatgccttatgttttagtgttaaaattatggtatgcttaaaagttttctgtttcagtgtttttgtgtgtgtctattgttagatggtggttgttacttgcaactaatttatcaagaatgcttttttttttttttttaattcttggtgtgtttaaggtccatagctcaggaacttattttgcctcatcttctttgtacagcaagtaaaccggctggagataaccccggacaaaca

SEQ ID NO: 17619 - DNA, 1014 bp, Glycine max
  Intron number 1 from transcript Glyma07g03320.1 (locus Gly ma07g03320) derived from phytozome v7.0 (chr-ID Gm07; pos 2340314 to 2341327 reverse strand)
gacgacttggtgtgtattgtattcctttcatgttttttcgacttttactttattatgtcaatttcaattcagttgcgtctttgaaactgggtaattgaagggttagaattagaattcatcttcttcggcatattatattgttgttattaattaaggtgttcggtgtgtattcatctttcttttttctagctgcaaaatagttaatgaatctatttgtttttaaattttgattttcgtcgagagaaggaaaattcacatttgatttattgtaccgacaaaaatttcacaattgatttgtgttcatgctcgagaatagactcacctgagactcctaaagcttagtatgaactcaagagctatacattgcgtgacctggtgtcacctgggctggtcatgcctatttaacaatcatattaatcaatcgatcatattattcaatattcgattgattggtcacttgggctggtcatgcctatttaacgagcatattggattggatggtttgaggttattgacaacaacaaaaaatgtctaagtcactttgtttctttttgtccaagtttcttctcattttgtctaacttccttccttttttatttgtgagttttgggagtatccccaatcatatgtcttctaacggtttccttttttatttgtgagtttcgggagtggtgtgaatggggcctgagtcacgtgcgagggggaggtggggtcaatggtacctcaaccacgtgcgaggaaggatttataaatattatattgagcctgaaggcccaacgcccactgactatttgaggtcttggggcatctcaactgttagtgtgatagggtgagcgatcaaaggaaatggtcggttttacggcgctcggccgtatggtccaatttgcaatttatttgtgatgttttagatttgttctttgaaaggagcatgattgatatagatgactctctttctcttatataccttgtcggttgctatgttgcctttcaggttcttgagagagctctccaaga

SEQ ID NO: 17620 - DNA, 857 bp, Glycine max
  Intron number 3 from transcript Glyma09g02170.1 (locus Gly ma09g02170) derived from phytozome v7.0 (chr-ID Gm09; pos 1448825 to 1449681 reverse strand)
tgccatcctttagagacaagaggtacaacaatcctgtgtcattaatttattttcagcatttgaattctgcagacttagttttcttctttttttttaatccgaaaatgttaacttttgttaatagaggacattaaacgcaggacattttttcttttcttttctctcttaaccatcaaattcaccttatatctctacgtagatttagtttacttgatgaaattagaaatatcagtcgcatattatctaatacactttttctttgtattactgactgaaatttatttgaaatcacaaaatttgtatcatatttaatgagtctcgtttatgattttatagtttttgataaattttaataaaaaaaatagagtgtttagaaagaatatgttgttagcattcctcctaatgaaattctttggtttgttgaagacttctagttttcgcctttattgttggagttctaatttttctcttctacttatttttgaagacttctctgggattcttcaatagatatgcattaaagtgtagtagaacttgttttctttgttttagccatattgtagagcttgttaaactaaatcatttatatgtaaacatgcataatataattagcaactttccctagtctgttttaacttttaagttaggagtgttgacaataatctatatgtcgtctactgaacaagcttcaaatggaatattttttttgcatgttaaatatcagacaagaaccattcttgaaaattacatattagaacaagtatttggcttagaaattttcccatgctcgtttaggtctaacaatgatgaacatgataagctgactttcccgacttcaaatttttttcagcataatc

SEQ ID NO: 17621 - DNA, 771 bp, Glycine max
  Intron number 4 from transcript Glyma12g33760.1 (locus Gly ma12g33760) derived from phytozome v7.0 (chr-ID Gm12; pos 36960309 to 36961079)
ctgttaatttctgattccgcgcaggttagttcaattactcaatgctgtaatatttgtattctgattcatctcttgtggtttttatgtttctgaaactgtctgatactctgataattaatttacaatgttgtctcaaactgtgtgatgataacaataaggtcttgtcactatcattatcattattagtaacaattcttagttagaaagttgttgggttaatttcagcaatgttaataatcagaaatcagactcgtcttcttatggaactgaaagtgtttagatgttttcatcaacttagtcacaactgtgctggcaaagcagctgccaacacctcaatccaccatgatttctaaacccagttggcattagctattcttctacttacctgatcaccatcaacttacagcttgccatcaccatcagataattctttatttgctccagttatatttttaaaataaaaaatttatttaatttcagtttgattttgttagtgtctttaattaacaaacaccatcaacttatacaacattttctctgagaaatatttattctgatatacttgtaacaagtgcaagctaagaagtgtcccaaatctcattagttttctatgaaagtaatattaatcgttttctgaaaccttgtaaatatttgttggcattgtggtgcctttttagcttttgcaataacactttatttctgttttttttgcatatttgcttccaatccagaatgttttaatatttttattcatcttgcaggctgataact

SEQ ID NO: 17622 - DNA, 697 bp, Glycine max
  Intron number 1 from transcript Glyma07g09710.1 (locus Gly ma07g09710) derived from phytozome v7.0 (chr-ID Gm07; pos 8144075 to 8144771)
caaacttgctgaccttcctcccctcattggcctttgtaagaatcattatctcaaatccaaattaattactccaatcgtctttttctcctttttctttcctttattcattaaatttctaaccaggttacacgttttgcatgattgtttgcacttaattagcgtgcttgggtacgtgtttggcatcatttttttcatttaatgagtgtgtttaactatacatttataatgtgtgtccgaacataacgcaatattaatttccgcactttctccttaaaccattgattttcttcgctttgtatcctccatcttcgaaggtaattctgtttggtacccgatcataattgcctccgaaagagaataaacgtggaaataaataataaaaaaattaagaataattgattttcttcatccttcgtaaatttgtgcacacatgtgcatggattgaatgggtgcgaattttatcaacaaaagaaaagttaataagcctctaaggcttgcaaaaagatcaaaaacatttatcatctcttttgtctatgattgattcaatccattatctgggtgcgtagacagtttatgtacttcctttgacagttcttgtgatataaaagtggctatatagtaattcgatttttaaggttatgagtactttttgtgatggttgcaatatcagattccagctttgtcccacctttgatct

SEQ ID NO: 17623 - DNA, 701 bp, Glycine max
  Intron number 1 from transcript Glyma10g00600.1 (locus Gly ma10g00600) derived from phytozome v7.0 (chr-ID Gm10; pos 339640 to 340340 reverse strand)
tcccactccgtatgttcccttaccctctcttcttctcttccattactcacttatgttgttatcttctgtattttgtttatatacaaataaattaagggcaatcaaatttagtgacggaaattgttcttttctcactaattttggaattacatgttttttttttaagaaatagttatagaattttttgttattaattttagttggccaaacttagtgacaaagatattttttcttcactaattctaaaactacaaaaactttaatgacaaatatttttaaaattacctataaattatttttttacctagtttaaaaaaatgttttatttttttcttttagattcatgaacttataaactttattttataaactcttgttgaacttatttatttgtaaaattttctgagatcaacgacattcatatgttgtaaatgagattagtttgtcatctattagaagagtaatgacaaaaaataaacttaattttaatggaaaccctttcctctgatctatataagtccattttagctttaaagaaaaattaagacataagcttaatttgcatcacaatcaagaagccttcatttttgtttgtgtgtgttatggacttatgttatggtcagaaactgaagcgaaatgggtggttttacttttgagtttggtcagcaggaggtatcaccacgcacctcaggaagactctc

SEQ ID NO: 17624 - DNA, 892 bp, Glycine max
  Intron number 1 from transcript Glyma12g36530.1 (locus Gly ma12g36530) derived from phytozome v7.0 (chr-ID Gm12; pos 39572667 to 39573558)
ccaccaaggaccttcctgtcaaagggtacctcccggttagtagtacttttgaatttgttctttgttcaatttaattaaaatgtactcatactgtagagattgattgacaatgttttactgttattcaatcatacattatcatgtaggggaagattgttgtcttttgtactaatattaattatccaggtttttggcgtgctgcggccgcaaggcaaccacaattgtggctgcgtttgtctgcgatatctagcaatattgaggaaggcgatgaaactgcaactttaaaactttggttgatagtgtaaaatttttactctgagggtgtatgaaaattaaactcttcttgttatccatttgaggatatgtgttgtgtaggtgtgtaattcaagattttgaattgcggttgcagtttcgttgtgttccttgaaattgcagacaaatgcagccacaattctggtcgcaaacatcccaaaaaccttgacactatggctgaagtcatggttgcatcgtttttatctgttgtggtgtcatgattgtaagaaaacttacagcctctagattttcctcatttgtgagcaccgtggaagtagtctgtgtcccttgattattatatctagttctttgaatattatatcttcccttgtgttatgctgctttaagcctcagttcatacgggaaggccgtgttatgctttactggccatgaaaattttgtgatttatccttttggtgttctgctttctgtcgttgaaaaatgtcaccattgctattcacgagatataattaaagggttttcatgtaatacactttgtactaaaggtctagagtctagagcaatatcaggtcctgccactcattgtctaacatttgaagtgtgttgcaggattgcttga

SEQ ID NO: 17625 - DNA, 694 bp, Glycine max
  Intron number 1 from transcript Glyma06g42750.1 (locus Gly ma06g42750) derived from phytozome v7.0 (chr-ID Gm06; pos 46076388 to 46077081)
cggtattcctcttctcattttatttatcacttatggaatatttttgtttcaaaatatttgtcgctttagaatatgaaaaaaaatattttttttcttctgatacttttagacttaaattattattttttattctgacatatgaccaattcttgtatggttttcaataaactttttaaacttttttttcctactaaaatttaattagataacactttgggaagtaatttgggtagctcttgagggattataaacaaaacaaaactttatcagagattaaggatataaaacaaaattgttggaaccaaaattgatcatttagaaatacaaaatatatttaagtcatgcttttcagaaataaattcactagtatgttctgtcaaaaaacattcactagtatgtgtataatgtaattaattatttagttagataaggttatattatcacaaaacttaataattatttattttctcaagatgtgtgcattactttaaataacaaataaaatgagagggaaatggagggtaaaccaaatatcttatattatgacaataacattgtgattcttctttccatgctcaaacactttaataatattccattgtttcattagaatctaactatgctaaaatatcaactctcttttttgtttgtgaaaacaggtagttgttgggcattttcagccgtggctgcgacc

SEQ ID NO: 17626 - DNA, 898 bp, Glycine max
  Intron number 1 from transcript Glyma07g25450.1 (locus Gly ma07g25450) derived from phytozome v7.0 (chr-ID Gm07; pos 27938200 to 27939097)
agatacaacagtagtggtggccgccaagttgtggggtgagttcatttcatggatatttgtttcttaattatttgggtttgattctgattgttttgtagttacacttcatttcaagttggcatgtgtgtggttggtagttcaattttctgaagctcttcttttcctcccgaaaaggaaaagtggagcgaaacataattttatataagttcttataaaagtaaaactagtgtttttttcatgaataaaatctataacaaaaaatagagcttttctaaaagtttagagttctaatttttggacatatatgcataatgtaaacatcccaatgatactcttatttctttttattgacctcttcattttatcatatgatatcatacttatggtaacaaaaaaacaaatcatatatatattacttatcatcacatctacatctttctctcttttatctttttctctatccgggtaattactattatgttgtatatccatggagaaacttcaatttttaattagggaagagaagctcaaaacaagttatatccaatgctagctaaagtctgccaaatgttcagtatatttttgtgtgcttatatgggccattattgaattatttggtgtctagtgacagtggcactcgagctttctcaatggctgcactttcggataaacttgctttctgtttggtgtctgcctgtctggtgacagttgcacccaagcttttccaatggttacatttttggataaatttactttgtttgttggttttttccttttttatatccccagctcagtccctcctttattgcgttattataattgcttttggccttcatttgactcattcattccaatgtctgattgtgcaggtgcataccttacagatataaagaagata

SEQ ID NO: 17627 - DNA, 924 bp, Glycine max
  Intron number 1 from transcript Glyma11g26240.1 (locus Gly ma11g26240) derived from phytozome v7.0 (chr-ID Gm11; pos 25120103 to 25121026 reverse strand)
ggtgagtttaacctctcattttttttctacttctatgttttgagataatattttttagacaccaaataatgctaatattttcttaacactttaatttttttattttatttcttttcttgtcacatataacatctttatttttgtctctagtattttttttaagagtttactagtatagagtgttcatgcattatttttcatgttttgataacaaatgctaaagaaaatggaatgaaatgagatgaaaggaaaacaagtggagggaatggagttctaatgtttctatttagtaaaataaaaggtgattccatatcatactttcaaattaagaaaaaaaaatagtgcttgaaatgtattgcttcaaattccattcaatgcatcttactataaagaagccaaacaatgaaagcaaatatcattttgttacatttcacttcattgtgtttcttttcatcaatattcaatattgcccagagttgcaattttagtagaagagaaaataggggtattagtgaaattgtacacatcttgaactaggcccgtttatttaagctactcgtttaggtgtcatattactatttactcgtgcccacattagcagtagcaacactttaacaactaaattatataatatgaaagtatttagtataatttttggattatgtctcaaatgataaataaattgtcagtcacatgtcaaaggtttcagttatgtgaagttccttgcaattgtttgctctagtcatacctatatgtgcacgaggaaaaataaaacattactacatataggttttaatactactcttttttatctttgtcaagaaactcttttgtttatttgtttttttgttagagtgtgtttattgaaagttgagttgatgagttgtatgtttatgctttgtattttatacatgcaggtggagc

SEQ ID NO: 17628 - DNA, 751 bp, Glycine max
  Intron number 1 from transcript Glyma12g31550.1 (locus Gly ma12g31550) derived from phytozome v7.0 (chr-ID Gm12; pos 35150975 to 35151725 reverse strand)
cccctcttctccatccctcagcgccccatcaatctgtaagtctcccgaaccctccttaattttatccaccttttccgccctttgtgaaaaaatgggaaattcatttattttgttaatttcgatttatttgggcatttttcctttgaatagttatattttaaaagcagaagtattggaagaaaaggttgccaattgcacttgacgttacgttagctgccttattttttggaagttgttacttgatatgttgcaaagatatgttcggatatacatttattgattgaactttgctgttttctgcgataattttgaggaaaagaagattgtaagagtgagattatgctttgagcgaggaaattagggagaatgggacttaaatttgcatcttcaattttttaatagcactttgggggtggggggcgaggggtaattcccacaataaataaatgagttaggcacatgcctaaactacaaacaaatgcgtattgcaccaatatcagtatcgaatacaataagtgtcccaattttgaagtgtctcagctcacaacttgcttgtagttgtatgtatctaccttgcgttgctgtaaaagaattttgaatgtgtggagctgaccatgtgaggaattttgtattttcattaaatgcttgctggttttacctgttatactttaactttgtgtgtcagtgtatagtgaaaattttgtaatttttattgtatgaattagggatctgagctccagcattggcaaaa

SEQ ID NO: 17629 - DNA, 725 bp, Glycine max
  Intron number 2 from transcript Glyma08g43350.1 (locus Gly ma08g43350) derived from phytozome v7.0 (chr-ID Gm08; pos 43185382 to 43186106)
atttccatcatcttcttgcagctcttctgccaaaggtcaatccaatcttcaattccttgtgtatcctctcaccccctcaaattaacatggctaaaatgcaaaatttttaggtgtttttttattatgtttttcaataataactagagtttttctttgataacttaagataacaatcaagtaaatattttaaaatgaagtattgaagatagactcttattataattgaagaggaatgttaatatactctctctaccactctttatactttttttttaaaaaaaaaaatcatcaactttagtgagacttactttaaaattagaagagaaaattattaaataaaacgtaaagcattcaaaaatattttttttattaataaatttcaactaaaaattaacaaggaatttttatctagctgcataccaaacctagatataattgacgtgtactcgataaaatgtagaattatatttattgattgaaaaattaataattgatatcataaaaaatgcatataaatatgtaataaattacacaatcattaaaatctggtttccttttaacttttagctgtgtgttttctcttaaggactctttcaagtcatatccttatgttaaatcaattttgattattcactataatatgatggttgattaacaatcaatgatttggcaacactaattctaatttaggtcctaaaaggaaagcatcattagaagtggtacac

SEQ ID NO: 17630 - DNA, 610 bp, Glycine max
  Intron number 2 from transcript Glyma11g19330.1 (locus Gly ma11g19330) derived from phytozome v7.0 (chr-ID Gm11; pos 16015537 to 16016146)
tcactgccaaagcgtttcgggattccgctattcccgtaagtctctaacgctgaagaatgaagagaattagtaacttattattattattattattattttagtcctttgattgttttatatctaacaattttataaagctaaccttattatcattatttcatttttagtctttgttgcccatattatattagttttttaatcttgtaatttgttttttaattcaatttgatccttccgtcaaaattaggtcctgttaagaaatcgcagtatgtttgtgatggtttaaaaccgttactaaataattttaaaccgttatacaacgcacatttcctaatttaatttagacaaaagaatcgaattaaatcagttttaaaaaattagaggatcaaattgatcccaaaaaaattagaggacaacaaattaatttaaccttaatattataagtaaaaaatagtaattaatgttacattgacaaactaaaatgacaattattttaggaacaatttttttttcttgcactacaattattataggatggaaggagtattatttttggtattgtagtttgttactgtatttttttttttttttttatattttcagattattg

SEQ ID NO: 17631 - DNA, 951 bp, Glycine max
  Intron number 1 from transcript Glyma12g10780.2 (locus Gly ma12g10780) derived from phytozome v7.0 (chr-ID Gm12; pos 8767223 to 8768173 reverse strand)
ccttcatccgtaagcataataatacccttgatttttgctttgctttcttcacagtttattggatttccttatttcttgaatttcccttgtgtgcaacagctggtttaatgcaaattaattgaattattctttgagtgttaatgtcaaattcatcataattgttgttcatataaaagacttgttttgaccttgaattttggaaaaaaaaattatatgattcatgtgttgtttgttgaatgacttattggggtttttacttttattttctctttttgttatatatgtatgaaccttgtgcaaaccagcatcctaaattgccagcaatcttattaggctgaaaaaggatttgtgtcatgttatgcaatggtttttcactaatttgtggaattagctagctcgaatctacgaagcactcagatttcatcattgttttcttttagttgctccctagccagagatggaaaaatgattgaagttcaacccccttttttttcaaggagaatgtggcagttctgtctaattgataatattggtagttattggattactattatacgaatatcagtgcttgaagaatacaaaattattgtactacacaatgcaaacctcttttgtttgggttttttgtatcatactttttgttttccacttttgtctagcaattgcagaatataaattgtacatatagcttgtttgatttttgaagaaaaatattgctgagttctgattttgcaatcatggacaagaagaagaaaagtgttaagattgattgatttcccattctgtgactttgtgacttcaagagactaaactggtcctaaaaactatacccataaaaacatatcatgtatgctatgtatatggaatggctgagatcatggtttagtgaatggtaatgcaaattatgtatgaacagatagtggacgaagaagcgaggtttgaagccgaagt

SEQ ID NO: 17632 - DNA, 395 bp, Glycine max
  Intron number 1 from transcript Glyma09g33470.1 (locus Gly ma09g33470) derived from phytozome v7.0 (chr-ID Gm09; pos 39928533 to 39928927 reverse strand)
ttaggtgggattcacatcattgattttttgtaactgtggttattacatgtttaggcttgaatgtaagaaggacaatgaaatggccttttgtttttgacacatggcaggttttagttactgcatggtacaaacaaattaatccttcttctagtttgtatatggtgtatcttattcatattttgtcataatacaaaagttctattcattgaaaattaatgggttttttgtatgtgtgtatatatatatatatatggtggatctaccagtagtactagtagtgatatagtaatatgtcatttatattagttgctttactgtgcaatcttttgattgctgcaattctgtttttgttatttggagtgctgctgtgttccattggttggattctcaataga

SEQ ID NO: 17633 - DNA, 688 bp, Glycine max
  Intron number 2 from transcript Glyma12g30800.1 (locus Gly ma12g30800) derived from phytozome v7.0 (chr-ID Gm12; pos 34424519 to 34425206 reverse strand)
acatcaaacacatcctcggcgcaggtccttcctttatcctaactactctatctttttctcccttttttaatatattatgattatgattattattattgagcgttttttatttatgggttattggttgaatgctgaactgggttcgcaatagcatttctttatgtgttcaatgcaagaatgttggggggaaacggccttattttaatgttgatatagtttgggatttgtagagttggttagtagaaaactgaaatcatgccttgagaatgagatgtagtacagtatttttcttctcaaagttattggtgattgaattcggaagcgttgtggttgtcttgtttgttgatattgcgacaaatcgcggacaagtgcagccgatgtgattccagttgctgtcgcagactgttaaaaataccttgatgttgcagcctaaatcatggttgaggactgattttttaaagcctttagccatgtgtaattttcttgttgatttgtctttgctgttttaagtctttagtcaaggatttttatttgggaggaaatgtaatttttatagttaggagcattgttttgtggttgattagtatatggagtccatgatgaagtgggtaaaactttgattttgaattgtttggagtgattgtttttgtgtcttgtttgtgatttatagttggagctgaggctgaga

SEQ ID NO: 17634 - DNA, 818 bp, Glycine max
  Intron number 3 from transcript Glyma06g39750.2 (locus Gly ma06g39750) derived from phytozome v7.0 (chr-ID Gm06; pos 42639108 to 42639925 reverse strand)
cgcgtctagccacctctaccagcaggccacgtcaggtatctatccctggataaatcttctctttatgccggccacgtcagtatgcatcacaacataaatcttctctttattatttacaattgaattgatgtgaaatttaattcttttgattaaattaaattaaaggcgttaagaaatatgcatattttatatgaaggtttaaaacaatttagtgactattttaaacgtacttttaatctagttttgactgcaagactaaattaaattggatgagaactgagaattaaattgaatataaaaaataagtgcagggtttgttttttaaaataaatataaaattaattttttttaagaaaacacaatttaaaaaaatataaagacttatttcaataaataaatttaaacaaacttattgattatctttattttaaatatattatccttaggaggctatgtttaggttaaaatttactaagataaaatagtcattttgtaatttaaatgctttgttccttcaagtgcactccaaatatgaggaataaaattatggttaatcattggaatggatcatgatccatcttcttatattatgtttcattcatataattttacaaaccaaacaatgaaacaatttactcttcaattccaaacatctccgttccaccctctaccgtcaattcatatatagccaaatcagttatcagatgataggaatttttataacttataattatataaattattgatggataagaatttatataacttaccattatataaattgaagaagttaacttcatttttatcaggtgatagga

SEQ ID NO: 17635 - DNA, 549 bp, Glycine max
  Intron number 3 from transcript Glyma08g40800.1 (locus Gly ma08g40800) derived from phytozome v7.0 (chr-ID Gm08; pos 40627329 to 40627877 reverse strand)
tcaaagtggacactaactcaaatgtgagttaaaaattcttgcttggatagttttgacttataacacttgaggcaattcttttttacttgtctgatgtaattatatgttctttaattttatatggtcacaatttttgcctggatttcttacctgtcatacaagtgattaatcactttatttatattttttgtttgctgtttgccaatttgttaagcctgtgtttgggtgtggtgcgaaaaagcaagatcaattaaatttccccgttggtgttgaagcaacaatgttcgttgggcacttattcatggactttttgtgtttcttgggagcccaccgtgtaaccaaacgcaggcttagttgagttgttttctgtgatagtgcatgatcatttctatgatatctgcatcaggagtctgagtatcctttataattgaattgactattgtacacccaagactcatgcaacaaaatttgatgagtaattagttagagctcatgctacatttcttatctgactgaatacttttcagctgcgtacaaccattactgtgg

SEQ ID NO: 17636 - DNA, 856 bp, Glycine max
  Intron number 1 from transcript Glyma05g32670.1 (locus Gly ma05g32670) derived from phytozome v7.0 (chr-ID Gm05; pos 37536171 to 37537026)
tcagattcttcgctttttttccccagtagtcataggtttgtccaattaacctttcttttcaagctattcagatctaccacatcttcaccggaatcgctctcttttccgtttaatcttcacatttttgctcttttgcttctatgaattgaacgttttccttttccctttttcttttccgctttctttttctcttagcatgcaaacttggttggttgtctttacttaacgtttattgcgattggtgcagttttgtttctgactttctggcagtgtagatctatgtgagtgtcgttgttttcccgttgaacgcgtcttttcttctgttttcaatccgctgaatctttagaatttgttgttgttccgcaattcttggtaatggagtctttctgatccgttttttctggttattttaattttctagctcattcgtatttgttgaatttgttagatctggtcgttttccttaataaacgatgttctcgggttatgagagagaaagatacatttgaatgtgtgtgtttcaccttgaagtttgcaagccttcgactgtttttaacggaatcaatttttttgacccctctcatatgttataacttggcaatgtcatgtattttcaaacgtcttatatttatgccaaatcctcctaatttcatctgattggacaatgttataaattattggtatttgattttcgtgtcttgttagttcatgtcatgtattttgccatctaactgcatagatattgttaattgagtgttgccactgctgatccatgtccaacaatagggatgatgtttaattgttgtttggttcatgtccaggtttaaactatccgtgaaccgctgcaccctctgac

SEQ ID NO: 17637 - DNA, 644 bp, Glycine max
  Intron number 2 from transcript Glyma05g30340.1 (locus Gly ma05g30340) derived from phytozome v7.0 (chr-ID Gm05; pos 35729425 to 35730068 reverse strand)
gcatttgaggaatctttccatatccaacagtgcaggtagttaactcgttaaagtggtttttgtgtttatatatttgttgttgactgttgtctgtcagacaatcatttgtgcctctacttaagtttctgggattgtttgttcgtgacatggtatgagagcctttgggattaagttaagtgcgtgtttggtttggtgccactaaaaatgaactcatgttgcttatgcttgaaattatggacaaacgcacaagcaaacacactaagtggtatagacaatagagtttaatccttgccttttattgacagttcaagcccaagggttcttccttgagtggtgtattagagatagaatatttgagattgtaggtcaatcacattgtccatctccttttgtgtccttgttttcaagtaatctccagaatttgtcttttggacaaaacttagatacatattcatatatatattttttagcattatatttgatttagaattagagttttattttgataacctatactgatcttaatgttgagatgaaactccagttttgattagagaataatacccaaagcatttatgtttgtcccctttttttgagtttaacttactttcctttcaatttatttgctttcagggagagtgtat

SEQ ID NO: 17638 - DNA, 517 bp, Glycine max
  Intron number 1 from transcript Glyma05g30340.1 (locus Gly ma05g30340) derived from phytozome v7.0 (chr-ID Gm05; pos 35730779 to 35731295 reverse strand)
ccatccagatctttccatttccattattaggtaagcctcgtcaattctcactcccttcattctctcctcacgcatcctttccactttcatttctatctagtttttttttaattccacatatgcgtcaattctcatctgggtattactattctttatagttattgcttaaaaataagattctttacaagtttagcttatctgttaccgacagctaaacttgtaaaatttaccgtttaatccatgtcttgggttttctggattcttgtttcagatttatggactcttccaataccgtgcttaccaaattcgtgtttttttttctctctcataaccgcataaaagaataatctttgttgttgttgtaagttgtaaccaagccgaataacatggtgtgaataaaagacttttgttgttgtgtttgttttcatcactgcttggttttgattttgaaagatggtgttaaatctgtgtacactttaacaattatctatttgattcttcattcttgctcccagct

SEQ ID NO: 17639 - DNA, 191 bp, Glycine max
  Intron number 1 from transcript Glyma13g19260.2 (locus Gly ma13g19260) derived from phytozome v7.0 (chr-ID Gm13; pos 22829926 to 22830116 reverse strand)
gactttggtcgacggcgcttccttctgaatttcctgtaattattatttatatacactgcacccgccgattgataacataacttctttgttttcttttttccattcaaattctgttctatgcgtttcagtttttatataaaagaagattaaagcgtaagtgcttctgtttcagagacccttttggcttcacg

SEQ ID NO: 17640 - DNA, 657 bp, Glycine max
  Intron number 1 from transcript Glyma12g10650.1 (locus Gly ma12g10650) derived from phytozome v7.0 (chr-ID Gm12; pos 8612654 to 8613310)
gaaggtatttgccaaaacttgaaatttcagcagctatctctctcaccaattggttttacttgacttcgcttgacaacttatgtatgcttgtatggtcaagattgactcttctcacctctcgtgctttcatggttcttgtaatgtgagacgagctaatcttaccattctattctaagtggggtttggtaaaggttagttttactttaatcttgaccacacatgtataattaaatagttaagattagctcttctcatctcacacggtgtccccccatatccattgtttattgaagaactacttctctttaaagtttgcttctaatcatgtcaagtcacatttttcttgactatctacaccaagaaaatctttattggaccaaaaaacattatgcttgattaatatttaggacataactttatagttctttaggtacttttggtgctgttttccaatcaaaattagagtttcacctcggtcatctacatatcgaaggtttgcattgaaagttaacattgattatcgaggtaaaactttcatcagattctaattgaaaaacaacatcaaaagtacctaagcaactatatccaagttttgtcctaattaggtgtagcaaacaagcgttggttaatctttttgatcatgtagctctgcagttg

SEQ ID NO: 17641 - DNA, 867 bp, Glycine max
  Intron number 3 from transcript Glyma07g00510.1 (locus Gly ma07g00510) derived from phytozome v7.0 (chr-ID Gm07; pos 235464 to 236330)
ttactgacatcaggttttatatcaccttcagatacttagtgatatatgcatccattaatatctttatttttccatccagtctttctaaatatatgtttacaatctaaatgataagaatattctaaatcaacttttgatcaagtatgataatattcttgtttcattctctttttaaatatttttgctcatggcatgttaaagtatatattttgactccttttaaacaagagctatactttagattggaaaataaaatacacttataatcattcattgaaaaatcaacttcagtaaaaaaaactaaaaaaaatcaataattgaaattgtgataaaattaaaaaaaaaaacatataaagtaaattttaaagtcaactacaatctcaagcactgattatcaaatcaatattcagacgagtcaaaactttgttatcacatgttattgtagcatgataattgaatttatcttggatgaatctttttcttagtaattgaaattttgataactggtgaaacatggataaattttactttttataacgttttggacatttcaaatctttatttatgattgagcacaaatactagatacttaatcaatacttaaaaatgatgcttaaggttaaaaagttcataagcaacataagtttaaaaaattctactatgaaacaatttgtttttattatttactaaattaatttcagatactttcatatctaagtattgttatttgcatttggtcatggtcttgtttaacatcatatcaaaattacattgctttgggatttaatatttgtgttgtttgcaagctaattaacacaaatcttatgtccagtgaagtgcgaattgaaggattagagacattagatt

SEQ ID NO: 17642 - DNA, 732 bp, Glycine max
  Intron number 1 from transcript Glyma11g04390.2 (locus Gly ma11g04390) derived from phytozome v7.0 (chr-ID Gm11; pos 2981969 to 2982700)
ctcaccaaggcttcttctcagaattgcgtcgaaaggtgtctgtgcttgtgcttctatcatttgcatctttgttcgttttatagcagctgggattcgttttcgaatttcaaatacatggttgttttcttcttcgtcctattatcatgtatgtttgtaccaaaaaaatatcatgtattacgtatgttcgttctatgtatgttgccaccacccatcatttagaattcagaaatctctttagcgttagttaaatatcgcactcgtatcaattctttccaactccccaagagcatagattatgctccttccatatttgatggatgcatcatgcatcaataccccctccctctttgttttaaagcaaaattgttggttttttatttttattttctggttgagatcaaagtcatgtagaacaagggaagagatgaggttggattttgcacccaaaaggtttatgatatgtctaattctttgtccttattttcacatttctgtcttcttctttaactagtaaccatgtggtttaaaattggatccttgctatcctcattctttcaaatattgtctatgttttaagtcaaaagggctgggggcatgtcaaatatataaaccattcagatagctttggaatagttagttcggacatggtctgtgatagaaagtttagtatactcgcaaattctaattattaaccaaacttttctctcatttccttcatgttgtgccagcagc

SEQ ID NO: 17643 - DNA, 1009 bp, Glycine max
  Intron number 1 from transcript Glyma09g01210.2 (locus Gly ma09g01210) derived from phytozome v7.0 (chr-ID Gm09; pos 742962 to 743970)
gaatcacccagctgggcctaaaaccagtgagttgattttgtccaatcccttcgtgtttatgttctgtatttgttattttctcacgcttccgattttcattgctccgtgtgatgatgttgatatatatatatatatatcagtgacagggtttggcttaggttacgaattttgatttagtgatttgataaaaggccatgtgcaaggctttatctacaacctatgtttttttttttttgaaaaaaaaaacctaatttgaccttggattgcatcttgagaaaagggtttttcgggtgtgaaggattacgaaactgatggttagatatttgggaatgttggaaactttgggcttcgtctactaatttaatttatgaacataaggagaaggttgggtagataaaattgaaaatgagatgagtgactgacaaaaaaattaatgttaatattttgtcatctgtgtaaagtggaagacactagtaaactaacttgtgcatgctaatgcgatgctgctttgaaggatatgatcatttaaatatcacatttttttgaagaataatatttgctggattttgtatgaaaaaactggaaatgtgctccatgtttttagtgtattggaagcatgatgttgttgttgtattatgatttataacatgatttaaagaatgtagtggaacttgaatttgtctatttgtaaaggaaagttaaaggtaatttagtttcggagttgcagttagaaagataacaattgttgaatgaagtccagtcatttatatacatagatttgcttgtgttgtactttgtaaacatcacttgcttaaagtaccaatacctagaagattatattttacaagtgtacggcattattttcccactgattcaaattgtgttctcttttttatgtttctagtgaccaatgttattattaggtgttaaaattgtcattggcaacctatatgttaaccggttattttatgcagttcacttctgggcacctacctttaagtggggcatc

SEQ ID NO: 17644 - DNA, 684 bp, Glycine max
  Intron number 2 from transcript Glyma13g10120.1 (locus Gly ma13g10120) derived from phytozome v7.0 (chr-ID Gm13; pos 11693084 to 11693767 reverse strand)
cattcaggttcttggctctcttggatttgaacttttttttttctttttctgttttttcgtggaatgtttctatttggttgctttgtgtacatgaagatataattatataaaaggaatgtgactacttcaaagtatatcttaaactttgtccctagtttgagttcttatgttttagtgtaccgggaggttgttgtatctccttaaaattaggggtgaactattaatttcgaatgtgatttttttatatataatattttattcaagaatttaattgaaatgcacttatagtttagacttttttttaaaatgtatagtcatctaatcatgaattgacgtataattggaaattgttgacttttgtaattaaaagtcatacctaagagtatttctgactgattcaccgtggaaaaaaaaaatctatacaaggaccatgtatcaaatttaaactcttttttcaaagtgtgttgcatttttgtgttgcaatgaatttaaactcttttttttttttcccgttggtgggagtttatgtaatttgttaagctccaagtatgttttggttgtgggagattacatctgatgttgttaagaatgaattttggttgatttaaaatgttgagttacatgataaatttggaatatatgtaagcagattggttttctccagcctcagtgcatcgtcttgag

SEQ ID NO: 17645 - DNA, 412 bp, Glycine max
  Intron number 1 from transcript Glyma09g37020.1 (locus Gly ma09g37020) derived from phytozome v7.0 (chr-ID Gm09; pos 42599646 to 42600057 reverse strand)
ccggtacgtgaaattcttgtctttttttgcgtcattaattgttattcaagttttactttccaaaattcgattactttttaattaaattagatgtgatttccttggataatgattctttaaattgtaccttttcaatctctttatgttttgtttgatttttcattaatcattacatttggatgtgatttgcttaagaaagagattttctcttgctttttgtttgtactgtacagaattaaatactttttcttgtcttactcggtatatttattagtttatatgaagtttgatttaggatttagattagggtttttggttaatttgtatggattttaatgcagttagttttaatttggattgattttgaattcgggcaatgcagctgaaagactgggtaggggtattgagactg

SEQ ID NO: 17646 - DNA, 901 bp, Glycine max
  Intron number 1 from transcript Glyma13g33850.1 (locus Gly ma13g33850) derived from phytozome v7.0 (chr-ID Gm13; pos 35530343 to 35531243)
ctcaagtcgcacaggtttgtttttttagtaatgtttttccgactaaacttagatcaatgctcttaatattagtatttggtttaatcatttacttgcttactatcttttaccttttcgtccctgcattttaaatattaatttactgactaaaactgattaagaagtgtattaaatggattgtgatcagggttatcaaactctcaagttaactcgctaactcttacgagtttacgagtccacttgtcctctgcgagttaactcttgaataaactctttttagtagactctgagtaaactctataaattctaagtaaactcgatagactctcgagtttatcattgagtgaatgagttagcaaattaaaaaaattagaccaaaatgtaagtaatttttttattgttttctgtgtgtttagcattagcattaacatatcttcatttaacgtgtgattctcaaatacaaaattctcatctttaataatatcaaacccttgttctctaataacatcaaaccctcaatgagaatgatctaccactactataacctctataagttattgcctactagtgactagtgatgtattattattaaacttggttatttaaatattctgaactttatgatttactgatttactttattatattgttgaaatatttaattagtatgttatttatagatattttgttattatttttatatgaagtagactcgtaaacgagttgagtctacaagtcgagtctatagaattctcatgagtctgcgtaaactctcgagtttgataactttgattgtgataccaaaagtacctaagaaaccaagtttaagttttgtccttgtgaggcattttgggtattgcattatgtgttatgctcttctaatgcatgcaggctgccaaaa

SEQ ID NO: 17647 - DNA, 1037 bp, Glycine max
  Intron number 1 from transcript Glyma11g02250.1 (locus Gly ma11g02250) derived from phytozome v7.0 (chr-ID Gm11; pos 1403560 to 1404596 reverse strand)
gaggatccaccaagaccctcggcaacttcgttaaggtttgtgtatttttttaccaatttgttacttttcatattttagattgccgacgacattgtaaaaatttagggcaaattagggtcgtgcttcaaatgtgacaattaattttttcttatttatgtggattttaatttttatttattttaaattcattcgaggttttttgcgattattgtctgcaatgcgtgagtgttgaaattggggaaaaaattgtcacagttgcaattgcggagttcaatttgaaacctttgtgttttatattttttatgtgaatttttatttatcgtatttgagtgtttctgatgggctttgttttgattttgtgttttggattatctttgtttaatggaataattcgttttctttttgtttgaatgtttcgttattgattgttgatgaggatgttttagactacggaattcatgtatagttctactgttctaccttttgcctgtgtttctaacttagaagacagtctactcttcaagagaggtagttccattgtatggctttttgtgtatgaatgtgtttgaataaactaccaattttgtctctgaagtattactgtttcttctaagtagtttctaaagcaataaaactatttgagtaattttctaagtattgattattgaataatcttcacccagtacctatgttaatgtattttagtaaagtttggagccccatttgaaagatcttttaatattcgaggcactatttagtattgattttaatgtatttgaggcactatttctcaatgtaagttagtctatggtgtctttgctgcaattgaaggcattcaaaatgcatcatggatcacttgtgtgatttgttactcgtgtgtctatgtgcatgatcctttgttagagaggccagtgtgtatctatgtgcatgatcctttggtatagaggctaatgtccatgaaagaattgctctaatattgttttagtacccataatgatgttgctttgtatttttgacaggctacttttgattgcttg

SEQ ID NO: 17648 - DNA, 978 bp, Glycine max
  Intron number 1 from transcript Glyma13g18930.1 (locus Gly ma13g18930) derived from phytozome v7.0 (chr-ID Gm13; pos 22539500 to 22540477)
tgcaggtaacatcactttttcctatttttctatgaaatgtgcaaagactactctgagattattttagaagtaaagtaagggtgatgaaattaagttgggcaatgtatgtatgttctcctattgaatttgataatatttgtgttaagttagaaaaaaaagtttatttttcttctcttcagcatgcttggggactcaacttaaagggttcatctaaagttctacacctgaaatttcataattacattggaattatttttgtgaggttaagggctttgaatcattttcaactcaatatggtttgcctctgttacgagacactaggcattccaggaggccaaataagattaacaaaaggaggtggcattgttttctttttctatgtttttgccctcttttttgcttgacaacataaaattcctggtatgatgcttcatttttcattataccatcataatcattacagtaaaagtttataatcttaagttttcagacttccatcaaattgatacaatttctgaattgaccacaaaaacatcggtggaccaaaatgtgccatgttacgagacatgcaaagaggttatatgttactttgcctaattttctccgcttcttaagaataagggggacttcagtggtatatgttttgattgatgacatcccatgttgtagagaaaagtgacattttaactgagaatctgcaattcttgacaggatatacacttttctaatgttgttaagtccctttagtttcaagctacgttgcaccattctatgtgtagggcagtttcttgtatcatcttcattgaccccaaagtgtagaagttctttgaactttgcatatatatatattgtttctttgatgatatttagcactagcaaaatatgaaataatgcttgagttatgatgttcctggtgaacataatagcctctttgtttatgcagtcccatcttcaattgttcatcaaagtacaaactct

SEQ ID NO: 17649 - DNA, 471 bp, Glycine max
  Intron number 2 from transcript Glyma13g27810.1 (locus Gly ma13g27810) derived from phytozome v7.0 (chr-ID Gm13; pos 30944221 to 30944691)
gcgggactataaaagtaaattcacttgaattttgatttttttaattattaataatttactgtgagctgaatgtgcgagtgctactcatgaaccagttttgcagttaatcagtgattataggctactggtagtttatttccttattggaaatgacatttttctttttggaaaatgtagtatgcagtacaccccattttggggtataaggaggcggaaattggagagatatagaaagaagtgagatatggatgagagagaaaggaatagatgtgatgagttatgtctagagataagaagaaaatgaagtgaaaaaggagatgaaagagaaagtggcgtaggaatattcatcccccctccccccctttttatctgcgtggttttaattcaggtgttgtttcgcgtcttcgttctaattttgattatcgttttttttcagcctggtcattttgagggtaacacgtttgacatagt

SEQ ID NO: 17650 - DNA, 512 bp, Glycine max
  Intron number 2 from transcript Glyma08g05420.1 (locus Gly ma08g05420) derived from phytozome v7.0 (chr-ID Gm08; pos 3866040 to 3866551 reverse strand)
cttgttaaaactcatccacgcttgtatatcacaccgtaagtactgccaacttcttccctcttaattttatccaacggttctgaatttctaaaatgaatgttggcaagtaagaataatatgtccttgccaagtgaaccacctgtaaattgaatttgattttgtttacattaattgttgggcgaaggaatagtttttggataatttgatagagcataatagcagtatttgatcatgtaacagaacaactaagccaaatttggtgattaaatttcttttttaagtgatgcctttgcagcacatttattgtaaatgctgtgtgactctgactgcagaaagagagggagaaagttctttttcgacttcatgatgtgtaaagtaattttctttactagaataacaaactcaaacccaccgcatgatccaaagtccaatcaattatttttagtgcgcttcctggtgtgagaccactctgctcagtgctttctgaaattgacataataggcagtcctgtt

SEQ ID NO: 17651 - DNA, 1021 bp, Glycine max
  Intron number 1 from transcript Glyma12g16620.1 (locus Gly ma12g16620) derived from phytozome v7.0 (chr-ID Gm12; pos 16128907 to 16129927)
ggtgttactcaacaacgtaggtggcctggtcgtcggtgcactgcaatcgaagctgcgaccctatttggatcgaagagtttcaaattaacaaagaaagaaacatatatagagaaaatgtatgtagaatgatccagtattggtcacccacaatgtaaagggtgggaaggaacacacttagcaaacgataggaaggagcacactgtgttttctttctttagaaattataataatgtgttgttactatatttttatgattatgtgtttttactataatgactaattaattaatcgtgagtatggttgttataatagttaatcagttatagatcacaatttgttaaaaattagaaatttataaaatctataactagaaatggaatcaaaccataaaaaatgaaatttataattttttgtaatcagaaattcgctaacatttatcagaatgccaatgaaccaaaaccaacgtcaacaaacacaccattatttcttggtgttattcttcaattttcaaatttaatgattaatatatatagtttttcaaatgttatatgatttccttttctcagtccaaataaaaatgtggatttccttttcatcagtgttagaatgagaaaactcaaagcaagacattttgaaagtggcagcttggcaacgacggaatccatcatccatccagaatcttttctcctgggactgttcttttacgcgtagggttcttctgtctggcgccaagaaacttccttttccttaacatcatcaactctctctcattccttctttttactataagtctttgcttttggtctcttttttaccatttatgacacacgttcttcacacagaaaaaaaaaaaaaaaaaaaaattgtcgcaatcaacatatcatggtcaacaacgccaaaagttgtcccgtttgagttccttatcttggatcctgcaagaagcaaagacccttttcttgaatctttatttggagctctggtttctgtttctttgcacttgcagggtggtttagtgattttg

SEQ ID NO: 17652 - DNA, 961 bp, Glycine max
  Intron number 1 from transcript Glyma09g41070.3 (locus Gly ma09g41070) derived from phytozome v7.0 (chr-ID Gm09; pos 45829262 to 45830222)
agggtttcccacttttcttcttgttgatcgtggaggttagcttctcattagtgcttttggattcttcgccattttgtaaaggaatgaaaaaaaatcaaataaatggtattatgattctgtggtaacttcgaatgtgttgtgcattggaatttctttttatgttacttattgcatgagatggaaagttggggataggtatgcaatcaattgaataagggattgccggttatttattaagtttggaacattgtggtttatttaactggtagtactagacaccatatgatgtacaagttcactgggggttgctgcgaaatatgttgtaaacgttgcatttgatgttctagtcaataatgcagaatgacattgagtttaagggtgagtttgatttctattctaaattggtttttagtttaacacaaaaacaaaaactaaaaaaatatacttacaccaagttcatgccttaccacatgcagcaccactccagatgacccatacccttgagctaggatcacgaaatagaagaagagaatgagaaaacattttccatctgtttttgtttttcttattttttaaatgcttgttttgaaaacaattttaaaaaattaatacattctggataagaatttgattgctgagctgcatgaatttatattagaaaacagtttttaaaaccgagaaataagaaggaaatccaacaggccgtccctccctctttctctttggtgtggtgacggcaatagcaataaagtacactattgtaccagaacccatatcaacaaaaaaaggacatgttttctggtttgaatacctattatatttttagagtgtatggtaccatgctaatgatatctatgcataggttgttaataggaacactgccacaaataaagggatcagccctttaattttttttttctggtcattttggtagattgctacttcactttgaaggcgtgga

SEQ ID NO: 17653 - DNA, 266 bp, Glycine max
  Intron number 2 from transcript Glyma13g01050.1 (locus Gly ma13g01050) derived from phytozome v7.0 (chr-ID Gm13; pos 777276 to 777541)
ctgttgtcagagagcacttgtttgagaaccccgtaaccgcaagggtgcaaagtttacaagaagatgctgcaccatatcataggtattcatttatttattttactatccatcttaatgttgtttaatcagtacattgtagggacatgaattcggttttttgttgcgatttcctgctgttttctgatttgaattggcttagtcttcaagtgtgatgaaactagcctcaactagcctaaaaggctaaagaggttgcttaattacactgc

SEQ ID NO: 17654 - DNA, 577 bp, Glycine max
  Intron number 3 from transcript Glyma13g00550.1 (locus Gly ma13g00550) derived from phytozome v7.0 (chr-ID Gm13; pos 286695 to 287271)
tagccaagaggctttcaaagacaaggaattggatagtaagtcctcttaatacctgtttgaatgcactaacagctgctaaacaaacacaactcaatttgatttatggttaggtgttatgttttttaacggcgttggaaaaagatgttgttatgcttgctttcttcttgaaaatgaacaaacatcagcatagaaaggggaaaagaaaaaggaaacgtgaactataccattgtcatgaataaactatgctaaatgcttaagctgtttagtaaatgatttttatactatgggggcttttatctcttaaatatgaaacacaaaactacaaattgtggctctaagacttgggatatgagatgtccagtatacatacaacctttgtggaaagtaacattgtgggggctaaataattcttaggatcaatttatcattgataaagagagagggaatgaatgggatttgcacacaattttactcaataacgacaatttttcaaaagtttcttgacattgtttgtaactgaataatggcatgtcacatgacaggttgctataaagacattgatagtcattcatagaat

SEQ ID NO: 17655 - DNA, 400 bp, Glycine max
  Intron number 1 from transcript Glyma07g10000.1 (locus Gly ma07g10000) derived from phytozome v7.0 (chr-ID Gm07; pos 8405305 to 8405704 reverse strand)
aagacttggttgagcacttcattcctttagttaaggtagtgcatgttcctagttgcattgcgttttcattcgttgtgctaagggtctgtttggatgaacttgttcataagtatttataagagaagaaaataaaaagataaaacgtattgaggttctccatacgctataaaattaatttatgcaccttaggttttggagaagttgatgaaaagaacttctatgtaaatgaagtgcataatttgatttgagcttaagctctattcattttacttgtttatggagaaagttatccacacatgaccttatgatgagcctgattgtggttagagtggcattcattgcgtttgttattttgcttgttgcagaggctggctgctggtgagtggttcacggcacgggt

SEQ ID NO: 17656 - DNA, 828 bp, Glycine max
  Intron number 2 from transcript Glyma06g07090.1 (locus Gly ma06g07090) derived from phytozome v7.0 (chr-ID Gm06; pos 5120739 to 5121566 reverse strand)
tcgttacagagacacgcacatttccgttgttgccggtaccgtaccgtactctaccatcaccttctcttccctactgtccgctactacccttttttttcttctttataaaaaaaaaacattttttttctgtaccatctttgttcttgttttgagaactgttttttttttcactgggtctttatattggcatcaaggtttcctttttccttcgcagaaagagatccttgcttgttcttgttccttagttgtctctgttaattcatgtttattatatatatgtttttcatttcttaaatctttaaatattttatgggttttatttttggtcttctttggagtaagttttgcttcccttcttgcttgtctttaggcaatttcttttccgggtttttctacattttttatgataaaaaaatgtttcagactcagttttcccttttttctatccgcgttttctgttattttattttattcttgtttcgattttcacggcaataagttttttttatttgggggtggggtggtggacttgagagttaggttgtgggtaggtaccatttgtaacattcaaagtattttcttagtctctgattctgatattattgactgataaaaaatgatggaccttaattaaggccacatgcacgtcttgtaatgatagcctcttgtagaaaacaaacatggtggtcattttaaacaatgacccatcaactaatgagggcttaatagatttaatggggctattgctgttgatgttgcctttggttgatttttgtgtttattattaatgtaattggattacatgtaggaattgaggctagggggttc

SEQ ID NO: 17657 - DNA, 657 bp, Glycine max
  Intron number 1 from transcript Glyma08g10890.4 (locus Gly ma08g10890) derived from phytozome v7.0 (chr-ID Gm08; pos 7940067 to 7940723 reverse strand)
attcttgcctcaacaggtatgcttttctgctgtaaatttacctgagcgtcttaggaacttattacacttgatatgataattcttgctttatgattcagatagtggaggattgtgaaactttatttaattgtccattgtgcttatgtacctctggtatgggaaatcttttgagtatttgttgtttgagagatataaacctgtagtattgattttgagcctttgattttttatacagggagaaaataatcctgctaccagttctctccattataatttatccatttctgggatgtgttggttttagaagttagatctggagtgcttgtctgtctgtctatgcttagaagcctttctggcacaagattttaacttttggaagaagtgtttttttctaagacaaatgtttcactcaaacactagaaagtagaaaataaaaactataaagcttggaatgggttgatacaaattgacttgtatgatttcaatttcccagttatgtaactaaatgcttacatttgcaacattgttacatgaattctgaaacatgaaatatgcttgatcatgcatcagcctcactttttttgcaaggaaacatctttacacagtgctattattaaactttgtaattgcaattgcagctggagcagattgtcaagc

SEQ ID NO: 17658 - DNA, 784 bp, Glycine max
  Intron number 4 from transcript Glyma09g17080.2 (locus Gly ma09g17080) derived from phytozome v7.0 (chr-ID Gm09; pos 20804851 to 20805634)
ccattaagaggttgagaatcgcaagaaataaaaaggtttgtggcatgcttgtttactttatatttgcttgtgtttgttgttgtttacataaattaatgaagatctgcaagaaataaaaaggtttgttgcttgcttgtttaattgtttcctttatatttgtttttgttgttgtttacataaattgatgatgatttgtggcaatccttggttattctagtctatctactcatgcgtagctgatggtacttatgaattcagtcgccttttttctgtagcatgtttcattctggtgtgtgaatctgcatatgtgtgtataatgtgtatcaggggaaagaatgcacttacaagtggttagtgtgattaacttttttctttcattcttatccaagcatatggttgtatggtcaaaatttgtttttcttgtctcatgctctgtttaggtgtgtgttcttaatttaagaaaatgttcaaattcaaatgcaaaaccttcatatatttatgagttcctcgtcttcagctctcacttcctggaatataaagcacatgtgaatcactattttagtattgtttttttggtttggttcttagcatttggaagaaagtatgtcttttgagccgtcaagttatttgtttcattaaatattttggttcagcagtatttatttgttgttgaattaccattgcagtgatgattgatatttgtttaagttgattgatactgatcatgtgtgtttcttgatgtttaacagtctggaaaatcaagacattttgggttcatagaatt

SEQ ID NO: 17659 - DNA, 750 bp, Glycine max
  Intron number 2 from transcript Glyma13g04720.1 (locus Gly ma13g04720) derived from phytozome v7.0 (chr-ID Gm13; pos 4987728 to 4988477)
tgtcgtcgccacgcgcctcggcattcgcaaaagtaaagacctcttcttttcatttgtttccatcaatttctttctttctttctttttatgttaatgtgattgcaagtgtggttgggattttgaatgtgttggtatattttaaatgatcttggattgcctctgttcgttagtaatgtgttttagatgtcattttggtcaaaattagtctatatttgatgaattttctctctaactcataagtcatatcttatttttcggatcggaccaaatgcaccaactatacaaaatatgaagactaaaacattatttttaaagtatatagatgaagaccaattttgatagaaaattgagagattcgaaacatattttaccttttagttgttttagttgttttagtgatggcttcataatctgaagattacttattctgacgattttgattaagcattcttatgcggtttaattttaaaattggggaaaaaggggttggggtgaaattaattagcatgttttttaaagcaatatgcaatgtgatttcaatcaagttaatggtgcttttcaagaacgatatactaggggtttaattcagttcagttggttgcacataattattgtaaatcctgctatctgtctttgatacctacagataaaaaaaaaaattacaatgttaaggtgtttaggggtctttgtgaattgtgattaataatatttgggaaataaataaaattgcagggttactgaagctaaggc

SEQ ID NO: 17660 - DNA, 437 bp, Glycine max
  Intron number 2 from transcript Glyma09g12400.2 (locus Gly ma09g12400) derived from phytozome v7.0 (chr-ID Gm09; pos 13054815 to 13055251 reverse strand)
ttgctgtgcaacataccaaaaatttatccatagaggtatgtatttatagttttgtttattactttggtaagcttttattttatgattggaggaagtcttgctttcatttatctattgcttgttttgtcatcaagtatcccttgggattcttgtgctctgtttttcactaacataaaataatagtggctaattgtcatcatggttatgcacgtataaattttatattgtatcaaaagtccagttcaattggttcagcagtgtacaggtaagttgttttaaacatcctggtatcaagtttgattccttatgaaccaaaaaagaaaattatttggttgaagatgagttttagtttaaaaaatgaatgaagaaacatgttgtttattagattttttataatttgcaattataatataccaaattggacattgtatgagcag

SEQ ID NO: 17661 - DNA, 884 bp, Glycine max
  Intron number 3 from transcript Glyma07g18460.2 (locus Gly ma07g18460) derived from phytozome v7.0 (chr-ID Gm07; pos 18403488 to 18404371)
ctactacgacagggaaaagaaacgacatatcgaaggtagattactatggtgagtttagtttttttgtggttagaaatgtggtggtgtcgttgttaatggcatgtttattgtttgcttatattattgctggtagtttagtttgtgcattttgcaagatgaatgtatatttttatgtagttaatttcataataaatgcatattttaatatataaattgtattaaattaaaattcttaataaataaacatctttgaatatataaattgtatttggatttacaacaaacaatttaaattgtgatataagattatcttttatgaaaaaaatttaaaatttaaaatttaatttagaaataagatataaaagagtagatcaaaaggaatagacagttaagaaagtcaagtttaaagtttgagatggttgagagaattcttttggcttgttgctggagtagtacgtgaaatgtacatctaaaggagagaagagaatagaagtgagaatgtctaattgagagtagagagggatagagtttcattatgcaagttatgtattttaatttataaatttataataaaaaagtagatatgtatctttttgagtggttgttaaaaaaattgtggcatgtttctttgtgtatttgttagaacattattagccaggtcgaatctagtttgagggtgaagtttgtgtacagcagtacaggatatacagtgccacatatttgggttttatgggtggcatgaaaacaaatcagatcaaatagtcctgtttcctgatgcatttcaatttgattctgaggtactgtgatgttttcttcttccatctattgattcaacttttattgctgcagggatacgtactaatacggaggctgttaagcaggga

SEQ ID NO: 17662 - DNA, 666 bp, Glycine max
  Intron number 1 from transcript Glyma05g33980.1 (locus Gly ma05g33980) derived from phytozome v7.0 (chr-ID Gm05; pos 38461507 to 38462172)
gatcatcacaaaaaggttcttctttttcttttcttctcatcgccccatctccggtttgcttttttttaatgcgatctgtttctattatctttttgttttattttttcgcttattcgctactgctcaagtttcgtttttttccacacccacgtctttatctttttctgtgattattttatcgtttaccgggtcgatttggttctatccttgtttttctctctctaaaacaagacgccaaagcattacctgatgcacaggagatgaggaatagtctgccatgattttgattaattcctttcccaggcacttttcttcatatactgaggaatcaaggtttgaatttcggcatagatgtgtcaatgtcttataatgtcattgcctttgaaggttgaaacctgttactgtgacacaccaaaagaaaaaagctctatggtgtgtgttctgatatgatatatggcatgttgtgagatgaagtaccgaattgaatgtcattgccagtttatgtaaatttgatacattgtgttctttgttgatggattttatgctgaatagagattgtagtaggtcacaagaagagatccaatgaagttatagtcttcaaattatgtttctaatggtttctggtgatcaagcagggtgcaccagagacagagttttttaccgagt

SEQ ID NO: 17663 - DNA, 862 bp, Glycine max
  Intron number 2 from transcript Glyma13g17010.3 (locus Gly ma13g17010) derived from phytozome v7.0 (chr-ID Gm13; pos 20838883 to 20839744 reverse strand)
gaggttcttttccattccactcacactcactcttttcatacccattcaaatttaactctttttcttttttctttacatactcactatttgttgcatgtaatgtaagttaaggtttctatacatatataatataacatgcttgaaattggtaagcaattagcgagatacatgttgtcaagttttttttttttttatcatgaaggatagtttgaactgaaaaacctactggtggttatatgctaatggctaataaagcaaagcttagggggaatttgtctcttttaaaccatagggaggcagactgtaatttattcttatttttgtgtaatttgctagtgtaacagttagttttgtttatgaagatatcaggtaggagatccatatttgttactcgtgtctgttgccttatgatcaatgttccaagaattaccttgttagattagattttggaacggggggctataagaataccatacttcaattcatgctctctgacagcttaagacttttaagtttgtaaagtggtttgaaaactagttattttttaaattttcatttgttattttatcatgcatggtctgggaattagattattttttttccttaatttggccgctgttgactattgtttttaatcctgcctacatggttaaaaccatctgctgcgaacatacatgaagtgcccaaaagaactctagaattcgtagtattgatgctctatgaaatttaactatttgaatacatatgatactactagtcaattaaaaggttaatgttgtggagtttttgtttactagtcaattatttacctgtgatgactacttattcaggagatccttttttttttgggtgcagttctata

SEQ ID NO: 17664 - DNA, 704 bp, Glycine max
  Intron number 2 from transcript Glyma14g03380.2 (locus Gly ma14g03380) derived from phytozome v7.0 (chr-ID Gm14; pos 2169093 to 2169796 reverse strand)
aggtgtgcacttctcaattttactagtatatttttgttcgtctcagaaatatcaattattgcactaaaatgagttgagcgctagttacttgttaaaaggattgcaatgaggctagatttctatgttgaaggattctagaggatttttttttttttttttttataaatattatactgctgggcttaacttgtgcattaaatatgtttaagttatgtagacatttgaagaagggtagacgtaatgctacatgtagagaccctgttaagtgtggatttgactacgggaagtcatttatgcttaactatctgttgggtagatcacatcatttctctttttctgtttttatttttattgactatggaagcaaatagtttttcttaaatttttgccacccatacgatggtatctggtggcgtaggggtaggactgtagataaatggagtgtactcgagtcatatggtgcattatttctgactaacaacctaacattagcacacaggaaatggtaaatgaggtgaaaggcattgaagtttggacatttggtgaattatggtcttatgaaagcccctttaggaaagaaatacttgaacaaatatttgtattttagcttccaattgctgtcttattggacaatggacatggaggtttgagtttttgtactgattgcagatttttgagaagaatcctaccaagattaagaatta

SEQ ID NO: 17665 - DNA, 1021 bp, Glycine max
  Intron number 2 from transcript Glyma14g02610.1 (locus Gly ma14g02610) derived from phytozome v7.0 (chr-ID Gm14; pos 1618677 to 1619697 reverse strand)
ctcatcccctcccaatacaccggccctgtttttgcgtcagttctgtcctctttgctctcaatttttctttgtttagggtttatgcttctgtagtgtaggtctggagattggtaattaaattaagaagaaaaaaagtatgcactcatagtttaaaatagttttacatcatcatccaatcacaaatcacgatttttacaaaactatacacagttcatgcatcaccattaaactcttaaattaatgtcattgcaatctctagagtatgtgaaagtgtaaggtggaaaaagatatatcaaacatggacagagattcaacgtttactggtgatatgatttaagtggggaacaatacttattgcatgagttatcttttgaagttctaagatggcattggaatcttagtgattgtactcgctatcaggtgttgttattggatcacctacaaatattcaatcttgcaagctataagttatgtgtaatccccggggtaagcatgtgtcttggagatctcatgttaactagtgatatgaccaaaatagtacatataggtaggaagaagcattgaaattttttgtagacattaggaattttggattaaaagaatggagatgaagtagaatgccctccactcagaactcttgttttttttatagtaataactattgttgaaaatatctctaccgtgcgagttacttcatttcgttttggaactcaattgtgagtgtttaattaaggtcaacgtcaatgatatgatgtgattgattcattttgatgttctttccctggtgagaaaagataggctggactaaggagaagaaactgcggaattgtgttttgcattttgggagaagaaaaaatttcttacttttggaagatgcgaatacgcgtgttgtcctagaatgcccgttttgtgttttatcatatacctgttaaatttcgcttggaaattcttatgttttgtgcagcaggcatttttttttatatagttttgactgtcttttctgtaaatgacagagaactag

SEQ ID NO: 17666 - DNA, 890 bp, Glycine max
  Intron number 2 from transcript Glyma11g35930.1 (locus Gly ma11g35930) derived from phytozome v7.0 (chr-ID Gm11; pos 37502034 to 37502923 reverse strand)
gttttggaggtagcgggccttggataccgttttttgtaagttttttttttttttttttttttttgcatcttggacttgtgagtgtgtgtttgtgtcatttttttttattttttatttttacatacttctccgtcaagtatttaaatatcgaggactcaatctcaagactattagttaaagtgaaacaaaaatcctgccttggttgattcacatgtatatcgtaacacattcgatttattagttccaaaaattaaccattggatgcaaataatgaagtggaagtcaaattttgaagtaaacacggttgatccagcttaattcatggttattagttcgagtatgcatttgacttaaatacttggtttatagtaatcttatatgtttcaaatatgattgtctttcttgatcgataactatggcctatactagaaaaaaaaactaggttgtgcattttctttaacaaagcatgaatgcagttgcataaatattttagatgttgtggaattaaaattagaatttcatctcccaagttatactgcaatgcaaagtcaaattttggagtaaacactaggtggttgtctttttttttaacaaatctttattatgtgaaataccaaaactccaattcaagcaacaaaatgatgcaaaaacatgcaactttttttttcttttcaattataattttttttaaaaatactttaattatttatatttgtttgattacttagaggaatttggttgcacggttaatggattactaatatgatttaacgaaggatagttctttgtacattcttgatccctgccccgtgtgttagtttatcttctgatgtagaagaagactatgattagcagaacaacattgaagattttgacctaaagaaagtgga

SEQ ID NO: 17667 - DNA, 266 bp, Glycine max
  Intron number 2 from transcript Glyma05g36260.1 (locus Gly ma05g36260) derived from phytozome v7.0 (chr-ID Gm05; pos 40106735 to 40107000)
cagctattgttcgttctcgttcttttcttctctttattttaaatgcacgctaaatgtattgcttttcataaattcagataattatggttgattacttttctaataattgttttaaaagttttatctaattggttcatagtttaattattattgtattgtgctcacaagctcgatcattttaaagtatataagttagtgattttgatttatgcttgctattggtttttgaaggacgttgcaactgggaattctatcctatttgctcc

SEQ ID NO: 17668 - DNA, 567 bp, Glycine max
  Intron number 6 from transcript Glyma10g29470.1 (locus Gly ma10g29470) derived from phytozome v7.0 (chr-ID Gm10; pos 38327840 to 38328406)
agcgttcttctctttctaagttgtggtcaagtcttttgttctggctagacgtaaaatggtccttaagtttgttgctgcaagttgcagttctttttccttctcaataaaaggaattctttcaaagccttatgttaaacaatgtgtatcacttaaggaggagaacagaaaattgaaggatagattcttggataggtacatatgatgcaccattcatttatgcactgaatgtctgaacttatagaaacaagtagtgagttggtcaaaactgcatgatgagactcaaatttgaaaatgtcaaatcaattgtatgtttttgttaatccagcatggcaaagaaaatgatataccatttctacctcagtatttgcaaaattggagtgtttctttctttgatacatgaataatttccccctttgcaatgggaacttagaacttcataattctggatttattacatagtagtgtggtattcatgttagaacttagaggcaaatcatattcatattaattattctataactcatttttgcagctgaagttagctcaataccgattgtggacaataat

SEQ ID NO: 17669 - DNA, 630 bp, Glycine max
  Intron number 3 from transcript Glyma06g02100.1 (locus Gly ma06g02100) derived from phytozome v7.0 (chr-ID Gm06; pos 1381043 to 1381672 reverse strand)
tgccccctcaattttttgctgtaacaattaccactgtaagatgttacaagtttttctcttcttgcttaactcttactttcatttttaataagcaattctgcatgttatgatggttatatttggctgaataggccagccaacctcttggttgtttgatgaaatgtttctatggagcgggagactttgctttgtttgatgtacttgcccctgaaatttgtgttttcaatcactatccccctttatatcatgtcacattaagtcatatttggtttttgaaatttgatttttttttctttcaaaagtatgcttatttcctttgggttcccccccccccccccccccccgtttattaactttgtgttgtaacccctaataacagagccttttataaattcttccccctagtttactaatctgaattaattgaagaatattatcaatactaacaactgttctggtgttggaagaataacatatttttagcacaagatggtccaataagcaatgttgagccacgcggttgggttgaattgcagttattcctttttatttattttgctccatgcatcttacatatctcaggggaatcatttggctttttattaggtagctgaaaaccttgcacagctc

SEQ ID NO: 17670 - DNA, 475 bp, Glycine max
  Intron number 1 from transcript Glyma06g02100.1 (locus Gly ma06g02100) derived from phytozome v7.0 (chr-ID Gm06; pos 1381896 to 1382370 reverse strand)
gcactttggtacttctttttcttactctttcaaattcagtattacccctatctcatttttttatatattatatattattattttcatctataaaaaaattagttaatgaattgtgagtgaaaacctcttcgaatagatgaatgaatatatcaaatatttaaactctcctatagaattggcgaccatgtgcattcatgtctgtacacctactacttagtgtggtttatctttcatatttctcttccaatttagtttattattgagtcattttatgaaatcctactaagtttcttcagcattatatgccctagcccaagtgattattttggtagatatataaaattaaaatgggatctgtcgtcaaaataaattgttcaggaaacaagtgtctatctctgtctgagcagttatctgactagtgattaaatgttttgaaatcgaaagtcaaagagcaggagagaaattttactggaat

SEQ ID NO: 17671 - DNA, 757 bp, Glycine max
  Intron number 1 from transcript Glyma06g00290.2 (locus Gly ma06g00290) derived from phytozome v7.0 (chr-ID Gm06; pos 101091 to 101847 reverse strand)
gagagggttagagttaggaggagaaatgcagctgcgattagagttgcccatgcaggaggcgaggaaaacaacaattggatgagaatgctgctgctgctgctgctgctgctgctgttgttcattgaccactcactcaatcactccttcacagtaattcaactcacctgttctgtaattggatcagcgaactcgcataataataataatattaatattaatattagggtaaattaaattgatgatccatcatagcacagtcacatacagaagggaattggttgattgattgagatcataagagcaataatagaatcaaatataatagaataggttgggaaatgaatcttaaccttatctgtcagtcgtgaacaagaagaagaagaagcaagcagcaattcaagaaaggaaaccctttttttcctttccttttcgcatcgcaaatcgcaattcgcaatctccgacctacctctctctcttcataaatttagttcaataatttaataacaaatacaatcaaattcatgcacgtctcttctccactgtaaaactggataggttggttggctgggctcttcctcgcctagaccaccctcatatttatatataatattagttttttatttttattttttaataattaaaaaaaaaacaaaaagaattattacagtatttttttttagttaacataaaaacggcgccgttttgatttggatgtattgaagggggttgggcaaggtgaggcgaaacgaaagagaaa

SEQ ID NO: 17672 - DNA, 975 bp, Glycine max
  Intron number 1 from transcript Glyma08g25560.1 (locus Gly ma08g25560) derived from phytozome v7.0 (chr-ID Gm08; pos 19846705 to 19847679)
tttcatttttctcttgtttccaccatttttctaaggtccgtttctgccatatattgctccttttgtttttttggtcatctttcactttatgggtgttcctattatgttttgcttaattgatttgtattcttttttacttgttctctaaaatttgtgattaggctcctgattgatttgggtctcttgtagtttggttcatgaggaaactcagttcacatttttcttttcaattttatttgagctgtgcaaaatagtacaaaccgaaccaataagatgttaacacttaagcacacaacaaaccttgtagtttagagaaacagaagttgaaagaaatgggttttatttgagaatatatattattcttcaagtaacaattcttgtggagattcttaattcaggtgttgcaatacagataaatagttttcggtttattttggagaattaataattttcttttgaaaaccctcttgaaaacttgcaaaaaagtgtgattttttttttcttctagatgagatgaactaaatatgcatcattagtttgttttagttatatggctttgggaactatcacatattcacatactcatatttcataaattcttcaaacgtgttttccttatacaaaaatatttgtttaaccagtgaaatttgtactactgaacctgcaatatgatgctgatatctgtgcattgtagtttagtttaacagaaaccattgttgatatcattggaatattgacaaaaatgttggagctatgatatcagtcattacttttctgtgtctcatctgatgtagaaattaaaatactatgaatgtagtttttctgctcttgcattgtaggatccaaagtttttgcattatggttatggtgttcttcatatcagccttccagttaatttattattcttcaagacattgacacttttatatggttcatccaggtgaccttggaactggtttaattcaaagacactta

SEQ ID NO: 17673 - DNA, 1051 bp, Glycine max
  Intron number 1 from transcript Glyma07g08240.1 (locus Gly ma07g08240) derived from phytozome v7.0 (chr-ID Gm07; pos 6843020 to 6844070 reverse strand)
ccgacaccgatcgggtcctcgacgaactcgaagaggttccctcttattcatttctaaactcttgagttttttattttatttaattttcgtacactcaaattatcttaaatatatataacactggcccgaagatgtttggataaaattttatgtaaccacttaaaaggagaaagaaaaaagaaaaaaaaatgaaaatgaaaaaagttttttcataagctaaacaaaaaagaagaaaaaatgaaaatgaaaatgaaaaaagttttttcataagctagttttagcttaggcacgcatgttaatttgtaaaagctctagaatttgttagttgatttaaatttattcgttaaaaaaagagtatatttaaaaaaaaacactttcttttttagttttaaacaaactaactcattagcttctccaagagcttatttttaagctcatgcataagctaattataacttatgagaaatttatttcatttttgcttcttattttttctctctgagtatttatggaaaaattgatcaaacaaatcatgaattaactggcacgtggtcagttgcattgaacacttggagagaaaacttaactttgttgtttgtagtagtgttatagggtgtggattagattcaattttcccagaatcaaatccaattccgtgttgaatgtcaaagcaataaatagttgcttccattttttccatttttcatcgtgattttgtgggctacaattgattctggtagctatccaaacacactctgccactactgctcggctcaaccaaaatcaactctcctgcaggatttatctcatacaaaaaaaataaccgtaaatattatttttaaagtaacattataaaactcaagaatcttaacatgcatggtaaataggtgtttatggtaattaaattattttatttacgagtttaattttcacaaattactagtgtaaccatttttacattattcaaatcattgcattttaattaaattatttatttgtttgttggtttattgcaggctcttttagtgtctgattttggtccaagaatcac

SEQ ID NO: 17674 - DNA, 990 bp, Glycine max
  Intron number 4 from transcript Glyma06g19870.1 (locus Gly ma06g19870) derived from phytozome v7.0 (chr-ID Gm06; pos 16217035 to 16218024)
tcgtctgagaatatcttgaccagaattgataggtaagctcttgattaagataagatgctgtttggttttaggagatataagcctttatttttgtttgaattctttgatataattgcttgatttatgtgatgatatttactagatttggatgatgtttgttgattttacctatgctaatggtttggacacgattcacatctagacttgaattgcattagtggaagacatgatgaacatacttttggatatgattagatcacctagggtttggacaggattagggcacccagatcacatggtgtttagccatgtgaaaaaggaatggagagaggagacaatgatatctgaggaaattattaaaagagtcaagggaatattatggtgaataatttggattttgttacaggtcaatgatattctgtattccgggtagttgatctcacctaatggaataagattgttgatgttgcattagatccccatatactttctcattctaggttggttctggtaaaattcatctgttgagacttaattcattaatagtctcatcatgttagtcacatggagtgttttgggaacatgttgcttccaacttgcacttgtggctacaatgattgaagcatatgaagaaatccagattcccacttgcctaacggtcaactgttgtaaaggaccctgttggcatggaagcaattattgtcactataattgccacataatcatacatcttatcaatacttctatgcatctatacatgaaattattagccaacaccattaggctatgctcaccctcagtgtttcaatggattatgaatatagtttgttaatgattacttcaacatttgaacaaagttcataccatattctttatctttacctctcaaatttgataattattttgacttgtagacccaattattcattttttttttacttttactgattggcagttgcttggaggaaggagcagaggagtttctgttga

SEQ ID NO: 17675 - DNA, 851 bp, Glycine max
  Intron number 1 from transcript Glyma06g10340.1 (locus Gly ma06g10340) derived from phytozome v7.0 (chr-ID Gm06; pos 7830739 to 7831589)
gtcggagctctcgtagttgctcctcacagtcccaggtgtgttccctttttctgtctctctatcttttgtggtaagctttgattggctcctcccgaccgcataggttcgcatgttgcgccccacaggagccaggtcctgggctgaaatcacgttcagtttcaggaactgaacggtgccaagatttgagacatttttttttctaatttctatatgtatgtatatatatatatatacatatatgaattaggtagctagcgatgcaatgcaggcaatgaaattggttattggatgcatggggatgtggtggtgatgggattgcattatttgagtttgtaggagcggacgtattttttgtagagtttgtcggcggttttggagcgtttgaggggtcggatccaagagaagatggaggagatgcggctgcgagtgcggggaggggtggcactcgcagtattggtggtggtggtggtggaccagggagggcgtgacatgaagaggcaaaaacccaaaccctaacgacacctaatcagaggggccattcatttgttttcaaagcgttggttctcagttctcaccgctgttttcgcttaactccttaataatctaaaaccaccaaaccatattgtattacagaccctctccttcctttttttagaatgcatgcataaaccactagacacacatcttaatttcttccaactgccaaacaaggcttcggcagggtggggtaaatggataactaagatcatatgatgattcagtcataaattttataatatttatattttttttctctctaagtatcttttaacaccagtgttattttagattgtcaaaaattgtggcaaatc

SEQ ID NO: 17676 - DNA, 488 bp, Glycine max
  Intron number 2 from transcript Glyma13g34900.3 (locus Gly ma13g34900) derived from phytozome v7.0 (chr-ID Gm13; pos 36398180 to 36398667 reverse strand)
cgctcaagaagaaacgttctaagaaattatcaaaggtattctcatctttcttcttcttcttcttcttattattattatttgaattttagggtatttaatttttagtttcagattttttctaaggcaatctcattaattttgattttaggaaaaataaacaaatgttatgttttagttattgcttgtgtttgtgaactgaaatttgccattttttgtgtgtgaatcatgtacctaaactgactaggatgcttttttttttgtggggtcctaggttttttttcctttttcattgtaaatgtgatgattatttatatacaatttgggtttttgagttttccaaccggagcgtatgtagtttgttgagttgattgatttaacagggtgtgcattttcctgattttgtcatcactaatgtaaagtcatcttgattttatgtctaatttgatggtttaggtcaaggcaagcagtacaattaagaagagtaggaa

SEQ ID NO: 17677 - DNA, 350 bp, Glycine max
  Intron number 4 from transcript Glyma10g16760.1 (locus Gly ma10g16760) derived from phytozome v7.0 (chr-ID Gm10; pos 19872082 to 19872431)
cttgagctttataacgaagagataactgatttgttgtcccccgaagacaattctaggcctacagacgaaaaacaaaagaaacctataacccttatggaagatggaaaggataatgtatttgtgagaggccttgaagaagaatcagtatacttttgaatgaaatttatactctgttggaacgaggagcatcaaaaaggaacactgcagaaacgttgcttaacaagagaagcaactcccttttccttttattgaagttgcagaagaaattcatgtttgtaggaagctattttatgcttatttaatgttattttggtgcagtcgttcgcattcagtcttcaccattattgtgt

SEQ ID NO: 17678 - DNA, 675 bp, Glycine max
  Intron number 2 from transcript Glyma07g01860.1 (locus Gly ma07g01860) derived from phytozome v7.0 (chr-ID Gm07; pos 1263887 to 1264561 reverse strand)
aagttcctcaaaaagttcagaaacagaattgacaagtgagtctagtcttttgatctttcacatgtagtgttctcccttcctcaccaacctaccccacacgttcacacatacaaaaaatttcttcaaatagaataggaaaggttttatctattcatctatttagaaaaccttactcttatgattatactttgtgccttcttgcattttatcccaccatattatcatgttgaatatgtttttgtcatttgattaagacaaaatcaagttaaagaccaatttcatgttgcttctacgcagtagaggggggcagatctacatatgaatattattgcaaatttagtttaaacttcagtccttaatttattaggatttttgtcaaagctattttttccttaacctttgaaaatcaatcgtcatttttcaaacttgacattgtcaaaacaaaatagacatcgaattaaaagcacgcctaatacgtgtttttttgtgtcaatacctaatacttgagtggatgaaattgccgctgatgaaggtgaaatcagattttagaactaacgtattctgtagacaaggattttgttcaagttgttaaccaattggaagaatggtatttatttcttttttgttttaccaattccagggttggaatccgacttccaacagtagaagtgaggt

SEQ ID NO: 17679 - DNA, 271 bp, Glycine max
  Intron number 1 from transcript Glyma07g01860.1 (locus Gly ma07g01860) derived from phytozome v7.0 (chr-ID Gm07; pos 1264874 to 1265144 reverse strand)
tgagtagaggattctcttactccttgttttgccatgtaagtgtttatgctctttcatgttttctctctttggtttgctagagatatagaagaaaaaagaacaagagggtgttttttttttttttgttcatgtaaatctcttaaaggaaacggtttttggtttccttcaaggcttgattttgaataagtaaagcacccatttttggtttggttctgaaaagagtaatatcatgtttaaactttgattctatttcagcacaaggggaggcaaa

SEQ ID NO: 17680 - DNA, 968 bp, Glycine max
  Intron number 1 from transcript Glyma05g33920.2 (locus Gly ma05g33920) derived from phytozome v7.0 (chr-ID Gm05; pos 38426523 to 38427490)
cgccttgagctgtctcagcaagaggcaaatacaaggtccgtgttccaaatatgtttttatttttttattttttttatttgtttcatccttaggaaacttctccaacttctaaagccccaacagatatttatgacattgaaatacattttaaaaagattcccatgaacacaaaacttatgaatgccacaagttctctgacaaaacatgccaaaagtccattatttggtgggtgcacctgtacttatttatcaacaactttcctgtaattttttgaagttactaaaaactgttttttttttttgatttctttaagaaaattgactatcctaagaatctgggcttgtacaagccttataaggattacattggtgatatttctagtagatgtgagatttcaacagcccctgagaactgacattttggtagttgtactctatgacacttcagtcagcctttctgatatccctctataggtagcctttttgagacgtgtttggacctgttgagctattgatagcaggaactcaccacactagaacaagttatggagagaaagagagaagatttaggcttttgcacaaaagatgcacactcactctatctttgttattcacacttttctattttataacaactaatgaagttatttagatataactaacttttatgacagaaaagtaactactaacaattacaattaaattgtttaaattggttcacaacgggatcctcatcctctatttaatggttatttaattgtgaaatgttaatatgctattgtagactgtagaggctgcggggctgttgagaagacagttaatgcaattaagaaaactttccaacaacaatcttcttacattcatcaaaattatatagtcaaggttacattttagttcttttattgatgactgatggccttcttgtcttgcataggaacgttgagaaggtggaagaggtggtgcttccta

SEQ ID NO: 17681 - DNA, 778 bp, Glycine max
  Intron number 2 from transcript Glyma09g03440.1 (locus Gly ma09g03440) derived from phytozome v7.0 (chr-ID Gm09; pos 2427071 to 2427848 reverse strand)
ttcaaggagcttccagaggaattggcctcgaatttgtgagattcttttcttacttgcacatcaacattgcttatctgggcactgctcacattgtcaaaattttcatgttagtgtctttgttttttttggttccgtgttatacagagtatccatcggctttgcggatgattaacacctttagtttctatgattctagctgttaattactataactgtagaatgggggtaacaccgtaacagtaattcactcttacttttagtatgttgtgtttactttttttcatattgtctgtgcagtggtactgtagtagcattacaataattgcagtcattttataaaatatttctaaagcagaacaaaaattaatttttcaattgataaattttcttaggggctaaagatcaatgaatccattacaagttgatgattcaagaatgataacaagccttttcataatcttcacttcagcactgctgtgttggctgttttagtctcatgattggttttagtatacctttctatattagtttattagtaaagctatgaaatttgttcagttcttttgacaaatatatgatgcttggacaccctttttcattcgaatatcgtgaagctatctgatgaattatcctttaattcacctccactggctccacatatcaaaggagtcatcaagaatcttggttgtgatattattaatctaataatattgctgacacagttttaacactgctttcagtttcttccatctacaggttaaacagattttagaatacg

SEQ ID NO: 17682 - DNA, 1008 bp, Glycine max
  Intron number 2 from transcript Glyma12g04020.1 (locus Gly ma12g04020) derived from phytozome v7.0 (chr-ID Gm12; pos 2636468 to 2637475 reverse strand)
gaagcattaagctcaagtaccttaaggtagtgtaacgaatccctcgttttttttaattcatacgatctttgactcccttttgtgttattttgctatgcattttttatttgtaatttaaacgatctagagaaattcatgatggaatttttatagaaaatacttataaaccaatgttgatccgaattgcttctcacgcgctttatttatccctgcattcatgttgagttgggtgaatcagtttttaggtgcgatggtgctaaatttggctacccttcgatccaatttgattgtcgaaatgattttaggactgctttcttttctggggtttcgctccctagcctacaactaggattgataacctttttttttattatttggtttctgtcaacgtagtgtggatgatgttttagggattttaattcttgtactgaagaacacagatttattgttgttggtttgattaatctacgcctcagcttgccgatcctttcgtgactgattctactctacttttaggctatctactgccttagcttgaattaagcccttttgccaggtcaatttgttgagtggtttactgatattttcataacgatcttgaaatgagtgataaatagtcccctgatgttgggaaatgcttatgtaacgtgttatatactagagctttgatggttttaatctgttatgaattttgttatataattttgtaatctttgtttaattatatcattatatggcatgtaatgtattgctgtgccatgtgttatgtttttaatgcgttggtttcatagtctgatagtgccaaatgcctcccattcttacatttgttatttcttgataatgagagatatttaggatgcttcaccttacttctacatatcttaatgttgtactgcactttgttgaacttctttgctttttgctgtgtaagcattggttttttattctcttatcatgtttgttttactttcaggcaaaagccaaatctcatcagaaagctcaggagaa

SEQ ID NO: 17683 - DNA, 924 bp, Glycine max
  Intron number 2 from transcript Glyma10g31540.2 (locus Gly ma10g31540) derived from phytozome v7.0 (chr-ID Gm10; pos 40022318 to 40023241)
ttcttggaggacttccaccagcgttggctgtatgtggattcatcattgtcttaattctcttacctgttcttactttgatcttcttaccatttatcccttttaatttcacgctttcacgagttattcttaatctatcattaaacccattaaagcttagggttaaagtgcaaaataatacaacaaagattgatccaactgttaagaaaataactcatattctacaaggatttggattcaatttctgctgctgatataaaaatcttgatactgaataatatgtaattatttttgtgtaaatatacattgaatctcgaagtctgtcagatcagtcttcaaaactcaacttacttaaattttttgtcagaagaaaactagaaaataatatatttccatagatcacaagactaaaataagtacaaataaagtacaagaatatggtgatcattaaaaaaatacaaggaagtttggtgtgtgcctgtcatctagaggaacaaatcacgtaaagtttgatttatttgattttttaaagtcaaaaggtgcaatttatttattattagtagtagtccttacatctaatctaattttaagaattcaaaagtaataaaattggaaaagcaagtatatattacatcataaatataaatagtggatgcttttttcctcaataaaatcttacattttttagttgattaaaaaaaacagaattgaaccctgagacctatgtgtgtaaaaaaaaaaaaatctattaagaaaaattaactcaaataaataaatcgtactatcaaagaattgctccttaacttccaagtggagatgcctggtttcatccaaaaaaatagacctgaggattaatgttaacattcttcttcttattatctgatccctgttttgtgctaattaatatagggaaacggacaccgtgtt

SEQ ID NO: 17684 - DNA, 1028 bp, Glycine max
  Intron number 1 from transcript Glyma13g29190.1 (locus Gly ma13g29190) derived from phytozome v7.0 (chr-ID Gm13; pos 32139809 to 32140836)
caccccaataaccgattctctctctcctctgccaggtaacgtaaccatcaccttctttcttcagaacctcttctcttctcgcatcactcaataattattcattatctcaccttgcggaaatcttattttgtcttttcttctctaaaaataattatttttctttcacttgtttttataagttcaagtcaacaatttttacactgatatttttcatacttaactatgttataaaaagtatgcatgcctttaaataaaaaataataattttttatttgtaatccatgcatttcataaaaaaagatttgtgttctgttcttttaaaatgctttcagaagtaaaagtaaataatttataatttttatgaactaaaaaaaaattaattatacaattcatacctttagcagaaatatagttaaactgattttttaatatataaaattttaaatatcgatagggagttaaattggtcatgagttttattttttttatcactcacaccaatttttttttttaatttcttcacttagcttaaagaaaataatttattttttagatttatttgtttttattatttctgaatgtaacattaatattgtattttttatttttacataaaaaatacaaatcataattttagagaaaagttaacttaatcttttaatagattaagctttaaatatttaatttttacttcccaattataaaagaagttatttggtattttgatgcattttttgtaaacaagttaaagatttatgtatttatttatcctttattgtatttgaatgcgaaaattaaaaaaaaatcatattatgtttaacatttgaaaaataaataaaacacaatctgaaaaacaaaaaaaaaaaaagggagtgcatgaacatggacttgactgtgagattatgaaggggggaatagaagtcaagtgttttgttgcgtatgagaaaattaggtttggtgtttgttgcactaataatgatattctcgttacaggttttacgcggctgaagtactggttgcgttggagt

SEQ ID NO: 17685 - DNA, 641 bp, Glycine max
  Intron number 1 from transcript Glyma10g09780.1 (locus Gly ma10g09780) derived from phytozome v7.0 (chr-ID Gm10; pos 9112529 to 9113169 reverse strand)
cggagtgcagccgtagcagcagcagtagaagtcctgtaagtgcaaagccacaccttccaaactcacattttaattccaattgcgtcgataatatagttagaacaatgttatatcaattttcttaatgctttcatcattgtatttttatacattttttaatgttatagtcaagattagattgatcctaagtaggataaaaggattatatactgttgtaacacagaggaaaacacttggctactggtagctttaatagaaccacagcttgcagtagaagcttcatgaagatgcactttttattgttgttaattttctgtgctttttagggttctgagaagtagtgtttttttggcagttcaagggattcattctattggaagttaattgttcactaattaatagtttctattgcatatgatagtcatctaatacatgttgaccctgtcgtattctttgattccctaggttattcaactgatgagatttctgcttgcggtagtttaatttgatgataggagcaggacctaagaatatgtatttcaatttttgaataatattttatatgttcctcattattgttttctgttttggacctttttcttcttcttttctagtgaagtgctgctctagtttgaggcaca

SEQ ID NO: 17686 - DNA, 353 bp, Glycine max
  Intron number 1 from transcript Glyma06g10380.1 (locus Gly ma06g10380) derived from phytozome v7.0 (chr-ID Gm06; pos 7872859 to 7873211 reverse strand)
cgccacacccatttgagaggatcttttttctagaggttcgttttttcgcgctaattttttccacttcttgtctaattattattgtttgtaattagtaagccccgctttatcattgagggaatgttgttagttctcgcgcggaaccaaaaagtttctggtttttctcttcctgattctggtggcgggggaacgagggttttccctttttcccccttccatttctgcgttgccctataatgatggcggtgttcttttgaaattggatgtggataatatttatatattggatgggttttcgatgattattgatgttctctatattgattgtagaagccaacccaaagtgtgttttc

SEQ ID NO: 17687 - DNA, 772 bp, Glycine max
  Intron number 1 from transcript Glyma11g18940.1 (locus Gly ma11g18940) derived from phytozome v7.0 (chr-ID Gm11; pos 15547408 to 15548179)
atttcgacatcgttgtcgtgctcctttaccctaaggtactctcctttctctctcgccttgaatttctgtacggaggcaagctagagattttattattgcgtaaataacatttttatttatttatttgggatttctgtgaaatttgatgtgttgtggtaaagggttgcatcagtgatttagctggtagaagtgtgtaagtgtaatgaaccctatcttagtacgtatctgtaaatttgtggcaggaaggtgcacagattggtacgttttgtttggaaactgctaatatttttctgagattggacacttcatgattcttctttttgttctgccttctcgttcctttgatgcctaattgtttgttcatcaccttgcatcatttgagtagaaatttttcatatttacatgattttctttgcccctcgtttggctttgtgtaaaatagaagagcttgtgctcaccaacatgccgtttgaactcgggttcctttcgccgccttcgttaatctcttttttattgtttttgacttgcctgtctgccaatgctgttaattatcttatcattgtccctttaataaaagtctatcacattgctgccgtataagccttgtctgtctcattgcacggcttccactgagattcattcgctgcaaccccttgtttggcctttctttttgtttcctcctttcgatatgtgtatacttcttcccaggaattcttctggcctctgtgccttcttcacagttgcctcacgcttatttcgttagtttcataag

SEQ ID NO: 17688 - DNA, 502 bp, Glycine max
  Intron number 1 from transcript Glyma11g36980.1 (locus Gly ma11g36980) derived from phytozome v7.0 (chr-ID Gm11; pos 38246623 to 38247124)
ctaaacaagataattcccccctaggggcatatcaggttgggaattcgcattttgtaaatgatatagtcaaaactaatttacacttaccacttgctatttgctaagtacatattttctttgcttgtttaagtttttggtctagcaggaaatacagctgacatggggatagaacaagtgatttaatgttgtctttgaaaaattaatcgatgttttcccttaggaattagcagttcattcatagattctgtaaaatttggggatgtttcttaaactctagcttcttaatgtgttttttaatcattggtctaccccatttatacaggtattgctggtgctttttgcttctgccaaacactattccagtttctgtgatttctttgacttgtttaatatctctgataggatcttgttgtatttttctttgcttctggacaaactaaagcagttaacaattaatgttcgatttgaattgtagtttgcagatcacagtgaccatttgtgt

SEQ ID NO: 17689 - DNA, 755 bp, Glycine max
  Intron number 2 from transcript Glyma08g15860.1 (locus Gly ma08g15860) derived from phytozome v7.0 (chr-ID Gm08; pos 11546489 to 11547243 reverse strand)
acaagggtatgtggcgttcacctcttatttcttgtattctttctttctcttcagttgttttttaacaaattgaactgcattaaagtatggatgctttggatatgcaaagctgtcttaaatagttgacaatgtgatttttgacttgaaggttgcctcaatataaatcattgattattaggtgctacggctgatggctttatatatatatatatatattaacactgagcagttcttgctaggattttgttacttttagttgaaatcgttatgggtttgtagatagataaataaaatgctgtgttctattcattgaggagttttaatgtatgagtaaattaaagcagatattgagctgaagtcgtttaattgaggaaaaatgaagttttgctgtggctccaagtgtaaagtgcacttactgacataaataaattatgaacataggtcataggggaaaaatggtgtatttgattattagatgtggatatggcaggtcctgatgacttctgcaactcaattgaatttagttttagtaaaaaattgcagtaattttattcttcagtttcactttagatgagtattaaatctgtatgaaatttttacatgctcgataaaatctagtgatatagctttgcattcctctatattcgtctctgtgctttcctcctctttacatttctatgaattaatgaagttaaagttagtttcatggctatcttgtagtttctcggattgtggcacggagtgagaagtgtgac

SEQ ID NO: 17690 - DNA, 601 bp, Glycine max
  Intron number 1 from transcript Glyma08g27660.1 (locus Gly ma08g27660) derived from phytozome v7.0 (chr-ID Gm08; pos 21977879 to 21978479)
gtaggtggagttcggtggcgaaatttacaggtatattacttttactttgattcccatatattatgaatattgcaccacgtacccctaaattattaaacgatagaagtaaaatttgggaatgtgaaaaacaaggagaaggtgaaaatgcagacgaatatatacataaaggttgaactccactttttgtacgaatatatttgttttttttttttttttgccaataaagtatataggtatatgggatgaaaatttcacgagatatatacgttgtatgagatgtaaaacgggtgtttgtgatgtataggcttctatatcttattaccctaaagtgaatggtaaaagatatatttgcaatttagttctcttatgagtgtgaatgaaatgtaactttaaaattgtgaaatttttcatagttatttttgtgtgacttatatgacacacacttaattttgataattaagaaggaaacatctatatttttcctttgtacatatttctcttctggcttctaccttttttttaagacagtgtcctaccttattaattctcctgtaattgaatttcaggattaaataggagcggcaaaagttgcaggttaaga

SEQ ID NO: 17691 - DNA, 647 bp, Glycine max
  Intron number 2 from transcript Glyma06g15860.1 (locus Gly ma06g15860) derived from phytozome v7.0 (chr-ID Gm06; pos 12473409 to 12474055 reverse strand)
cagcttgaagaggtatctcatttgccgcgattgatgtcatgaagatatatgcaaatgtcatgctttgtataatcaactgcaggaacatcttcctattcttgtggacattaaactaattcatattaaatgttgaaatccttccagagttcatagatgctgtgaccttcagggttatatagtgttttgactgttttccttaaattgagaggacgagtattactatctttctctgtatgtttaaactcttaattcataaatactactccctccagtcccaaaataagtgttatcctaaattgttttacaccgtccaagaaaagctaataaatagataaaagaaaataataatttaaagagaataatattagtattatattgaaaaactaaagtgaaacttattatattgaaaaaaaaattaatattatattgaaaagccaacatgacacttattttgggacaatttcttaccaaatgcaacacttattttaggacagaggagtacacacaaatgataaatcttttggtttgttcaatattttatttctaaagcaatttgtgatgcattgatgttgaatctgatgtgttatgaagttgtcttgtgcttataaatagcattttgctttttgtagtgtcctaactccatacta

SEQ ID NO: 17692 - DNA, 642 bp, Glycine max
  Intron number 1 from transcript Glyma12g34220.1 (locus Gly ma12g34220) derived from phytozome v7.0 (chr-ID Gm12; pos 37397045 to 37397686)
agagaataaaggtgaagatacatctgatatacaaggtaggagaatcttttttctgtttattttatctacatgcatttttttgccataacatgttctgctgatgaacatcctgctttaaattttagctgtaacagatgttgaaaagttcatcagtgtttttgcattacatagagacataattgatgtcttctatgacattttttgggatcatttgaggtgaaactgtttacccttgctgtttgaactgcaagtgatccatgtggctaattgtatttgagtattaagatacgaatgctttatgctaccccattgcaattaacatttatctaaatccacacctgtgctgtatcagaaaaatgttaagagaataaaatttgagctaaattatattccaagtacattgctgttatgcatgcagctcattattagaagtttccatgccaaacatgcatgtctcataatcagtgcatctgctatctagtaactagtaaggaaatatgactattaacataatgctgctttttctgcactttgatgttctataatgatagaaaatcttgtttcatgtagcacattagaaacttaatttgttcaacctatgttgcagaaaattatttattagctctttgtgaaagtgaacgg

SEQ ID NO: 17693 - DNA, 557 bp, Glycine max
  Intron number 4 from transcript Glyma07g37800.1 (locus Gly ma07g37800) derived from phytozome v7.0 (chr-ID Gm07; pos 42748147 to 42748703)
gttgaagacttttgcctctggttcttccaagacaggtattctattttcttattcagtgtcactattttttttagttgaattagaaatcactgttgatttgacttctaaggaaattatcatcaaagccaataaacttacaatatatgatagtttgtgttaggatgagagtggataaaagctttataatgcatggattattttatttttgagacttaattggtgtttaatcacatcggtgctggctatagcttttaaaagttaggtccgtaatctcttcaaattcattgcaatattttgctaaattcaattataccaatttattttgcataaggctcttttggggaggagggtgctttctgtagttaatgggagtgtacactatatatgctagccaaaacctatgcccatacactctgcacactttagaaaaatacgattacatactaggaattgtcctttatcttctccaattctaggtttatgtttgttcattggttacttttttgttttttgtttctgcagagaatcacattaatttaagcccttatctatcctac

SEQ ID NO: 17694 - DNA, 809 bp, Glycine max
  Intron number 1 from transcript Glyma12g22870.1 (locus Gly ma12g22870) derived from phytozome v7.0 (chr-ID Gm12; pos 24989219 to 24990027)
agggtagcgcagagaatagcatcaaaagcaagtataacgaagtgagtaaatttgaagataaggacaaagaacaaagcatacagaattcaaaaatgaaaaccgagggtggttcagagaataatgtcaagaacaaagatgttgaagatggtgacttaaaaaaaagcaaacaaacttcagacgtataaaatttatcagataaagctgcataataaagggtatagtgtggacagtaatatcactgaacaagcaaatatagtgaagactattattcaaacttcaaatagtgctcttatgttgaatatctctttacttgcagaaaaggatttcaattttgctgtaactgacaacatgtgctgatttttcttttgtttaaggtctaatatcattcattggttgctcttatattttcttttttttttccaatttgtaggtaagttcattgtcaattgtaagatggggtgtgtgatggcgagatagaagttgtaattttattaagatcttccttcctaattcaaaatttggcactcatatcactgaaatcagaacctcccctcctctccccaaaaaaggtaaaacagaccataagaaatacatcaacacccctccttttcgatggagttagattttaaaactgagttacatttttaaaactgagttagattttttaatcacataagataattaattattgtttctattcatgattaagatatacaacaactgtttcagatttaataggtgtgaaagaggagctgtaagcattgcacaaagaacctatttccttagtgactaatagattttactttgac

SEQ ID NO: 17695 - DNA, 236 bp, Glycine max
  Intron number 1 from transcript Glyma12g10570.1 (locus Gly ma12g10570) derived from phytozome v7.0 (chr-ID Gm12; pos 8528299 to 8528534 reverse strand)
gacaaattaacaatgtagtaattgatgaaaatgaagatagtgaagaaatattattagttaatgaacaatattatattgattcccaaactcaaaattaaaaagaagaagaaaataataaattaaaaaaaacaactattaaaattatatatgatcaaagtcaaaggataactactagtacaagtttgagaggtttattagtagaaaaaggtcctattaaaattactaatatatatttt

SEQ ID NO: 17696 - DNA, 863 bp, Glycine max
  Intron number 3 from transcript Glyma09g03610.1 (locus Gly ma09g03610) derived from phytozome v7.0 (chr-ID Gm09; pos 2574909 to 2575771 reverse strand)
cctgcgaagagctaaatatattggtcatcgggtacgccattctctctatcttcctttcaatcagattcacttgtagtcagcataatttaaatacaacatatatatatatatatatatatatatatatatatatatatatatatatatatatatatatatatatatatatatatatatatatatatatatgggaaccctcaccatggtgaatttttcgctaatcaagttgtgagcctcatgtttgcgacttatgttttctaaagtttagattttgtgatttaacacgtttggcagatactgatcctttgagtactcagcatcatttacttcatcttttatttttatgcttgtgatgctcttttcatccatgcttatggggtgcttctgcattgaggttgctgtccttgtgcttctatgctagtaatgcactctttttgctgaagcactgtatttgttgtgttctgtttggataaagttttccttcaacactcagttaggagaagaaaataaaaaggtaaaatgaattaaacttgtcacataagttaaatttaacatgtgcacttcaacttttatagaaattctctcatcgaactcttccaaggttgaggtgtataagttgttactaacttatagaagtttgattaattttatttttcttctttcataagtacttatagagaagtttatccaaacagggcctaagatgtgtttctaacttatagagaagtttatccaaacatagaagtttaaatatctaagctacatacatatgtgatgagactaagatatttgaaactgatcatgctgtatgcctgcttgctgttgcagaaacataacacggagcttcttgttgatttggtgag

SEQ ID NO: 17697 - DNA, 460 bp, Glycine max
  Intron number 3 from transcript Glyma10g13840.1 (locus Gly ma10g13840) derived from phytozome v7.0 (chr-ID Gm10; pos 15752818 to 15753277 reverse strand)
tctgtcaagctttaggtgcttttcttgataaaaaggtaatccttttcttttcttcaacatttgtggcatttaatagcaaactggatctggatttgtttttttaatttagtcaattggtctgaaatcttgtggcattatttgtttatttatgatgttatgcctcatattcttaatcatgaatgcacacatgaatgatcatagttatgtctttggaaaaatacttttgttctgttttggaagtattttcctgtgtttttttttttttgcttatgtgatgatgagatgacaggatgtaggaattgctcattcatcatttaggccttcactggttatttgggttcaagatattattgaaaaactacaatctttaatcgtatgtcaaagttatgctggatacataatcccatcttatctctttttgttaggtagtcacctgccttcgtcaaccatcgcaaggacc

SEQ ID NO: 17698 - DNA, 517 bp, Glycine max
  Intron number 6 from transcript Glyma11g11800.1 (locus Gly ma11g11800) derived from phytozome v7.0 (chr-ID Gm11; pos 8415810 to 8416326)
caaattcggtaaattcctctattatgaggcaactactccatattagttttccctatttttccgtgtttccacccaaagttgctaaatcccaggattcttgatcatataggtgtttaaaactcgttaaggtagtataagaggaaggatcaagttacaagagtaaatttaagtatacatatatatatatatatatatatatatatatataaaagttaagtttcatcttcatcattcattttcttagaattgctcttggtgtaacttgatttctcctctctctatatattgtgcattcgttttgtacatttactgataattgccctcgtgacaaagttttgagtttgatgctatattaggctcgtgcaactcgtcctatttattgggatagtataccacataataatatttttgtcacatgcgaaaccctggtagccatgcctatgtagcttgagttattctgttattctgatcgctcaattcagcttagtcaagctattggttctgtccaagcaattgc

SEQ ID NO: 17699 - DNA, 607 bp, Glycine max
  Intron number 2 from transcript Glyma07g06700.1 (locus Gly ma07g06700) derived from phytozome v7.0 (chr-ID Gm07; pos 5366641 to 5367247 reverse strand)
gttgaagaaccccattctggtatttgaattgagtgccttgaaaatcttgtgcttagagcgtgttttgtttttattttcaaaaactatttttagttttcaaaatgtaattaaataacgatgtctagactgttggtggagggtggtgcaaggcagagagtatagtgtggaattgatggagagcttgaagaagatgagaaaacatctcctaacagttttcgttttttggtttttaaagttcttgttttgcaaacaatttttgaaaaaaaattatatatagtgattgctgaatagtttatagttgttttactaaacagttttcaatgccgaaaatcacaagggaaacaaacagctagtttcccaattatatagtttttggagaactctacatttttctcaaagaagtgcttaatctaaatgtaaattgagaatatgatttaaacttgagtgtgatttaatagagaaatttgtgttaccagagagtataacattctgcctttgcttgtgacaatgaaacagacatggatatcatttgattccttctcttaagtacgaagatatcagttctgctttatgaatacttttgagtttgttgtggttaatgtaggtg

SEQ ID NO: 17700 - DNA, 930 bp, Glycine max
  Intron number 2 from transcript Glyma13g38800.2 (locus Gly ma13g38800) derived from phytozome v7.0 (chr-ID Gm13; pos 39523594 to 39524523)
gaaatgtgagtctctctctcataacacttcatactcatattcctgagtttcagtatttattttcatgttatgttggcaaaaataatcatcacctatggcgcttttaactaaggttctgtatcatcatgtagttatttctacccacactaccccaaaagaaaaacaaaagagttttgttgcttgtgtttcaactcaagagggaaaagattaatggttttcttgtgcatttgcgagtgtcatactcggggcatttagtggagttgttttgattcttcaaatgttagagcttggttcactttagttaagtagtttgttattgatcatttcaattctaccatgtgctcaacgaattttcctcttggaaactatataaactgaatttggtaaaatttaaaaccagatccactattgaatatagatttaagggggtatattgcatccccaaacctgatggcaaattaatgttaatgctgttgcatgagaaagtcgttagaaagtctcacattgcctgcctcatactggggtgcaatttaaatacctgttggacaacttcacttaattccaattggttttaagggggtatatcacattccctcaattgttaatgccttagcatatcaaagagttgttggaaagtctcacattgctagccttaattactgaggtgtggtttaaatacctattggctattgggcaatgtaacaccaattggtttaaagatgaaatctaacaagagccacccaagttggtagtgtttttagcatatgagagaggccactcaaggttttctcttatcccaaagaagttcttcacatcttctagttccactcctttataaaatactacacattacatatcaagaattaatttcacatgttttcaaacttttcaatggtgagaaggttggcaagtttcaccatcagagaaggc

SEQ ID NO: 17701 - DNA, 362 bp, Glycine max
  Intron number 4 from transcript Glyma06g08170.1 (locus Gly ma06g08170) derived from phytozome v7.0 (chr-ID Gm06; pos 6001425 to 6001786)
tcctagatcttgttgctacattgcctcttccccaggtatcacaaatgcttcggccttaattctctcattttgtatatgtttaatgcaaaggaaatagaaacaatgttgcagtgcaagcgtaagtaacaagtcccacattaaatagatataaacatgttgagtaacatactataattgatgaagactcaatttgcgttcttaaggttgagtttaatatggtgtcaaatgttcctatgtagatttccctgctgattttgttttgtctttattttttgtccttggaagtttgccaatgtttgaatatggtgatgttaaattacatgttgtcttttctttgtttgcagattgtgatttggtttatt

SEQ ID NO: 17702 - DNA, 336 bp, Glycine max
  Intron number 2 from transcript Glyma11g12800.1 (locus Gly ma11g12800) derived from phytozome v7.0 (chr-ID Gm11; pos 9150515 to 9150850)
aggtgcttacaatctatttgattttattaactgaattgttttttgtgcatgtttttcttctagtgaggttgagaattgacatttctcagttatgtgtctatactatggtgctttaatttggttagttgttgttatttgtatgttatttggcaatttcaagtaccactttaccccaaaatggccaacccggtgggagaggattagttgggtgccaaataagaagccccagatacctctagttaaaccaattttttttggcaatttcaagtcaacctttgcttttgtgtttttaatgttttaggatcctgctgctgtggttgtggatcattcaggata

SEQ ID NO: 17703 - DNA, 818 bp, Glycine max
  Intron number 1 from transcript Glyma07g07830.1 (locus Gly ma07g07830) derived from phytozome v7.0 (chr-ID Gm07; pos 6491034 to 6491851 reverse strand)
tacactacatcattgccttccccattgcgcttaaggtttctaaccaagcttttaaattgcagtatctatggtttagttaaacttacaaacaaatccataagcatttgtagaggaaaataagaagggaaaaatgaaaggcttcttcataagttaaaattagcttatgcataagtttgtagaagttctttcatagtagcttatgcaaaaaaaaaaaaaaaagaacaacaatttttagattatggagaaacttattttgttttttcttagggtctatttggataaagttctccataagcacttttatgagaaggaaaaaatgaaataagtttttctatttagcctatgcatttactcattagcttatggagaagtttatttgattctataagtgtttatagttaagtttatctgaacagacccttagtaaaggacaaaacctgcgagcagttccataagtgtttttggtgttgtttcttaatcagagttggggtttcattttggtaacacgcataataaatgtttgcatgaagattattaagatgcaactctatttcttgattggaaaacaaaccaaaaatgcctaagaatatgtatctaagttttttcctttagtaaattgtagacaaatgcagctaatgtggctgattgcagtcacagtgactgttttctaaaacctaaatctaacttgttgggtttctatcaatttgggccttctttttttatgtaatgtgaatggtgtttgtgattggatttttaggttggtagttagttgcagttgatagtgaaacttgttttttgattgcagtgccacgtgctgt

SEQ ID NO: 17704 - DNA, 769 bp, Glycine max
  Intron number 1 from transcript Glyma06g13760.1 (locus Gly ma06g13760) derived from phytozome v7.0 (chr-ID Gm06; pos 10889500 to 10890268 reverse strand)
ggtacagatctgtcttctctctcttagatccactcagatctaacctcatttccctctttattccacccattacttcatttctcattttcatttttttatcggcaaatattagttttagtcgttaattgttttagtcgttaattgttagtattttgttagcggagaacttttcctccctccctctcaccatctccttttactaccaaagccaacgttataactccatggaatgccaattcttaactaaataaaaataaaatcgaagaagccgtttttttttttttgtttcttgatgccttacgtgctgtttgtttgtgaaattgaatgtatcgagaaatcaaaagcgtttcaggtggatcctgagtccatttgtttttgtgatcagtgacgtgtcttaatggttctggaatctgtgattttcactctctctctctctctctctctctctctctttggtttaataatagatgtgtacagtttggactgcattttacgtgtttatgttatccattgtgttttactcaactcattattattttaagtaaacatatttagccaagttatctcttgaagggatcggttcatttaatctgattttaattacatgttttcatcattgagttacgattctgaggataatgttgtctatggttgcgtatgtgattgttgaaattgtcaagttgggaacggagttactgtttttagtatttttaaatctaataggttgttgtttctatggctatagctggagattggctacaaggtccat

SEQ ID NO: 17705 - DNA, 296 bp, Glycine max
  Intron number 1 from transcript Glyma10g22080.1 (locus Gly ma10g22080) derived from phytozome v7.0 (chr-ID Gm10; pos 28060543 to 28060838 reverse strand)
acgactaacaacatcaaagctttgatattggtaagtaaatgcctcaaaacttctattatatttcctgtttctgaagtacgttttttctcactaacatctctttttataacattaatctctttaatcctctcatttgtactaattactttatcttacatttttcttccttttcttctcatctccttttctattaaaaaagttgcccgattttgttatataaatgcaatttctcttttcattttaccttatttgattcaccaggacatatttgctgctggaactgatacttcagcatc

SEQ ID NO: 17706 - DNA, 588 bp, Glycine max
  Intron number 3 from transcript Glyma10g23470.3 (locus Gly ma10g23470) derived from phytozome v7.0 (chr-ID Gm10; pos 29640940 to 29641527 reverse strand)
tgtcagggagttgccggataaagtgtttgttcactgtaaggctctttgaaaagctttggtgattgtattggtgtggtcaagacaggagattgtttgatttgttaaaaatacatctaacgagtaaaaggataaaaatctattaactgtgttgtctaatcacgaactcatttatagtaagtttatggacttatatagtttatagtaataacaaccaaactctttgtacttaaacgatattgtggttgtaatgtctctggtcaactcaactgtgattggacctcttgagtgtttgatgtgttttggcgcaatgttatacttggagctcctttttctttcttctatagtggacaagatatctttcattaagaaattattcaaaataatgtatcgatttttcattattgattgtataagttggaatgttaatttactttcatgtctcttggacaattttgtacgcctgcagaattagttgacttcattcttctgggatattaatttcttctggaaactagaatgggctttaaattttgtatattgtgcttgcttttactgtttccatcttctttcacccaggtagcgaacgaa

SEQ ID NO: 17707 - DNA, 966 bp, Glycine max
  Intron number 1 from transcript Glyma08g13180.1 (locus Gly ma08g13180) derived from phytozome v7.0 (chr-ID Gm08; pos 9615401 to 9616366 reverse strand)
cattgctcagcgccatatagacacctattgggaaggtaagaaatgttacataacagctaaactgtgttgggtaggtcatatgagaattgtgctacctaagatttacaattagataaataataaatgataccttattgattaaatttatgaatcaatgatcaagcaaaatattgatagagatagaggtaacttgctctttatggcccttcttcaatcttggtggggaataccacatcctcttcaacattattgagaaatattttatccttttttcacatgcttacataactactagtgagtgggtaaaagcatcacaaacaaatcataaacaatttatagtggtccagctcaacttgcctacttctatagatgagaagaatcaaatttgttatcaaaacaaatctagcttgtagaattttttgcaatgcaatctctccctcactcttattttcattctcacgactcatccttacaaaactcacccaatttcctattaaaacaaatctctaataggactcttacatatttttcaaatctcatatctttcaaatatctcccatactttttacttatatctcaaatctcttacatatattttgtccgtcaaacaatcttacatatatatcgatattatagcaaactgtcaataaaatcttcaacgaaatttggttaaattgtatatatgattaagcattagtggttaggtacataaggttcttacacatgctagaaactttttcttttcacattcatcctgaaataaaaaaaataaaaatttattagatttatattctcttagctcagaacaagacttaagagttaagagggtcacctgttttacaagttttctgatgattaaacagtattgattggctatattatagtactgtgatcaatagtttaatacttttgttactttgcaattttgaaggaaaggagcaggtgtttgtctatcccatagtacag

SEQ ID NO: 17708 - DNA, 853 bp, Glycine max
  Intron number 1 from transcript Glyma12g32920.2 (locus Gly ma12g32920) derived from phytozome v7.0 (chr-ID Gm12; pos 36314943 to 36315795)
actactggcatgtccgtatcttcagctttccttatatattttgtctctccttttattataataataataataatttattgttgaactactgcttttcacttctaccccttgaaataagcttcttcactgttattttactttaagttcgtgactttggcctgtttaaaatgtagggagcaacaatcgcctcatgagctagctttggtgttaagttaggttgaaattcaaattcaaaatctaggatgatatcggagtttatactagtaattgttgttgagtctctcaagccacccgtatcgaattaccacaaatgtctaatcttgcaaatttcattgtctaaatgtctagtaccaggcctgagggaggtttgttagagatctcacattgattagtgatatagtcaaaataatctatacaagtagtgagcaactttcatttcatgagctagctgtcgaggatgagtttggtttaaattcaaattctaagggaccctgtttggtttcttgtatatattgggtattctattctatcaccacggagtgtaaagaactgaaaatggaacattttgtgaaatgttaaacgtaacagaaagtgaaagtggtttgagatacatccatacataccatgcaaaagcagagttggttgatttgagctgaaacattgttccaagttaaacaatcatgttcttgttggttgcacaagtttcttttcactaattataataacaaagaaacgagcggaagatgttaaatagtacagtgattaagaaagagaactgcagtgcattttctgtataatatagggaagaagttaacaactaactgggatcttattattcagggttggacccttt

SEQ ID NO: 17709 - DNA, 440 bp, Glycine max
  Intron number 1 from transcript Glyma05g33290.1 (locus Gly ma05g33290) derived from phytozome v7.0 (chr-ID Gm05; pos 38003651 to 38004090 reverse strand)
aaggtatatatatgttcttgtggtctttcatttataacttcagtttatagcattatgcaacaaggatttttctttgttttttcgtttcaagtaaactgcaaaaggcaaatggcgaggttaatgtaacctgtaggaacttgattgagtgattgcacaatcaaattgatctatctagcattcgtagtaataacctacaggagtggaaggaaatatcttcattctttcacttcctccttttcttttttttcttttcacttcaaattttaaagttatttcacacaaattttattcctcttttatgatcgattagagtgactgattaagcaattctgttagactgcatcttgtttgaagcccctctatatatgatttcactatctttccagtttccaccataaaaaaattgattccttaatttaaatttttatgcaggtcttata

SEQ ID NO: 17710 - DNA, 492 bp, Glycine max
  Intron number 3 from transcript Glyma07g16950.1 (locus Gly ma07g16950) derived from phytozome v7.0 (chr-ID Gm07; pos 16578653 to 16579144 reverse strand)
gtcttgggaagcagaggtcttggcacaattcaaaggtaactgtttcatttgatctccagcttttacttttctctcgttcatcacacacacgttactgagtatattttaaacaatgtttgggaagatataacatgaaaggcaagttacactaacatgttttgtcccacaccagttgataaaaaaatatcataaattataaaatcatgaatttgatttattaaatgaggaaaaaactcaattttatagttgtcaacaaattttaactaataataaagaacgattgaatttctaaatttttatacttgaaattactccctttaagaaaaaacaatatttcccccttaatttttagtttttaccataaaaattaaaaaattaaactagtattaatttattgtgatatggatctcttcaacatttttctgtgtgattgtgtttaattatcaaattagtttattttctgtaaattgctctctgtgttgaaaacacagg

SEQ ID NO: 17711 - DNA, 949 bp, Glycine max
  Intron number 1 from transcript Glyma11g17870.1 (locus Gly ma11g17870) derived from phytozome v7.0 (chr-ID Gm11; pos 14298389 to 14299337 reverse strand)
agaaaggtttgtttctaatgatcaatataaccttatgtctattatgttaaaactaatgcttaaaacttcggctaattgtgtcatagctttctttcttcgtttatgttaatctcttgttcctactttatggcactggggattcatttcaacaattaaattgcactctctaacaagtaaaattacacacaagatgcctatctagtgataaggacttgattgatctttatatctgcaacatatggtaattatgatcataattattgtggaaaatagataatttacccattaggcaccaattattagaggctttctgtgtctattagtagggcctagtaatggcttggagttgaaggacacaatggttttgagttgcctcttttcattctcagacttaatctttccatatatgttaatagttggaaattcacatctaactgaatatttatgcaaagctcaaagagtattttttctattaaaataagtaatggacaaattgcacaacattaattattatgttgttccatacaaagtgataggattgggagtgtgggcttggacattgatgagaagctcaagatttggagggtgtatgtttgaggaaacaagggtgagaagaggaaaggtgaggtggcaaaaggagtaacagaattgccaaaagtgtgagggaggatctgagggtatttagggaagtgtcattgagtgagaggggtatctgaaactttagaaattcagttatggacagagggccgtagcctttctgtaggagcctagctctgtggctgtaggattatactccttctgcacttcgttttttcagcgaataatacatacatttcccaaattcattattttgtctgtgatttggtccctaacacaatgattgaattatttatctcaatataatggagtttctgttgtttgtctcagctgcaaaccaccaaattcttat

SEQ ID NO: 17712 - DNA, 741 bp, Glycine max
  Intron number 2 from transcript Glyma06g07920.1 (locus Gly ma06g07920) derived from phytozome v7.0 (chr-ID Gm06; pos 5839124 to 5839864 reverse strand)
tgacgacgtatgaatcattcaatctgagaaacttatttactaatcaacaatgattttttccttataataatattctagctttttagcccattatatatttgctagatattgatattgttaaatggcggtgccatagtcgccatggtggaatggcatgtggattttgtgccaaccaccatagccaattttgaagggaggcctgctatagtagtgccataggctgcaatggcgtgaatatatatggttgaattttggccttccaccattgataacactgctagatatcctatagtttcctctattaatttggacccatctcacttcttcctccaaaagtattaaaataaaatcccaaaaagcaattataaaatgttgctaacatgtcatgtggttgtttggtgagtgttgttgaagctttccacagaatgtgtattcgagtttgttttctatgaaagagtatttttcatttttcctttgattatcttgcatatatgttacatactttaattctaagactactgttggttgtttgtaatatacttcacgatagttaattttttcataactggtcaaaactcagaagtaactccagttatttatgtacatttgatctcaaatattgtcttcatataatatgctttcatgttaaatgtatgtttaaccagtagtggccatgttaatgagttatggctcatgactatgactcttataattcaatgacttattatgcaggtgctcaaa

SEQ ID NO: 17713 - DNA, 951 bp, Glycine max
  Intron number 1 from transcript Glyma10g35680.3 (locus Gly ma10g35680) derived from phytozome v7.0 (chr-ID Gm10; pos 43949000 to 43949950 reverse strand)
tcgaattggcgtgtgcctcttgctatccctcaaaggtattattcccataattaatgctttaattttttccattttttatctttaaactttccccattatttttgcgttgctcgtgctcggctctttcattatctgtttctgcgctgaggcaatttggatcgaatttttcatctttaatttgggtgatttgccccctacttttttcccctctttctatttttcgttttttttaggtacggttgtcggaaagtttcgattttttcatcttttttgaataaataggcgaatttatgagatgggtttgggtttttatgcttaatatttcgtttttatgcaaatttttaaaataggttgtgctaaggaggttgaatccgagaatttcattgcgttttgctttgcgttgacttttgtggatgcagaagataactgataaatctgatgataggatcactggggttgtgaatcaatgcatgttgggaagtgggaatgctctacttgcttaaatatgtagtcattaatttgtatttgatatttagtgtagtcttttttgtttgactcaatgacaaagggtgggggagttggatccaaggttcaagtcttgacaagtttagagttattttctgtttctgaactgcaaaaatcatgaaaaaaaattatttgatgttgatccatgatatcatatagattcagtgttgtattaggttttgaatcctgatatatgaactttttgggtttgtatgcatatttttggtttgatctattagataaatttaagaaatttagtctgattttaaaggtttttgaccctttagacttaaggttttgtttaattttgtttatcagaattctgagaataatcctccacagatcgtgtctctgacttgtaattccatgaagtattcttatgtatgtttgccttccctccttatgcaggtcttttgaagcagaaga

SEQ ID NO: 17714 - DNA, 907 bp, Glycine max
  Intron number 2 from transcript Glyma11g35760.1 (locus Gly ma11g35760) derived from phytozome v7.0 (chr-ID Gm11; pos 37370510 to 37371416 reverse strand)
cttgctctagtttcatccaaatctttgctactgaggtaggttaaatgcctttaggcctgtttgaataaggtataagtgtttttaagaattttcttactgaaaatatagaattttttcggatagagaaatttttagaagttatcaaaaagaacttttagcctatatccaaacaggtccaatattgtcaatacccgtcaatgacgaaagaagaaagaaacatttttttcattgggccaggtaaattgtgttaatcaagacggaagaaacagagagggtggaagctaagtaacgttagacgttgagtttgcatttgataaatcaagatatatgatatctatattgggaaaaatataagtatcagtctcacatctattagagacaaaatggtcaaaatagtgtatataaatagaaacaaccatcaccttaccttaaagttggtttatgagattaaattatgcctaaattcaaatctaagattgtatcaaggcttatcaacagatcacttatcttactaccaaatccaataatactagtcgtgaaggggtgtattatcgactatagttaagactaaagtagtgtatatacttggggagcaaatctcatatcctaagtcaagtgagattaaattaggttaaagtccaaattgaaagaatctaaccatacgatcctacagccaaggttatagaacctcagggtcattactgaaaataaatgtttagtatacaattcaatcttaaattctcccctggagcgagctcgaatagattcttcataagtttagaccattgttgcttgggtttacaaaagaatcacaaaattcagttatgaatgccttacatttatgactcatccctggtagatctatttcactgtgttttgttacttttgtattaagcagggttgcaag

SEQ ID NO: 17715 - DNA, 624 bp, Glycine max
  Intron number 3 from transcript Glyma08g22200.1 (locus Gly ma08g22200) derived from phytozome v7.0 (chr-ID Gm08; pos 16895034 to 16895657 reverse strand)
aatatctgctcatcctttgatttctcagaagaaaggttttactcataatttgtttgtactatagtttcttgaaagactatcaaagtatcaatagttttgttgaaccgaaatcaaatatttgaatgttttctcagtgtgcattatacgttattatgtaagtgttcaagcaaatgtctcttgtgagacaataatgccagttaaacaaatatttgcttgattaagaaaatgagaaatgaatttggttagtgaacctgatttcaaaattaaatagaacatttttacctgatgtattatactcccttcacatatagtaagttcttataagacttcaaattgttgctagtttgtacaacagctgatctatagatttttgagagaatcctactcgttggagccgagaaatttgaagattatttgtttcctcataatattataaacacttgttgcatggaatcctataatactgtccataatctgtcatcatgcattttataatgcttttcactttgtttttgaatttgttcaataccttgatatgttctcagctttatattgatcactattgacatgcatctacaaattgtcgcagacaagaaagataaccttccaaaacttttgactgca

SEQ ID NO: 17716 - DNA, 543 bp, Glycine max
  Intron number 1 from transcript Glyma06g47510.4 (locus Gly ma06g47510) derived from phytozome v7.0 (chr-ID Gm06; pos 49936985 to 49937527)
tttggtattcaggagcatattgatttgggaatcaagtaagttgaagaacccttggatttttatgctgttgtttttactttgcctgaggtaaacattttaggacttaagggaagctgattatttgatatgggttgtggtgtgcacaatgcatattcaaaattttggatatgacataacatatctcttctcctttatgctgcatttcagttttgacttgaaccaaatgttaactggttcataaatctgttttctattgcttgatgattttttggaagcaggaattgcattagttatagttaggttgatttattaattagtttttaggcatgatgttgtgtctaactgattaactggttttgcaaattgcatgctgtctttaaatgacataatcaagtcttccccctcttggattcattcccttgttatgtcaactaatttttagttaatttcccctcgtatatgtttaattatgttttcggtttctttgattatgaagatttcaatttacacatattggtctttgactgttgactctgctcaggt

SEQ ID NO: 17717 - DNA, 724 bp, Glycine max
  Intron number 1 from transcript Glyma06g44810.1 (locus Gly ma06g44810) derived from phytozome v7.0 (chr-ID Gm06; pos 47632391 to 47633114)
ccctttggtcacgattctgattacccacctccgtggtaaaattcttcctttttttcttccttttttttttcccttgtgatcagaaactttttggacttcgattgacccatggcaaataagatttgagcagagaaaaatgttttttgaggatacatttttaaattgttttttggctatatggtgctaactgattttttttattaaagtcttgagtggaagatatgttttaggttgtgaaagagagaattgtttattgggggagttgtgtttggcattataaagctgttgagttttgtattctgtccacttgctagctgttaatggaattaagagaaccaggaaatgaattatgtataagccggagttttggagcagtgttgaggttccggcttaggatctagatatgttcagggttttaaattgtggtttcaattgcggttttgttataatcatcgacattgtggaaagtttattgcggtcgcagaaactccaaaaaccttgatgttagatgcggctgccatttttttaaaacaatgatatgttcagtttgtgaggtacactggttggtacttaaaatttgtttgcttgagaaagaattgtgtacaaagtccaaacacagtatttcctgctagtttgattcttctttacattattaagttttttgatctttatgtatggacagattgtgaacaaattgctttcttctgcattcaggttcatttac

SEQ ID NO: 17718 - DNA, 879 bp, Glycine max
  Intron number 4 from transcript Glyma05g31490.2 (locus Gly ma05g31490) derived from phytozome v7.0 (chr-ID Gm05; pos 36613316 to 36614194 reverse strand)
aggtaagtaaaaaaatagtttatgctctaactccatacataagcaatagagaaactaactacttatatgcttcattgtcatttatttggctagggctcaatggattatttaatttgaccaaacttttgaattattcaaatttgtttatcatttgcttgcagaaaatctctgatgatttgtctggttgacaaccgtgccagacttgtattatcattcttcaatctatctcaagtttgaaattagtcacttgcacttgtttgttcaaaagattcttcaactggcttttcagcttctaaagcttttgctctatgtttgttttatgtccctggtagtctgttataattacttttgttgaaattaaatagttttttttattcttttataattgtaccatgtttatatacaagtctgagaaactcatcaatctcataaattaaaaaacttcgtaccccattgcccagaggctcttcgctatgcgaaggtatggaatcaaggattagaatcaacctatgtatataaaagtaatagaaagagagcagaatttccctatttacataaatagacaatatttccctaacggtacacaatatgtcaatatcatttcccacaatatctcaactacttttttttatcaatttatcatttattcagggtccagtaatatgtttgctgtggtaaaagtcacaaataaaatagccacttggtactatgcacatatttccatttattaaattatgtctgagttgtttttggacaacttaatgcttatcacatactccatatttttttcttctcttcctgttgctcactgcagtggctttcatttatggcgtgagtatttcaggttattattccagctccattctgggttagttaccc

SEQ ID NO: 17719 - DNA, 774 bp, Glycine max
  Intron number 1 from transcript Glyma09g34880.1 (locus Gly ma09g34880) derived from phytozome v7.0 (chr-ID Gm09; pos 41184813 to 41185586 reverse strand)
ttttcgctcgaaaaggcgaactcaaattggtattttcttctctcttttttttatccccgcgccttatgatgatatgcgttgttgcatgtttgatttctgaaatttgtggttggaataagggaactattatttgaggctttcaattggttggatttatgtggcaatatattagggtttcactcagcttaattaatttgaatttatattcttcatgtttgtgttgtgtgtttgaagaagttgcatttactagcaatctacatgatctcattcaaatgtaccaatttttatttattctttttttagtctaaatgttttgaggagttcttttgtagaagatgagcagtatatgtgttgcctcaagtgtacaacaaacccatgtcagcaataaggttgctgcattgtgaccagttgacactgttctggttgtttaaacagccacagcctcttctatcctggaatatggattcacacatttgacttatcccacatcccacactgttgggagcttaaaccgtgttctctggtccaccgattatgggttcctgactgaatttgaatgttttcaagtcttatgattataccgattcttgtagtgcttgaatactttgcctcatgtcattgatgatttgttaactgttgggttattcatgattttatcgttcttttaagagttaaatttgtatcatatttggagcaaaagggttttcaattttgtcaaatttagtcacgtgggggtatcttttggtgttgctgaataggttaaaaaacttatca

SEQ ID NO: 17720 - DNA, 639 bp, Glycine max
  Intron number 1 from transcript Glyma06g19130.1 (locus Gly ma06g19130) derived from phytozome v7.0 (chr-ID Gm06; pos 15363829 to 15364467 reverse strand)
agagaactgaaaagtgtattctaaagattgtacaagtgagctctatgtgtagagcacattggcacaatacagatcagtacaagagactatttgtctaacaaactaacggagtcttaactaactcttcaactgacagctgtcataagaaagctcttatcttatactctaacaatgggatatgttttacctcttaattatctaatgaaaacaaatccaatgactatcatgtcttgtctagtatgtgttaactaaaacaaactcacatagacccaatatttgatgtagtatgggataagtagatcaattttcccactaatcactggtctgtccctatttatttcaaggtgttgagaatcaaactatttaatgcatagatttattaggatctgatttgagagtgagagtgagagagaaaatgaaaaagataaagctgatattattgctccgtcagaaaaactcaatgagttagatacaacaaaggtatttaaagagttttgacttgagaaaataaccacaactaactctaactaacttctaacagaatgtaaactaactctaactacctttaactaacttctaacagaatgtaactacttgggtgcagtttagtgaaaactaaccgcccttacaacatataca

SEQ ID NO: 17721 - DNA, 837 bp, Glycine max
  Intron number 1 from transcript Glyma08g24760.1 (locus Gly ma08g24760) derived from phytozome v7.0 (chr-ID Gm08; pos 18917778 to 18918614 reverse strand)
caacgagacagtcaagcactggacttataccataggtaattaaacttctaactatattaatatgatcaaacgaaaatgggtagattattatttccccccaagtttgaatatagttttagtctctctctctctctctctctctctctctctctctctctctctctctctctatatatatatatatatatatatatatatatatatatatatatatatatatatatatatatataatataattctcctagttttagttttagggccagttttttacaaattagaaaataatgattctgatattagataatttagtgattttttttacaatttaaaaaaagtttaactaatttatatttgtttacaatcgtaaaaattgctgggttttttttttttaaaaaagaagtagctgattctatgataaattattcaaaatgacttaaaattttaatcaatttttagattcctttcggatattgtgattgttttgaatatatagttgaaattataaatgcataaaaactacaaaaagtgattattttttaaaatgatttttttatgaaagaagtgtattaaacattgctaattagtttaattttgactttctagctataatggttttatttgttatggaatttgttgctgatttgtggacaaattaaagcaaaaacgtagtcacaatggtaagattaatttcttatctacaagaaatcaaattctgatggatagagatcaatattaaaatttagaaaaatataaattcattgatttattctttttttatttataattcttatacaatgatcttgttattggttttgattgcttgtgaaacaacag

SEQ ID NO: 17722 - DNA, 745 bp, Glycine max
  Intron number 5 from transcript Glyma08g19520.4 (locus Gly ma08g19520) derived from phytozome v7.0 (chr-ID Gm08; pos 14764611 to 14765355)
tttaacataccacctattcctttgtctcagccctggtaagctttctatttatacatttagttatcacttggttttgtatggcttattgatcttggcatgctatgaaagcacatgaatttttgtgcaaacgctgattctgtctgcatgtgtgtagatctttgcatggatatgatttgagatctatatgggatggcacttgtaatactgtaatttacacttgaagcaattactattgggtcttggctgagcacaaaaaaaaaaaaaactattgggtcttgtgggaaaattttggaaatgggttttatgggtcaagtttccattcatagagcatgaaaatcagttagttgactacttgacttagttttataatggttggttctgtgtgtttatttatttcccttatgattgatgattgatttaagaagaaaggaacatcttgtttgatagccatttagttgggagcaaaccttgtttttgtcgtgttatatatgaattatcatggctaccttcctcataagttatttttagatgttgcttaattctattatttagtgtgtataagtcattcccatcttaccaattgctgccttggaagggcctaatctgcctgtatattatgtggcagatgggactcaatcagagtctgatatttactgccatattctagtgcatacagagctcatttaattttcttttccatttattttttaatttactttgagttttgcagctttgttagttgaaa

SEQ ID NO: 17723 - DNA, 918 bp, Glycine max
  Intron number 4 from transcript Glyma09g15220.1 (locus Gly ma09g15220) derived from phytozome v7.0 (chr-ID Gm09; pos 17644488 to 17645405 reverse strand)
ggtgttgcctggttgttgggggtctatcaacaaaggtttgatcactgtttcaatttcatgatgacttgtaattataagatatgctgatggttcagaatagagttatttgcttcttgtgatgctttcagtatgcagtcagctgtttgggttttgtttgtccattggaaatatcctcttccaccttccgtcttttatacatttccatctacaattccaataaattttgggtcccgttacaatacatttcctgtctgtttgacacaataatcaatccttcagtttcaagagatgctttttctttcctactagtattaacttaaatttgacatatttgagcactgtatgttatctgatctctttttgtagatgatatgtattgctgtaactgttgcgagtctcacatcgagtagttaacgagcatgataagtgcttatataactgggtaggccacttctttatgaactggtttttaaggggacctttcaaatgtctggtcaaactttaacttggaatcaaagccagttctgttcggtggtgtggatcgaggggacgtgttgctgggtaggccacccccttatgccttattagatagtgagccttttgaagaaatatttcaaagttcaaactaatcagaagggaaaatacgaaggattgtatttgataaacaaaagttcattggtgatttcataatatgtggtttctcattttgaccagatgttatcttactgataatatatatcacatgattaggtggttttttaatggatgagagcatgcaatgtggcttttacagctataaaaagttccactattatctagttgataggtaacgcaggtaatgcagattgcctcctttaatatttattctttaaaaatggtgttttctcatcctaggtgcaagaggctgctttgagaaca

SEQ ID NO: 17724 - DNA, 784 bp, Glycine max
  Intron number 3 from transcript Glyma06g05770.1 (locus Gly ma06g05770) derived from phytozome v7.0 (chr-ID Gm06; pos 4128696 to 4129479)
tactgctggggagactccgacaattgtggacacaggtctaaacatgttctttgatcccgcattcaaactcattcacttcagttctatctgttttagtactgatgcagtcttttgttctgcgatcatgtttgctgtcatgtaaatgagaaatgtatgtttaaagtttcaagtttcaagctgatgctaatgttggccggctgcagaggtgtatggtgacgaaaggaaatgaaagttattatggttgtagccttgtaagattggataaagctctaaaatgattgacttcttatacttttccgtggttcttcttgaacttaaatgccagggtatcttatgaacaatttgagattgtatgcctctatgaggggaaattttgttaattatatcactggttcagattacatgtttttatgtatttctggcttctcatgtttgtgcatatatgtgagtgtgggatacgaaagagaaaataatcattaagaaattatgacattattacagaaggagaggataatgtgtgcgcttttttaactaattatgcttgtagtcaagttttacccaaatgaaactgaagaaaaaagaaagcaaccttgtaatgtaggcttcccatacaattattctttatttataaacatgttttttaactaccatgtcacaagagtgatttaaatttttgctatttgtgattatttttttcttgcaatgaaaattctgtctgggtaaacaaattgaaataatgagttgattcatgcagaggttggacgcattggcataggcatctgtt

SEQ ID NO: 17725 - DNA, 951 bp, Glycine max
  Intron number 1 from transcript Glyma06g34970.1 (locus Gly ma06g34970) derived from phytozome v7.0 (chr-ID Gm06; pos 36719693 to 36720643 reverse strand)
attacgaggtacgaacgcctttcttttccttaatttcaatgttgcttgcttggtcggtggggatgatgtcgcttgtgggtacctaaattttgtttctttctttttgtaaaaaaaaaaaaaaggaaatttgggttctttggttttacttaatttttttaattacctttcaagaattcttttaatggtttgcctttaaaattaatagaaaaccattttgatgattttatgttatgtctggaatctggcaaacttgcttggtattgttgaaagttttttttttcttaatttgttggatttagaatgcttacatacctttctttgcttcgtggatttatcttcctttttcaagcttgttgtttcctcaaagatgaagctttatattcttctcttgtttttgtttttactttctttcgggtttaggggtatggtattctggaaaattgaaaagggcaataattaaattcatatactttatgcatatgttttgaaggaaaaggtttttgtttttgctgtcttctggtttcagggaatagtattctgaaaaagttaatagacattttgccatgttataggattctccattgagcccaagttcatagtttcttgactctagtttttgattgtggatatctagttctcctttgtcttctggttcttgcactttgttttatttctcttttccatttaattaaataactaatgcacgtttcatttcattctgtatgccctggaaatattggaattatttgttgaataaaactatgaaatctggaaacctagtgaatcagtgtatgcttaattcccactttaatgggtacctgctgtaacggtgtaatattaagttattcattgaaaagacttatttattagccactgtctaagatttataagaaattttaattgtgagtagtttgactgtcttctttattttcttgtgcagattttctttac

SEQ ID NO: 17726 - DNA, 372 bp, Glycine max
  Intron number 1 from transcript Glyma08g09160.1 (locus Gly ma08g09160) derived from phytozome v7.0 (chr-ID Gm08; pos 6548578 to 6548949 reverse strand)
tctctcacttctctctatcacatttttcttacaaggtatgtatgtgcctttttctttgcttttttttttttgcatttttttcatgtttttaatgttatgtcaattgcctttaattttctcaattcctcgattacctttttagtaatttgattgttggaggtgttagtgatagaccctttaatctaaaaggctcatattttaagttttatacctttcattcaattgaattgagacctcctagttccttccaattagagaaattgtaggcttgttgtttttcattctagaattttccaaacatttcgagtgtgttttctctgttgttttttgtaataagaactaagaaattactgtgttttggattggatgcag

SEQ ID NO: 17727 - DNA, 753 bp, Glycine max
  Intron number 1 from transcript Glyma12g04890.1 (locus Gly ma12g04890) derived from phytozome v7.0 (chr-ID Gm12; pos 3243422 to 3244174 reverse strand)
acttccatcttgcttggctacggtgagtcttatgaatatattcattcctacttgtcttgctctacatgtaacttcttttagtgtgtttagaaaaaactcatggagaatggataaatcatgtttgtaatctgcaagctataactattaggctttgaaaaatacgtctataacgtgaaaccaaacgtactattaatttgattacacaggagaaactaacatagtcaatgatggaccgaagttcagttgaggggtgcacctgactttgagcgaaatacaagagtatatactagtgcgttcttatttttggcacctcctatttttataatttaatcccgttgccttcaatttattacttattgtcaatttttatcttttaacggttttttttttctcatgtttcgtttcttttatattattttcatatgtttgataataaatattatttaaaattttgtttttgccccaaccgactttaggtcctcctgatccgtcactaaacacagtttcttccgcgcgggccgaaaatcgtaaaacttatccagtttacgtggaaaaaggaaaaaaggaacaagacttttgcgcacaaaacacatacaaaaagataaaggaaaaggaaaaggaaaagaaatagctagtgggacaagagtttgcatgattctttaattagaaaaagggaataatctccgagaacattattttaagtgagacgtggtatgtaataataagtgtattattgtcacagatattggtgtg

SEQ ID NO: 17728 - DNA, 630 bp, Glycine max
  Intron number 2 from transcript Glyma11g09140.1 (locus Gly ma11g09140) derived from phytozome v7.0 (chr-ID Gm11; pos 6471710 to 6472339)
acattgtctctaagataaaattctcaactcagaaagtaagagtgcatcctctctgttctctgtctaattgacccacagatctttttttatttttgtcttctaagttttaatgagttttgatctcttcaccgttctttatgtttttgattccttgacttttgttcttgtccacttgtgtgcgcttagcttgaaactatgacttttgactattaatcataaatatgtcgctgataaaaaaataatcataaatatgtctttaattttggattttttttaatttatatttttaccgtttatatgtgtgtagtattaattatttaccttgcacttataatcttcaatgtagtttttgccaactgttataggcaacacagattttttgtatcaagggtctcaatgttgttaaatggtggcaacacggattttttgccaactgttataggcaatttatgaagggaggcctgctatggcggtaccacaggccgcaatggcatgtctatatgatagaagtttgggcttctgccgttgataacactgtttggggctggctgttcctcgtggctgtttggaattaataactatgggtgcaagtataagaaaaatgttggtttttttctctttcttttcagg

SEQ ID NO: 17729 - DNA, 484 bp, Glycine max
  Intron number 5 from transcript Glyma11g09140.1 (locus Gly ma11g09140) derived from phytozome v7.0 (chr-ID Gm11; pos 6472900 to 6473383)
tgaggtaatgctttttgttgattgattattctgtcaacattcaacatttgttaagagctcgtgtaaagcctaatgtgggaatatacattttgatttgtaaaggattgtgtgctctgtaattattttcttttgaagaaaagattgggaaattggaatgcatgtgctagtttagggctcttttggctgtttttacttgagaaacaaattattatgtactctctttgcttgtttcatacctgtcattgatatttgaactacataaatgggtttgtgatgaaaatatcttacttcaaagtcttgtttttggctgccaggttatatctaacttgttttcagctcatttaactagtaacttgcttgtccttcatactgacactcataactcagcatggtttttccatatttgatactattaaatacttattttgtctttggatactttgctgcagtggaaaagtcatccgatactttgttcccattgaca

SEQ ID NO: 17730 - DNA, 1017 bp, Glycine max
  Intron number 3 from transcript Glyma09g12020.1 (locus Gly ma09g12020) derived from phytozome v7.0 (chr-ID Gm09; pos 12370663 to 12371679)
ataaggtatcctcttgattgcatttagttttgactcttcatgatctttgtttaaacttttctttgctccatcctcattataacttggcttctgctttttgggagttgggcttgtattcagtttgaataacgatattatcttttccatgagttgagcatctaattggtagtaaccagaaattgaagacaattctgatgttagaattaaatgaaatctgaggaagtgtcctctgttacaatgcttgctgggaaaaataagaaatgagaatgagaatgaaaatggatggagctaggctctaggctcgcttacaaaatgaaaatggcagaacaaaataaaagataacatcccttacttagattggaccctctcatcccttccaggattcatgcctccccctcctccattctccttttgctgtctgtccattctgttacaccaatagccttggtttcttaagcccttttaatcccttcactactcccattgcccctctatttcctctcctcctatgcttcacaatggggcctatcacaaattttctaagcagactagattcaatcttattaccattactgggattttgatgctatcattttactaacttatgggagacaattgtattatgagtttatgacttatgagagagacatacagtgcacttgtctgaaattggtggaccccaacataatcaaggttggtcactccataataaaatttgtgtctttcatcataatggggcacgtgttactgagaaataggagaggatccaaattcctcgataccatccttgtcgtgattattggtagcagaagtcagtcattcatataaattctacattcagaacacctattttttggtttttttaattatattgaactgcttttaagcagtttcatttgtacaatcatggaattgttttattatattattagaaacttgtaaaatcatatattcatgtatgataataagtgtaaatttttctgtcacaggttgtccaggagtttgtcttgggagcgt

SEQ ID NO: 17731 - DNA, 669 bp, Glycine max
  Intron number 1 from transcript Glyma08g47100.2 (locus Gly ma08g47100) derived from phytozome v7.0 (chr-ID Gm08; pos 46027643 to 46028311 reverse strand)
gaagaaaggtatattaattttcaatctctttgttattttcaaccctgtgtttatgatacaagaagaccaggtgaaatgagataattcatttatgatattgtcatgtggcactatattgtaaccataagtccataataggttgccataatgatcaaacagctaccatattggtgtgtttagaatagattcacagcgagaaaaaataaaaaataaattcatggtaaaggtgaattaacaaatatttatttctacttttcatagtttctccatgattttgtagggtaaaatcaattttgtgttatccaagcacaatgacttttgctaatactttgaccatgtttaattttcttttcaccttttgattttaaaaactattttctaaaataatttcacactattcagtaatcaatttcgcattcaaaatatatgaagttttgaaaattatttttaaaaaaaagttttaaaaaactagatgttttcttattttttttctgtttttatgtaacctcttcctggatttcacattctgctctgtgccttgcaccactatgtactagttatctgaataaccttatttagtcgcattgtgaaaaataaaaatagtttttaaaaatagaaatcaaaacacaccctcaaactaaagatctgcaaattatttttcaggtttta

SEQ ID NO: 17732 - DNA, 692 bp, Glycine max
  Intron number 2 from transcript Glyma07g40350.4 (locus Gly ma07g40350) derived from phytozome v7.0 (chr-ID Gm07; pos 44608681 to 44609372 reverse strand)
ttgattatctgcaggtttgtaacagcatgtaatattggcactttttttttttttttttttactttgacatttaattttaacacaactgacgaatattcataatcttaaattgttcttgctggacattaagggtccattttatttgctaaaatttatgggacaacacaaattaaatagatgaggacaggacaagaactcaacttcttgttacacagaaaatcatgcgacaacccagatacaaagtattcaaaagatacacataccccacctctctcttatttctcacccattatctactagatgcaactaccttatcatggcatgtattcacattatctactagctgcaacaagcttatcataccatgtattttaaattcacattatctactagttagcttacttgtatatattctgtattttgaattcacaataataatgtaaattctattaagatgattaatattaaaaaggatattttagtaaattttatattattttgcttgtgttgttcattgttcatcaaacaatgtacatgataaaaaactgttgtaactcaattgttgccttgtgctatactctttgtcctgtactgtagtgcatgtcaaacacacccatagttgtacagcattttgaacttcattatgtttctttacaggagttattggccattcaacagcaaggacctagagc

SEQ ID NO: 17733 - DNA, 632 bp, Glycine max
  Intron number 4 from transcript Glyma11g15680.5 (locus Gly ma11g15680) derived from phytozome v7.0 (chr-ID Gm11; pos 11352690 to 11353321)
gtggacctgaagttccattccaccctggaagagaggtataatatcgcaagtttttagttccaactgttgttctctgttatttgatttgattatgcattaatgtatataataataataataataataataataataataataagacctgattatctatttttttgtaaaccgatttgtttgtattttttttttgctgaattttgatttgctcgtagtgtaaacggtagttgtcgtagacctattgaattacgaatttggattcggattccctgcattcaattttattcacgtctccttgaattactaggattacattctagtcgtttaaatcaactcttcttaccgtagcacatttggtagaatgttttccacaaaattccttttatggcaaaaactcgcaatttaattattataattttttactgcatctttagttaatttggatgctttgcatcatattttgttgtttgtattgttattttgtacccagaatttttagtaaattacagtgatctatttttggggtcgtatactatttttgtgcgggtaatgttattgtttttttggaggctaatgtggtgttttccttctgattaggacaagcctgagccaccaccagagggtcgcttgcc

SEQ ID NO: 17734 - DNA, 837 bp, Glycine max
  Intron number 3 from transcript Glyma06g39620.1 (locus Gly ma06g39620) derived from phytozome v7.0 (chr-ID Gm06; pos 42424274 to 42425110)
actctttttcaggttgttgatactcaaactattttgcagtgttctgattaataatgttttctgcatgtcttccgcatgattatgtttgcagaaatgatgcatcacataaatgaagattttttactttttgtagtagatgtgtggtctcttggaccatgtacaatgaaaaaggagtgtttattcattagtattatcccttactgatgttatttgtcattttactgtgatgagtctgtatcaatccagaaagatagtgcattcttaatgtcacaactcatactgagatcccactaacaccatatttgagtttccctttcactggcaacaacttggttttgtacacacacacaagatgactgtaaagtgacataaggttttcatagaacaatagtgaatgtttttcttttagtaaaaacattatttatagtatatcaataaattaaatagcttgccagttttctttcctttttttcataaaagaaaaaaaatctaactacagtgtattataaacctacatgctagtatacatgttctctatactaagccatcactttcaaaaaaaactccagttattttttgctgtggccaaatgaaggagggatctagttacatagtcctgcaggggatcttacgcaaaatgttgtgtggcttcataagatgcataaaatcaccagcagttcatggaataatacatttgattcatcaattaatttgattgcactaaacattgtattatgtttacttccctggaaaattccacttataaatccgaaggttaacttgtcatgaccataatctgcagcctcacactactcgtctggaccataaaacactgaa

SEQ ID NO: 17735 - DNA, 1031 bp, Glycine max
  Intron number 2 from transcript Glyma09g32820.1 (locus Gly ma09g32820) derived from phytozome v7.0 (chr-ID Gm09; pos 39360260 to 39361290)
acaaggtattctttttccattcttcttttgctaaaacactaatacaaatttatgtaatcaatttgctgaccacaagtaaagatattgatcagaggcccttaaaaattccaaatagtggttcctggtttggctctttgacaccatccatatgtttcattgttcttcacttttgtggacagtaaaaatggaccaattttaggctttttagccaatgcaagtaaaataaacaattacactctcaaacacacaggagcagagagatttaaacttttattaggcatttaacatgatttaatcttgcatcagtttgtgagatattatgctatcaaataacaatgtatttaagcttgatatgtttattatgaaaatgaaaattaaaactaattaaaaagaaatttacatgtgatgggagatacaacatctagagatcaaggatttcaaagcatcctgcattcccatgacaatggcattccagaaattagcattcaagatagcagggtatctgaggtggttttggtttgtaaaaatatagtttccgttttcgctattagttacgaaaaaagccatcctgttttcacttcattccaatagttcaaatttttgtatggtaaatgatgaaaacaacacttcttgatagtatttttgtattagtgaaaatagaaacataaaacatttccaaagaccaaaggcacccttaaatactgtcatgaagatacctacctgcgaaatgctctcttaacaatcctgaaatctattttatttgattaaaattatttttgacttggaagtaaatgaataattggtcatgatttgtaacgtcgcctgtcacttataagttgcatctgcactattgaatatgctttcaatgcttaaaaaaatatcttgagtcaaactaacatcaattacactaagctccaagttttagttcacatcagttgttttcattgttgccaattgccatgataatatgcctaactggggttatatatataataggttacctcatataaattgtggcggcaagtgggaga

SEQ ID NO: 17736 - DNA, 826 bp, Glycine max
  Intron number 1 from transcript Glyma08g10250.2 (locus Gly ma08g10250) derived from phytozome v7.0 (chr-ID Gm08; pos 7416003 to 7416828 reverse strand)
tcgtattccacccacctcggaggcctaagccaaaggttccctttcaactttacctggttttcgttccaaattgtttgctgtcgtgaattacatatttgatcataattattctgttatactaattgattatgaacatgattaactttgttttgtagtcttaatttactgctcctttcattttcatactcaaagaattcgtcgttttgggtactgtttaaggtttaaacattttgaaagtgtgaatctttaatctcctggttttgtttccatcatgggtgtcttcagaatctggtccttgctcactagtcagaatttgagtggggtaaattagaactggtcctgtttgtggaattgctcatcagtattacataaagtaaaatgatcccataggttgggatatttttcctctaaagtcgacacttgctttataggataaagtaagtaattttacttgttgatgaaaaaccacctgtcaatattttgcgcacatacataacaaatcatgaaagtgaagttttgataagaaaaattcagaagatcctgctttcatgtggtggggactgatgaatctttcatttgacatggaatggtaactgtttttcatatataaaagactattaattgtcaagttgacaggattctaactagcatgttttgtagtattctgaaatcagtcagtgaacttaagatatattcatgcttgcatttattgatattgcatagcatctttgcattggtatgcatttgatataattttaggttatttaatcacactatgcttcaaactcaatttcagcagatcctgcggacattgtaagtaaatctt

SEQ ID NO: 17737 - DNA, 532 bp, Glycine max
  Intron number 1 from transcript Glyma13g03180.1 (locus Gly ma13g03180) derived from phytozome v7.0 (chr-ID Gm13; pos 3135482 to 3136013 reverse strand)
gtgacattcttgttgttccaatacctggtaatttctggttttctttctactcgagggaaaagggtttcaccttgtaggggaagtgagggcatgtttaatttgagaagttgttttactttttctttgccatttgatgttatcatattttaaacttttttttcatagttaaagattgatacaaagaaaactatataatttttttatatgaaaacaaggtatgaaaattgaaaatattttctcaaactacacggcctaatcttctttgtatgtttggttgtgttacgttatgtatgatgagtaaaccttctggcctaatatttcaatgctattgatgcctgttcaggtttaagtttgtgatttttgtgtttttcaagttttcacattgattattttttggcgcaaggtctatgattccatcactgaagtagggataatgattctgtttgtgctacctttcatagaaattctactgcataaatgagtcactaatcttgttctcttgttacagcttgtgcatcaaattttccaaaat

SEQ ID NO: 17738 - DNA, 254 bp, Glycine max
  Intron number 2 from transcript Glyma09g00200.1 (locus Gly ma09g00200) derived from phytozome v7.0 (chr-ID Gm09; pos 522 to 775 reverse strand)
caagctattatactgccctccaattggagggtccagaggtagtttattttagttttagttttagcttttttgttggaattttcttctttttcattgttatacatctgagtctaaaagacacactaaactgatgttctgattcaaacatattgaaatgcatgtatcaaataattattgtgggctctcagtccgaaaaagtaatggtttaattttatttgttttatttaaggctctcctgtatacaggattcatta

SEQ ID NO: 17739 - DNA, 993 bp, Glycine max
  Intron number 1 from transcript Glyma07g16860.1 (locus Gly ma07g16860) derived from phytozome v7.0 (chr-ID Gm07; pos 16510192 to 16511184)
acaaggtaactctcaattagatcccttccttttattctttccttttcttaaaataaatcgcttatatatatatatatatatatatatataatatggatcaaacttctttaagaactgtcttgaattattgttatgatttgtaattataggattatggtagaattttcaacttggggaagaaatatttgtgttatgtattctaaatttctaaccgtaaataatatagaaattagaagcttctactactcactgacaagggggagaggtgcagggttgttacggtgaggcattgccgcacacgattggatctactactcactccgttatgctatgctttcactttagaactcatatccctcacacgcgaaatgcttttgaggaaccgaaacgacaatgacagagaagatgaaccagctcgatttgaacgcgcgcgtagataattagggtaacttaaacaaagacggtccttcacccaaacccgtctttgttcaagtttttcatatttacaaaaatgccatgaactagcattctaagacggttctctacgaccgtcttagaatgcacgacgtaaaaacaaaaaatattacttctaattataaaaatgtcaccgtcttacattttaagacggttattaataaccgtcttagaatacgcatcgtaaaatcaacctcttttagtagtgaaggcattatcaaaaattaaattttaaggagcaaaaaggtatttaaatccaaattttatttacttttacataagtcaatcatatttctgattgatgtaatgtaacttggtaggaagactgcatcctagcttttagatttctccaaggagattagcatctatgaatgatgattggagacattggttgctattatatatgtatccaagaaaaatcatagttgtttttatatattccaattatttactaacatacaagtaatgtaacttgggaaatcagtgcgtggctccagcagcgaaatctgtttttattgt

SEQ ID NO: 17740 - DNA, 648 bp, Glycine max
  Intron number 4 from transcript Glyma12g25240.1 (locus Gly ma12g25240) derived from phytozome v7.0 (chr-ID Gm12; pos 28105418 to 28106065)
ttacatcctgagcctaatagtcgtccaacaatagggtaaattttcttcatcacatgccttttacatatcaaatatccaaattgtttgcaaatgtttgaattacctgccacttgtatgcattgttttctttttcccttccgttatccatttccttaacttttgattggaaggttgaaattaagcgaattggataataattttgaataaattaagatccttaagatggtttttcacataaaccaagactgcatttaggtcttgagattgtttattgtttaaggtttgtgatctgcatttctccttgatggacttcacatggagtttgtcttttagatgttagatcacggataaaagaagtgcaaccaaacacacgtggagaaaagaatatagagatagaataggaaacaaaatagaaaagagtatctgattttgcataattcaagatgacatgcaatcaatcaaatagcatgcagtgcaaagcacatcgcccttaaaatgcatagagacatgattgtgctgcagtgaagtacgagtaatctcaatcaaatgataactttcatccttagcaattccaactgagtgatatttcaacaatttttgttattatttaattgtgttgcaggcagttgttgcagagtgagtttctta

SEQ ID NO: 17741 - DNA, 634 bp, Glycine max
  Intron number 3 from transcript Glyma12g16310.1 (locus Gly ma12g16310) derived from phytozome v7.0 (chr-ID Gm12; pos 15491893 to 15492526)
gtgactatttacgtatcgatttcaatatcaggtagaagcatttgcaagtgttttctgtctttggttgaatagggtgtttctcaactcaagatggtggatgcttgtgtcttaactattgtttagtgttatatttgaattattggtggctttgtggttttctgagtctaggtatgaacttttcatgctgcaaggaatgtgagcttctatctacttgtatttgcaaataagcaaattgaggcttgtgttataggaatgtatacttgtctaatagagaatttatgaagaccagcttgttggggtttgataagttgtttgctgtctattggttaattcattaaacaaaatggttttgtagtttgactttttagaagcttgaaactaacttaggtagtgtttggatagagaatttcaaaattctaaggaatttaaaatgcatggaaatttaattgattcaattaaattattttcattttcaaaatagttttttgaataaagaaattcaaattccttgtatttcaaattctttatttggataaagtaatttaattttcattatctgtaaaattttatttttaaatatttattttaaaaaatgcataacagtaatagagaggtagagggaaagagaaaagag

SEQ ID NO: 17742 - DNA, 781 bp, Glycine max
  Intron number 2 from transcript Glyma13g27230.1 (locus Gly ma13g27230) derived from phytozome v7.0 (chr-ID Gm13; pos 30397715 to 30398495 reverse strand)
ataagtcaggtgtctgtattttggctggcatcttatttgacttttgctttataataatgtaattttgttacttctccttttggatacacttttttttttctttttcttaatgctatctattttgattaaccagcatgctagtgttgattgttctatcatctattttgatagagaaaagtgtgatgttattgttacttgctctctaaaggtagttcagtaatccgagcaaatcaaagatgtttgttagcctatttggctttcaattcattaagcattcccctttcttactttgtacttactgaggcattgggcgatatgcgctgctagccctttgcttcagtaagtgagcctgtgttgacacaattcaggttaattgcactatgccattaagaatttatccacccccctgaaaatttaatatgtttagtaatgaaatcgtatgatcaatgtatccgactttacttagtggaataaggcttttgttgttgttgttgttagcaatgaccaattgaccatcatgcctttcaaattaggggttaattctagtaattaagggaagagaaaattttatgcatacaagtaactttttataggaaatttattgacaatagattccaatttgtgtttccaataatgacttctaattggtagattaagaattcaccttaaacataatgtttgtctgtatatacaatagcattatataagaatataatttctactaataagtatcttgttggtctcaggtgaaggtgttgccaaagaataccaaaacatcaaa

SEQ ID NO: 17743 - DNA, 657 bp, Glycine max
  Intron number 1 from transcript Glyma13g27230.1 (locus Gly ma13g27230) derived from phytozome v7.0 (chr-ID Gm13; pos 30398683 to 30399339 reverse strand)
tgcaattcaggttctgaaaaccaaagcttttcatagtaagtccttctgaagttcattgctttattctcttgaatcacagaatctctagtttttgttaaaattgattttaactttctaaagggtgtttctgtgtgtgcttgtttgttgtcatcttcctttatgataattgtttgtaagaaatgggatttttgttttcagcatgtgcgtttagttgggaagaaaacatgagaaaagtaattttgatttttgagctttcagttttagtaatggtcctaatggataaggatagtcaatagttattactttgttttttttatacaaaatagaatttcatgttagctataaataatcaaattccctgctcaagaacacagaaattgataaagctctagtctttttgggattttgagtggagggtaagtcttaaaattcatttcattttacttggactcattttcatagcacgcaatttagtctgaacttcattacccttttctagctttgcaatggaatggagataaacgattgagattgatttgatcccgagcatctttccttttatttaaataatttttggaatttgattgtgttcttgtgtgtctgtgattttgaattttgttgtatctttgtgtggttatagggaaaagttgtgctaag

SEQ ID NO: 17744 - DNA, 490 bp, Glycine max
  Intron number 1 from transcript Glyma13g27020.1 (locus Gly ma13g27020) derived from phytozome v7.0 (chr-ID Gm13; pos 30194093 to 30194582)
acaagacagtgaacgactcagaaaggctttccaaggtttctttctctctctctctctctctctctctctctctctctctctctgtctcaaaacatttgttaatgctgaagaaaattgagaaactgaattctgttatgatttgagttatcaatgaatttaggctgcaagagtggtgtcagaaaaactgaaattttgtattttttgttttttgggctaatgggttttgtacaaacattattatgtctgcaattctatgaaattctttggttttaccgttccaaattaaaggaatgtaatgtattattttatgacaaagttttatgctttcttagtaattggtaggagtttggtaaatgggatattggaggtattgtcaatgatttttctgttttttagtctttttttcttggattatgatggtttgtgtatgagttatgttttcacattagatcgttgatgatgattacgggaaagttgatgcatgtaggat

SEQ ID NO: 17745 - DNA, 277 bp, Glycine max
  Intron number 3 from transcript Glyma12g04220.2 (locus Gly ma12g04220) derived from phytozome v7.0 (chr-ID Gm12; pos 2759523 to 2759799 reverse strand)
atcgtgattggcacttttcatgtgagtgtgtcattcttttttgcttttctttttttaaataatttcttgccaagataataagattcaatacaatttgaataaacttcttcaatctgttgtttttttagttgtaagtattcaatctaaccacatctagcttgtttttcagaaattggattggattttaaactacatactcatagcaattgcttgatgctgatctgcacactaattgtttctaatgtgactaggtggcacaaaggagtacaaagttcta

SEQ ID NO: 17746 - DNA, 555 bp, Glycine max
  Intron number 2 from transcript Glyma12g04220.2 (locus Gly ma12g04220) derived from phytozome v7.0 (chr-ID Gm12; pos 2759866 to 2760420 reverse strand)
attttatttggttctgcgagctctcgacaccgttggtttgtattcgtatcttcgatttaaagccttgcgcgctttgttactttgtgctgcatagcttgcgatgatgaatgatggatatcggttttaattaactacgctgtgttgaccagtggtttttcggtgtttaattttgacttctttatttatttgttgttttttaagcgttgaatgttgctgtgtagggattgatgttatcgtcgtacggctttgggaaataaaagtgattttaagcttcagctctttgaaaaagcttttgaaaatgaaattcaatagaaaagcagtaacacgagtttttttttttcttgttctaaaaaacataattattatggaaggcatgcaaaattggcttacactgaaactattccaagtctctataaatctgctggttattgtgtctattgtctttgaaagatttatgtttaaaccttaaaattattctattgagcaactattcttttcttcagaaattaaaaggctatttatattgttgtaatttttttttccttttgacagagg

SEQ ID NO: 17747 - DNA, 808 bp, Glycine max
  Intron number 1 from transcript Glyma13g40610.1 (locus Gly ma13g40610) derived from phytozome v7.0 (chr-ID Gm13; pos 41121280 to 41122087)
ccgtcagaagagtttgcagtactggtgatctccaggtacaccttcattcatttttataaaacaaaacaactcttttttttatccgcaattgttaatttttataaatagaaggattcaatcccattatcattctcttaccaccaaataaaccttatatttccacccaaagaaaacttgtatcttctatcagtgttaattctgatcgagtcgaatcacatgacaaaaatcctcccataatatttaacgtaattgcctattaaagttttaactcaatatcatatctgcttaaattagaataactcatgctaagtgatttatacactgtgatattgttttgtagcatggtcacatgctactcacagtcatttcaaaattgttgtcctatggttttgtttattaataatagtcaaattttgcaaggcatttatctaacaatctaattatgtaataagaaggaggggattctgtttttgtagactaagataagaagtataacagaatgaaaccgattcatttaaactatgggagaaaaaaaaaaatagtagtgtaacgcttgcatcacatcccaggttcaattaatttgatatctgatgctaggttatggcgtatgacgttttactatcgccttattaaatactttcggtattagaattttatgtcaacaagaatgtgagattctaaatttctttttgcttgtgcagttatgcttacgggtttttttatttgttgtaatatgcactaattatgcagtatactgttttttgtttttaaatattttaataacgtgcaacttttgtacagaggatca

SEQ ID NO: 17748 - DNA, 263 bp, Glycine max
  Intron number 3 from transcript Glyma10g06180.1 (locus Gly ma10g06180) derived from phytozome v7.0 (chr-ID Gm10; pos 4931880 to 4932142 reverse strand)
aggtgtgtgcatcttcaatgatactaatgattagaatcgcttcccctcagtcattaattttccagtttttgtgttctctctctaattatgggctttattatttttattatatttttttgtttcgtagtgtagcagttgaaataggttggtttttttattacctgtgtgtttctaattctattacccttttgacttgtaaagcataaatactttaaaatgatttaataactatatttgtttcttgtagatcaaatttgtcgttg

SEQ ID NO: 17749 - DNA, 707 bp, Glycine max
  Intron number 2 from transcript Glyma06g44980.1 (locus Gly ma06g44980) derived from phytozome v7.0 (chr-ID Gm06; pos 47773843 to 47774549 reverse strand)
ctataaacatcagcaaggtaaggaacaagattggtgaacagtgagtgactgaggtctaaagtaaattttaataaaaaaatattttttactttaaataagagttatatatcaagtctttttgtcatatgtggagtttttttatctatgagacttttttctttaaaaaaattaatagtgaatgaatttttgttagtgagcctaaaacttgtacgttgttttagtgcatgtttggattgaaattataaatgtggtgcgcgtattttaatataaatccatcggataaaaacaaaatgaaataaaaaggaatggtcttgatcctttgataaaatcacttttgcctcaaaagtactttttcacctgaaaactaaacatgtacttagccttaggccgacttgtaaggagactgatatgctacagtatataagtcttgtgaatttttgttagtatgtgtgaaataaaccattatgaaatgtatggcgaaaatttctgtatccaaattatgaacttcagttcagatcttcaatatgcagccccatgcagtacaatgacaaaacacaaaaacagaaactaggggatgaaattatgctttaacttgttctaaacagaacccctgacttaggtgaaaaacttaactaattgcatacacaatttcaattgtttgtatcatatcaggctttccttgttggcaaggacttcggtgccatccc

SEQ ID NO: 17750 - DNA, 610 bp, Glycine max
  Intron number 2 from transcript Glyma11g34590.1 (locus Gly ma11g34590) derived from phytozome v7.0 (chr-ID Gm11; pos 36369212 to 36369821 reverse strand)
tgatatacagtggcggatcaacttgaccaaaaaatgtttaagggacccaattataattatgattatatcatataaattaaatgtgattgtttttataatataatttattgtggatgatgttaagtattaaattatattattcaaatattaacgattttttaatcatttgtcttttatggtatgaaaatatttgtttttctgctatattaatgacactcagtttttttacgattattatacctttatttgctattaaaaaaatataaaaatacttcttttttaaaaaaaaatgtaatataaatcaattttttttacaaaaaaaataaatttgaatgaggatacataaaataattaattttttctacggatttttaaataaatataagaaaataatcatttcttttccaaattgataacacaatttgtagaaattttttgtaaagaaaattcgaaagatctcaaaattcatgaaaacattatcataaaaagtccacaaagaaaattcaagtcattgtttttcgttagcaataaaataatataaaagacattgtaataaataatgatgaatttaaaaaataaaaaaaaaatagttttggagcatatcaatttg

SEQ ID NO: 17751 - DNA, 460 bp, Glycine max
  Intron number 1 from transcript Glyma05g37720.1 (locus Gly ma05g37720) derived from phytozome v7.0 (chr-ID Gm05; pos 41264971 to 41265430 reverse strand)
gaaccgccctcaccgccatcgtcacaggtctttcttcccttttcttttattttctgaaaaaaatataaaaaaatcctatcatgtgtttttgggtgctgagaaaattgggttgtgtgtgtttgcataaaaagctttaccacttgaagcaagtttaaatctttaaagggcgtgtgtccgaggatgccatagtctacttggaacacttatgtgggatgaaatgaaagatgacagaagttattttccttatgttgttttatagtttaatgatgatgcatcacttatggcttattcaatgatgacatgagttttgttgaattattgaacaaatcagatcccatgtaacctgttataattcagatgggagtttgaattttgtactggtttcaactataccatgattcagtacttatttagtccatttttaggagcaacaagtggccttggtctggagaccacccgg

SEQ ID NO: 17752 - DNA, 671 bp, Glycine max
  Intron number 2 from transcript Glyma13g09310.1 (locus Gly ma13g09310) derived from phytozome v7.0 (chr-ID Gm13; pos 10456529 to 10457199 reverse strand)
attgtacactgatcaaggtataatttctcaaaatgattaattatgataatgatatttatcatggcctctttgtgagtccatgatttggcagctcagcatcttagggaacctacctagcccacgtggatttttaaagttactttattaacccacctattgccctattttttttttcaaactacattgaattttcctttattcttattcttatgtgccaaatgagactttgttgtcccccattcaatcctctgacctaagtcaaaaactttagccaaatttcattttacaagaagatcattctcattctacccacaagtgtaccacttatttgattgcctttgattagaaactcatgtgaagcagtattttcttctttgatctactttgactgtttaaacagaaaaagttgaaaatttgaattgaaaaacttattgaacagataaaagttctgttaaaaccccattaagtcgattgctaaaaggttaagttatgaaaaacattaggctaccccaagtggatatcattaccagatcattttttttccatagttgttgaaaaaatcattaacatggagataagttcatgcaatatctaatggattctttttacttctttatttccaaaaataatacgcagtttgatagtattaacaaacctggaattctgctgga

SEQ ID NO: 17753 - DNA, 420 bp, Glycine max
  Intron number 1 from transcript Glyma13g09310.1 (locus Gly ma13g09310) derived from phytozome v7.0 (chr-ID Gm13; pos 10457203 to 10457622 reverse strand)
agaacttcagcaacagaatcaaccctccaaggttcactgttatctccccttgtattacaactttggttttccttttttttcccaatggtatgcaaattatgtagattctcttggcatttgtggaaatttaggcctctttgggattttcctgtgtagcttaattttgctttaataccatcttaaagtaaaaagaaaaaagaaaacagcaccacaaaaaattaaaagcttcagtaattcctaacttaactagtcatatgttatatacggaaaatgtcatcaatttaatcctcacttgagtcaagttaaaactccctatgaacttgggtttgtggtgggaatttctaatacccggaagaagtgactcttttatggtaactctgtttccacttcgcagggtctctgtggacaacgatagttgcc

SEQ ID NO: 17754 - DNA, 618 bp, Glycine max
  Intron number 1 from transcript Glyma09g04940.1 (locus Gly ma09g04940) derived from phytozome v7.0 (chr-ID Gm09; pos 3730146 to 3730763 reverse strand)
ccagatccaaacatcgacgaaagttcaatactctaaagtcaaaatcagaggcgcaatcgaaacagatctaaacacagaagcgaaaccaaaaccgatggcaatagatctacaagcaaaagctacgacgaaagaaatagagattagtttagtttacctgtaaggaggtcctggtaaaccaacatgtttacagagtttttctcggatcgctccaaacaacaagatattcgtgcggtgaaactggtgcggagcgacgcgagagaagagggacgaaaaacttgtgtgcaactcttatttatagtccagggtttccagtttctagttccacccgctgaaattaccaaaagaaccccttgtccagttctcctattgggcttctatttcggcccatagaataataggcccgtaattgaaaaagcgggaatttgaaatggaaaagagagcgtggtggaatgtgtggaggaagaagacacagcatgacggaaatggaggaaacggtgtctcgcgtaatctccgagctagaggatctccgtggaaaccctcaaccaccaccactctccgaacaaaccctaacgaatcttctatttctcctcaaacactctctttcagagtctctctacg

SEQ ID NO: 17755 - DNA, 817 bp, Glycine max
  Intron number 1 from transcript Glyma08g07170.1 (locus Gly ma08g07170) derived from phytozome v7.0 (chr-ID Gm08; pos 5160526 to 5161342 reverse strand)
ttttcccagccgttacgcccgaaaaggttcccctttctctttctcttttcattttattcaaaaaaaaattcgctgccaagaacatgtttttctttcttctttttttttttttttaaagattggtttttattagaaaaaagaaacaattttatctcaattgttgtagaggcatgactcggtgtcgatttggtttcttgtctcactgcccaatttgaaattgaagtgtttgaatttagtgtgctaaatcgcttgagggaaatagagaagacaaaactgtgttagatagggattttttttttttttagttcatgtattggtatccggtgatgatattcttatattgaattaatagaaaaatatatatattgggaatacattgctgagagtgtaggttaccctagctgtggctttgctagagtaaaatttgtgtcaagtgatttctcaatgtagttctgggctagtaggacgctaggaatgtagctttcttgcttttctaggttttagtcttgctccctttgatgccttgctattgcttcctctttctgtaaatgaccctttggttggtttttgattgcttgattatgaaatgatggtgattctctggtaggtgaatggcatctatgcccgatccactgtgaagcttttaaatttttaagtgatcttttgtgacctgttaaattattccattggattggatgtgcctcctgttttgcacaacttctataaaatggttgcacattttctgggtttgatgatccttttatttttcttcttaaatgcaggtgcaggctgtattattactcttgggagcacagga

SEQ ID NO: 17756 - DNA, 737 bp, Glycine max
  Intron number 1 from transcript Glyma12g02980.1 (locus Gly ma12g02980) derived from phytozome v7.0 (chr-ID Gm12; pos 1908695 to 1909431)
ctaaggtcaagggcttccccgcttggcctgctaaggtctcactctcttccttctacttttcttcttctttctctccaatattattatgattttgcgttttgtttttttttgcgatgcatatctcatatcactgctgattttttaatggttcagcatggctttcatgtccttttttcccgttagtttgtgaaattgctcagatgagggattttacattgtttaatgtgatatgttggtcatccacctagtaatatggccagtatagtgaatataagtaggggcaaccctcgtcaataccctagcttttagggttaagttatgccggaagtcaaattctaagatggtactagagtccggttgggtctatagaaatacctgttattatacctcctatagatgtccagccttgcaaatttcatgctcgagggatatgactaaagtgagggacaaccctcatcataggttagcttttgagattgagttaggctcaaactcaatttctaggatatgatttactttgcttttagtttacaggttatttaccctagtgttgttagtattcttggtaaatttgatctgttgttgcttttgtatgatgtctatttctgcattgttataaggttttcaacttatggtgcttggttgaactttcagttattattagtactgaggatgttgattttgttgcatctttctattcagataagcaggcctgaagattgggagaaagtccctga

SEQ ID NO: 17757 - DNA, 1069 bp, Glycine max
  Intron number 1 from transcript Glyma08g43650.1 (locus Gly ma08g43650) derived from phytozome v7.0 (chr-ID Gm08; pos 43439645 to 43440713)
aggatctcacagaaccacttggaacactctcactggttcgtgttgtttcctttcactcttctttctattccttttgtgtttttttcgcttcttcacgttttgctttgaaaatgcaccccaaaaaaagaaaaagaaaaaataacagagaaagtgttcgaaacttagcttttcttgctttggtgttccttttgtttttcttcgttgagtttgtgttaattaattccacgttgttattaatcaaatgatcggtgcatttcttgcatgtgaacttttattgaagtatatgaggctgaggattgagatttgagatgctgtatgtagtgtactgtgttctggtgcttggaaaattatgtgtttgtatttgatgtttttagaattagagtgagtggggaagtgagaattttggagctggagcagggaatcaacttgttgaagttggtgtcggtgagttgttatccgatattggttagtctgtttctgcatgcaatcaaggttttaaattgaggttgcaatcatatgggtaaactctgtcgacgatggatcctatattgcgagaaattgcagacaaatgcggccacaattttggtggcagagacctcaaaacattcatgttgcagcccgaaatcgcggtcggggactgtttttttaaacctggcatgagataaatggaaactttgaaagcatataggtattggaaattctagacattgtactatatagcaagttcatcgtatgttacaatggaaaattagtttcaagagcacattttttggtgaaatggactgtttgtgaattcgacaaattcaaatctttgtttggtgataatggagaggccttaaacaatgaacacaactctagatatcattaggtcttagagttttcttcctttataaaataagataagaagccattgtcaatagtatttgacatgtacttgaatgatttatgcaccttttttttttcttttgtttaggaaaaacttatgctctgtactttgtgtcttgaaactcacttggataagttctttgttgcaggaagtccaccattggtcatagcacgtggtgggtcg

SEQ ID NO: 17758 - DNA, 827 bp, Glycine max
  Intron number 5 from transcript Glyma10g44560.1 (locus Gly ma10g44560) derived from phytozome v7.0 (chr-ID Gm10; pos 50887701 to 50888527 reverse strand)
cactgtcaaggtatatttctcttcttcataacaccaagccacacaagaggattaaattacaaatatgctttttttctaactttatgattcctgcctttaaaaaactcacatgcttcttgtgcaactatgcatgtcaaatgagcctcatctccactgtcaccaacatttgcctatttttccgtgcaacatagaaaatagcaattttaatcaatgttgtcaagattgagagtctacttaacaagttcgtaaaacatagatcataagatcctacctaaatgtaaagttaaaactgaaatttcataaacataagtccataacatccactattagtctactagcactcatggcagagagaatcgagatttgagagattcagaaatcagagtgcaagacagccagtgtgctcacagtcacagcaagtctgaatgcacagcaaaaaacaaattcagaaatcagaaccaagggattgatagagacgagagggagagataatgattgattcgaagaggcagatagaatggggtgggctgcattagaatgggggagaatacaccaatttaggggaaaacgaaaggctgaaatgcattcagggcagaccagatcacacaagatcacacaccgcaacttggaaaacccagctcccaagataaaaaaaaaacatcatcacaacctaacatttgattaatatttatgatgaaatattaaaaactcttaatatctacttgtctggtaaaataaggttgatattgtttgtattccttggttttgagtcttgacataataaacttgtttgatgagttggcagacaccttggctggatcagaggc

SEQ ID NO: 17759 - DNA, 578 bp, Glycine max
  Intron number 2 from transcript Glyma11g13760.1 (locus Gly ma11g13760) derived from phytozome v7.0 (chr-ID Gm11; pos 9780544 to 9781121)
ccaatagtgttatccttattcttgtggtcagtatttctcttctttctttcttctttttcaatgagcttggatttgtataacaatatgtaattcaatatttctccatattttgctttttaatttcacttgtgacttctctgatttctattattatcatgttttagatttattttgaagaactctgtgtttagattggattggaaaacatacctagttcaagctttcttcgttgatttattatgcagaataatcaaattcctatgtttcccaatttagtttttttttcagggatagcaatctcaatactcattactcaacctctgaaatctgtcttcaacttattctgattactgatctaagcttcaattttattttctatgactgaaaatgaaaatcgaagcctgaaatcagaagtactaattactaaagtacaatttaattgtgtcttgatatttttggttagaagagttatagtcataaatggtaatacttcatatgaaaagttttcagaattaaatttgaaaagaaaaatgactctgttttgatttcttttttctttggcagatatactagtttgt

SEQ ID NO: 17760 - DNA, 787 bp, Glycine max
  Intron number 1 from transcript Glyma08g41220.3 (locus Gly ma08g41220) derived from phytozome v7.0 (chr-ID Gm08; pos 41239072 to 41239858 reverse strand)
tctccaaaccagtgttcaagccccaccttcatgtccgtaagagatctcaactttcgacccatcatctaaaatttcttcctttcttcttctttttcttgtctatgtctttttgaattctcttcctttcttcttgggatccaaggttcggtcttttatgcttcattacttagctgaagttgtgtttctttacttagctttcgtgggtattcgtttatagctcttaatttggtcttttgtggaacttgcgtgtgttttcttcataagtaggtagttaaagttcgtgttcctttcacctactgggttagttaagatgtctttatgttttcctaacgttttgggttgttttggatagtgtttaaatgcttatgttttccttgtcggaaagccaaaagaaataacgtgaaacttatggagcttaagcttgagacttttgagcagatctgaaacttgtttcacaactatctttttcttttctttgataactcttattgtatatcaccgactaattaaaggtggttgaaagtaaattgacctgaattttgtcaattatggaaattggaaagctttatactttcaatgttaattaagtgatggctgatgatttaatggtcaagagttggattattctttaatatgtatcataaatttgcaagttgtctgttttcttcattataagcaagtatcttgctttgacatgagatttttatgccagatcttgagtggatgttgtggattacagccttggtgttgtagttctgaataagaattgacccttttcaggttctag

SEQ ID NO: 17761 - DNA, 1010 bp, Glycine max
  Intron number 3 from transcript Glyma10g03630.1 (locus Gly ma10g03630) derived from phytozome v7.0 (chr-ID Gm10; pos 2697742 to 2698751 reverse strand)
gtccctagtaagtttccttaacaactatttttatgagcacattcccatggccaaagagagctacgtttacatagacgaatttaatttgcatctgaggagcaattactcaataatcattgaaagattcattgaatattgaataccgaatatcgagtattaagccatattatatttatcgtgcattactaatattctaaggacgaacaccggttcggtactgggatgttattataaaaattgtattgtattttattttataaatattgtcgtaactctatttatcaattaataattgaaacaattgttttacttctgataatatagatacacttctcaaacctcactaaatcttgtgttcatttgtacgtgtttactatgatctttaaaattcatgttattaatattgctaacaatattaattttaaagtaatatataacgaaatatagatatgagatacatcatcaataattaatgaaatgaagcttttctttaaaaaaaatgtaggtatcaaaactaaaaaaaaattctttagaagactaacattggatatttaagaataccttatttttagaaagaaagaaaaaataatactttttaaacttcataaagtagcccctagacatgacatcatatttctcatgaacccaccgcaacaaatgagttcaattcaccaaaagcattgaaaatcacatcatgaggacagaatcaacattatgcataagtcatttcgaggaataaaggttattttactcgcagataacaggacctcgtaattgaccacggtaaacgagcaaaattcctacaagtacatgaatacacgattgactaaccctcattaatcaactaattaaattaaatggatatatatatatatatatatatatatatatatatatatatatatatatatatatatatatatatagagagagagagagagagagagagagagagagagagagaagagaattttgattgttactttgtgtcttttgatttacagattttg

SEQ ID NO: 17762 - DNA, 783 bp, Glycine max
  Intron number 2 from transcript Glyma10g28800.1 (locus Gly ma10g28800) derived from phytozome v7.0 (chr-ID Gm10; pos 37665302 to 37666084)
ctagaaaggataaaacacgagcacaaaaggaaaatgttggtaattttatcttaaccttcaaaatttccaatcatcgtccaactgcgaacgtttcagtttacttcaacagccattaagattagcctctatatgtttcacagtttattattattattattattattattattattattattattattattattattttgttttcgtgggtggaatatggatgcagcattaacaagtaacaactaagactttaccttgtttgactaattcgtccacttttcaaatggttttattgtatttagtgatactttttggtcatttgtgtggattttcttctttatataaggaggttagttaatgtgttacagcttgtttcttacctattatagtacaaaggaggaaatgtaaactttgtgaatatgctgtttgaaaacaatagacatttatgatgggaaatgagaaattttatagtgctagaacgataggttcatgtaactaggctgaaatttgcactgttcactcatatgaagcaagaggtttatggcatattatttgtttgtggaattctggaagcatgatttctttgcaagtttcttctattaatttccatgcatccttgtactaaaatggggcaatgacgtgggaaatgactccttgattttgcatatcctaaatatgtttgttcttgtgtatgtatgtatgaattaattaatacatttttgatgtgatattctgaccacaattcaaaaaggcttcatcttcacagcttactggatccgtgggtgt

SEQ ID NO: 17763 - DNA, 549 bp, Glycine max
  Intron number 2 from transcript Glyma07g03460.4 (locus Gly ma07g03460) derived from phytozome v7.0 (chr-ID Gm07; pos 2425452 to 2426000 reverse strand)
aagcagcaccaaccccactgaatttgtaaatcacggtattattcatcgccttcgttgtgcagatatttgactaaattagcatttcatggtttgaattgcttttcttgtaaataaactgaaatgatagaaagaaatggtatatccttgcacagtggtagctgaaagcatccgctgtctattggtgggttaacaaactctattttaaacaagacttatggggtttgtttttgttcatggtggggttatataatgataaattgataaccttaagctgatgtcattgtaatgtagttacttttacaccaccctatttccttcatagggccttaccatttttggtgtactatggcaacatatatctgttgcatgtcgcagctcatttaagaaatgtggtttgagtgacatagtggtttgatttggtctgtattgaattatcaaataagtatgttctttaggtttgactagcactgtccatatacttttcttctgggctgcacactaaatatttttggttgcaggtgtaattctttggaatcagactcggcaacg

SEQ ID NO: 17764 - DNA, 702 bp, Glycine max
  Intron number 1 from transcript Glyma06g11640.1 (locus Gly ma06g11640) derived from phytozome v7.0 (chr-ID Gm06; pos 8972516 to 8973217)
acaccgtcacccacaaaacgcagcaacctttgcaggttcaccctttccagatctctttattattatgcctcaagattttaatgtctgaatgttaattgggcgcatagtgtctgtgtatcttagcttttgtttctgctgactacctatttcctttttattttattaattatattcatattcccttctgaattacttagttgcttggtgaaggttgtattttttgctactacaaaaatgacatttggacacccaaaatgctcattgacacctagtgtgagagataaatgagaaaaatataggaatgataggttgtaagatgtactaggaggggagagataaagagaaagagttttaactgggtgttttgaaaaatggggtgctcaaatgtcattgctcttcctacaatttagtttcaattcttttgtggatattaacctgtttattttgtaaaactaaaacctactgcaaggacctaaaatcatatcttgcccagtagaattgggagggttttgggagtgaagggagtttggttctgttttgtatctggcaatggcatcttcagaccaaaataatgccaaaaaaatatggattttgttttggttctgttctgtacctggcattgggttgttcactgtttgattcttgttgatcgtcatttgtttgtcagattgcaaagcgcttagagaaatttcagacaacaat

SEQ ID NO: 17765 - DNA, 902 bp, Glycine max
  Intron number 1 from transcript Glyma10g27960.3 (locus Gly ma10g27960) derived from phytozome v7.0 (chr-ID Gm10; pos 36780796 to 36781697 reverse strand)
aagctgattctaaaggagctggtctctctctcagctaaattgtttttatttggcttctttgtgtgatgtgtctcttttcgaaatctgcattttgagtttctatgtaattggtactcattagtacttcactgcttcacattgcattctctgtatctgatttgttgggtattgatggttgtaagaatcaatttagtggattactttccttagatgagagtcttgcgcataataatatacctttgagctattacatgaaattccacaatctgtagctaacccccatttcgtgtttctcctttaaaagcagtatgtacttttttcttcttctctagtttgcctaattatttgctggagttgcatttctttgcttatctcctccaaattctttcctctagaaattagttacttcctttcttttttttttttttcttttttttttatcgaagttgttactaatatgttagtttttgttaagagggggatttgaattcctgacctctccctccttcccttctcccttcaccatgaaaccaaccttatatctccaattaattaattcctaatcagaattcttagttatgacttatgagataccatagtggggggattcaagatgaagatagacctgttacctccctatctcaaattatctttgttatagccccacacgaatataacttgtttgtctctctttgcagtgcatattattttgattgattactgtctgaatatgcctcatatttttgggtgtgcttgtttgaattggtttagttttccataattgatgggaaaacctattttgttgaaaagagtaaagatggtcagatccataaatttgctacttgctttgaaatctggcaaataagttttggatttttctcctataatgctagtctgtttgg

SEQ ID NO: 17766 - DNA, 350 bp, Glycine max
  Intron number 3 from transcript Glyma14g01430.2 (locus Gly ma14g01430) derived from phytozome v7.0 (chr-ID Gm14; pos 808511 to 808860 reverse strand)
tccgatccttttgaagtcataacaaattctgtcaagtgagttacaacctttcaataaatttcatctatgttttcccctaatttttagtttataccagtcatagaaatctacaagtaaggccttcgggctgggatcattcacttagttattacaaaaattgagttttaaagtttgttaattgaagtttagtcttctgaagtaatatttttgttttaacattactgcactgcacttttggatgtacagtgttttatatgtctaaacaagtcaagttattgatttgattttattttcattttctgtaatttttttcaggactgttgagaaacacttacagacctttgcacatc

SEQ ID NO: 17767 - DNA, 295 bp, Glycine max
  Intron number 1 from transcript Glyma14g01430.2 (locus Gly ma14g01430) derived from phytozome v7.0 (chr-ID Gm14; pos 809258 to 809552 reverse strand)
ggtagccgcacagtcttcccaattggcaagcttcagtatgtactcttcacttttcttcttcttcttcttgttagtgaaaaataaaatctttgtaattttgggtgaatgctgtattttttgttgttgcttgtcacaatcaggaagtgcatgtgtgcatgcgcatgtactggattacttttgatgtttcttattatgtgtgttggtgcatagttaataatatttattttaggataactgcaattctgatcctaggatgatgtttttttatttattttgtttcagggggttgcgattt

SEQ ID NO: 17768 - DNA, 285 bp, Glycine max
  Intron number 3 from transcript Glyma13g19830.1 (locus Gly ma13g19830) derived from phytozome v7.0 (chr-ID Gm13; pos 23312049 to 23312333)
cacaacgtgtgtggatcgctaggaactacaaggttgtttcttcgctgtcctcgttctagaataatctattcatttatttgattccaatttccatctctttattttattcgccttgctttttagttatgatgttaaatattatgttattgtcttttttattattattgttagtcctaaatgtctgtttgttttcttattaatttattctttctgtcactgttatttctcatgttgttaattgaaactacaggggctacaagataagatcaatttggtccctattaa

SEQ ID NO: 17769 - DNA, 342 bp, Glycine max
  Intron number 1 from transcript Glyma12g01900.1 (locus Gly ma12g01900) derived from phytozome v7.0 (chr-ID Gm12; pos 1157671 to 1158012)
agggatatttgtaggaacttccagcgaggcaggttattctcttcttcttcttcgctgtttcaatttcaaatgccaaacttattgttgcgttgtttctatgccattattcccctgcgcaattatttcttttgattcctcactgtttctcaaccattagtatataacaatataaatctttgcatttacatattatatttgttgttggctcgccctttcaagtcgtgctatcatataaatgtgaacaaaactgctatttgatctttaatcttgaattgaatttattcatcacaagttttgaaaatgtgttttaaattgctgtggttcatctttttagctgtcaat

SEQ ID NO: 17770 - DNA, 679 bp, Glycine max
  Intron number 1 from transcript Glyma07g01840.1 (locus Gly ma07g01840) derived from phytozome v7.0 (chr-ID Gm07; pos 1225328 to 1226006 reverse strand)
aaacagtccctctttgatcaggttattccctcttcctaacactaatttgtatgttcatctactatatatgaatcttatgttctttaatttatagcaatttgcaacatacaaaaaatgttagagatcacacattaactacttatatggcccaaataaatcgccttatgagctaagctagcttctgcggttgatttaaattcaaactcaaattctaagatgatatcagagtcaatcccaatgattgttgttgagccatcatccgatttcggacaacacaagctatctttgctttgttttagtctttgcaccaggatcattcattagcaggtgtaaaaatgcatagtcaattggtagttaatgaaaattacatattccacttcatcagaatcctgattaccttaaatcacaagacacaggaaaattgtgccatgttcatagcaggcatggcattagcaactatggtaactggtaagggaagcatcatgcattggaactaataacagataatggaggcttccttcaatattgtttcttccaaactcaaagaatccacactttcagatggaatgtatactatagattatgcaatgttctgctagctccatagcacttcaatgatggattttaacattggttctctgcaggggttcctggacgaacagtttatccaactggaaga

SEQ ID NO: 17771 - DNA, 643 bp, Glycine max
  Intron number 1 from transcript Glyma09g30190.1 (locus Gly ma09g30190) derived from phytozome v7.0 (chr-ID Gm09; pos 37074390 to 37075032 reverse strand)
cagctttaccgtgcttttaagggtacccttttctctctacaattttgttgattatgcttgtaaattgtaatcatgccttagaactttaattaggtagttatttgtttgaaacttccccttgaggaagatgctgttgctggacataaatattcaagttcaatttcatgccagcattaattttaatctaatgttgtatcaacctatttgcatgcaatggagatataaggtggattggatggttaaggaagaaagaaagaaagatgtgaaagatcgcggattcgatccctctgctaacaaaactaacattctaacaaactatcatttgcatgcatgctttaattttgaagtttggatacaagccctgactgccaatgttgtttacttgttatatgatgttaattgctaacttaaagagtatttttcatcttatttttatttttcaagaaaatgtaccttgtgaagagtcttgaatgactcttcttagttcttacaaagagatttttgtgaagagtctatttctattgctccagatttactctaccttaacttgtacccttagatccttgagttgagacctttaatttcgttttgatcctgtgttatcacaggatttgggtgtgatacaagtgctgttatcaatata

SEQ ID NO: 17772 - DNA, 720 bp, Glycine max
  Intron number 1 from transcript Glyma06g04120.1 (locus Gly ma06g04120) derived from phytozome v7.0 (chr-ID Gm06; pos 2869077 to 2869796 reverse strand)
gttagtctgtcattaactttttaataaaaattattaatatgacatatttgtaaagacgtgacactcaaatagagttgataatccaacacatatagtcttgataccacagcatacactaatagtatagtatgttgccgttagtatgtgcatgcaactacgtgtcatcaccatgtattcatttttataaataatattctgctaaaaaaaatgctaaaatattctggcttaactcacatcatgttgaggaataaatattatttcttcaataatccaaaaacgtgtgcattttatttaccgtgtatatttttcttacccttacgttactttcattttttactaacttcacaaatacattagatgcgcagttgcttgcttaggaggctaatctgattttttcaatcgaaattagccagctaaaccctctgaccccttctctcgccatgcatctctcaagcattcaaacaaaatttatgaaaccaaatgccgttcaatatcctcttctttgctttggttcttttctattttctttacggagatcttagatggaaaccaaagtaatttctggttatctcttttaggcattgtttctgtcaaagttacccgtacgtgcatggtttacattacaccctcgtaactacttaatttttccttggagaatgacatccggtaacttttctctttacaggactctccggatataaaatctttcaagaaattccc

SEQ ID NO: 17773 - DNA, 616 bp, Glycine max
  Intron number 1 from transcript Glyma11g15460.1 (locus Gly ma11g15460) derived from phytozome v7.0 (chr-ID Gm11; pos 11091889 to 11092504)
tgcacttcacattgctgccaagcaaggggatttaggtatgtcttcaatgtggttttgtctgttttttcttttgtggtgtgtgatcttcggatggaatctcagttttgtttttgttgagatgccttgaagagaaatgcaagcaacacactcttttctattaattgaaatttattggaaattacaaaattttgtgggtttcacatcttattcgatgaacttttctcatgattttgtagttgtcaataattttaactaatacaagaaagtatgtcggaaagagtgtgttactagaattcctcgtgccttgaattttttgttaatggattgtcctgaactaaaacccgacccaatattttggagctcaaaatctaaagatttgtttttttgtacttccttggaatgtgaatcagtttattgggttgcaattagggtaaaataggggatgggttgttgattgtatcattgatagagactctttgtatttgttctcttaaaagaaattgaatctctctgactgtccgtggatgtagaggtcacattggccttttctttttttattatttttgtacttgtcataataacagtttttcttgttgcagatattgtgaagatcctg

SEQ ID NO: 17774 - DNA, 775 bp, Glycine max
  Intron number 3 from transcript Glyma05g33390.1 (locus Gly ma05g33390) derived from phytozome v7.0 (chr-ID Gm05; pos 38055437 to 38056211 reverse strand)
ctttgagaagttgcctgataactacttctgccctggtaatttcctcttgttagttgcccatcgcaaaatgccattttatcctgctcatatttattcttcattcatgagttttgtaaattacttttaaaaaacaaagagtttaatttatagattaccatgcacttataaaaattggcctttttactatgtcatgtcattctattcattaatatatgatatgatgataaaataaatattataagatagtctatatagattaaactcagagagattgatggtacattggccatatatacacacagcatgtatggtatggatgaatatgttcgtttctatcttgcttttcaattggagttccccaatgagtcaggctcttgtaaattgtaatgttaacagtgtgtttggattctttgaaatattagctatcgtgagtttaggtaaacaaatgttcatatattttagtctaaaattgattttaagttgcagtaacttaacagtaatttaattttattgttaacttgctttcagaataaaacatttaaatatagtaaatcatattacttcaaagttcaaaatttattttgtaaatactcacccgaacacagttatgataagatagaaaaatgtggttttggaatggttaatggtcaggcagctcttgttagagcttggtagaaacagaagagttgaaagaagttggtaaagtgcattatcattgccataaataaagtgttttgcagtttgtggtgctccaaagcgaagatttagggcctat

SEQ ID NO: 17775 - DNA, 457 bp, Glycine max
  Intron number 1 from transcript Glyma05g33390.1 (locus Gly ma05g33390) derived from phytozome v7.0 (chr-ID Gm05; pos 38056668 to 38057124 reverse strand)
tggtaaaaaattattatttactcaaaatgcattgttgacattgtaatatgcagctagtagatgtgtaaaatacttaactttaccgcttacaataattcttcaatttctttctctcacgtctggaagcttaaaaacccgttaaacggaaattgtaacatgaaaaccagcatgcaccctgtcttactcaatcagtctttcatgtatataaccttgttggttgtgacatgatagataattttattttttaaatatataattatgagtttaatatctgatttgtttgatatatataaaaaaacatatgttaaaaaatatcaatatttcagcacttcaatcgaaagatattcaagttcacaccaaaaataaatatatataaaaaaatagaaacattgtccacttggacagagaggataaaacaagagtgagaaagtagatgggttgtgtggtgtagttggga

SEQ ID NO: 17776 - DNA, 708 bp, Glycine max
  Intron number 3 from transcript Glyma11g36010.1 (locus Gly ma11g36010) derived from phytozome v7.0 (chr-ID Gm11; pos 37564711 to 37565418 reverse strand)
accaagaagctagcaaacctactgataaggtaagaacatgttatgcaaactcgttttgtcttgccctatctcttccccaaacaaaagaaaagaaagaaggcttatttcttggtagtattttgttaattgcaactatatatacttctttaccgctgagagcagatgtaaatactgtttcatacccacgtggtttctaatacattctgtcagagggttttccctgacttccataaaataaaaatacctgaattgtcagctcaacttacctgtaaatgcagatgtagataattgagcattaaaatttctaatttctttcgttgggacatttgtctgacattaaatgtttttttcattaaatatgttgtcattttgaagcttcaagttttattccgtagggtgttgttctataatgtaatgaagtaatcaaaccatctagaattatggagagttattattgggaatgttttggcatggcaaatcacagccttttcacatttctttcccctccatcttgagcttcatgtatacaattagggtgacaagtatgttagtcctgccattttggactttgaggaatctgtattcaatttcaatatatggcttgaattcatactctcttttatgcctatatatggtggaaacaaataggaatctaatatggtcaaacatgcagatacaaagacgtcttgcacaaaatcgagaggctgc

SEQ ID NO: 17777 - DNA, 874 bp, Glycine max
  Intron number 1 from transcript Glyma11g36010.1 (locus Gly ma11g36010) derived from phytozome v7.0 (chr-ID Gm11; pos 37565771 to 37566644 reverse strand)
tttcacaaagtggcttttttttttattatcacaaggtttggctttttagtttttattttacagtttttgtggataattctataactgtcaagggaggaaattggtacagatcaaagtttggttgtactttgccaactaaatatcatgacatcaatagatacttagatagattgatgcctttatttttatctttgttttgaactactatgattactggtacttttcttctggcagttgttacttaaaacttttgttgtctttggaaaaagggaaacaaaaaaaaggtaaaagggtggtgctatgtaggatttggttttgtgttcctatgtttactaaaaatgatgaggtggttttgctgccttattaatgggaaaatcgtactatagattctgttgcataggcgttgtctgtggcggttgtcgtacaaacgtggccgcggttggggaagaaactaaaacacggtttaattaaatgaattattcgtttttttttttgtgattctctttagcttgtgatgtctgttttttcttgagattttaaagttctgtttgtttatcatggattggtagctattaattaaggaatttcactcttcgtctctctcatagtcacttttctggtatcagaaaggttggaacagtggcaattgcatgatctactttgctacccttttatgtctttttttgcttcttgctcctgctacccttttattcttattttgttttctctttttccttacaaaatttcttcagttattaattttttaagtgaatgtgtttggcttgcaatcttcaatgcattttaagattgattaagctttaattcatctttttttttttctgtttttcctgacagcagttttctgtataggagt

SEQ ID NO: 17778 - DNA, 798 bp, Glycine max
  Intron number 2 from transcript Glyma06g13150.1 (locus Gly ma06g13150) derived from phytozome v7.0 (chr-ID Gm06; pos 10296677 to 10297474 reverse strand)
gcgtcaggattattggcggtgatcatagacttagggtacgtaactaacttatatccatctcagttcaagctacatactcaatggagtattcttcattaccttcaatattttattatctactttttctttgctttggctcagaggagttttttttcctctcttgcttataaatttgtctcttaattttttatggttagatgatttctccgaggcaaaacgtgccggaaaaataaaaggatattttctgcacatattgcttcatatttcttgagttgttaaaattaaattatttgtgcattcttgttcaagtctctgcaacattttagaaagcagaaaataactgttgtgttcagagaagtggcaattttgtccggtcactctgcctcgtttcttgctaaatttttcgttgtctagcaattttaccaactgtgacttgtcagatcagtattagttcagatttcttcaattctattgtcagatcagtttttggaatagttagttgttagttttgacaagcaattccaattatacgtttacacttctacaaaaacatatgccacagatatggttttcataaaccacctcccattcatttacaaattaagaggaaaaaatctgtcatttcaattgtaaatggtcatgtgataaacttttataatagccattttaattaaaagttatatctaaaataatttctaactaattaacaatgtaaaaaatctcacagcatatggaaattaaaaaaaaaagtttttgatgtaagttgtgtctgttgtgtttcagaactactcgtctatc

SEQ ID NO: 17779 - DNA, 732 bp, Glycine max
  Intron number 2 from transcript Glyma12g11080.1 (locus Gly ma12g11080) derived from phytozome v7.0 (chr-ID Gm12; pos 9098944 to 9099675)
agaaggcttccaactgcttgcctaattttaacttggtagtgcatacctttctctgtttcgtccgttgaagtattcactactgatataattaaaatagtgtatacaagggaataacttttagctccaaaatgtaatttcaattcttagagtgagtttagaccgaaacttgtgtatactatttttgttatatctagagttgtgcaaaaattggtttggagaaaaaaccgaaccaaacagttccatattgatttaaacagtttgatttttaaaccaaatgtgagaactgatttttaaaatcagtttgaaatcgaattgatcttaaaaactagattgaagattgaactaatttcaaattagttttcaaattatttttttataaatattttgattttaggaaaaaagtcaattattaaatataccaaatcaattttaaaaccagttcagttcgaatgaaacttttttgataaaatagttcaattttatttaaccaaaccagtttggtttaaaaactaatccgattcgatgcagttaggtattggttcagttcaaaccaatttatatccacacccctatgtatcactaatcaatatcaagtttccaataacaacttgtttgcaaaccaaatgattactaccatggatcattcactaatttatatatatatatatacctttcttcttttccattttgattgtgttgttcatcagggttgtgttggccattggattgtcc

SEQ ID NO: 17780 - DNA, 674 bp, Glycine max
  Intron number 1 from transcript Glyma09g41460.1 (locus Gly ma09g41460) derived from phytozome v7.0 (chr-ID Gm09; pos 46137387 to 46138060)
ccttacaagatcagccgatccaccaactgcgactcgtacgttatttttttcttataaaacattaaaattactgacgaaataatttatatgtaattttaaaaaacatatcactaaaattcagtgacaccagaattagtgaaagaaaaacaatttttttctcaccaaatcaacattcttgaatttttcacttcataatgcatgtagtaaccagcaaagctatattggtacctataactaccttttaccaaaagtgttacgtatgaatgattttaacttttaattgagatgtctttggattacaattacatctaacttaatccacgttaaaatcaatttaccattctcatgagttttcggtttgtcagattgaaatttgtaatattacattttaatgtattttcagtgcctatccaaacacaatctaagcaatcgggtataagtacacaaagagaagaggctaaaataaccatatataatcttcgtataattcaaattatttatatttttcgctcttgtgatagaattattatctgtatataaacgtttattagctgtgttaagagagaaaaacaatagtgacagatcgaaaatggtgattatatgttgaacttcgcgtgcttgttttttgtaatgttgcagcatcaagttctaaaggagcgggtagctttgccaat

SEQ ID NO: 17781 - DNA, 1026 bp, Glycine max
  Intron number 3 from transcript Glyma07g02700.1 (locus Gly ma07g02700) derived from phytozome v7.0 (chr-ID Gm07; pos 1840291 to 1841316 reverse strand)
accaccccttcctcctcatcctcttcaccattctcgtcgctgccaaagggctctgtctccgcaatcatcttcaggcactaattcttacacccattttcatttgagatccaggttctgttttctgcacccaacaccttgaggacaaggtgtttttgatgggctagggaatgttaggaaaaagatgctctgccatgaaaacttgccataggggtagttgtcattctagaagtagttattgtcgtggttattgtagtggttatcgtagtgggagtgcggttattatagtgggattgcggttattatacatatttgataggcctttaaatatcaagaggcacagaataaaacgtagaatatttaggcttaagtttgttatttcctttcttcctcttggagactacccttagtctcgaacttaagggaaccaccgctaacaggggaggagttactttcccttgacagctacaaatctgggaggccatgctagagtgctactcaagaacagcttagtagttttgacctatggagtttgaggctctctatctccttgatgttataacttaggccccttttgtatttcttgtttggttgtgacaattagtcaaatgaatttactactttgttgaatttgatcgtgagttatattatatggcttgttaattagatgcaaacaaatatttttttgtttattggggatgaatgtatgatttaccttccattattgtttgctttgatatttgacatgtgctcacaaattgtgcaataaaatatggatattcagaaagggttttgtttattccatcacctgagttgaaaagatcaagtggaatatcaggtttaactcttctttagtaaaaaaataaattgggagttttcctcatgtatttcagtgctgcttatgaattctgggcaaagtttaacaacattgttacaacaggccttccaagcttgttgaactttgactttttatttttggttttctaacttttagaaattggagctgctattatcatccctggatcaaga

SEQ ID NO: 17782 - DNA, 759 bp, Glycine max
  Intron number 1 from transcript Glyma07g00980.1 (locus Gly ma07g00980) derived from phytozome v7.0 (chr-ID Gm07; pos 564241 to 564999 reverse strand)
aacgggcccctcccgttcggtgcgtgcattttcctctctctctctctctctctctctctgttgtgattttgaattttcttttcctactgctttggattgtgagaaactgcaaattgtttttctattcaatttggtggatttggttgctctgaatcctcatttcgctggcattgttgataattggttgcgcctctagctggatcattattgttgtcagcgaacttttgagaaaaataataataattattataaaacgtgaaagacgttggtttcactttctttcacctttttttaacgcattttttttggtttgagacattgtgatgtaccattgcatttcgtgtttagctcatcgatttgaattctcggacttctcatacctgggaaaggaactagtgtgtaacatgatctctggtttccatgctcttttttttttattattaatttattattgtcattattgttattttctcgtcttagtttttagatttttttatataaaaaagtatgatgtcgaggaatgacatgaatttgaattttagctggaatggtttttttttttttttttgggttcacattttaatgtttgcatgagtttagatttcttggtattaagttatttgcgctcttgatttattatgcttatgcagattcaatagtatgcatcaaatgatcaccagtgtttatttgctcaagcgaattattcttggtatgtgtatgtgttgttaggttttaggattgaggacaaggggcagtttg

SEQ ID NO: 17783 - DNA, 992 bp, Glycine max
  Intron number 1 from transcript Glyma11g19500.1 (locus Gly ma11g19500) derived from phytozome v7.0 (chr-ID Gm11; pos 16242529 to 16243520)
ctagacaggtttagttctttgatttttccaactatattgattctaatttcttttatggggatatcaatcaatggttgtttattaatcttaaaccttttagaatttgcacaaactttgctcagcagacacacattaagtttggggtgattttgtggcatatttggaagaggagaaactccaatgtctttgaggatgctttgctgcttgtgcacaaagttttgttacttattaattccatggtgcatgacatctttttcagcaagagtcgttttatttatcacaggtgtaaggcttactcatggattaatgttggttggaaaccacctgatattggttggtttaaatttaatgttatggttcggtaattaatcatccctattctgcttcttgtggagatattttcagagatgaccaaggtgtttgtacagttttgatggctgaattgtggggtattttctcggctattcagttggcttgggagaaaggttttagatagattattgttgagtcgaattctccaactgttaagtttatatgcaggcctcttaatattagtcaccattatgcttccatggttaatcaaactcatgctgggttggctaaagactgagaggtgaagatagttcatattcttcggaaaagtaatgtggtagttgatagtgttagggaaaaaatccaaattccatattaaagattaataataataaaaaaattatctattatcgttcttcacgtacagaaagtgttggacgtgaggagatatgttggaaaaaatctaggtcacacattgactacgaataaaatcaaattagaatataaaaataaaaaataatccttatctcttaagttatcttttgagattgaattaggtatcaattgaaggacgcctgagtcaatgtgtataaaacatttgccttgcctgtatattcctcctaattatgctaatatgaaatttggacagtactgaggccattttggattctctgttctta

SEQ ID NO: 17784 - DNA, 1006 bp, Glycine max
  Intron number 1 from transcript Glyma11g11580.1 (locus Gly ma11g11580) derived from phytozome v7.0 (chr-ID Gm11; pos 8269244 to 8270249 reverse strand)
gaaggtaaacagtaaaaagtaaaaacttaattagtacttatttttgaaattgacgtagccgttttgtgtttggaattcacacaggaggttttactttacctctgaaaaagttactcatggcattgacagattgggaaaaggagagttcatgatagggttagttttgtccattcatgattgcacccaagagaagaaaaaacggttaagaattaaatgaataagaacagtgtggccactctggaagaagagaagagaaccaactcaactcaaattagtatttggtttctgcgaaattgcaaaagcaaaacaacatccatcttcttctgcaaaataattctaaaaatccataatttgttgccgttcttccttcgtacaatgtcagaactactctagcattcccaactctacaaacacatcatcacctttttgcttttttcttcttctcactaactcagacaactaccatggcctcaaaatccaggttagcgaactttgtcggtgtcacttgtgaagatctgatttcggttttcattctcttttttttttttttttttctttttctgcttggtgaagtttgatctggtaattgtcacttgctattattgggttttctccatttttttaatctaaataaatttcatatttgtgtgtgttgaaatttcggtgtttttctacttgcaattcacaactggatttcgcttcttttttcgtctcgattttatacaattgtgttagttcaggcttattattatacatcatcagtatctgctgttctcgccctaattttcgtattggtaatgattctggatgcttaatttgccactagagttgctttttatggcttagatccatccattgcttatttggtaattggtatcttgtactgtatgtttcattaaatgcattattatttatctggtgttgtcattttgaatttgatagacccaatctatctgaaaattccaacaaaggatcaattgcaactcctagagtcagtaaaactagc

SEQ ID NO: 17785 - DNA, 958 bp, Glycine max
  Intron number 1 from transcript Glyma06g06930.1 (locus Gly ma06g06930) derived from phytozome v7.0 (chr-ID Gm06; pos 5003937 to 5004894 reverse strand)
ggattatttctataaaggagtaagtaggactttttagtgagaggttataatatctgatataacttataactttctgaaatcgtaaataatgattttaatttatttttattttatttatgactttaaagtcattagttatttttttattttatgattttgaagatgtaaatatttttttttatattttacgattttaaagtggtaatgttttttttttcacgctttattgtattttattttcttttgtttttaattttttaaaaattttacataatcttttttatttaattattaaatattatttttatttaagatgttgtatttttttatgattttatttaatgtgctatatatatttttttaacgttttttatttaaaatattttatattttttaatattattattggatgttgttaatagtaaattcctttatacaaaataaataatattatttcataaattataagttaatattaataatattttaatagttggtttaaaattttagtttttaaaatttaagtatttaaaataaaacaaatattcaaaaaaaatattaaatatcattgagttacttttttatttcatttaaaaaaatttaaattcaatgaaattattaaaatatgatctaaattttaaatatacaaaatatattaaataaaataatattaaaaaaatatataacacgttaaataaaataataaaaaatatacaacatcttaaataaaaccaataacaagtaaaattaaaaatatttatttaataattaaataaataaaattatttacaagtttatagaaattgaaaacaaaactggccgtctatgcctcttaaacttagtagcattttatattttatttgtaagaaatgagcataaatgaattcatatatctatatctgtatatcgcggctaattggtgtagctttttatcactgcggcagaattaagcataaag

SEQ ID NO: 17786 - DNA, 799 bp, Glycine max
  Intron number 2 from transcript Glyma12g05740.2 (locus Gly ma12g05740) derived from phytozome v7.0 (chr-ID Gm12; pos 3838210 to 3839008 reverse strand)
agaagccaattgtccagcatcctaatactagagaggtgagacatggattcttgggtcttaatactatgaagcggggacgcatcttctatttgaagtgtcacagtattagacatgtttctaagaccaatactgacacctgtccgacactttcattaggcatccaattaaaagttaattttcgttgattcacacacttgacctgacacctttgtatggatggacacacactaatgctattaataagcatgctccttttaaacttttagaaattcagcttaaaatataatagaaaatattaaaaaatgatgactcagtttttctttggtggggctcactatcatcaaaaatgtaaaaacttaacaagtaggtatttgagaaggcaaatttacctcttttgaaaagagatttcatcttgttttgggagtttttgtaaagaaaccaagtgtttacattgtaaaatgaataaatgatgtctccaaatattcctctttgaggctcattatcatagggaaaaggtaattatacaagaatatacaattgttcattatcaatttagatcttttattagttcctcttgctcatatttcatttgagtttttctctgtctctcatgtgtgttgttccagtgccctatattttggacgtagccatgttggggtgtgttgtgtctagtggctgtggtagagttcgagcttcataggtttattttctcttcttgcttgggctctatttgtatttaattctttttttttatctgtggccagcttacttgcggtatctgttttgaaaattatcctcg

SEQ ID NO: 17787 - DNA, 810 bp, Glycine max
  Intron number 1 from transcript Glyma07g10240.1 (locus Gly ma07g10240) derived from phytozome v7.0 (chr-ID Gm07; pos 8556895 to 8557704)
tgatctcaacaagtgtgaaccttgggacctcccaggtagtttgagagcactttcttcaacactatttctcctcttataaatatactttattactgttcatctagctctccttaaaaaatctagctatatacaaaactttggttcttaatttgttgtcatggttgcatgactactaatttgcaagggcttatgttctttatataggcacaaccttttggcatgcatattgattctttcggaaggattgtaacttatttttgaaaaatatttatgtagacagattctgaattaaaaggaaaacaacacaatggaaggaaattaagttcatccattaagagttaagattatataattctatctcttcataataatttttcatttttccccctagaagctaagttcctcaactgatcatacatatataaaactttatattcattctggtctctggagtctgcgatggatcatttaacatgccctttcagtttcatcaaccaagcaaatattaatcaaaaatgactttttttcttttgattccgcttttcgtaatatacatatatagaagtttgacccattctacttctgcgtgtggtgtgtggtttacaactcatgcatatgataatatataatatcctagtgaatatatatatgctatttcaactttatttttcggtctattaatttgaatagtatgtagttgagtacaaattcattggcatgtcatcttttatacggtggacaaaaaataattaaataaggatcattaattggcgcgttaatttctgtgatgatttaacaggtaaggcatca

SEQ ID NO: 17788 - DNA, 577 bp, Glycine max
  Intron number 3 from transcript Glyma08g24830.1 (locus Gly ma08g24830) derived from phytozome v7.0 (chr-ID Gm08; pos 18979508 to 18980084)
gtcactttctttttaagattagtgataaacattaggtaaaattttataatagaaatctgcattatattttttattaacgtatcaaagacgtatcgcatccttaatttcaaaaaattcgccggatccgtgttgtgccttacccgtgctgtatcccgtatctaggcttcatagcttactatgcttgattgcttggcccagaacaccaaatcgaatcctaaagcccatgcatgacactaacacaatactcaatagcaataccctttgaacttagaagcagttcacacatttcaaaatagaagagggaagaacccttttgggttgagggtatggttccccaactgaattttgtttcttggacactccctttgattttccctaaaagttatctatgatcaactactaatttttgtcataaaagtctaggtttctcttttctgttgtgcattttgaatatccagcgacttccatctcatttaattgtttggatgctttattatgaactgattggtctcgtcttttttctgtcatatgttctgtctcagtttcatcactggttattttgggtacccggtttcat

SEQ ID NO: 17789 - DNA, 531 bp, Glycine max
  Intron number 2 from transcript Glyma06g14670.4 (locus Gly ma06g14670) derived from phytozome v7.0 (chr-ID Gm06; pos 11509840 to 11510370 reverse strand)
aggtcgtgtctcttcgaggtgctaatatcattgaggtactgctttacaaagccctaatcttccaaatttgcctttttattttgtgctgaggaaaatgacaaaatcaccaaggtgaaacttacaaactttgatggagaaataaatcaaggaatattctttgaaaagaggaggtaaaattacatattagcaactaggaaaaaatatggtaatttttgacttcttatatagcggttgtaaattctaccccggtatcaaacgaaacaaatggtacttctttaattacttgataagcaaatagattctgatggtattgcagggattgtcaggaaggaaacagaatagaataatatatggtgagaaaaatatagagattgttttaaaatcatggaaaaaggaaaaccggaccagatgtgaatcctgttaaaattaatctattatgtaaacatccctttccttttggaaacagggagtgtgtatttcttatgtgtatataggttcttatttatgtttccattttgatgtctgaaggtc

SEQ ID NO: 17790 - DNA, 937 bp, Glycine max
  Intron number 1 from transcript Glyma11g31810.1 (locus Gly ma11g31810) derived from phytozome v7.0 (chr-ID Gm11; pos 33165488 to 33166424)
tgcactctcttcctcccatcataaccccaaatctggtattcagtttttgaacttctttttattgttctgtttctatgtatgtgtgttttttggtggggggattagagttttttgttataatttatgcttggtaggaaaaaagattcattgaatcactggattctgatggagtcaatcaaatgaaatgtgtgtttttgaagttgaaggtaaattgataggtcaaatgatgctgttgctgtttttgttttgtttttatttttatttttttgttccttcttcagtgctccaaaacaaacaaacaaaaaaagaaactgagttgaacatgttggttctttaattcttttgttattggactagagccatggatacacttggttgacaatttccaagggtttaagggagtgtttggataagcggttggtgaaaaaacgcactttttattacataaccctttttgtaagctactttttctgactttttttagaaaagttttaaacttttttttttatcctttgtgattttggcttctaaacgtgttaagaagtgtttctatggtgaaacacttttttctttagaaagtactaacaaacgggccctaagttttgataaatcaccaaagcatttttgcaattagtgtatagtgtttgtgtaaaaggagtggattgtgaattttggagcaaggttatgctcaaggtcgattgtggttgatagcattttgaatccatggttacaaatttattccatatctgtgtatttgaaaccatttcggcaatgcatatttatcatgtgtattgacttctcttcttttgtggttaatgagtgcttgttgtacaagttgaatatctgtcaatatttttcactcatctcttaagacgcacaagtaatgcatgctgggaatacagtgcaggagaagctgatagtaaagcattttgctagt

SEQ ID NO: 17791 - DNA, 345 bp, Glycine max
  Intron number 1 from transcript Glyma11g01330.1 (locus Gly ma11g01330) derived from phytozome v7.0 (chr-ID Gm11; pos 779209 to 779553)
catttctacgaactcagacccttcaatcccaaccggtaccttattcctatcaatttctttttcctgttttattatttttctcaattttcttttgctccgcgttgatccgattcctagttgttagggcttatcttgtattgggggtttcattgtgaatatacactttgcaaatcgttcgtacctttcatgtttattttgtctgtttgattcttctttatgggacatcgtttcaagtgcatatatatattagggcagattaattgccggtgtaattgataaaattaggttttcagatgttgattcaatgattattacattggctttatgcatgcagagaaaaaaatc

SEQ ID NO: 17792 - DNA, 397 bp, Glycine max
  Intron number 2 from transcript Glyma11g01330.1 (locus Gly ma11g01330) derived from phytozome v7.0 (chr-ID Gm11; pos 780049 to 780445)
tggcaggcttcggtttcactattcttttgtttcgagtaagccttcttcttcctttttctcctcccaaatgatttatgactcgtaaatattgtattttaaaaggtatgaatagtaatgcagctgaatttctggttgtatgagattgagaatgctgtttagttttttccttgtttgacttttatttgatattttgatttagtcatgcataaatccaaatatccaattaggccatgttgatatatgaaatttcacatcttggttaaactctcaaaatttattgttggacaatgataactaaaggattggtgactggtgagcagccatatatatcattcttttgaaatgatatataattgaatatttcatttgacaaattatctgtttcaatctcaggtac

SEQ ID NO: 17793 - DNA, 969 bp, Glycine max
  Intron number 1 from transcript Glyma12g02580.1 (locus Gly ma12g02580) derived from phytozome v7.0 (chr-ID Gm12; pos 1690780 to 1691748)
cttcccgttgccttcgctactctcggttggtacgtaccttactttgcactatcacgtgctggaacttggaatatcatgggaaccttgccagcatattaatttcatttatttaataaattaaatcacgtctttttttttttttgaagttatttcattaaaaatataggattttgtatatattcggctgaggcaattattactattatttaaaaatatacttattgttttattttaaagtttttgtcataaaatacatttttttaagatgaatcaagtcttgaatactcatcaaatatagaacagaactcaaattttatatttaagaaacatctaattagttacagcttagatagtgatacctgtttaattttcagcccggacacaatcaatcaacctctccttccaattccattgatctctagttgtagtattgtatacgtatatatctgtcaaggattcattgggagattaattgcttctagttaattttatactattaatctctcaaatatttctgcatacagatgcttctattttgttgaaaaatcaaaccagaataggtctaattaagttttaactctgatagtcattcttcttcggtaggtaggtagtctaagtctcgtgtataaggaagacaacacatgcatgcacctgctggctgctgcactcaaaatcaaaatctttttggaaatctctacttatctaattttcactatcagatagatgaacaattacgaatcatgacttgcatacatacaaattaagccaagtatatagaagcaaataaataaaccttagtctacgcgaaagtctaaggctgggcctacgtacggtctacatcattcatgttctgggctgtgtgtgtgtgtgagagagagatattctcatttcatgcatactctcaatagtttatagtgacatgtatagtttttatatgtagtactgaataatatcaatgatttgcagggc

SEQ ID NO: 17794 - DNA, 860 bp, Glycine max
  Intron number 1 from transcript Glyma12g01630.1 (locus Gly ma12g01630) derived from phytozome v7.0 (chr-ID Gm12; pos 976058 to 976917)
tccctatcctcatctctcgcctccaccgccattcggtaatcaattacttgctccaattcctccctctttctctacaatttcttctccctgcattttcccttttctcccctttgacctttttccatcctcttattctttttaaccttttttctccttacatcacaataccaccttaacctcaactctttgtgcttcgttgcttctcttctatttgatattgtaaattgagctgttttacgcgtgcgtgcctattcaagaattttgaaaagatatattgaaaacctcttatgctcagctgttgcagagaataataagcttttacgagctagatgatcatatggaattcgtgattgtcctttgcttccagctggttaatgtgtttctttttttcttcgttttgattataaactgatttatttatttgaaactgaaatagcctaggttagtatcatgttagtggcctattaattcaacctttttatttgtttaatgcaggcctctgcaatccatttgtcttgctttatgcatatgatttttatgtttaagtgtgtgctggcaagtatgactaattgggctgcatatgctaatgctatatcctcagggcataggtcatcatgaattttaatcaatattttaattcagatattgtcaaaagtttgaatgggaagttctgggatgggttttagattaacactttcagctgtctgtaagatttaatcagtttttttggttcatttctgataatattttcatttgatctggaatggatgatattttcttggtgttgtcacttgaagtttgctttgaaaatttataacttgatgattaattggaacttcgttttctttcccagacattgt

SEQ ID NO: 17795 - DNA, 735 bp, Glycine max
  Intron number 3 from transcript Glyma09g34070.1 (locus Gly ma09g34070) derived from phytozome v7.0 (chr-ID Gm09; pos 40518877 to 40519611 reverse strand)
aaggtacgctgaaaactttattattattacttacaatgcttcttcaatctcagcctccattaaaaacgttcactttaacgatagtaataatattcgaaaccctaaactgcagtagtacatgctcttaattccacccacttaattgaaagtctctcactacattttactacagcacgtttcccaatgaaactgcctttccttggcttttgcattaaaactttcctatgccctaataaaaacagctacacagccagtgagagataaaatattaagaaaataaattttaaaaaatatagtatcaataatcaatagtaaataaaataaaataaaagaggaagagtggaagactctcatttacttgtggttcttggtatgtccatcatacagtctgtaatccattaatgtacgcattaaaccctacctgtcacaagtggtctcaaacgctactcatatttattgctattatcattacggtttttagggtttgaataagggtcttctattactcctagcttcataaaatttttaaagcatttatttacgttttaggattacacgaattatatacatgaagatagtattcatcatcattactatacatgttactactgtagtatgttataacattatgaaacatacggaagaatttttggaatttttgaactaactattaatttttgtttgatttttttttttataatttggggacataggcacaacaagaccgtgcagata

SEQ ID NO: 17796 - DNA, 387 bp, Glycine max
  Intron number 1 from transcript Glyma10g35650.1 (locus Gly ma10g35650) derived from phytozome v7.0 (chr-ID Gm10; pos 43917743 to 43918129 reverse strand)
tctccaatacaggtacaattagttttttttttttttaatcagtgttagttgttacgatctttcactctcaaaacaatcttataattcctacaggtacaattagttatgttatgtagcttctttctcttttggatttgtttaagcgttcaaattttgatgtcactcttattagcttcctatgtgtgtaaatgaaaattcttaatgactaaaaattatgagctaatgaactaagaagctaaactagaaatagatgatttcaatatatagtggactggtgataggtttgtatttcttcttttggttgttactactactaatttcaaatttgtgagacttatcattggtaagttataattgtattttttgaatttggattttgcagtctgg

SEQ ID NO: 17797 - DNA, 454 bp, Glycine max
  Intron number 1 from transcript Glyma06g10200.1 (locus Gly ma06g10200) derived from phytozome v7.0 (chr-ID Gm06; pos 7695105 to 7695558)
cccaccaacgaagacttccagagtatgtattctctgtcattgatttctcgcttctgtgttctttgaagtgaatcttgaatgcgttttctgaattgttttattgttttggatgagggagggagattttaaaaatgtaaatgtaagttgaagagaaatgtgttttatgcccaagaaagagaatttgagaaggaataagtggactattaggtttcgtccaaaggtttcaattgattaggaccgggagaaatttgattcctttcttgatgatattggttactagataaatcaaagatagggtaaacatggaattgaatatagattaggtcaggcttatttgtcacgctacttatatagttcgagtgagtctttgagatattgctttatgctctaattatttacaattttacatgtttttttttttatatgtatgttttgtcaggtgtttcaaattgct

SEQ ID NO: 17798 - DNA, 749 bp, Glycine max
  Intron number 1 from transcript Glyma09g34300.1 (locus Gly ma09g34300) derived from phytozome v7.0 (chr-ID Gm09; pos 40718052 to 40718800)
tcattctgtcccttttctcaggtacattctcatcgtctcccttctttctctctctaaactctcccccacctcctttctctcactataaagttgaaagtgatgtttttttatttttattttttgggtttttcttattatttattcaagcttgaaagttctaacatttgagtctgtttctaagttggttttcttcgggtggcattcattagcagcaagtggtttgactcttacgagttttttcaacactcagaagaaccaacacttgtgacccgttcttccctcttcttatctttctaacatctaaggctgataaagttgaacggtttacacgttttgtttcttgttgttgtctatttttgactgttgataaattcactttttcatggggtttctgtgtttttgtctgttgtcaaacttagatactatgagttgaatttggtttaatttaatttcatttgatttttgtttagcatacatagttttttttttcgtttttccaatttaaaagaaaaccattcaactatgaaggctttcaagtttcaacgtttgattgcggctgcttgatggaccatggctgtgactgattctctatgcgcaaaaccaaaactcctaaaaccccttaatattttaaacataattcaagctctttttttcttttttctgaagatatatgttgatttctatctagttacaattatattgggatttgttgttttagagagagcaacgaggtcttatagttaaatctg

SEQ ID NO: 17799 - DNA, 464 bp, Glycine max
  Intron number 1 from transcript Glyma08g05270.1 (locus Gly ma08g05270) derived from phytozome v7.0 (chr-ID Gm08; pos 3737852 to 3738315)
tgctactgtgtacccaatctgaacccaacgaagtaagcgaatcatcaattctatgctttttggactctaggttatcataaagttttgtttttctctgtgattcctttcgatttgcttgcaattaatttcacgatccttggagctagctagctcatttctttgcattttggatgcgtttgtttgtttcttgctggttctgtttagtataagctcattttgatatttagggtaatcttcctatcataaatttggtgtcagtttgcatcaactttgaaaactgtgtctttagattaggttagttcatcattgtgtcttaaatattgtgatttgggtgccattttgaggtgttagggtttgattaacttgttgaggaactgcgttatgcttttgaagggttcttgaattccttttttggtaatgattttgcagggggggcagaatctttccccaaaggaaaggagtag

SEQ ID NO: 17800 - DNA, 770 bp, Glycine max
  Intron number 1 from transcript Glyma07g32610.1 (locus Gly ma07g32610) derived from phytozome v7.0 (chr-ID Gm07; pos 37492472 to 37493241)
tacaattcggtcttaccagtgttagaaaccaggtagcaatatttttgctttttaatcagcaaaataaaatatattgtattaatattaggtatagggtacctaaaacccatctacatgcataaaaggttagtcactatttactccaatcatcctagatataaatagacaccaacccaagtttgtaaatacactttacagatcagatccaacattaggtaagtcaatcttttaaaatatcttcgtttcatggattaaaagttatatataggaacaacatgggccataacttaacccatctgttatatatgagcaagactgttccagaaccaatgtaaaatagtgttttttttggtagcgtacatgtatacacgtactacaaaacttattttaattggaccatatgtattgtattttataaaaatgttacataattatgtattgagaatggatgaaacgataagtgagacttgatacatattttaagaaaaaaaaattcaactttaaattagagagctgtgttaagtttttttttttttttaactttctaaaacttcaatatacataaccttttttgttttgcaaaaattaatagcaactatttttgttgttgtcggtgggctttaagcttagccttcagttcagttgatttgttctcggggtctgccagcttgtttgaattttcttctgaagtattgacaatgttttagaagtatttgtactatgacaactatgtaggtacaagaagaggttaaaagacttgtggaggaata

SEQ ID NO: 17801 - DNA, 946 bp, Glycine max
  Intron number 1 from transcript Glyma13g25060.1 (locus Gly ma13g25060) derived from phytozome v7.0 (chr-ID Gm13; pos 28335977 to 28336922)
cttgctcaagttaggccacaaggtcagcctcaaaattttctacattcattttttcttagcattttttttaaaagggtatgtttagagaattatatatatatatatatatatatatatatatatatatatatatatatatatatttgatacttttaacttttaagtttagatttgggggaagaagatatatgtcccttacaaggcctgaaatttaattaagtattgcctagtaaggaacaaatctgaaaatcaaacccaagttacagctattttgaatagaaggattcaaccagctactatgtttgattgtgtttttgttttcagtttacaaaataattttaaaatttaattttcaaaagtataaatgaggggaaaagaggcaaatgtaagaaaaaacacgagtaatagaaaatttaaataatttagagatgttttaacttttaaatttttagtttcaaaactactcttgtcaacttttttctctatagaaaacatttctaaaaatagcaaacaaacaggctgaaactttttttttattgaagaatttttaagaataaagtgatacatagttatgaatcttgatcgtttcgtgcttatctttatcaacattatataactattgaaaatggtgttcatgtaactgcatcaaggacttccatgccctttttcttcattatgctatattattggtacttcgccttagtataaagcgaagttgacttttattttgtttgttgctgtggtatcagaaggttaatttgacagtaattaggattgaattatatataccttccttttctttttaaataataaatacagggaagattaataatgtacgtagtaattgcaaatcgtaggaggactgaaggggtaattttaatttgccttttttctaaataacttgtgctttggtaatttttattatttcaggtggtagtggtaactc

SEQ ID NO: 17802 - DNA, 558 bp, Glycine max
  Intron number 1 from transcript Glyma08g18050.1 (locus Gly ma08g18050) derived from phytozome v7.0 (chr-ID Gm08; pos 13570706 to 13571263)
tgatatttacaaatacgatccttgggatcttccaagtatgtttgttgtttgcactctaaattaattatggctactcttttcattaatttcttgatcttcttctatttctcttaaacataacttcaaaattctataagattttcttacaaatcaaggaaataagagtagggttttcatctaacatatgcagaaagaaaaaaaatgataaccatgattaccttacttgcttccttggctagcttggttatcatcatgatctccaaaactactatataagtatatatatgtatgatcacacttacatgcatacaaaaagtttgattaagatgggtaagcataaacatatatactttaaggcctcgcaatagagaggatcaactttgattagtttggggtaatataaatcacacttgcatgagtccttaattttatggaaatataacatttctttctctagtttttagcactcttagattctgtttagtatcaggtcatatgcaataacatattggtcagcttacagactgtgaggctttcctttcaaaccaatacacatcg

SEQ ID NO: 17803 - DNA, 1028 bp, Glycine max
  Intron number 5 from transcript Glyma13g28880.2 (locus Gly ma13g28880) derived from phytozome v7.0 (chr-ID Gm13; pos 31845843 to 31846870 reverse strand)
ctaattagtaataaggtacgaaaccatctaatattaacagctaaccctaaatatggactgctcttacattttttattgtattattgcttttacttaaacttccattttgaagattttagctgtctctatatggatgcattttatatatatattttttttaatgtggataattacatgctttggtggtttttattgtctctaaaagtccagctagggtaccaagtaaaaaactgttttgtcggatgatgcatattaggctgcaataattgcatctgtctagccccaattccacctttaaaaaaaaaaaagataaacgaaaagaaagcccattctccttattgctcgtgaacataatagttaactccttcactgtagtcgtcactattatcaatcttcaaagtcactttggtgattattttgaaaactccttgtggccatgattcttatcttatttcttcaagagtgaatggaaaaaacatgaagtttacagatatgtagtttcctcccttaaactaagtatatgtccaccttgttgataattcttcaagatagccaagggttgtcatacttttaattcatgcattgactttttcctggttcagttggatatcagttttggtgcttgattggatgtgaaaaaaaaattggtgctgcaggcgcagcttgatctctgtttgcagtgtcattcaccatgatttagttttataaaatctttcttgtctattattttctactgtaacatcaaccctgccgacacatgggtaggtctgcagactgacaactttcaatttgtgctttgcattctcttgggttaatttttcagcttttccagattttatttaaaaaggttttagatagatataagataatcatcttgtgtttttaaactgcccatgagaagttatcagcctttgagtgttaactctacatgctatattctttgccattcgtgccttgtttaactttgtttgcacttaccatatcaatctaattcacttatttattgtagttacacgctcttgtggaat

SEQ ID NO: 17804 - DNA, 552 bp, Glycine max
  Intron number 1 from transcript Glyma07g33620.1 (locus Gly ma07g33620) derived from phytozome v7.0 (chr-ID Gm07; pos 38596439 to 38596990)
ttgatcccggttcttccttcctcgagctttcacaggttttcatttttttctttcttcaaacgaacttttaaccttttttttttatcgtttgagaaatatatgtccggataaacttctcgataaacacttctagaagaaaataaaaaggaaaaatgaattaagttaaaatcacctttttgtgaagctagatgaagagagtttctacgaattagcttatacataaggtaatttgagcttatgagagaagctagattcattttccttctcgtagaagtacttatccaaacatatcttaattagtacattacattattattaccggttaatttaatttttaaatttataatgataacactttagagtttagattactggcgaaatctggtaactctggtatctggaggtttacaacaactcacgaatatcctatgtttgcaaactttaatccaaagatgcactaagtcttggaaaaagggtggtgattatgtgaaatgggtttgtgggtttgaccaggaaagttttttaaattttgagtgataaagcttgcaggac

SEQ ID NO: 17805 - DNA, 851 bp, Glycine max
  Intron number 1 from transcript Glyma10g43240.1 (locus Gly ma10g43240) derived from phytozome v7.0 (chr-ID Gm10; pos 50013720 to 50014570)
cccggcgaaattcctctccttttcgattgtttcaggttctattcttcatttcatcaaatgggtttttttttctttttctttttatacttttccttcttgctagtttgatggacactacttacttgcttcaccttctgaaaaaattgaagataataaaattgaggtgtgttttttaaaagttggtgatttggtgtgagctgaacagatctctaggggtttaatttgaatgtagttataaaattcgtatcttcagatgatatggtgttattaagttagcattctttgttgaccctttgatttactccaaggttaaacgttgaaggttctatgttcgtgtccgaggaatgagttgcctaaagcatgcatgataataagaatattgaggtcgtgtttgatttaacttctcagtaagctaaaattaacatatcgacttcaggttttggtcacgttagatgaaaaaacttctatagaataagttgattttaacttatggaaggaatttaattcattttagcttcttattttctttttctatgaatacttattgtgaaatatattcaatcaggacatgagtttcatgtgctaattgttcattaaatattttaatcttacagagagagagagaaaaggagagagagagttgatttctaacggcttctacatgcatggctgtaaaaaattcagatgaaatttcttaaacaagatctatgcgtaaattgtggaaataaaaatcaaccgataaacagatatactgttttttatgtgcattagttattatcctgctttagtcaagaatctgattccttttcttatgtgaagccaacaagaagaggatcgtgaaattctctctg

SEQ ID NO: 17806 - DNA, 951 bp, Glycine max
  Intron number 4 from transcript Glyma08g14040.1 (locus Gly ma08g14040) derived from phytozome v7.0 (chr-ID Gm08; pos 10208148 to 10209098)
catcaaagcatcggttaataaacgatacattcaaggtacacatctcatgtcagccttgtgaacgatattaaagttgctggattcaagttaatatctttataacttctttcattgagaaggaaaaagatttaattgaataatatactatagttggaagaggtttcataatctcatcaaagattcatgcacattatttgttgaatgaaggatggtaaagaaagtgagatgagatagtgggccagatgaatgaagtaaattttatcaattgatgttagtttacaatattaaatctttaaggttttaagacccatgatttaatgggttgtagtggataggctcttcagattaagtagatgcaaacttgagtttatgaggaaatgagttgctggagttattcatttctgttattagtcttctgcttcccttttatttattccaaaggaaatactgcttagcaacaaactagagtaaaattggctcgctttctttaatctagatcttcctttcagttttagtcatgcaacagactgctaagcgtaaatttaccatcaagcattgagtaattttattaaattcataaattgtaaatctctctctctttctctctctcttgctttcacacccacaaattatttcaccatcaacaatctagagaagttgaaattgtagaaagcaaaattcgttatgaacagaaacagggtgcttttattaattgataaaatattgattcaaatgtaaggaagaaagtaagaaattactggtagggtgatgttccaaaattggaaaaataaaataagatcaagcacatagcaacaatgagaatcaaaaagactcatgcttctttttgttaacagcttgagtatgatttgtattatttaatattgggaaaatggttcgttaaagtctgaataatgattgttgcttattttcatgattctctgcaatgcagat

SEQ ID NO: 17807 - DNA, 643 bp, Glycine max
  Intron number 1 from transcript Glyma08g12730.1 (locus Gly ma08g12730) derived from phytozome v7.0 (chr-ID Gm08; pos 9308652 to 9309294)
ctgaacataacttcttcactttgtttcctcaccaggttagttgagtaaaatactgaaacatcatctaaaatcctttctcaatggttcacctctttttggggtaaatcaaacatttttttcccttgaaaccaagattttgcaatacacctagattgcaaactagctattacaagcaaatgaaactttttggagataaatatatataaatagctcatgattttaatgttggattaagttcttgaggggtgaagtgaagaggctgttccaagctttcattttcttctactacttttcttttcaaattcttcctaacctgacaaaaatagctgaaagatcaaaatttacttatgtgtcttgtcaagatatactttctgtgtgtgtgtgtgtgattatatgagaataataaaatgatataatcttttacttgattcagcttgattagtctttgaggggtgaagaggttgttccaatcttccattttcttctacttttcttctcagatgcttcctaacctgacaaagatagctgaaagatcaaatttacttatgtgttttgtgaagacatactttgtgtgtgtgggtgtgtttatatgaggacaataaaatgatatgtgatacttttacttgattcagcttgcaaaaac

SEQ ID NO: 17808 - DNA, 833 bp, Glycine max
  Intron number 1 from transcript Glyma07g10800.1 (locus Gly ma07g10800) derived from phytozome v7.0 (chr-ID Gm07; pos 9018313 to 9019145 reverse strand)
ctttccctgctgattactctgagcttctggaacaagtaagtgtttcattgtcctccctttgcaccaatcttttgttcattgcaacattcaactttgatattgatggaccgatgtagtggtggttttgttaatttgttatatgtcaatcctgtgttgatcgacaaaaaacttcgtaccccattgcccagaggctcttcgctatgcgaaggtatgggggagggatgttgtacgcagccttacccttgcatatgcaaagaggccgtttccggattcgaacccatgaccaacaagtcaccaaggcacaactttaccgctgcaccagggctcgccctccctgtgttgatcgacagagcaggtaaattttactcaataaaaaaggtttcgaacctacaaatatgcaatttttgtagtcataatccaggaaatattcaaatatttcatcagtctcctttagataaacatttatttggttccatctaatgttgctatgtaagcaatttgtaacgtggcattcctatgtggcaacacttcgaaggagtcgcataagcatttttttgtaacagaagaataaaaacagaaagtttcaacattattgggattataaacaaaagaaagaaaattacaaagattaaaagtgaaaaaaacaagtagtatatttacaagaatggaaaaggtatttaaaccaccctaaacaatataagaaaaaatggttggacttatagttgtgtatcatgtacactcagacacatgctaattgaacaccaagattggtgtctttgttattgaatcaaccaacaggccagagtagctgcagatttggctataaaggataa

SEQ ID NO: 17809 - DNA, 561 bp, Glycine max
  Intron number 1 from transcript Glyma06g12760.1 (locus Gly ma06g12760) derived from phytozome v7.0 (chr-ID Gm06; pos 9963458 to 9964018 reverse strand)
aacaaggttcgttcactttggaaatttggattgtgaaaataattatgcttattctttactgtagactgtgctgtaggctgtagcaaactaaatgaatttgtactgtaactgtacatgacagacaaacgtgaataaaaaccataataaagagaattttcgcatggaagcctgataaaggaaatgcatgcactcacggttgcatgatgaaggatgccgtggatggatgtagagtgtcaaaatttgtttagtttaaagaatttgctatttggttcaacattggtctaccagttaccaaatgttcattctaggaaagaaaaaaaaagtatttctagagttaatgcacgtgttaattcttaagttgagtttttcatacattttttaaagtttgaattccaattgtcacttctattatagattttaaatgattttgttttttataggcaaatgttagtttggtagaatgttcattttgttagtagagaagatcaagattttaaatgaaagtgacataatgtaggcaagcatttgatcagacaggttggaggacgtatcgcaggccgg

SEQ ID NO: 17810 - DNA, 542 bp, Glycine max
  Intron number 1 from transcript Glyma11g20700.1 (locus Gly ma11g20700) derived from phytozome v7.0 (chr-ID Gm11; pos 17492453 to 17492994)
tgaagccacttgcaagggtaagttccaaggaccctcaatttttcttttcaaatatactctttcttctgatttaaagatgagtaaatagaattaactcactggttaatgtgttaaagttaacattaaatcattcaaatattatttaacctcaattttcatccagacattatttatctctagatcagattagttagaattttatttctcagataaaaatttattgtattaattcatgttatcaaatcataagttattatcataaatacatttattaactttaataataaagtgagatttattatgatttcttattaattagttgacatttaaaactttttacactaataatacataataaattaaattctacaaaagacatgcaatataatttattaatataagagaaaactatttttatactatatgatcggttgacttttttaaaaatacatcttctgatttttgattggttgaggagtgagagatgaactagctgatgttgagtttgtttgtttgtttggcagttagaaaagccaactgtg

SEQ ID NO: 17811 - DNA, 600 bp, Glycine max
  Intron number 1 from transcript Glyma05g31580.1 (locus Gly ma05g31580) derived from phytozome v7.0 (chr-ID Gm05; pos 36713423 to 36714022 reverse strand)
tcattcatcaactcctctggactctgacgtgcttggtgattgattgttgcaaccaattgttatctagtttttccatattctaattttcatgaaatattgtacatagctatgttttgaatttaaatcaaaggcaaagcattattctgtttccttagatgttaaatttagaaaacaacatcattgcaaagtatttatctgttttgatgatatttattggaaaacttgagtgtagtcttttcttccatcggtgtgtttggattaaatccaatttttctttaattaatttcaaattccaagctgaaagtcaaagaagaaagagttgccaccatttttaaaacttttcaccataattttgtggggctgaattaattccattaactattcaaacacactattagtaaaatttctcaatcaaatcttttttttttcgtgtacgatgaaatcgtactcaatccattctaatcaacataataagagagttatgaaaaagttatgtttgtatttttctatttttataaataaataaatataaaagtatgccctttttttttacttgattttgcaggattttttgtttgcatttcggtgggcgcccctaga

SEQ ID NO: 17812 - DNA, 623 bp, Glycine max
  Intron number 1 from transcript Glyma08g44200.1 (locus Gly ma08g44200) derived from phytozome v7.0 (chr-ID Gm08; pos 43917588 to 43918210)
tattcttcacattcatcagcaggtaagctactcttgctgtgttaagttgtgacaatcagtagtgtgtgtggtatatgttaagttctattagtactttttcaacttcttaaagctatcagtttgtatatttgtttatgtattttgatgttgacagcacttttttttcatttatgattttattcgctctaatgatctttgtgtctatatttattattcaagtgttttgtgatttcaaccactcaaaatccttatttctggtgggtagtcattagttttgatctttctaaatgaaaatttatagtattttttttttcaaaggtcaggttggctggcaagttattgaaatgaagaataagaatggaaaacttaaattgacgtttgagaagttcacatggacgattagtaacttctctaaattggactccaagaaactgtactctgagaagttttagctcgatcaccatacatggtgcttgattcaattcttgtgtatattatatatgcatttagagtggtctttgacatgatattcattttttttaataagttttgttacttcgcttataggaagattcttgcctatccaaaggggactgatgtgggctacttgtcaatttatttag

SEQ ID NO: 17813 - DNA, 552 bp, Glycine max
  Intron number 2 from transcript Glyma08g44200.1 (locus Gly ma08g44200) derived from phytozome v7.0 (chr-ID Gm08; pos 43918297 to 43918848)
actaaaataaaaggtatgtttcatccttctctcttctcaaattgaacttttgtctatataactaatggaacttggctttctaaacaatttcatatagaggcttaggctatcttttggttgggttttgcatttttggtagaagcatcagattagttaacaattaatggtctcatttactgtttttgatcctttagctattcctcagtttttcagattccatctttccttaatttgctaatcttttcatatttgtgatgaattatgtgtcaagtaataatgtatgttcggttccactctccaatcatgtggttctattttatcagatttataacctacttgtatagttgtatgcataagcgtgacatatgttctgaggtttttctgattaataagatagtctttggatgtggacatggacatggacatggaccttccccgtgtagtgattgagtgtttgtaattatatatccatttgataatcgtatcatttgatttttagtccaactcaactgactcttgatatatgaatgtcagaaactacaaaacagttca

SEQ ID NO: 17814 - DNA, 1055 bp, Glycine max
  Intron number 1 from transcript Glyma08g14980.1 (locus Gly ma08g14980) derived from phytozome v7.0 (chr-ID Gm08; pos 10898810 to 10899864 reverse strand)
tttggaggtttcctgttcttacggcaacatttcaggttcccattctaaccaatgatcccatcacgttttatatatatatatatatatatatataatttttcctctgctggtgttgttgaatttcgttcttgctgctttccactcccttttgttgttgaagtctctttttggttcttttttattattatttaattttgctgaaaggattgttagttctgagctatctgtctttcaaacaaaatgaaggattggtaattgcggtaagaaggtataatgaagtaatgaaccatacttgtaaattgtcaatgaatccggaacaacgatttgtccattttgtgtggaatattataaatctgcctccaaaggtacctgataaataatatctctgaatatttgttctttaaccgtgtcaaatagcgtcacatggtttgatccatgtagggtaaggctcttgtagttgttgttagtgaaaagattttacactataaaaaaatggatagaaatcatcagatatgatttttaaaataattttatagaagtcaataatatttaattatatgtcattctattattggatgacagtgtaaaaaaaacctttatactggtagtatattttaattaaattcttgttattttgtccaatccattcttttcctgtctgaattatgtacataaaataggttttcgtaagttttttcccccagcaatatcttaattgaaaaacattatatgattaatatgaaaagataatactagtagtccccggttttcaatccagcaataactacattgtccagttttgttttgaactagcttttattatctgcagattgaattatatttccttttccattattgattagtcaagaaaattatgttaccacgtcttttgagggaaaacacggtgtttgagaagatgtagtatggattatgcctggagtggatctagtttcttactggataaaacaagtgctgccaattttgaatttttacatattattcctaattttgtttttgtagcttcaatattggaatctggaagtgttcgtgctcct

SEQ ID NO: 17815 - DNA, 833 bp, Glycine max
  Intron number 3 from transcript Glyma07g15580.1 (locus Gly ma07g15580) derived from phytozome v7.0 (chr-ID Gm07; pos 15333361 to 15334193 reverse strand)
tgtgtcagccaaaaacagtgagttctatacatcttacaatatgaaaaatttttttggatgagaaattgatttgtgggtagcatggttcggaattgaattgttttgataaacaggtcctagatcttcaattcgttttttttttttttttttgtactactgtctttatcttgataggattgttatttattttgtacagtcttcgtataaaacacataactgaagtttccactaaattagctttaatggtaatagaccattgaaacaaatattgaatcagtcagtgcactttttctgttgcaagcacgtggcttagaaaatcgtatggttggagaggctgaaaattgagagacaaggtagtaaggtagtgtttaatctagtttcttttttagcttctctttttcttaaaggagagagtgggttaaacacaattttaaatgtccttcccgtttttgggtagattgaggtgcaaagaagagagataagaccaaagaaaacaagatagagtgttcactaaaaacattttaggcagagaaaatttactaaaaactgtgtttctcatgtgaccgtctcaaactttctcatgtctaaagcatcaaagtggtcagtaaaatggaaaaccaacaattgggatgttttttgtagggttaaaaaaaaacaggagtgtccaatataataaaagtaaaccacatgggactgaccaatgtaatttactcaaaagtttattgaactactattttattttttgaacaaggttgtgggtggatctaaacagagctgaatgggggtacttatggtaaccatgttaactattgattgatggtggggttatgcag

SEQ ID NO: 17816 - DNA, 517 bp, Glycine max
  Intron number 1 from transcript Glyma06g06500.1 (locus Gly ma06g06500) derived from phytozome v7.0 (chr-ID Gm06; pos 4644324 to 4644840 reverse strand)
gaacttaaagggagcgacgaatcgagtaagaacctgtgtctatttgcgatttaattttgtttattgagtaatttaataatcttaacctcaaaagatacctaactgtcactgcgtgtgcgtatagtttctagtgtctttatcaggtttgatttcctaattatggaaagtggttaatattatagattgtatctttatggagtgctatgtgattcgtgtattgtctcaaatgtttcatgtgaacacaagtatttatgtttatttaaagtttgaaacctgttgttctcttccaaataatgttatattatattcagacatcacttatgtatattatcaggttcagcgattactaagtttgtatgtgtatggcaatagaattctttccatagttatttatgattttccttttactactgaaattcttttctgacttttttgtttttggaatatgaattctacagataatcagatatacgagaaactaatgtttgcttttcttttagggatgaaaaaggcaaaa

SEQ ID NO: 17817 - DNA, 703 bp, Glycine max
  Intron number 2 from transcript Glyma12g05420.1 (locus Gly ma12g05420) derived from phytozome v7.0 (chr-ID Gm12; pos 3611225 to 3611927)
aagttggtgcagggatctccttcctcatcactaaggtagcctttgcatagtctcagacacgaatttcttcttaaggagtgctagcaacacaaatgctccttctgacccacattttactattgttaagaatttattgaagagtataaaataataaaaagacacattaaataagaagtcaaaccacaaaaaattgtaatttctaaaaaatttcagctaattgtaagaaatgtgttcaaaagagggtgtgttataataattaggtgacctagactatcatggtccctgctaatctttgtatgacatcaagtgttattaattttttttttcctccattaggatcatgaatagatggtgtggtctagaaccatctaataatttcttgtgttagtgtattattaatatttctcctttttctttcaccttttaagtattatgacaatagtctaaaacaatccgacaaagaagaccaaactatatctcccaagccatacggttaatgtttctatttttctatagtcttcattttgtgttggtgtttaatcgaacatattagagcttacatgtcatagacgactaatatgtcaaactgagtgtaatgtgtaaagaccagagtacaacaattctcaatatttgggagagcatatgatgttgttaacttattattctttggtttaatctctaggtgaattcaaacttggggcca

SEQ ID NO: 17818 - DNA, 951 bp, Glycine max
  Intron number 1 from transcript Glyma08g23280.1 (locus Gly ma08g23280) derived from phytozome v7.0 (chr-ID Gm08; pos 17753193 to 17754143)
gctcttcggttcacaagcttcttcaactccttgatgtaatctctcatcttgtgtttcctctgtttttcatatgcatgtgtatctctctgctggatttttgtgtcatgaattctgctgtgtcttctgaatttgatcatgaatttctatcagttggatgattatttgtttaacagatttgttgctgtctgtaatttcttatgtttggtgtagaattgtagatatatgttttcttcacaaccattctttcatacagttgtttatctttatgtttggtatttctgacctcaaatggattgggacgcccaaattttttatttttaccatagagaatgtttaaacaattgttactttgatcattctcacggtctaacatgccttccattttttctgtagccttcaagttttgatttttcctgaattttctgagtttgagtctctttgggtccctgtggctctatcgacttgtctaatggggtgtgtgcctgaaaatcccttttccaacttctgaatcattggttgaatagagtgactgtcaggtccatctttataagcccctttggaagtccaaagcctccttgaagatcgagttttttatttggactgtggtgcttgatagaattaatagttaatactaacgacattttgcccagattccctctgaatgctttgaacaaattgcacactaaaatatggatatttagaaagggttttgtttattccatcacttgagttgaaaagataaagtggaatatcaggtttaactcttgtaacaacataaattgggagttttccccatgtatttaagtgctgcttatgaattttggaacagagtttaacaacattgttacaagttacaacaggccttccaagcttgattgaactcttgactttttatttttggttttctaacttttagaaattggagctgctattgtcaaccctggagcaaga

SEQ ID NO: 17819 - DNA, 939 bp, Glycine max
  Intron number 1 from transcript Glyma09g33530.1 (locus Gly ma09g33530) derived from phytozome v7.0 (chr-ID Gm09; pos 39981874 to 39982812)
cgcctctctgcccagtaagtatcatttccccccaattctccaatcactttgttctcattgttttttccttaattcttaatacgctgtatttttatttatttttttacgttctcaacatgggtttgtgaaaaagtttgagtcttgggctttatttgaagtgttaagggtgtcactagagttgggtagtagtataatatgaaggggagagcagcctgctgaattctctctagaaattacagtggcatgcaaggttttaaattggggtctgcaaccgcagcatcaaggtattttgattcaccgtaaccacaatttaaaaccatggtgacatgttacatatatctttttctattttactttatttgtctggaatttctttttatttttattttagtttactaaattgttggcaatgtaagaaccaagaatttagaatgttgctgatttgtcctgttgtgctaacttgtaagaatttagatacgaaattagttatggacgaatgaaggtatttccgtttccaaagatacaattatcaccatttttgttcaaatttttatgttcttattagtttattcataactctgccttgttcggataagatgataagtaaaaaaagttcaagtgaatataaaattagaatgttgctaaattgtaagaaattagattattccatgtatctgtagatatgatttggtctttaaccaaactgaatgacattgtttgattcatgtagccaacttcacctactatgataagacttttatgtactaacaaacaaaaaagaagagtgaacatctatttatctttccttttaggatatcttctttctatcttgttccggatgtttttctgactaatttctaggggtagtattttgtgtggcactaaaaaatgaaattcctttcaggtccgcaggcaagcagtgcttccacggctcaagct

SEQ ID NO: 17820 - DNA, 820 bp, Glycine max
  Intron number 1 from transcript Glyma09g00710.2 (locus Gly ma09g00710) derived from phytozome v7.0 (chr-ID Gm09; pos 382380 to 383199)
agatttccaccattctgagtaacttcacacactatgtaagcgcctttacccttcttttatctcctccttcgttgcattttcccatgtggactcgtctttgctctcacgtaaataccatgatctgtgttatttttgtcggattgcttgagttttttatgattctggtgaatctgggaattgaaacttggatctagacaattgataaagatttgagttttaagcgtttctggctatgtgggctgttatgttgtgttgttgttgatgatacaaaatctcttttatttcatttgttttggttgtatgattttccgtatcatatgtcactgccgcgttaaattgatatcatgattcaggttctgaattctacaatgcgttggatagaggttttctaggatactttttaatttgacgtacgatcatctcatggtaattatttcattgtaatagaacatgaactgtgctcacttctggtctaagagaagaaatgaaattattgttctcacaagtgtcacctctgaatctggccagtgcaattagcctcttttgtttgtttgtttgtttgtatctgctaagttttgatcatatctatagcaacatctcgatgaaatggcataaagcagcttgttttgtttcaattatgaccgggaaattttgcgggtagggactagagagagtaacatgatgagtattgatgttatactatagatgacatggattactttgaccccccaattaatcaagtgttattaacttaaagttatgctgtgtgtagattaaactttttgacattgaactcctttcattcatcagataacagaaa

SEQ ID NO: 17821 - DNA, 485 bp, Glycine max
  Intron number 1 from transcript Glyma08g22430.2 (locus Gly ma08g22430) derived from phytozome v7.0 (chr-ID Gm08; pos 17063464 to 17063948 reverse strand)
tgaagggaatcgcagctcgttctctcagcagacccgtaagatcttcagcccttaatttttaagcatgtttaatcgttacttagtttgtttttcgcatctattttgtgtgaatcataaaaaagttactttctttacacaaccctgcctaatgggtatcgtttgttttctagctctttcttgagcttttttattttattttttaatttgaataaattttggtctctttacttttttttctatttaatttggttagtaaacttgcttagattgcattatagtaattactcacatgaataggcatgatgcatgtcagcttcatccttggctttttgatttaccccaaattgattttggagaaggtgctgtatatataccattgcattactcttctaatcagtgccaacttggttagtttttataattcttcaaactgcaatttgtaatcttctattctaacagtgttcctttaacatggtgacagttaa

SEQ ID NO: 17822 - DNA, 628 bp, Glycine max
  Intron number 1 from transcript Glyma11g35630.1 (locus Gly ma11g35630) derived from phytozome v7.0 (chr-ID Gm11; pos 37266658 to 37267285 reverse strand)
gtgtcaaggtactttcttaaagtacacaattttggctttgcttgctgaaaaatgttaactttttgtttttgctaagtttggctagacttgatttggcccgaagttgttttttttttcatcctggactcgattcaattcaagtttacttatgattcggtttagaatttatttatgtagttcaagttcggatcatttatttagctagttcaattttcaactcaagttcagttcctttggttcatgaacgaagttcaacgaattagctatcaaagtgaatcgagtctcaaactaatttcaagttggtttgattcattgataacataaccacacatatagattttataattttgacaaatggtttcctctctttgcttattagcaatcagttttaaaggtcatttaatggcttatacagttggtttagtttaaatgttcaactgatccgagatcatttagtagcacttcttttctaattcttttattggagctccggccttatggcatttgagtttgtttcttgcttgaagatgtttctgacagctcatgctttaattaaacacaaatagattattctttagttgtacttgttccttttgatatttcaggtgttggggactttcatcaccga

SEQ ID NO: 17823 - DNA, 748 bp, Glycine max
  Intron number 1 from transcript Glyma10g05720.1 (locus Gly ma10g05720) derived from phytozome v7.0 (chr-ID Gm10; pos 4480562 to 4481309 reverse strand)
tttgagatctgtctgtctctttggtttcacttcaggtactctcattcatttttattggactttggaaccgcccccccccccccccccccctttttcaatttttaagaaaaattgctatttttgcactttcccatttcctcttttctatgcaattaaatgttggtgggggttgtttaatgtttaaagttctttaatttctttctttgttttggtttggtgaaaattgttgaagttttagcaaccagggtgttgtacaattttgactggaaattctattttgagtagataaatctgcattctatgtgttgcttaaggaagataactaagttgttcatactgttggattcaacattattcggataatgaagatttcaaattatactttgtttatatagatgatatttagattcctttagggattaggattttgaattgctcataatttgagttaacttttccctctttttctccatcccttgatggtgattttctctagtagaagccagaagctaattcctcatttcctttttctttaagagctaagaggcttacataatttatgagactctgtcattttcagtatcaaatttcatagttctaatagtatttaataatgtcagctaatgccactggatctcctattcaaacgcaagatgaatccgtgatttttttttttttgctttgtgacttgtgaggtatgatatcttgaaatttacatattttccgtataaagggctcaaagtgagga

SEQ ID NO: 17824 - DNA, 1012 bp, Glycine max
  Intron number 1 from transcript Glyma09g05600.3 (locus Gly ma09g05600) derived from phytozome v7.0 (chr-ID Gm09; pos 4374265 to 4375276 reverse strand)
ttctctggtaattcttttctcttcttcttatttttgtttttattgtttttcttctttttttgttgtcttttattgttatctcagaaaaagcaaaggtttttgagtttctgggtggagtgcaaagacacccttttaaggattcagattccgttttcatgatgttagcacaagatctctttttttcctctctctctctctctctctctcagatttcgatgcaacagcacctcaacagagcccagagaaggcacacttaacagaaacaaaacgccatctaagcgtggtgacggttgagattctcccgtttatggcgtcaccttgaatctctctgagtcaccaccaagcgcaaaaaaaaaaacttctttttttttataaaatattcatgtgggtccttggattgtgattcttttcctttgacccctctctctgggtgtgcctttctgggcttgtgttgggcctgttgatgagttgacacatgtttcaaatggagattgtgttttgcgtgaggacttagaagagagagatcagaaaaaaattgtgttttttgtgtggttcttatatatatatatataaagtggttctaatgggtcaattcatgacacttgttagttcactggagatgcttgtttgacaagatgattaataataataataataataatttaatactctgactgggacatctgagttttttggaatgggtatgctactgctttatgggggccagattttgaaattaaattagttagcaaaagagaatgaggatgatgtaagtaattaagtatcttgttttttgatggtgacaaatgtttttttcttcttcttaatttgtaatgagaaattgtgtgtatggcttgattaaagtatttaaaaaaaggggaaaagaaaacgggaagcacaagttagctttgttagttcttgttgatggatgtgattgattgcgtgaatgggctaagtacctattttgaaatgaaatgattaggtattgagacaggagatttagaaaaaagag

SEQ ID NO: 17825 - DNA, 499 bp, Glycine max
  Intron number 3 from transcript Glyma12g32670.2 (locus Gly ma12g32670) derived from phytozome v7.0 (chr-ID Gm12; pos 36157740 to 36158238)
gcacagggaataatctaccatttgcatttggttgggtacgaaattgctgtttgatattacgtgcttttaatgaagctttgaattacttgtaaaatgttatattgactctgtagtgatttgctagttttagagctacagtttcaccaaaaaagattttaattgtcttgattcctgctctttgtttgattggatggtctttaagattaaaaatattatgctggtttattcctgaactttttgcatgtctgccatttacttattaaaagtaaataaaaaataaaaaatagcatgcagtgtttatgtttccctgtatatatgaagatttgtggttcctactatgtccttcacttttgagtagtagtgaagggaattttcttcagttcagtagttgctgcgattgtgatgataaacattatcagaaagtatttatttaataaaaaactatgaaacacatttttttctgctgctttattgcaggggaagaagaacccagggacgg

SEQ ID NO: 17826 - DNA, 722 bp, Glycine max
  Intron number 2 from transcript Glyma05g31960.1 (locus Gly ma05g31960) derived from phytozome v7.0 (chr-ID Gm05; pos 36979243 to 36979964)
ggctgaccaccattgatattgttacccatttgcaggttttattttgttgtctttgcaattgttttttttttttttgtatgttgtgccttttgtgttactttttcaatggagatactctttttcttgttttttttttactccatccaacaaggtttaagtatatttcgtcaactctatctatgtatatagcttatggatccctttgtcaattgctttgaatgttaagttgttgtttgatggacataatccttagacctttggtttttgaagtaggacaaaacctagacctaatttcttaggtgtttgtgacaatcttctctaaccaaaattagagttttacctcagtaatctatactaatctttaatgcaaacctttattcacctagggaattgtatccaagtctcgttgatgtaccagtctaccagaaaaccttttaatttgtctctttgatttttctggacactgaatacaatggctgtatgccctatcaccatcccaatatttttatttgtgtaagaggtcttgtgccacctgccaaacggattttgattgttgaattacagccagagcatgaaaaagaatttctttttctcttttcagttcacttggactggaatttcctttatataattgtgctatttccggctatccttcaaaatgaatgtatctggtttcggatatatcttagtatataaccttgagctatgcgtgtgcatgtaga

SEQ ID NO: 17827 - DNA, 743 bp, Glycine max
  Intron number 1 from transcript Glyma11g04440.1 (locus Gly ma11g04440) derived from phytozome v7.0 (chr-ID Gm11; pos 3008284 to 3009026)
gaagacttggtgggggcattttcttttcagccaaggtagtagctaggaaacaataaaataaaaggctttgaaaagaaccacttttcatgtgcatgctgattctcccttgattcatgtgttcagttttggagaagagagttggttttattttcgtttttttttctctttgccttttttgtattataatatgtgcatggcatgtcatgtcatgtttgccactttgaggttgtttgcttctttttctgggttggttcacggttttgcattgctgtctgagcctgactctgtttcttgtcaagttttcctgtggtagttgaaggtcttaatcatctcacccatgcctttgtctgtgttagtgttctgtgaaggtttcatttcattagaaaatgagatctttacagtttatggtatggagtacaagttttgattttcttttttctgaggaaacatggtggaaaaattagtagcaatattctgttttttttttgtttttttatttatttaagagttgtttcatgaatgatcagaacttgggactctcaaactgaaccttgttctgggtttaagtttaacttctgagtttagatgtcatgttagtgttccacatttggaagctttttaccatgtgaacaagtttaagcttctgtgcagtttctgcttctctttttttctttgtttttctgtgttctgtggaaaattcaagcttgtgatctcatggatcttgcagaagggattcggtgttg

SEQ ID NO: 17828 - DNA, 764 bp, Glycine max
  Intron number 2 from transcript Glyma11g04440.1 (locus Gly ma11g04440) derived from phytozome v7.0 (chr-ID Gm11; pos 3009205 to 3009968)
gactataagggtgagacattttgtttttggattccctcttaatttttattttttttatttttggtatgtttcacttcctcatccacttgacattacggcctagctaatcccacttttcttaattagtgggtaaagttggtccccatcttgtagaatggcatcttctgaagtggcacttctttagatagcccttatttggttctttgggaaatagtggcctgaggttttattttattggaggctagaaaaaattcaagatttttccctcctttctcgatgcttgatgttagcatttgtggtatttctttagatggtttcttaaggtgcataacttttcatttttgctttagactatgcccctaagagttctgaaaactggaagtggtccaaattctaaaggtattaaggataaaagaatggccagctatctgactttttgaattactgaatctattctatttttggtgcatttggattttgatggccttttaatttccaagtgaatacgaattagttggctgcataagatgggaatttattatggaagactaaagtttccacaaatccaaatgtaattgaaataattaattaaatctcgagaaccaacctgagtataatttaactttcatacatttaaatttacagcagtcttttatcttttcatctgctactagacccttccttgttttctctatatctttattcctttaatttgttaagtaagcctcagaatttctgtacagtttccactttctacgacgaga

SEQ ID NO: 17829 - DNA, 495 bp, Glycine max
  Intron number 1 from transcript Glyma08g08310.2 (locus Gly ma08g08310) derived from phytozome v7.0 (chr-ID Gm08; pos 5965305 to 5965799)
ttcttccatattcactctctcttcctaaccgcccggtacgaacacacaacaacactctttcatttcaattttcgcttccttttcatcgttttaggttaattgttttttttttcctttcgattcgtgtatgttacatcttaacattcttaatttttgctaacctaatctatttttttttactgtcaattgaagaacggataggatacctaattgagtgtgctttcccgtcgaggcatttttgttttgtccccatttttatttttatatatattaagtggtttgattggatctaagatatggatgagtaaagtttagcgacatgtgcttcttatcttagttccatgttctggttagtattattatattaattaatgttgctttgttagttgtctttgcttgttgttgttgcctctctcaccacgttgcttccttctgaccttgttaaaaaatctctcacattgttttctttcttgctgttcaactgtttgttgccag

SEQ ID NO: 17830 - DNA, 702 bp, Glycine max
  Intron number 2 from transcript Glyma10g00680.1 (locus Gly ma10g00680) derived from phytozome v7.0 (chr-ID Gm10; pos 434116 to 434817 reverse strand)
tcattgaccagaatagggtatgacctttttcttttttctttctctgatttagtacttttttcgtttgattagattcaatgggtgggcgcccttttgtttgttttggtttctcgtgaggttggagcaaagattataatttttttcatctgggtgttggtaaattatcgacttcggttttgttgctagaagaattgttctgatccgtggttttaggtttttttgaagctgttagttctgcttagttgttttttaattgggtcataagtttgataaattttttctgttttatttgtctctctttttgaagctattgattaaaagtattttaattgggtcataaggctttgtatattttgtgtgataaaatcatcaatgggttttggtgttaaaccggaatgtgataatatttaatttcgttgtagttatagaggtcaaccttgcagccaactttaatggatgcttttagttttgttgttgttgttgttttatatttctctgttttgaagctattgttttttcttagttgtattttaattgggtcattgtgctcatcaattgagcttgtagtaatatcaaattcctttgaatattagaggtgtagacattattgataagttgcatgtgcatgttacagctttcgagtatttgatttcaaaaccatgtagcataatttttctaccatttgttgacaggctcttgttg

SEQ ID NO: 17831 - DNA, 485 bp, Glycine max
  Intron number 2 from transcript Glyma10g01200.2 (locus Gly ma10g01200) derived from phytozome v7.0 (chr-ID Gm10; pos 885094 to 885578 reverse strand)
caaataaaaatttagaatgtaataatctcggttttctatttgatggtttttctgagttatttggctaggctatattgcttgttttaattaattattaaataaatgagttgcttctattcatattttcatatcatgccactgaaatgaagcctgaaacggccgttgagtccaataaccctagactcatggattgagttgaatgtggtttggaatgtgtgtcaactgaaaaccaaacacccttcgaagtagaactcatcgtaattggaaagaaaccacaccaaatagcactatttccttccttctttccttttgaattgatgaaagttgcagttgccaccgggatgtatcttcttttgtaggaatgaacatcttcatggatgcatttttttattttatttatagagactttgtattcaagattaacaattaacagttgttagtatatgatttaatggtctattgaattatttcagtgggaaagaatc

SEQ ID NO: 17832 - DNA, 942 bp, Glycine max
  Intron number 1 from transcript Glyma09g00380.1 (locus Gly ma09g00380) derived from phytozome v7.0 (chr-ID Gm09; pos 123385 to 124326)
gtctacaaggaaagcttctccgtcaaagatactcagtcagtaattcattcattttctttccccttttttaggattttcaacacaaccccttcatgcccagaagcttcagtaattgctggccttacaagccacacaacaactaataggataggatttgatatcatcttagaatttgggttagaccctaattcagctcatgagatgagggttgttgcccatttatataccctagtttagccatgtcactagtaatcaatgtgagatcttcagcacccccttaagttgaggattgggcatggtagtccaatcatggcccaattatagtttacttgaaaggcacaccaacaaccgctaggataggtctgataacatcttcgaactttggatggacctgactcaaccacaaaagtttgttcataggaatgagattttccctctacttatatacactgttttagtcatatcactaatcaatgtcaatgtaggatgtcaaaaatattcccctcacatcaaagataggacatttcaaggattgtaggtagtccgatatgggtagcgtaataggcctaacaacaaactgctaggatagattctgataccatcttagaatctagacttaagtctaattcaacccaaaagctaactcttgcatgggtgagaattctccctcacttatatacactgtcctagtcatatcactagtgggctctgatattctcaatgttgtaatagattttaagtaatcactttaggataggacaatgttgctgtgttttggagttaatgccaactaatttcaggaagtgtgttcaaaaagatttcccaaacacttgtttagaacttgcttgtgatgcactcagcttttgagcttcatttgttggactggaaaactgtgttttgtttttctttagcttccttcatctacgagattctttgttgcag

SEQ ID NO: 17833 - DNA, 646 bp, Glycine max
  Intron number 2 from transcript Glyma06g23090.1 (locus Gly ma06g23090) derived from phytozome v7.0 (chr-ID Gm06; pos 20121909 to 20122554)
tgtctcttgctttcaaacaattgtctaccacgcaggtttgtaacaatggttcccctttttgtacttgccagggaaaataaaaactcaaatttcaacataaaccagctatcatccacgcatggatcagtgccactttgtaatccaatgtttaattaattttctcagggttttttattttactataatttaacatttttccacaaagattcacaaattttaatattaaagtaaataattatttcaaataatttgatctttttaatataagataaaatgtgacggaattaatctgtcattgtctaggacaacaaaatccgtccctgtgatttcaaaattggcgacaaaatttagttcgttacacattatgtcacaaaatttgctatggatttttatttattttgtgacggattacatccctcgctaattttgattattctagtggtacaagttcttattcttttctctttttttttccatattaatctggaaggaaattatattaaatgttgaacctcggtggtaatagtagttatttgaattgattgtaatatatagttaagaaacgctgtgtatcttagaatatttcctaattaccttgctctgattatttctccacacagtttgggtgctgtaagccaccgttgca

SEQ ID NO: 17834 - DNA, 700 bp, Glycine max
  Intron number 1 from transcript Glyma13g43060.1 (locus Gly ma13g43060) derived from phytozome v7.0 (chr-ID Gm13; pos 42840587 to 42841286 reverse strand)
gccattcaaacagtggtgtgtgctttctgaaactggtatggtcttctttatcctgttaatgagattagcatttgtcatcacattcctgtgttatgctcttccacacagtctaccagatgaactattaatctcaaaatgattttgcttgatggcttatgcacagtgatcttgcttggtccttgacctttctatgtttttgctttcatttcagagttcagatttatatgttgaaattcgaagttggttttgttttctgttgcatgctgttcttgaagatgtgagcattattatgactcaatcataaccaatttcacatgtttttaaaacagttaaatatttgtcgatgagcatcaaccaagtttcttgtagagttcaaatttaatttgccaaaattagctttgttatatacatattttttattccctaatgtaataaatctgaccaaaacctgatcccattctgcttcaatcaagagggactctgttatagcaaactaagaattgaagctagataatttatcttgtgttcttacctctgtttcaatttttaacaatgtatgtggacatcttgaccatttttatcccatataaagctactatgggatcttgcatttttttttatgttgacatcatttttgtgccccatttgttatgtttacttgctgttctttaacatgtgttaagtatgccacagggaaaat

SEQ ID NO: 17835 - DNA, 786 bp, Glycine max
  Intron number 2 from transcript Glyma06g46540.1 (locus Gly ma06g46540) derived from phytozome v7.0 (chr-ID Gm06; pos 49136484 to 49137269 reverse strand)
ataaaccccagtccgagaaaacggtggcttttgctgttatttattttattctattttattttatttttaagtagttcacgatgatgatttgtttatttatttatccaatttttttaaatgcattgttcctgtgtagttagagtgtaggtttagtttctgtattcaatggtttaacggtttgggcatgggtggtaaaaagattgaaatttgaagaatgtgagaatttgttttttacattgccctctgaaacaatatgtcgttttgggaccaacaaaggttggtccagttggtaaggaacgagttcatatcgtttgattcccactgtggatcttgttggtgggtaatgtataagtacctctgtaagtgctccttgggccttgaggcttgccctgaccttggtgagtccccaggatccagctcacctgaacttttatcactctaaaaaaaatatgtcgttttgggataatttctgttgagggtttgtttgcttgtacaactaatggattaaaggaaactccttcagttgttgcttgccattttggtgtggtttttgtttttcaactaaatattgtgaatttttagtaatttggctgagtcataactagataggttctagttaaatggttttttcatcaagtgatttgcaattcaaggaactaattgttagggcttagggatagtagggtaattgaatgtatgaaaattttttaagtggaaaggagaaaaattgattttttttctcctctttcaggtggctggaggtcaggaaagttcagggaggaggat

SEQ ID NO: 17836 - DNA, 952 bp, Glycine max
  Intron number 1 from transcript Glyma14g03370.1 (locus Gly ma14g03370) derived from phytozome v7.0 (chr-ID Gm14; pos 2165471 to 2166422 reverse strand)
gcagacattcaagcaaaaaagaccataacatcaaggtatttcattcctgcattgtattctttctaattttgatcaattaagttggtattataattttgtatattcttctccttgtctacattgctattataatcctcttttaagttttgtttgtgaagttacctttttattgtggttgttttatgtatgaagatgagttctagacttcagttcgaaatcacattacatgggtttctcttgtgggcttcaatggcgttcttaatgcctattggtatggtatactagtcattagactgtccaacagagaggggaatcaaagaaggcttagaattatattttatgttcatgcagttttgcaggaaagtgtatctaaacctaaaacctctgttacattatcattataaatttaaatcatagatcataattttttctttttcttttttggtatatttaattagtttcttttccctttacgtggcaacccatatttgtacaattatttatatggtttcagtttagtttagaagggtcggttgtcccactaattaacttctaatgatggtggaatggagataagaatagcaagattccaattttacagttaatttatttgtcctaaagcttgttagtcactacataaggtcaagtgaggggtatttcatctttgtttattgaaaaggactataatgaatggtttgaagacaagaaataatcttcttggttattggaagttccaagctttctttgtctcattttttaatagagcatgtgaaaagaactttgcaattatgctgttgtctgtatcattaatcaagttttagctcaagttataaaaaggccagaagctttcttttcttgcattgatccttgccttttttttattaattatatgcacgttttgtatttctgttcaacagaagcttgccgtacttcttgccactgcaggagcaat

SEQ ID NO: 17837 - DNA, 854 bp, Glycine max
  Intron number 1 from transcript Glyma09g29110.1 (locus Gly ma09g29110) derived from phytozome v7.0 (chr-ID Gm09; pos 36050172 to 36051025 reverse strand)
agcttcttcaatttgccaccactgtgctgttagtaaaagaccaattaacatgtattgagggtttggttttgtggctgattctgtttgtccttttttgttggaagtgataagttgaaggttgggaagagtgaggagaagaaaatatgattgcaactttggaaattgttcttaaaaaatgtctctcttttttttttgtggggggttggtatcattttagattattccaattgggaaaatcaggccaaccaagttcaagtttggtatttgggtgaaatttggaaatgggtttttggatatttcataattttgtggggattttcatcaaatcaatggaccatttttctcatttgtttcagaaagttttgagcttttattttcgagttatcttatccatttatggaacattgccaagtttctgaagatgctaacagagacacgttgtttcatgatttgttggaacgaggaattagagatgaaatgatgatgaatgaatgcaaatattcctttgtgtttctgcaattgttgcttgttcagttgtttttggttttctttggagaccctttactcacaagagtttcagctgtttttttctcttgaaatgtagaatccaataaaagctttcacttgatgctactttacctttaagtgttgtcaccgtgtaagcatagtgcaaccttttgaagccttttctcttgttgtcacatttaaacgttgacaagggcaccccttgtcatgtctcatgctgttcttgtgatgctgtcacttttagctctatttctttctcaaactcaactctctacctgtgaattttttttgcagagaattccagaacttttgacttgaccagtcaacgg

SEQ ID NO: 17838 - DNA, 711 bp, Glycine max
  Intron number 2 from transcript Glyma13g39490.1 (locus Gly ma13g39490) derived from phytozome v7.0 (chr-ID Gm13; pos 40086745 to 40087455)
atatcaaaaacatcctcggcgcaggtccttcctttatcccaatttctctttctttttctccttttttttaaatatattatgatgattattattattatttacttatgggttaatggttgaatgctgaactgggtttgcaatagtactttttttgtgttcaatactagaatctgggagaaaatttaccttattttaatgttgttagtttgggatttgtagaattgataagtaggaaactggaatcactgtgagaatgagatgtagtatgatatttttcttctcaaagctattggtgattaaatttgtaagctgttgattttaaatatcggttgtggtcacattgttgtttcattgtgtttgttaatattgtggctaattgctgacaaatgcagccaatgtggtcccaattgctatcgcgggcagttaataatccttgatgttgcgggtcaaatcacgccactgaccgttttttaaaacctttagtcaagtgtaattttctggttgacctgtctttgctgttttacctatctattcttgtcaagggtttttgttgtgcgaggaaatgtaattttaataattaggatcattttttttgttgatgagtttatggagtctatgtttaagtgagtaagattttgattttgaattgtttggagtgattgtttttgtgggttgttctgttttgatttatagttggagctgaggctgagc

SEQ ID NO: 17839 - DNA, 561 bp, Glycine max
  Intron number 1 from transcript Glyma13g27250.2 (locus Gly ma13g27250) derived from phytozome v7.0 (chr-ID Gm13; pos 30416425 to 30416985)
attctctttgatctgtctgtttgcagcggaaactggtagaaaatattggttttttgaggtggtttttgtgtgcatatgaagttttatcgcatggtctttgtttttgaagtagatagtggatatctgttcactgttttgatcatgcgagaatctcaaagaaactgaactttttctttgttcttttttttttttttattgttgttggtaatgggaaaagtgctttgttttctcagccatgtacacaaaggagacttcattatttagaatctgtcacccttgtcattttctcttagccttttctcatctacgtaacaaaatttgagatcagaagttctttttcttgtttccactttgcaaactgcttagaatggttgttaaaaactattctttttgtgtgtatgattatagcttcaatttgagatcacaagtttatgttttttgtcttcactttgcatactgttgagaatgcttgttaaaaactagaattttttattttcttttgtgataatagcttcattatctacagattaagaataaagggagtcttccaaattgatcttc

SEQ ID NO: 17840 - DNA, 186 bp, Glycine max
  Intron number 2 from transcript Glyma13g27250.2 (locus Gly ma13g27250) derived from phytozome v7.0 (chr-ID Gm13; pos 30417098 to 30417283)
gagtcggaaggggaagctggggtgagtatatataaataagttttctgtttgatttcttgatttcttccaatgttttgtgatgttgttgggtgtgaaatggttgttggttgatgcctgatgatgttttttttatgccatttccattattcaggcaaaaccagtgacagcattgggtgcccaagtgtg

SEQ ID NO: 17841 - DNA, 525 bp, Glycine max
  Intron number 1 from transcript Glyma06g39070.1 (locus Gly ma06g39070) derived from phytozome v7.0 (chr-ID Gm06; pos 41993565 to 41994089)
catcacttgtgagtgttgccttgagtgtcccttgggtaagttttccacttcaatttctcaattttttttattttgcaatagtataattgatctctaatgtttcaagcaagtatttttgttttgtattgttataattgtacaataaaaaaaatggtggaacaggaactgcagaatctgttgatcttttttagagccttatttttgttatttaaaataggttaaataatagttttattttgtaatttggaaaaaacaaataaatagcagatatatagatttaattttatcaaaaaaaatatctgtgagacagaatcactatttcttttcattatattttattgcaatataaattattattataaatataatttcgatcctatgcattatttgttggtggaaacgagggagaacactgaagttggtggaaacatgtttgtttgtaataatcagtgaatgtcactctagaagaatttgagaaacatgctttaagggaagggagcggaaggtggaagagaaacatctggg

SEQ ID NO: 17842 - DNA, 1053 bp, Glycine max
  Intron number 2 from transcript Glyma10g30670.1 (locus Gly ma10g30670) derived from phytozome v7.0 (chr-ID Gm10; pos 39272473 to 39273525)
ggaaaagggattggagttcactggtaaaatcaatccgacaaaacttatatgcagttccttaggtgcttttggggttgttctcaaatcagaattggagttttaccttgggagtctatggtgacatttaatgttggggagtatttagtatacggattattgagatgaaactccaattctaattggagaacaacgttaaaaacaccgaaggaactgtatccaagttttgttcaaatctaaaagcaaatgatttatttgggagatgtggcattcaaattaagttgggcaactcaggcagcattgtcagagaataatgatgccaacagtggataaattatgaaacagaaagtgatgaatcatgaaatgcaaagcagacaaaccacacttggttcgttctgtatatagagtggatggattttagcaatgggtagaagaaatatagatttagtaggcatatcaagtttcaaaacaatattgagctcagagtcctgagttgtgggttgtgactcgcatttgtttatacttatacatgaacttccacttttgaagagcatcagtatacttgtagtcttgtagatcctgatttcatgtggtatttgcaattttttcaagattcaaaaactcaaaatatctctcagtcaataatacattagaaaaggatgtattaggaaagaaatatgatatcttgccatgcagcagcaaactgtgattaaactgatttttctacaatgtggtatccagttggttgttaggccaatattcctgagaattatggtaaaacattctgatttattttatttggctgttagtattacagatttacaggcactgtctaactaggcatgttttagtttagtttggaatttatagatcttactagacgcatgtcatgggacaaacttatgtacaattcttgttagcttttcttgaagacaagataatataaaaatacatatccagaaccttaatgaaatcttacatagatcattgtaataaaaataatgattccatatctccatctgcagggtactccagtgaatattgttgtgggttctc

SEQ ID NO: 17843 - DNA, 904 bp, Glycine max
  Intron number 2 from transcript Glyma08g33560.1 (locus Gly ma08g33560) derived from phytozome v7.0 (chr-ID Gm08; pos 30119020 to 30119923 reverse strand)
gcaatactatcaaattcattgggtcagtcctacctttcttaccttgttttgatcactaaattatgtatattgacttgtgtcatttttacttaagttcacatgataatggaaatccaattggcaaaacacgttagaaatagaaatataaaaccattcttgtaactttacttgaaagctcaaagttttaagaaaatgtgtctttgacaaggtattagagagtcgaagataaagtgattaggagtgatatcctagagccctccttttttttataattaagtaaaattttagaacaaggcctctgttcattatttatgcttcaaaccaacaagacacttgtgcgagggggtgtgctaaagatgttaaatcattcttgggtgctccataactgttgaagcattcagtaaagttataaggtgttaggtttcctgtctcaaattccagaaccatggtttaggcgtaaactacaagagacaatcttttgtccaaaacatggtatgggacatttcaaatgacaaaccaaacacacatttgatctttaacaatgcttattcatcatttccttttcctttactttcaaaacataaaatccttttgctgctagacatatcatgactgtggcttgtttttggactataaaggaagttagtttaatcttatatctattaattgttgtttcaaatggtttaaattatctggagtgaggcttagtacatttgatatttttttttaaaagaagaaaataataagtaagtcatgcatccaatcaaactgataggaatgtataaataacagtaatgatccttacacaaactcttaagattaacaaagctagaaatgtgctttcatggagaaaggttgtaacagattaaatttgcttaatgcttaatacagttattactacaga

SEQ ID NO: 17844 - DNA, 745 bp, Glycine max
  Intron number 1 from transcript Glyma08g08840.1 (locus Gly ma08g08840) derived from phytozome v7.0 (chr-ID Gm08; pos 6312643 to 6313387)
tctcactctgcttcttctgcctctgcatcttcccggtacccatttctcttcacttcccctttctttctcaatctccgttccttactcttttctgtttcactttctctgtgctcccctatggaacccagaaaaggaattgtcaaataacagaataaagttttgattttttgtatatttttctaaaaattctatgtccgtgtgatttctctcatttgtgttttagttacttgaagttttattgtcactatactttggataagttttgctccctttgctattcagcgtgtagttgctaaggggggaagtttctgtgaaaaaagagacaattgtgattctgtcttcattttttatgtgttgcattttggaagtgtttgtctttttcaaatgctcggaaactgaaggtggtcgtttgagaatacttttatttcttttgatggagtttttcccttgagacaactggaattcaacatttaattgttcaaaagttgagtggcattctgttttttatattgatgttacggcttcagactttagaacagaaactgagtacagtgatggcatttcgaagttctaatgggtctataggtttactctggccttaggtgttgtttttttgggaaggaggtggtgtcggattgatagttacagataaatatgttattctgaaacagtttacataattaattgctatgttacaatggatgtttcagcaaactagtgctgaggattaaatcaaacgagggaa

SEQ ID NO: 17845 - DNA, 747 bp, Glycine max
  Intron number 1 from transcript Glyma11g15160.2 (locus Gly ma11g15160) derived from phytozome v7.0 (chr-ID Gm11; pos 10858195 to 10858941)
aaactcaattttaacactacttgctgtatcttcaggtttggaaaccccatctttcatgttcttcttatgctatcattctttagaactgcatgtgttcgtatctcttctataaccttaatatttatcatttgatgaatttatttatttcaaattgagattctaacatagtaggagatgaacatgaatataagcaagtaggagatgtatcatcaaagttaactacagtgacacatgcaatgaaattatgggctttttgtttccctagtatgtatacccactaaaaaaatcctacttgtacatgagactttattttcttaaatttttcatattattgtttcattattttgctgaattatccttttattttgttatgtcaatacatgaaaagttagaacaccagttagttgtgtgattgcgatgaccttagtttggacaaatcttacgagaaaggaaatagacaattcctttcttgctggatgaaaactgagcaaaattagtgaaggtcatgctttatgctgctggtgctttaattagttccaatgactgaaagtacacccataaatattgtaattgtttatttgagttgcatttaatatttcaatacaaatattaaagctggatcccccctttctccctatttgattttgtgtacatgtgatgtttttttaatggcttgtccatggtgtgaactatggttatcttattcattcaggttcaacccaaccaagtgtggtgtgaggaagaggt

SEQ ID NO: 17846 - DNA, 779 bp, Glycine max
  Intron number 1 from transcript Glyma09g24100.1 (locus Gly ma09g24100) derived from phytozome v7.0 (chr-ID Gm09; pos 29803548 to 29804326 reverse strand)
tccacaacactgggctcaagtgtacttaagtcgtggtgagtttttttttttttttaattcaattttcagttcaattgcacgctgtaatgatgacggttgagtagttgtccttgacgaataatttaggtgacaacaaggtgaagagtttagcttgttatgtggatttattaagtttttgattgaatttgtttttccctgttagcttattaattgccaatttgaaaacccagtagcagcttttaatgtgtaaaataaaatgacgtagtttatatagaaaaacatgctcctaatgtgtgaatgatgctgagggatggatttataaaatgtaaaagaaaaaggaaaactttttttaaatatttcttatttttgttgtaaattgtaataatacatgaaaatgtgacaatttggtattttgaatagtcaccctgttttaagcttgccttgtaatcttgttatgatttcctattcttgtttgaaactctatatataatgcacagatattctagacattaaaagcaaaaattgagagtctgctaaaagcaaaaattggaatctgaaactagctagctaaattgctcttatcttcatgatgattattgtgaaaaagcattttttgctttagtatttgttgttattgcaaaaaaaatcccaccagaccaaacaggcattcaataatttttgaaagcataagaacttaaagtatgctaaaaaaaggtaatttttatgtcctcatgaattcatgatgtgtcttcaattttagagttgttcaggtcctcaag

SEQ ID NO: 17847 - DNA, 819 bp, Glycine max
  Intron number 5 from transcript Glyma10g44480.2 (locus Gly ma10g44480) derived from phytozome v7.0 (chr-ID Gm10; pos 50817395 to 50818213 reverse strand)
gaggtatgacctcccttcttaatgctgatttttcactcttaaaactcagaatccccgaattacaaccatattatggtaaacctttgttaattttaacatacctatgcctattaatttggttgtaaagttaaggtataaatccaaatagttacatcattctataattgtcattatattctgtgctgttattcatgggaaaacttgaaactgcatgtttggactgtgtgtgtgtctatatgtataaggtcatataaactactggagttaaggatgttaagcataaaagaaagaccctatcaagcctccactcttgtcatctgggacctttttcacttagttgcatattattcaatttctataggcaaagtaccatttagtggatgagtggatctattttagcacttcatcagtgaagattaatgagtaaactaaaatttcctcatgaggtaccaacatgtgttggtctgagcggaaggtgcttaaatctcttaagtgtgtggtcttgggtttgattccaagatttgtgtgtggaaaacattctgttggtagggtcctctgctttagttcttgaccatgccccgggagattagtctctcacctactgagtgggaggatactgtgggaatcaaaaaaagaagtttgttcttgaagtgctagtttgctagagccaaagtgtgatatgcttgttagccatatataagatcaaacatgctacacctgggcaattaacagcaatttaaaaaacaaataatctgctgaataaaaactttgctgatgatgggcatatgagtgtattaaaattattttatcttcccagga

SEQ ID NO: 17848 - DNA, 881 bp, Glycine max
  Intron number 2 from transcript Glyma11g05780.1 (locus Gly ma11g05780) derived from phytozome v7.0 (chr-ID Gm11; pos 4085776 to 4086656 reverse strand)
cctacaacctcactaaactagaaatgtatgcatatatattatatatgcctttctttctttctttttctttttcagaccctcaattcctttctgttctataaggatggtaaaatgtttctgacatcttccctttgatgttgatggtctttcttaaacatcaaagtgaactttctgtattgatttcccgagctttggagatggattgtaaatttgagtttataaattttgattgtacgaggagttgaattggcaattacctctggtgactggtagtatttggagaaggttgataacatgcttatttagggatagatggataacatgatgctttgtttgaaagcataggctttcactgtgactgttgtagtgatttaaattgcaactgaattgtgtatatacgtaaaatggtaatcagagaaatgggattctgctagatttttgaactcttaagtaaaagccgtatttgtgttttatttgaatccgcaccatttgccttaagccatatctctaacctttttttctccagatatgtggtggcactgtgggagggttagggtaatagaacagtagtcattttactttattttctcttttgtattaagttttctgatatggagatgcctatattgaataggagtgagggatgtttcgtacaatagcaaatagtgattaaaaagactagattatccatcttaggtgtgccattgacttcgatacttaaaatttggcacctgaaaaaagcaatagttgagtttgatagtttatcaccggttataagctgacgagttgtcatgatgtcaagaatgtagatctaagatgaacaacatttattgtcttttgtatttgcagaccgaggagctgctggggttgccaaataactg

SEQ ID NO: 17849 - DNA, 626 bp, Glycine max
  Intron number 4 from transcript Glyma11g37710.1 (locus Gly ma11g37710) derived from phytozome v7.0 (chr-ID Gm11; pos 38745661 to 38746286)
gataaaaagtttgacactcaatatcagcgtcggatgtaagattttgttgtctcccctcccctcaccttttctttctaggcattatgattctttctttctattccatatctgtattgtcagactttaatgcatgcaaaaattatgaattgtaggccactatagtgttttttgttcacattttctatgagacctttatgcagtggattatttgtatgacaatgatttttgtgtggaagggggcataatgtgtttcactattctctctaaaaaatactggtgaaaggatataagattaataatttaatttgtttgtgggaggaagacaatctatcaaaatgcacatcaattcaaaacttgggaatctgattttattttatgaaaattcaatttggttgtcctttaatattgatttgatttattgttttaataaccaaaatttgacattgtagcatcttttatactagtcttataatcccacctccaccaaaataccaattttctctggttcttttattcttctggataattactttgtttgaactatttgaaaaatgtagaaactgatgtttgacctctctcaaatttttgtagtgcagaagcacttgataatcacttgacagctgttc

SEQ ID NO: 17850 - DNA, 593 bp, Glycine max
  Intron number 4 from transcript Glyma12g02900.1 (locus Gly ma12g02900) derived from phytozome v7.0 (chr-ID Gm12; pos 1862808 to 1863400 reverse strand)
gttgtataaaggtaaccttttgttcttgtttcaaattcttagtattcgtatctgttctgaattccagattattttgtggtctgcattgataatattttacgtagttattcagtcatctttacaatagtggattgtaacaatagattgctctcatgttttaaaatttcacaatgtttgcccagcttataaatgaataaagcttaattagtctctcttgactaatttgaatactgggtcaatggtcactcctcattgtcatttaaatatctggaccacaacagtcccaaacgtaatagttattgcattccgttcatctatagtccctttctttctgagccccacccccaagttctgtttttttttattgcagtgagtgaatggcatcactccttatttgaatattgtatcatttattcttttctattatgcatatatatgttttacttttatgttatttttagtcactattctgcttaaagccacccattactgctcttaagataggttgtaatattgatcttttagagttgtggggaggtcagatgatcagtgttttctcaattcttttcatttagctcttctttattgtaggt

SEQ ID NO: 17851 - DNA, 544 bp, Glycine max
  Intron number 2 from transcript Glyma14g00840.1 (locus Gly ma14g00840) derived from phytozome v7.0 (chr-ID Gm14; pos 437413 to 437956 reverse strand)
ttgcaggtttatatatcacttaattaatttttcccttacaagcatttttttttattgtattcagaagaatcagaacacattagacatttgacttattctgttcaagttggtcggactattgcgcaagcatgaaagcttgtaatattcaaattgacattatattttatttctaaaattaatataaggctatgttattagttattacagcttaaataataataataataataataataataataataataataatagcaataataataaatgtaactgttgacttatgcaactacagggaagattaatgcaaattggcattttctgttcatgtaattaacagtttgaggaatcataatattcactatagtccattaaaacttcaaaactagtagttgggatttttgttttgtgaataataataggaagatttcttttgtgtatgtttattatatatatgttctatttttctaaacctgtatcaattattacgttaatctttttctttccagaaattctggaccctgaagtgaatattacttgtttg

SEQ ID NO: 17852 - DNA, 871 bp, Glycine max
  Intron number 3 from transcript Glyma06g06030.1 (locus Gly ma06g06030) derived from phytozome v7.0 (chr-ID Gm06; pos 4311009 to 4311879)
ctcaatcagttagaggtaggttgattttcatataataactgaactgtggtcaaattatggttccttataagctccttctcatgtatttgactgtgaaaatgtatgtgttgtctgttatatttatgcacaatatctatctcctgcttgttgcagtgcagtatgctctagagcatttgaataaacttctctacaaacacttataggagaagaaaattaaatgaattgaagtaaaatgaatcaaacttgtcccatgagtgttgaaatcaactcatgcacctcaattgttttagaagttcccctcatgtgacttttccataagttgattttaatttatggtaaaagcttaactcattttacctcctggattcattttttcttcttctcttatatgtatgtttgtccaaatttgctcttactacaatactaagtctgataggatggatgctaagtatttagagcaatacctgtgccttgttttggcagggaagatccggctctctaaaaagttgtgtggtgattcaagtgcaacctacctagcttccagtttctaatcgctgttacctggtactggggggtgggggttgttagagataatcttatatttcaatttttatctacactctttttgagtttaattttgtgacatgtgataacagtcctctgctgcatgttatccagggccattggcatttattaacattttgttttatatatatatatatgatcaattagtacaatttgttctccattccgtgaataccatagtcatctcttatgattatttcctatttctatggaatatttttttaatctaggaactttatgttgataatctctctttcctcccctccaaatttgtagcttcaagttg

SEQ ID NO: 17853 - DNA, 630 bp, Glycine max
  Intron number 2 from transcript Glyma07g15360.1 (locus Gly ma07g15360) derived from phytozome v7.0 (chr-ID Gm07; pos 15211241 to 15211870 reverse strand)
acaactgcgttgacaaattcggtatttcccgcactttcctatttgtccaaacccattttacacatcaaatttatttatttctattttctaattgctggtgtcatctattgaattctctggtgcttgttcgtgtttatgtcttaagtcttttgatgagtgcatggttttaaatttggtcacggttgcggtcgcgttaggatgagtcagaaaatctttatattgcggacaatttcgaaaaaaatgcaactaatgcgattacggagtgtcaaaatatcttgatgcagacaatttaaaaccatatgaatgcattatcaggaacaccaatcctacggtgacctctctaaatttcttttactctttggttcattttgtgttgatcatgaattgaatcaattctgtaaaattgattctattgggaaaccaacttttggtgtgtactgagaatgcttaagaaagcttgttgggtatatttcattcttccgaaactttaattattatgtcaagaaatctatgattgaaaaggccatccagtcataattactaatttctacatttttctattagcttgttttgtttctcttcagaagattgcttaatttagactaaccaaatttggttttacgtacagga

SEQ ID NO: 17854 - DNA, 756 bp, Glycine max
  Intron number 1 from transcript Glyma11g05470.2 (locus Gly ma11g05470) derived from phytozome v7.0 (chr-ID Gm11; pos 3822473 to 3823228)
cgtcgtctcctggtccagctgtatctgaggacgaggtacgccttgtgttctgttaaagatctcacattaactactcatatcatcataacaacaagtaggagacacttcttattttatcaactaatctttttgagtttagttagaccaaaatttaaactttaagatagtattagagtttattatactaaattttaagatgtgtagtttcctctttatacattttgtgcaatttggaccagatctccaatttactaaattttaagatgtgtagtctcagatctgaagagtgacataaggcattgatatgcttaattgactttaacttcagtcgaggttttttagttgacttcaacatcatggaattcatatcttgagtggccacgcgtcactattgaggtggatttgctcatttggttagttttaatttgtcccttcttttatcgaagggaaaagaaaagaacaaattataaatccttcttttagaatccgtgtggagtatggactaagtaatccaacaagatattagcaaaagtcatgaaatgttaataaaatcaaagggttcggttgcggttggaatgtatcatgctttggtcgtgatgtttattgattatgtctgtgtcacagcaagttaattactagtatatgtaaaatgttaatggtgtgaatacaatatattaagaatactgggatctgaaatttctacggtttctatattgcagagtggagctgaaaccatcaggtgcctgaagaaggtga

SEQ ID NO: 17855 - DNA, 796 bp, Glycine max
  Intron number 2 from transcript Glyma07g11990.2 (locus Gly ma07g11990) derived from phytozome v7.0 (chr-ID Gm07; pos 10269977 to 10270772)
tcgccttccgttccaatcttcgcttctccactaaggtattcaatcatttatttatttattgatttgtaatcgccagaattgcatagccagtttgataataaactgcatttcaattcatttcttaccgcttaggcttgttttttgttgctttgcttttattgatgctgctagcttgaattcttgccataggggaagagaatacacgagttgaatttcgctacaaagtgtgctttttttcttgtgatcgtgatatttaggtcctatttggattaatttctcgataagcacttacaggagaggcaaaaaataagaagataaaatgaatttaggttcttccataagcttattttaacttatgcgtaagctaattttagcttgtgcaaaagttcaattcatttttccttcttgttttcttctcttgtaagtgcttgttaagaagtttatccaaatggggccttaataattgcttcttttttttttttttaacatgttttgttgtgttgtggttttatggttcagttttgcaagggggttatacagaacatgcttgtgcgtagtttaaatcttgcacaaattatttttggagatattcttgcttggttgggtatttttgatgttgatctctcttctcttgctttattgttggcttgcctgagttatgctgttcaatgtgcttttgtcgaattattactattattactttttgttgcatataagaggttttagggactagttatttgctttctaagtctccttggtggttggcagttaagcacttctgtagctatctccaagc

SEQ ID NO: 17856 - DNA, 814 bp, Glycine max
  Intron number 1 from transcript Glyma12g10290.1 (locus Gly ma12g10290) derived from phytozome v7.0 (chr-ID Gm12; pos 8154165 to 8154978 reverse strand)
ttgctcttcacaacccattctttctattccacaaggtctttctctcctctctctctctctcagatctgatttcgttagtttctcaattactcatctcatgatcttgctcaaaaactaatattttcttaattgggttgtccaatctgggttttggatgagtttttaagatctgggttgtgttggtatttttattttatttttttagttatgtaaaatgggaatagttcaattgtgaaagttgaatcatgactccttccactgatataagcaatttgatccctttaaccttctgattcatgtgctctggcattagtgatttgatgagaagacactgttaatagaacgtgtcaatcgatgttgcagattggtttgcttctttgacattattatacctagggttttgggtttttcccacaagatcttatgaataaagtaactgcccatcgtccatctaactaaaagcagttaaaagttgcagccatattgatttgcacattcactgtcaaacttatcaggcttagtcatccccacataacctatttttatgtataagcaaatatgaaactaagtactataacctcggatgctgttatttcctttggttatcactaataaatttgaaaattccataatcacataaattatagtttcaaaattttgtgctatttccaattgaatgactttgtggttttatcgtaatgtactggttgtcccttctcttcatctaactgcaaattgagcatgtacttatttcagtttctttctgtgtgtttctgcaggactgagcaacacttccttcggaggttggtttgtc

SEQ ID NO: 17857 - DNA, 773 bp, Glycine max
  Intron number 1 from transcript Glyma12g36250.1 (locus Gly ma12g36250) derived from phytozome v7.0 (chr-ID Gm12; pos 39333915 to 39334687)
ctgggttcttcctcgttgccacctactttgttattgtgagcttatttttctttcttactgaacttgttttgaaaggcgtggtttttttttttagtgtgaagttgggctttttggggagtggtgtggaatttgggaatgggtgtgcgggtttggttgaattttgattctggggtggggaatttgtggactttggaagtgacgaatgttgagatcaaatttggctattagttgaaagtggtgttttttttagtgcaaagttgggtttttttggggaagggtgtggatttctgattctggggtggggaatttgtggtcattgaaagtgacggatgttgagatcaaatttggttattcgttgagttgtgaaaatgtgtgtggggattttccttgtttttgtttctgtggttgagaacttgtgttgtttgaaagtggcaactgtggagatcaaatttagttgttcattgagttctgaaaatgggtgtgggagatcacattctctgtttcacttaatttgaagagattaattttgagggaaaaaatggttttgcttggaattatgtgcaattcttaaaatggatgtgcagatttttccagattttgtttatggggaaagtgataaattttgagagaaggactgattgttcatggagttctatgcaattctgaaaatgggtgtgaggattttccttgcttttgcttctgggtttgaggctgtgttctttggatttgatttgtttggggtttgttagggtacagctgctacaaaggtcaaa

SEQ ID NO: 17858 - DNA, 407 bp, Glycine max
  Intron number 1 from transcript Glyma09g15680.2 (locus Gly ma09g15680) derived from phytozome v7.0 (chr-ID Gm09; pos 18511479 to 18511885 reverse strand)
aacttttcaaccgctggagcttcgacgacgttgaggcacttcttcacttttccccctttttattcactctctgtatcgacgcttctttaaactatagcaaatttgattaattattaagtttgtcttagttattaatctagttatatcgtgaaattaccggattttgtttacgataactgtgttctgattgttattaggttaatgacgttgctctggttgattaggttaactaaaaatgtattttttgtggtatttagtttgagttacttttttgcatgttctgattgggattaggttaatgatatgtcccttgctgattacgttggggcgtggttgattagtttaactaaaatgttttcttttgttgtatttagtttgatttttttttgtgatattaggttactgat

SEQ ID NO: 17859 - DNA, 681 bp, Glycine max
  Intron number 2 from transcript Glyma10g15130.1 (locus Gly ma10g15130) derived from phytozome v7.0 (chr-ID Gm10; pos 17543685 to 17544365)
gaattatatgtaagtacatatttgccttcactctttgagtattcctttgaagtctcacttatgatgtgtttagtaattagtaggaaagaaaaatataggtgagaaataagatatatgcaaatggagaagacaaaaataaagtgaatgggaaattggaaatagatgagaatagagtggaaatataggcatttgattttaaataaataaggaagaaatagaaaagagaaataaaataagaaaaaatgaaaatgaaaaatcattgttcattgattgttgcaacaatcgattgcaatgtgtgaatatcaattaatataggtttgtggtagttttaaatcggacggtaaatgcaaaaaaaaaaaatgtcactaatgcattatttctaaaaattagaaccaatagagagggaaaaacaactgtggctaaacataaaaaattgtcgatatatttataatttctgatgatttttaaccacaaataaataaactgactcacaatgtgtggttgcatcttttcagctacatttctgggtatattttttattttgctccccgcctattttcgcacaaccaagcaacttcatttttttcacttgtccatttaaatatttttatgggaatcacttcacctactaaatatttttatgcaggcttgctgcattgagtacataattgtggagagcga

SEQ ID NO: 17860 - DNA, 443 bp, Glycine max
  Intron number 1 from transcript Glyma09g40910.1 (locus Gly ma09g40910) derived from phytozome v7.0 (chr-ID Gm09; pos 45700403 to 45700845)
gggagtcttttctgctgcataaggtaaaaactttcaagatgcggttgacaaccacttgatacattcatgaacttgtgttctatttgtcattgagttgtaagtttttatctgctaaactttagttgtcatggctttaatttgggtgtctcttttaccagctgctatgaatccataatatgctaacaagcaactaaagcaaccactatttgccaaaagtcttatgcctactttatgataccaaagaaaaatgttgatgacttctatttgtcttcttttgagtgcaaaatagctgcaccagtcaactcaatactattcagttaatgtctttgtttcaatttacagaaacggtatcttaattcaaaatctatattataaaactaatttgttgttttgtgcttgttcatgaagtttcccttggtgactctaagtgggaagatcaggaa

SEQ ID NO: 17861 - DNA, 979 bp, Glycine max
  Intron number 1 from transcript Glyma08g45790.1 (locus Gly ma08g45790) derived from phytozome v7.0 (chr-ID Gm08; pos 45059290 to 45060268 reverse strand)
gttgccgctctcgctaaaccctccacttttacttggtaggcttcttagtcatgacttatatgactcttgtcactttgttttgttttttaatcgtgtagaatgatgtcgtgtaattcatgtagtggaccttattttttttagttatgaaccttgtcacttttgttttgtttttaatcattggtgtaatacatgtagccgatcgtacttaattacctttgtcagaggttgcgctgaacggcttgtttcttttttgcttgtggctcttcttatttttcgctgtctgtattaaaataattatttattgaaatgaaaattgatagttttattttataataaagtggtttcttaactaacgtctaatctagcgagaccgtttttttaattgtgcttgaaaggttgttattttctaaaaatattgacttgcgtctttttggaactaatagtttatggacaaaacttgcatattagtaatataccattctacagtgtttttggtactcttctgaaatcagaattataattgcacctcagtaatctatgttgatattttattatgtgaattaatgaggtgaaactctagttcttattggagaaacaacaccaccacccaagaaactgcatctattgtatatatcggaaagtgcccctaagttttagttattgaatactaatttaatcgagattattaaggattattgattaataacatgagaacaagttatgatgtatttgattaatgatttgtaggatagtattaggcagtaggtacctttgttatggtactctggctggcctttttctgtgaatatgttaccgaatcaaagttattttattttttgttgtagttgttctttgttttctctctttccctgttagtatttgtaattttgttattcagttagagcatgtacagtggaatagtttagaaattcaagaactgactgaggtttcaacttgagcagggtatcaaaagagttat

SEQ ID NO: 17862 - DNA, 860 bp, Glycine max
  Intron number 1 from transcript Glyma07g36140.1 (locus Gly ma07g36140) derived from phytozome v7.0 (chr-ID Gm07; pos 41531424 to 41532283)
ggtagtcaaggtttgtctcctttccttcttttatgtgtaatgtcttttaaaatgtctgtttccatgtgtgtctgcataattattttggcatgtatgcatctatgcgacatgcaaatgcaaaattgacaaactttgttaacaatgagatttttggcacggacgaattttggatttgactttctaactgcataataatacattttgcttctccttgtcacaaaaaagctaaataatcataataatacatttttcttgtcacctatccttgatttttttaatctgcaattgttattgaaaggccctttcattatgcccacaactgcttgaataactaaaccaacataattttaccaggatgcaaattgaaaggtgaaatgttgattaaatagattgtttaatttcactttttatcctctaacaaattaatttgatgtatttttatcttaattttaagaaacttatgaattttatctttcatcaatttactcataatataattaaactttttattccaaatcttttatttttttacaaattttgcatctaactttttttattttttgacgaattttactcttaactttttatcttttatttttataaattttatcattcaatttttgagtttattaatgaataaatgatggaaggtaaaatttataagttttttaaaaattggggataaaatatgctaaattaatttgttagtggtaaaatttgttaaatttttttaaaaaataaggtataaatacaaattaagcctaaatacaaattgaataataatttcatttttcaagtaaatttcactttatgtcattcaccaataaataatattgcagccattccacgatctactgtag

SEQ ID NO: 17863 - DNA, 1033 bp, Glycine max
  Intron number 1 from transcript Glyma06g18330.2 (locus Gly ma06g18330) derived from phytozome v7.0 (chr-ID Gm06; pos 14675415 to 14676447 reverse strand)
gattcttctctcgtccctcctccactaattaccatgtgagactttcttccactttctcacattcacttcaattttcctttttcgtttctaattcttcactattagagaaccaattgaaatctcgaacttactgaaccctatgtttgaggtttcgttaacttaagtattagaaatcatactgaatagtcccccgagtattgaaaaatccttcaaattagtaaaatatataaaccgagggattaaatttattactgtaaggctgcttgtataatttcattactttaaaggctgtttaggagagagggtaatacttgaggaactaaatttatggtttactcaaacagttatctggtttttggctgtataattcaagtgtgttttgagactgtcacaatgcctttttgtttgtggttaggatgtgtgtgtatctagaaagtctaggaggatgaagaaagggcctttgatttgtaaattgtaattttattgaagctaatggctttcataacagccaagagatattgtataattgctgggaaaactatatatatggtgataatttagatttttgagaggctaatttggtgacaggttctttggagggctaaaatatggtggcgttttatgtctttgagggattagtttaattaccaaaagttttggaggattaatgtagtgaaatgtgtaacttttgagaacaaacttcaggttcggcatttactcaaaaaaaagtataaaaagctgaattgcttctttgcaaatgtgttataatatgacattttattcaatttgaaaaaaattatgcaggattgtagtctgaagaggttttatcagcagttttctattttgttttatagaagaaaatctgttttcttgattattattcattcaattgtgactgatattttctaaaagaattgatttgatggtgggacctataactacaaaatgaatattttagagtattacttattatcattttttttcttcttgtcatttaatttatttattttttaattaatgtatagtttggcaa

SEQ ID NO: 17864 - DNA, 637 bp, Glycine max
  Intron number 2 from transcript Glyma07g30840.1 (locus Gly ma07g30840) derived from phytozome v7.0 (chr-ID Gm07; pos 35785760 to 35786396)
gattgcgtaaaagagcggtttgttattgttgaattcacttaattctcccaattttgagcatgagaatgagaattaacctttgtgacattatctgtgtctgtgtgcgcttgtttcaatgtttgatgttgtcttaaattcttgttttgtcggtatctctgtgtgtgtgtgtgtgtgtgtgtatttccatttgaaaagttgttgattttgattctttagggtctcacatgtggttaaatttttggggcaatgcagaagcttgagtttgaaaagtgtgatttgatcaattaattgcatagttagagtttcttatcataattccacagcttctccttagttgaaaggatgccccttttgatgtggttaagagagatgtgaggaatgtttatcactatcaacaatgtttaataagaataattaaaatttaaagaagaaaatatttcatgcaaatggaatcgttatctgtttttgctaattttcggaaatagtaaatagcagatggatcaataatcactagtgtcaagatgtttaccactatgaattctgttgtctgttccttttaaattgaaaatcatatcataaacataatatgagtcatttgccaatatttatctaaaatttaggtattttgacactcaaa

SEQ ID NO: 17865 - DNA, 641 bp, Glycine max
  Intron number 1 from transcript Glyma12g36680.1 (locus Gly ma12g36680) derived from phytozome v7.0 (chr-ID Gm12; pos 39745587 to 39746227 reverse strand)
ttactctgttaataccactgtaagacccgacccaggtacgtagtagaagctactcatcatcccttacatatatttgcagtactaattgtcattgtttccttcatatatatatatatataacttaatttttgatgtggtatataggtccattattcagggtgcttatcatttttagctgttttatgacttaatttaaccataaaatttagagctgaaagtctagctagatccattattttgtgtactgtctgggttataataatatactatattttatgtgaatgttgcagttttcaacgtgttgcttcgggtattacccgaaaacagtagttgtttttgccacaaattttctaattaaaagaaatagacaatttgtcaacaaatttataatacatgctgtttgtaatcaatggcagatgacagtgtaatggtatgcattgccaattttccctaaaagaagagtgatctaataatgtaaataaagttagtgacaatttttctatatatatatatatatatatatatatatatatatatttattataaaaaaaacactatggttgttttcgaacatatatattaatccactaaaccgaatgagtttttttttttttttataaataaaatagtgcacgaagaag

SEQ ID NO: 17866 - DNA, 598 bp, Glycine max
  Intron number 2 from transcript Glyma11g30050.1 (locus Gly ma11g30050) derived from phytozome v7.0 (chr-ID Gm11; pos 30952253 to 30952850 reverse strand)
tctcagctcttcaggtttgaatctgatattgctttctatatgtcaagtgtttttgttggctaaaaatgtctgaagatttatgattggagttggtggttgtttgagcaagttaaattcatgaagtgctaggcatgaggacattgtattaatgctgaaaacttgcgagtttatggacttggccattaataaaaagcatgcatggatcatggctatctttgattcagtatcaattgccaactggactaattttcttcaacatgtgtagtacttggaaactgacatgttttccaaaagggtttagtcgtactaaaaaatgcacttgttaaattcttgcagttggtggttatcatatgcaaccacttttggtttctggcattccacctttttattctttgtaatttgttggatttacatcacataaattagtctagttgttatttgtctggggaatttggcatgatttgattaggttgaaagcaagcatattatgctatttagatgccaaacttttaagtgatgtttttatgctgaccaaaaaaaaaaaagtgatgtttttatgttgttaataagttaatttgatttggactttgcagtttga

SEQ ID NO: 17867 - DNA, 660 bp, Glycine max
  Intron number 2 from transcript Glyma08g03320.1 (locus Gly ma08g03320) derived from phytozome v7.0 (chr-ID Gm08; pos 2331839 to 2332498)
ctcgtggtttcaacaacagtgttgctgaacagcaggtatgtggtgaactgatttaaatgatatatttatttgcttcctgaattattggattttcagaggtgaagcaaccctgagagtgagggcaaagagtgtagcactctagcaacctaattctggtagtataggtatctagttttaggctagagttcaatctggtcaggaattaacagtgtgtttggagaacagtccactccaacacaaactggcgttgaactcaatgataaatcttgctttttcattttctcctttggaaggtgtaaaagtctgttttggaggctccaaatggaaatcaaaacacatacaaaagtatgttgatgataatttgttggaagagcattaagctgattcaaggacagaagttacaattgatgataacttgttcaaatttcacttttgatgtgtcaactttgtgttttagattctctgggataatgaatttttgggtggggacctgagtcttggttacttccttttcataactatcgtttcttctgatttttgttggattttatatatgtgacttattattttcccatgaaaagacttgtgatgtaatgtccttctcatgatatatttaatgtatcaggctgttttggaaactgttgccagagttaagcccaa

SEQ ID NO: 17868 - DNA, 563 bp, Glycine max
  Intron number 2 from transcript Glyma07g26520.1 (locus Gly ma07g26520) derived from phytozome v7.0 (chr-ID Gm07; pos 29365150 to 29365712 reverse strand)
tgtcgaccttcgcgacaaacggagcattatcaaaggtgcacactatctgattttatttcaatttgtttccaatgcaaatactcattgtttatggaaaagaaacaacattgttgaaaattaaaatgggtcttgtgtagttctagaaggttcttctattgtcttttatatggatgttgccaatgtcgatgtgaataacttctatacttgctataagcttatgcttcaaggttctcttccatttgttgttttaattattcattttaattgttgatttgatgtttttggttatgtaattttatgtttgatttttaaggtgcaaagaatgtcattaatgcttgccaggaacgtagagtgagatgttgtagttggtggtttgcatgatggagataagtggttggcatattcgtggaaagtaagatttttgtttaaccaactttcttttttgttttgctacatgttaatggatagattagatggttttgttttgcaaatgaataagcatttttaataggggtgtgtgaattatagactaacaacacattaagtgaccttaaggctcaagc

SEQ ID NO: 17869 - DNA, 784 bp, Glycine max
  Intron number 1 from transcript Glyma08g10520.1 (locus Gly ma08g10520) derived from phytozome v7.0 (chr-ID Gm08; pos 7630611 to 7631394)
gaaatacggtaagttctttcctttctctaattttaaattttgttaattcagttttgaaaattttctcttaaattttttctaatctcgattctcaagtgtatgttctttcttttccttctatatggttgaaattgtgctgataaacttatgaaatccccttttttattctgttaaattgtaatgcatgtattgtttgactggggtagacacaaaatttgtaatgattttcctatatgaatggcttcaaagtagacacaacataaggacaaaatatatagcatcaattattgcttttagctttgtttttcctattccacgtaattttttttgtaatatttctaatattttgtgaatgagaatttctttgtttcatacctccatgatagtctagcatcagtgatggttaaatatgtcatcaactcctagtcagttgtgttaaagtatttcatcatgtagctaatcaacgtacagtaagcattttcctaaaattagaaacaaaaattctatttcctaatattacttagctgaaaacttttcttggaaccaaaacgaccaacccacttgatagtttttcagatcattaagattaatgaacaggctactctccttttttttttttttagtgaaatgtgtcactgtaaattactccgttacatggtacatatgttggtacgtgttagtgacttagtgctagttctttttcccccactgagcatatcacgcttcactattttcttttttgcactttgttttataaaaaattcatgtcctgtaatcagatcat

SEQ ID NO: 17870 - DNA, 365 bp, Glycine max
  Intron number 1 from transcript Glyma06g14280.2 (locus Gly ma06g14280) derived from phytozome v7.0 (chr-ID Gm06; pos 11239035 to 11239399 reverse strand)
ggctggttcggttggtgaacaaaggaggaaccaaggtgtgttttgttttgtctagttttggtgttttttacaacttgtttataatgtctgtctcatcgtattacttgtatagtttgaatactatataacataataaaatatggacaaaatctaggctgttgagagtattaactcatcctttataaattttatgcctgaagatttatgctctcttctttgtttctagctaaatttcagaacaattttaagtgaagtaagaaaataaatattttagttggatggtgctgtgtgggaaatagacttttcatctttttttatgttgaaagtaagtgtttttttattattattaaatgcagggaatcaag

SEQ ID NO: 17871 - DNA, 931 bp, Glycine max
  Intron number 1 from transcript Glyma06g18970.1 (locus Gly ma06g18970) derived from phytozome v7.0 (chr-ID Gm06; pos 15217768 to 15218698)
cttccttccttctgctctaaccgctctgatcaccggtaagtctcaaaacacagcttcgaaaagctagggggtgaaaataaccatgaaaattaagcttaactaattttcatcctccacttcctcttcaccaaaaatttataactaaacaaggttgccctttttattttttattttttacctcgtggtctttcaaaacttgtttgagcgatgagtctgttctctaggaagctgagtgcttgagtatgcatggctgtgctacttggttttggtgattcttgaagcaccatatcttgttatttcatttctacttacttttccatctttttttgtcaaggaaaaatagaaaatttactttaatatctttatccaatttttagccaaattcgatagtaattgtatatatggtgctttctttctgattgtttttgcttcattgagggaagatgagagactaagtttcaaacatgctagttctctcacatcacatgagtactgtgccacttaagatgtggtgtggttgtttttagccgcagcaagatgtggttttgtgacttttgtctcttttgtgtgcacccttctttcatcaagttcaaacatgatcccttacctacactacactacgtacaccacaaaggcacaaactcataataatttttatcatatatatatatatatatatatatatatatatatatatatccttttaaaaaataaaaattgaaaaaatccttccctcattttctaatctaccctcatttaagaatgccataatctttaaatactttatattatatcggttaaaactagagcacgtgatacatatgtggaattaatttaatttaatttaattaattctgttattgttattgttattgaatttttaattttaattgaaggggcgagttctggtattggagctgaaacagcaaga

SEQ ID NO: 17872 - DNA, 899 bp, Glycine max
  Intron number 2 from transcript Glyma12g16570.1 (locus Gly ma12g16570) derived from phytozome v7.0 (chr-ID Gm12; pos 15939377 to 15940275 reverse strand)
aggtcaaggtaatttatttgtataacctatggtgggaaggacatccttcatcgtttggtgtttatataaaactactgcttctaattggcagaacatgcaatgctatctaatattcatataaaatcatgaaaagcgttgtccagaaaaacatttcctagttgtttaattttgaatgcatgtaagcttctattctattctcaagaaaaaagagagaaaaaaaacagaggtttcaagcctttaactaattgattcttaataaagtgtgactttgcggatgatataaaaaagtgacctacaattataaataatatcttttgctatcctttatgaatggtttgaaaattgaaaggacaaattctgtgcatgattcctgagtatatatcacttatattcataattcttagccacttttgttcgactgctatgttctcatattttgttctatctatgaagttgcctccaagttggaaatcaaagcctttaatttgttttgatgagtggaggagctcaggtggataagactgtttacttttggattccaaacccaactttgaggtcatgtagactgtttttatgtcagcaaacataataatattattaaaattattcctaatctaatctcaataaataaataaaatcacgtaggtttcaagccttttattaacttagaataatggcattattaatcacaagaatatataattgtgactttgctgatgatatctataggtgacttataatgaattaatatcttttctaatccttttttagagcttccaagagagaagttctggtgcatataattgttgagtatcacttgtattcagaattctctcttaatgtgtgttgtgtggctctatctaggaagtagcttccaagttggaaatcaaagccattcc

SEQ ID NO: 17873 - DNA, 429 bp, Glycine max
  Intron number 1 from transcript Glyma13g25880.1 (locus Gly ma13g25880) derived from phytozome v7.0 (chr-ID Gm13; pos 29104306 to 29104734)
gcacaacctgcgcctctctcctccgcgaattgcaggttcttcactcaagttgttgctttcaatttatatgttttttttccttctaattattaaaaaaatgtctcattttgtttttgttgtaattttgttggatagtcaagttttggttttttatttttacttttaattgtaaatttggtgtcttgttttcaatctgattctgatttcaaatatttgtactggaaaaagtgtttttcttttttctctctgttttctgtacaaatcttggaaataaaacagagattgaaaataaggtgacaattttgtaattaaaagtgaaaatgaggaatcttgctttagatgtgttagattgtttaacggtagtcttaagtgtaagatgtgacctttagtgtgtgaattaatgatttgaattgttttgacttctgatag

SEQ ID NO: 17874 - DNA, 871 bp, Glycine max
  Intron number 3 from transcript Glyma12g31660.1 (locus Gly ma12g31660) derived from phytozome v7.0 (chr-ID Gm12; pos 35219098 to 35219968)
tgtgccaagtatgtattcatctccctgtatgcaattgtagaattaattaggtacacacagatgatgtgaagaacctcgtagtttcttggtggttattaagtagttatttatagaatcttccatggcaaattggtgatttttacctgaacatttataagtatagtaaaagcaaattcaaactactgttttaaccaattggttatagcataagtaacaggttcttatgtttgtttgtcatgccaaattcacaagttcaggaaattacagcttgattagtgtctataatcttggaaagagaatttttaatgaattcagacatagcattatttgggcagaacatctatagtaatctaatttcaatacttaatttgaaatttttgcatgtattgtgttagagattatatcatgccattgaattgcttcggaaaaaaataattagcttctttgtggggaggggggaaaggggtgtgggtgacatttctgctgaaggtaatggtttcatgtgagaggtgaggcatgaacaatgaccattggaccttccataattggtcaagaatattaataatcaattcttgttatgttgtagtcttgaccatttattgaatctaaaacaaattatataattcataatggcagttaattgtgaagggttataataataagaaaacctactacattgagcgatcctctcttaccactaagagattgctatttttttaaattcatttgaagatgaaatatgaggtccttttcatgttcatgagaactaatttaatatttattctttctatggcaactctctttaccttatggattgcattcatcattttatgcagggtcaatataaatcaacattagtttgtcctgtttg

SEQ ID NO: 17875 - DNA, 813 bp, Glycine max
  Intron number 1 from transcript Glyma08g46000.2 (locus Gly ma08g46000) derived from phytozome v7.0 (chr-ID Gm08; pos 45230748 to 45231560)
cttagcgcgctcttttgtttctcttggagatataggtatgcactgaatcgattctccttgttctgccctggatcaacattaactgaaacagaaaacgtgttttttcctgtcatggatcatttgacttcgattgatttttaaatgggtattgctatgtcgttgttgaatgaatggggttgttgctagaagcagtcttccatgtgggttttgattgtcctgtactgaaagacttcataacatactgtgtgtgtgagggactcggtgctgctttaattactgctcttgtgaaggtgaacttgcattttttctttgcatgatagatcttgagaaagatttaaatttgaggttaacatattgacctttgcaaattttcgattggcaagaatgagatatccattcactacaaatataatttgcttattatcggcaattttttctgacatttttttgtttacgatttattatgtgtctgtattttgcagaaaaacataaattggttcatttggttgataatattcgtgtaaaatatcagatgcgagactatgcatatgaatttgttgcttcgtcagttttgtcaatataatgaaatcaactgcttgttatatttttcatcatatgtatcctattattatccatattgttttgtttttttttgctaattagtgtcctagcggtcttgtgcttggtattaaagtaagaggcagtgggttctaattccacattatgcatttagagacactggtgtttataattttgtttacttactattgacacgcaggtgaactgtgaacttggttggtcagagcttgccaa

SEQ ID NO: 17876 - DNA, 699 bp, Glycine max
  Intron number 3 from transcript Glyma11g31880.2 (locus Gly ma11g31880) derived from phytozome v7.0 (chr-ID Gm11; pos 33228461 to 33229159 reverse strand)
gtttgacctatctattggcaggtagtttttggaattgctttttatatttttctagtcatgatgttggtctagtgagatactattttttatatggttttgttgaacctatgtgacagtaggtatttttgtgtttttttggtcaattgttgtggatttgatggtggtagtttacattttccttgagtctcttcctccttagccatggttactagttttagctaatcaacttaatgagctctagggaataatgcttcttgcacatccctaagaaacaaattacctcagttcaaactcactaggtttggcctactggtgtgggatttggctaatatgtatgatgttttagcttcgaatctaattgtttccattgtacacaaaaaaaatcacctcgagatatgggtattcatgaaacaaggtggaaaccactgtgattaatggtgtgaaacaggtacaaggatgggggaggggtgagtaactgctctttgtgtacccgaaaatttcttgtcggtacttctgcaaacattggtcttaattacaatctagtgcgaaagttatttagtctctattatgtttttatttttgttctatgatttagctaacattgaactttcattatttgtatgaggctttgtatttgatgtacttgatatttgacatgtgacagacacaatacagagtttggttcgacatcttcgttac

SEQ ID NO: 17877 - DNA, 498 bp, Glycine max
  Intron number 1 from transcript Glyma11g37920.3 (locus Gly ma11g37920) derived from phytozome v7.0 (chr-ID Gm11; pos 38901695 to 38902192)
ccctcaatcaggacaacgaagccttacgaaagcaggtagaataataatacaacatagtataatatttagaagaattgattttgagtctaattaattttaaattaaaaagtataggtgaattttgagtgagaaaacaaacttcatgctgaattttcctattaattttttttctgggtcgtgcctttcaatctagaaactatgctcgatggatttaacctcatgcttgaaatgatcagtagttttctaattaagagctttcttctcttaatctaatttctttttaataataaagaaaaacttttgttgagaaacgatttatttaacaagaaaaatttatatttgattatctctaaattaagtgtaaaaccgtgatctaaaaaaaactcaatcaactcaatactctcatagtgtatatagtgttagttgagagtgagtggattttgaaattggattgtgtttgcagataaaggaattgaaatcgaggctgctgcaagaaga

SEQ ID NO: 17878 - DNA, 682 bp, Glycine max
  Intron number 1 from transcript Glyma09g33630.2 (locus Gly ma09g33630) derived from phytozome v7.0 (chr-ID Gm09; pos 40063735 to 40064416)
ttctctgatctaccaaagcttcaaattctccttaggtgcgtacttcaatttcttcttctcctactcctaactgctccttttttttttcttttcaaattctctgcgcgtttctatttctaagctctttcaggtagaagtagaatgcacacgcctttttgttttcgcttttttattttaaaaaaattggtaaggattttttgtgtgagtgaggatctattcagcttctgcagctttgtatttatttatttgcggaagaaactgaggttatgaagaaaactgaactagaaataggaagagagcggcgtgtgctattttgataagttttcagttaattaataactcacaaagttgtttacgtgtcttaattttatgtttctgttatgattatttattttcgagctgatttctgcagtagtataacgcatgcatgcatgtttttattttattttatttttaatttctcacttcccagctatattctgtgatttattgttgattaagttgctcgcaaatggcgtgatcactatggttgaggcatttttcctttttaatggggttttgcgttggttttgttattagcatagcgtttttgtgttgctggcaatatgtgaagtggacggttgttttgatttttactgtttgtgtgtctggcagtttggtttgtctgtgagtttggagtgta

SEQ ID NO: 17879 - DNA, 697 bp, Glycine max
  Intron number 1 from transcript Glyma13g22110.1 (locus Gly ma13g22110) derived from phytozome v7.0 (chr-ID Gm13; pos 25691253 to 25691949)
acaggcttgtgttggatctcagttgcagaaaaaaggtactaaactaccaatagtttctgttagcaccccaaatgtggactaaggcccaagttctaggcccacgatttggagggttgattccagagggaataagtaaaggaatgagtgctgaggtggtagagagagagagtagtgggttttgggttgtgaagggaattctgttatagggggtcttgaggggaggagagaggggattcgtggttgaagttggttatgggctgagaacatttgtgcctctgaaggagcttttctctgggcagtagggattatgattcctctgtattttccttttgtgcttcataatacacacatttctcagtagtgttttctgttcactactattttccttattttctgtttgtggtttctaacagtttcctttatatttgatggtaaatttgttgaagaaaaagttataccagaagaaaaatgaagtttttttaataattggctgaaagtattcaaatactttagagcaattccatgtaagctgaggaagtatttgtaatcaggagattgtttcatgaattgataatttgatacacatgtgaatggtcaagacaattttatgacgttatctacatgtcccaacatttctatgatttttgatcctttagttggattttttatatagcacttatggttttcattgattagg

SEQ ID NO: 17880 - DNA, 937 bp, Glycine max
  Intron number 1 from transcript Glyma14g00940.1 (locus Gly ma14g00940) derived from phytozome v7.0 (chr-ID Gm14; pos 485809 to 486745)
cactcgtgaaagtaaacgcgaagagaaggtaaattaatgtcttccttccatcacataattaaaattacgtaccttgttttacctgcctatgcattcataattaagtctaagattctttttttgaaagacaaattttattgaaataaaaaaatttgacgcacaagatatgttccaaattatcaaacagaggacacaagaaattctagacataccccccctgatacaatgcctccaacaaagaattaataccccatcaagcacaaagttttaaatagcggtccgcaatcgcaattgaagccgtaacgtcaaggtattttaaatcttcgcaaccgcatcatgaccctaattgtggtcacatcagtgacattttcttgcaatatgaaagtttttggctcaccccaataataatgaccacagtttaaaaccatgatcacaacagaaaatgcttcagggacatcttatttatcaaattatgcagcctgaaaataaaaataaaacaccagaagctttgctcagaattaataccctaatgtatataccactgccgctgctatatcatacttggaaagcctcacaccagatacccaaactcttttcacgcttcagcaccaacataacatgcacgtacaacttttgaaaaaactgatatttgatactttttaaaattacatcagtttcgtcacttttttaatatcgtgaaaatccacaaataaataaatatggttgatttgattacaattatgattgcattgtagttgtagacattaaaaaattaaattaaacgttgacgttgcaatcaaaatcttggttgcattactatattttttttatgccatgcattactatattttaaaacgttgattaaatcatatatatatatatatataaaatgcgcgttgcagctatcagacctaagcaaaacggtactggagataag

SEQ ID NO: 17881 - DNA, 544 bp, Glycine max
  Intron number 3 from transcript Glyma08g03090.1 (locus Gly ma08g03090) derived from phytozome v7.0 (chr-ID Gm08; pos 2182562 to 2183105)
tggcaaaagcagccaggcttgaacaccgtccaaaggcatgttgctcttcttacaaattctacagtcttgtgcatatttcaaatggcatatcttaggaagcatcattgatttgtgcaggactcttacgaatagttgaatgtgatgcttttttcttgttacagaattaaaagacaagcacattgtggtttccattacacatagcatgcctttaccaattagctttctctgtttgtactttactgttacgcgtataaaaaatccatgacctattatttgatccttacattgcatattgatatatttgagaaaactgggataaaattgaacacagtttttcatttgtatcttcctttactgctttatgcccccacttctggattaagcatacatgccttttattttgtaactatattaacatgtatggtagtcaaaatgaacaagtatgttagtcaattatctttttattggatgatcattatgcttcttgctcttgtactcatttcttcatgcagcatagttgaagggtcacttggtaaatttgttg

SEQ ID NO: 17882 - DNA, 944 bp, Glycine max
  Intron number 1 from transcript Glyma13g31320.1 (locus Gly ma13g31320) derived from phytozome v7.0 (chr-ID Gm13; pos 33768872 to 33769815 reverse strand)
ctgctctgcttcttctacttcagagctttccccaggtcaatgatcaattatgtattaacttctctcatccactttgctaattaatgaaaacccaccaaacaaacaggtccatggatggtgggtcattgccaagttttattcttgcccgtggatggatacttcggatttttcttcttctttctgttatttggctgttgctcacatttctattataggataggaagtaggaacaggcccgtgtttattttttgtttcctcaaattattatattctacttatgtgtgcttaggaggaaaaagggtattttttatatatttttttatagttattctgcctgtatttcttcaagttgtatttgttataagttataactcaatggctcatgccaactccacaagcttagtagtgtgaggcaaaagagggtgaaggagaggcccagagagccatctataaaggaatactattcagaatggtcacattcatagtttgtagtttctaaattaggatattgagtcatgcaggttgcccaatagtggtttaagccactaaacagtgttttgggcagaaattccaggactcaatttttctttgctagttgacatttgattcgatgtgtgcagtattataatatttcaccaggctactcgatgaattccaccttcatgtaccatagtatagtgttaatgatccacctgtagattttcagttgaaaatatttgctttggcagatctgactcaagaagtggttttgtacatttacaagtttgatttctttgattggtctttcattctagaattaactgtcaaaaactctatgatatttagtgtgtgtctaaattatccacagaaaactttgtagacatttactccaacttgtattaaagttgattttctggtgccttcatgcagataagcttccaactagtattgatttgtctgtaact

SEQ ID NO: 17883 - DNA, 494 bp, Glycine max
  Intron number 4 from transcript Glyma06g20770.1 (locus Gly ma06g20770) derived from phytozome v7.0 (chr-ID Gm06; pos 17145676 to 17146169 reverse strand)
ttggccttctatttgtaggtgttgggattgacatagggagtttgggattcatccatattcaatttacaaccaacaattattctaggggctgatgtgctgtatgattcaaacggtgagaaaaaatgggctgtgttagttatccgtcaccttcacccttctggaggaaacctcgtccagaacttctccttgggatcaaaatcgcccggcctaagctctcggaagaccgaagcgtgcttattatctatgttctttttgctttgagaaaattccatttcatatatagatgatcaccttattatgtttttttatctaattctaaccaaaccataactgaaaagctaattaaagtagcaatgtagatgagatacctaatacccagttgaagattaagcatcaaatcataattcttatgccctttagaaactgtatgacccgatttcttaacatccccatcaacagaaccacaagggctcttctgtaactgtacatcactt

SEQ ID NO: 17884 - DNA, 773 bp, Glycine max
  Intron number 1 from transcript Glyma07g18240.1 (locus Gly ma07g18240) derived from phytozome v7.0 (chr-ID Gm07; pos 18027720 to 18028492)
ctgcttcgtcgtcgtcttcagcttgtggttcttcggtaagggacaaccttcaatctttagttgttaattattatagaatttgaatcattagacactcaattgcgcttgatttagtttattacactttcaagcaccaaattacagattgaaaatcgtgctctaagaagtgtagcataagcaaggaattacaagtagaaaagaattgttcaaaatcgttactaacagtaacactctgttatcattaacgtgatttttaagcattcacggtgtaattttatttttttattgattaaattatgacttattgttaagagttctttttaatggtattttctaattaaaattggaattttacttggacaaggtatgctgatttttagtttaaattaagataaaactctaattataattagaaaataataataaaatatacaataaattacatttaagttttttttcatttttttttaattttctaatagtaagaccttatttctaaattgagtaataatatttttttattctaattttctcttttctcttttattcttttttaaaaaaaaagttttatattttcatcacttatcgcatttataaaaataattttgtgggatccttacaatatataaaaaaataatatttttatctatgtactacttgaaactactgctgcatgttggggagaccgttgtttgattgtgtataatttttcattttgttttattagaattatgatttcagaaactcacattgcaatctaatctacagtgtcg

SEQ ID NO: 17885 - DNA, 329 bp, Glycine max
  Intron number 1 from transcript Glyma09g25470.2 (locus Gly ma09g25470) derived from phytozome v7.0 (chr-ID Gm09; pos 31726613 to 31726941)
acgtcatcgctctcaccttccccaataccgtcgaggtaattcttttctcaaaccctaatttcctaatcacgtgattcatggatgaatcaccacgtcattaggaccatacatggttttgaagtgcgattccaaccggcgtgagtaaacaaatctttatatcgcggttggaattacggtgaatcaaaatatctttaagctgcggtaataattattacatagaatcatataataaattttcgtacgttagaaaataaggtagagtaaccttttttttttttttctgtttcattgcagtttgttgtcttgtttctagccgtcattcgagtgcg

SEQ ID NO: 17886 - DNA, 496 bp, Glycine max
  Intron number 3 from transcript Glyma13g02000.2 (locus Gly ma13g02000) derived from phytozome v7.0 (chr-ID Gm13; pos 1828506 to 1829001)
gatacttcctgcaggtgatagttcctccctcctctgcttctttgtctcttccttctacttttctgttggtgaaagatggttaaaataacaaggaaatcaaaataatgcttccaccacatacagaactatttgagttgacataaaaatagttagtggttcttcttatcaggtaaattattgatcttgtaattagggcacggacgaaggagaaattattatatagtatgagatgattatggtctagataatctccatgtaacacataatcgagttttattaactttgttttttaattgaataatttgattacgagtcatttagagatcaattatgatcatataaatgcactaaagacacatgatagtcttaaagtatgtagcgatttatgcatacaaagagtttgatgttttaactgttaaggatggatgtatacgtaagagtactattttattcatgcggttgttgcaggccaagacagaggatttggtcactgctg

SEQ ID NO: 17887 - DNA, 644 bp, Glycine max
  Intron number 1 from transcript Glyma14g02180.4 (locus Gly ma14g02180) derived from phytozome v7.0 (chr-ID Gm14; pos 1314450 to 1315093 reverse strand)
caagtgagctccgtctcaacttcttgttttacgctgcgtttctctctttctttcgtctattcttttcaagcttcgttcttttcttaagcttcactgtgaacatttccctttttctctctcgataatcgcattttcttgctacttgttgctgatcattgggttattgtagcttccgtttcgtctactcatttcattctgttgtgatcgttagcttaattagcttaccctgcattggattatgatcatgtcatatgtaatcaacaaaattcgacttctctacagatgcaattaaaaaactttttactttttaacaataattaattaattattattgttattaatattaagattttttttttttggcttatctattcaaagatccttatttgaattcgttatgttagtttagctgttgggatgggtaattttgggttaccggaattcaacatttacccacgatggataacggctttgcatttaattatgctttaattgcatttgcattgtcttatagcagatgtcttctactttcttgatcttcgtagaagagaagaaatgtttctctgtgcgtttggtggaagcagaaagaattttcaagtcatttttatattttgaggtgcaggctaggtgtcgctgggacttca

SEQ ID NO: 17888 - DNA, 442 bp, Glycine max
  Intron number 1 from transcript Glyma09g30260.1 (locus Gly ma09g30260) derived from phytozome v7.0 (chr-ID Gm09; pos 37122212 to 37122653 reverse strand)
tttcattgtaccctttgcagggttccacctcttaggtacgattttctctcttttcctcaaatgggtttctttaatttcatcttccaacaactgggtttgcctcaaaataatttcttttttacttttggattggtgggtaggtggtcgtcaattgttgtaactgctctttattttggggtttatggatgatcacccatctgggtgtctcttgatagtgaaaattttgaatctttctcactttctctttgagatggattgttctgaaagttagattgggagcttcgaaaaggcttataagagggtttttttttaaaaaattttggttgtgtcttgtgtgctattagttctgttcatgtggagatcgattgagtaattgtgtgtaatctactgttggttttcctgaattttgatctatggttgtttgtagatttatactggaaaa

SEQ ID NO: 17889 - DNA, 355 bp, Glycine max
  Intron number 2 from transcript Glyma14g00510.1 (locus Gly ma14g00510) derived from phytozome v7.0 (chr-ID Gm14; pos 224272 to 224626 reverse strand)
aaggatacaaaaactcctgttatttgtctaggcaagtgttttctttctttcctaatttcgccttttcaataccttttctattttctgcacgtactctagtaccttcactcgcaattcatgaatacattattgttattattaactagctcgcatgcaactctaaggaatgaacaaaattatcatagcttgtttgctgaagagtgagggggaattgatattttagttgattggaatacttgtgacttataatcttgaaaaataatttttgattttgatatcataaatgttcttgctgttttactatcttaaaaaaaaaaaaactaacataccacaatgctcctcatttcccaaaggt

SEQ ID NO: 17890 - DNA, 1032 bp, Glycine max
  Intron number 3 from transcript Glyma08g05570.1 (locus Gly ma08g05570) derived from phytozome v7.0 (chr-ID Gm08; pos 3985138 to 3986169 reverse strand)
aaggttggttgtaaggaagtggttgattctatatttatattttctgggaaaataaatctcatcaatgttaaaacttaaatttgttacataattatactttaagattatttcttgtttttctgttgcctttctttttattctcttggctctcatttgcaaaattcattctaaactaaagtattattcttcttctttcttttgagatcaacctgtttttacttcttacgtgagtaaaattttgtgcacagcagcaccttccattccccctagatacaatcatttatgaactctcacttgtttggaaagattgttttgatgtcgaaagttactatcataaattcataatgaggctcttaaaaggtattgtggaagtcagaaaatgagtttgtgttcctctattcctccattttcttcaggctcctgcttatactcccatacttatgttgaatatttgtattttggttatatcagcttatttgttttgaatgaatgatggatgatcagtagctgtaatacacaatctcacaacatagtttcatatcccataagctgtattttgtcttgcctatgattgatattgttgtgatgcatatgcatatgactacttctttggaactttggagctcagttagcatccaatgcctcccccagcccccacccaattttttttttcatttgaacccccaacctctcctcgctttaccagtaagccaaccttataacccctatctgcttgtattcctaccagtcatcattgaaaaatgatgattgagtaatttcatttttcatatcttctaccaatcaagtattgctagcttccttgaacatgcagaagtgtttcatgcattaggtctgtgttctttgttggttgatttattggttgtttcacttgcttgttgcctatattagtatgttattgctgaacttctgtaacagtataaattaatgatggaggttggagggcatcatataatgaatttcaccttggtgatttcagatccaaagcaggaggttgaggctgagccaaaggct

SEQ ID NO: 17891 - DNA, 485 bp, Glycine max
  Intron number 1 from transcript Glyma08g05570.1 (locus Gly ma08g05570) derived from phytozome v7.0 (chr-ID Gm08; pos 3986369 to 3986853 reverse strand)
ggtacgtcctcttcatctcgcttcctcctttgtttcctctaattctgcatgttcccacttttcgatagatctttgctgctttatcgttaacggttaaccctaccgatcgccgaggttttctttctgctcaacttcaattcattgagctcgcccttgctatgccgtatatgttattgcgtgttacagttctttccttctatttcaattttatcaacttctcttggttgcaagtgaatttcttgatccagtaagctgagttgcatgctactatatgggctagtggcttgattcataattgttttcaatttcattcctactgaagaaaaagaaaattttaaagaaacaaatgaattattgcttttcctgactcgaacaaaagcgctctactttgagatgttgtaaggatttgggggagttggatatttacctctgttttgtttcaaatggtagatattgaggaggacatccgttctttgcagctcgat

SEQ ID NO: 17892 - DNA, 907 bp, Glycine max
  Intron number 1 from transcript Glyma09g40610.1 (locus Gly ma09g40610) derived from phytozome v7.0 (chr-ID Gm09; pos 45496870 to 45497776)
cctgctcggtctccacaacggtttccactcttccggtacgatctcgccgagatctctctctataaattcccttccattctcccacattctccctccgcaacagatccacgtcaatttcacctccgatttctatcttctcacactgcgacgtgctctagatctatccttttctcgcgctgcacgtgaaacggcgtcgttgaatcctcgcttgttccgaatcgacgaatcgagtttcctcttcgtctgtgcttgtgttacttcgagctcgatgaaagatccgtgtgctcgttttcttttttatagtgaaaaaagtaataatgagtatgataaaacttttagataagagttatttaggtgattttggtgttgttcttccatggaattggagtttcacctgagtaatttacgtcgcattaaatgccatcatgtgttaccgaagtaaaactccaattctggttaaaaaacagcacgagcaagcatataaggaattgcatctagatttattgtcaataatagtaatagtaagaacgcgtttatgagggaaaagttgaatgtaggtataattggaatacgaaaacctcacaggacgtacagtttttcattcaattttgagtaacgtgaggaacctgcgttccacttatttttgcaaatagtgatgttctgttaatgattatataatctgtagtgtagtggaattctaaaattaatgtctcatgcttcggatatatttatgcgtatttattagcatatttatgtgtacttattagcagtggtcataaatgcactattatttttacttgaacatgctctgctaatcatagatcttgtgccttgacttgatttctttgttttttttttttctgactcttggattccatttatcattgcgattttgcaggatatatat

SEQ ID NO: 17893 - DNA, 534 bp, Glycine max
  Intron number 2 from transcript Glyma12g22790.1 (locus Gly ma12g22790) derived from phytozome v7.0 (chr-ID Gm12; pos 24921448 to 24921981 reverse strand)
ggtgtgacttgggccacaagaaaaactccctaagggtaaaccctttttcatgtaaaaagcctgctttgttctgcttcactttggagcatatcatgcacatcacactttttctgcccactaggggctctcctcattcaccaattcttgcacaaaattccaccaattaaacgttaggatatattaaaataataattaaacctatctttgtgcatttaggcacattgttgaacgaagcaagaatcattttcttctaaacctgtttggatacagggctagaaatgttttttttttttacagtttgatttttttttactgaaaaatgttttatgttttcagtagagaaactttgaaaaacacttgcatttttttcaaaagcattttgtgttcctctctttctgactagagtgtggattgtgtgatgcacggatgtattttgggctgagtaattttttatacgaataaaaaaatatattgacatctttatttagaagaataacatatactaattgtattgtgtatgaattgtgtagctgg

SEQ ID NO: 17894 - DNA, 489 bp, Glycine max
  Intron number 1 from transcript Glyma12g22790.1 (locus Gly ma12g22790) derived from phytozome v7.0 (chr-ID Gm12; pos 24922214 to 24922702 reverse strand)
ggaattaccaggtatgtctccaatttcacccatacaaataatagattgcaacaaagttttgaattttaatcttcaacctctattatagctgaaaatatctagattttagaggtttacattcatcaaccgcagtttttcataatattaaggttttatatatcaagtttcataataatttttacaatattgatttttcataatctttaatcgaactttttaatttttcatgatatgtcttaagaccttcattgttgtaatataaatctatgatcctcgtttttttttatttttattttttatttttaattgtgtttatgtaattgacctcagaatgaaatgaggccgtttaggtattataatttaactttatgatgggaaatgaaatgggtatatagtatttttatttttattctttttctttgatttttttttttgtttgcatttgattttgaagccaaagcatcgtttggggcggaagagtggtacttt

SEQ ID NO: 17895 - DNA, 793 bp, Glycine max
  Intron number 2 from transcript Glyma09g29900.1 (locus Gly ma09g29900) derived from phytozome v7.0 (chr-ID Gm09; pos 36786182 to 36786974)
agtatcctgtcaccactgagctccaggtctgtctgtgtgtcacttctctctcttccttgagtattttggtgtctttattatatctgattatgacatttaggtccttgaagttcggtctgtcaaaaaaggtttttaaaaagtagtctgtaactggaattttggcagcaacgtcaagttcaggtcttcatgaccacaattgtagctgcataggccgtatttgtctacaattttctgcgatatcaaggatggggagaagactctgaccgaaatttaaaacctttgttaaaataaatagaattgtttgaaatatgttttatttttttaagttattatagtgggaaagtgtttgactattcatttgtttaattatgttggattttagtttgttgtatgccaaatatttctattttttccccttcctttgcccccctaaaattatcattctcctctcaaattgccttttggataaaagggattttttcaaagaaaatgtagggtattaagaaaaataaagtactgctgatttttctgatacatatgaaaatttagtatatctgatggtaacttcttagatcttatgttttttgttgtcagatgaagattcatagtagattactttgttttaagcaaaatcattgcatacctatgttctgtatctgaagttcactagtaaatttgaagtctgtaaaactgattattttcagatgaagtttttgagactgaaagattgattagtttcatattgttaaattctgcagaaccgttgtgttaatataatagcaaatctattcca

SEQ ID NO: 17896 - DNA, 416 bp, Glycine max
  Intron number 1 from transcript Glyma07g38630.1 (locus Gly ma07g38630) derived from phytozome v7.0 (chr-ID Gm07; pos 43352018 to 43352433)
gggttcttttcaagtacggtcccaatcctattcaggtccgttaccttattgtttttaaatctgatttaattgttggtgattttgatttctagcttaacttctattcactagtagtaatattgcacctactcttctacattgtcttcgacctttgagatctctgatttttcaaacaaaccccaaaaaatagtaattattcagtgagtgtgctgctttttcctctattttgttatttcttttgtgaatctcatccctgagttgccgtagttcagtctctgtcattgtgtctttacttttcatttcctcctttttttttatgctttctgattttggtggagtggcttgtgatagctttttttttattttttattttatttgcaggttgcatttaagactggtgattataagcggcaagt

SEQ ID NO: 17897 - DNA, 935 bp, Glycine max
  Intron number 2 from transcript Glyma07g38630.1 (locus Gly ma07g38630) derived from phytozome v7.0 (chr-ID Gm07; pos 43352460 to 43353394)
gttttcttgctacttcgtacgtttcataccctacaatttcagttcggttttcttttgaagcacagcactatctggtcttctcatatccaatgtctttaaaaccaaattattctcttcttagggttgaaagataatatctattctactttaagtgttcagtgattgtcttggctttctttgcttaaaaccctatccaggatttctaagtatttgatgattgacatgattgagttaagggtgcgtttggacaataagctcctataaaacgagagcttattcatatgtttggatgtgaaacttactcaaattagctaaagggagcttatgggaaggtcatgagctactttcataagatcaaatatgctttttcagttgcctgctaaatataagggataaaatggtaggataaattaaattccggttttaaggcgtgcaagggaagtgcttgcaaaacatcttatttattattacccttttgccatttctaagttagtcccctttgcttggggggggggtgtgccacgacgaaacaagggaatgaaaggccgctttgcgttgaatgctcatgaccctgcccaaaatgatggctctgttgtcttgggaagcgttgaagcttgcttcttctccagagttttcttggtcatcaatacgacctgtccttaatatttattattacccttttgccatttctaagttagtttcctctcattatagtaacttcagaaataacaatttgctaatagctaccctcaagttaattactttatagaagttggtattgtgataagataatttaataatagaaaatttatactggttcttatacattttttaagctccacctctagatgtaaaccttagaatagtttctatctaacatgctttttcttcatcttcttgtagatacttggaacctctggcaattgctctggacc

SEQ ID NO: 17898 - DNA, 366 bp, Glycine max
  Intron number 1 from transcript Glyma08g02260.1 (locus Gly ma08g02260) derived from phytozome v7.0 (chr-ID Gm08; pos 1575480 to 1575845 reverse strand)
ctcagacaagttgttgacggaagagaaagcaacgccacttttgataaattcccttattacctcaggcataacacaaaataacctttactccttaatttgttttctcttataataattcctaatgttttttggatgcaaaccagcatggtcttattttatacttaatctttaatttggtagatcaattgacaattgataagaactaagagatttgtggcatgcataaatatttgatttgcgtgattttctctctatctgacatgactgtcacaaatggtttattagatactgatctgttcaatgaaggcttgatttgaccatatatctgaagtggtcactatatattataatttataaatttaatat

SEQ ID NO: 17899 - DNA, 720 bp, Glycine max
  Intron number 3 from transcript Glyma13g43830.1 (locus Gly ma13g43830) derived from phytozome v7.0 (chr-ID Gm13; pos 43411483 to 43412202)
gtattcctgaactcagagcagcattagtcaaaaaggtaaatggtataatttcttcttacaatatgcattatgtactagtgtgaatttggaaactctagttatctgtttgaagttcttcatttgaacacagcttggcactgcagttatttttgcatatataaggagaaactaatttaaattgatcattaattagctcagctaagttaataaacctactagtgtctagtatagtctgtggtctcttggctttatccaattgctttatgttggtttggtatttggtgaacttacatatggattcaaatgaacttgattctcttataacttaattgttttggatgagtcaggataatattttagatcacaaatgttatatggctatgaccaagtctctttattttacattagctaatttttatagatctgtatagatatctgtttttttccttcatcggtcaaaattcttggacatgcattgtttttactttccataatcacatgatgttacttatagctgtaatccatccaggtctcgccctccacctatgttttggatgttgctttattttaaaaataaataaaaactagaaattaattgcttttatattaggccttttgtatgcaattgctctgtgataaactattttgctctatgaaatttggatctcggtagccaatgaattaacttatttgcttttatcatgttcatgtagttgcgtg

SEQ ID NO: 17900 - DNA, 873 bp, Glycine max
  Intron number 1 from transcript Glyma12g10520.1 (locus Gly ma12g10520) derived from phytozome v7.0 (chr-ID Gm12; pos 8454210 to 8455082 reverse strand)
ctcttcactacaaggttcattactttttgttaattcctattgattcattacacgttttttttattggtataggatgacttctcaattttcaagctttgattcatcgtggtttatttattcttcaaaccagtgttctcagatcttcatcttcatgactcctcgtgtttttataattaattatttgttttcgtgagtttaattcattgacttgtttgtatggtaattttctcacctctcttgtgttcaccaaagctcatagaagaagtggatttagatctggattcaattgtcatgagtgacttctaaatcatgccaattttcttttaagatttcttctttacactgtatgattgactcctattgacaagtccactatggtgcctggtctctggtctcatttcctagttcagttctcattgctgatcttatatgaatccatctgaaaatttaaccactatttttagtagcagaaggggttagtttctcacatggcgaatcatattttgaatctttgttgagaaaacatccatattttgtgtctatatctcaaacaagatatccatcaaaaagtatacctgtaaaaaaaaaggaaaagaaaatacttttcgtgttacttggcactcagttctttttctttacctatagtagttgtaatattatagctgttagagaatcttagaagatgattatttaatttttggatctgccttgttattaattcgggcaacttgtttgtcggtgcgttagatttcaataaatgcatgattcattgtgtatcaatattaaccgttgaacgtattgccttggcaaccggtaaggtggttactgtggtactttttttctgaccataaaagttaatgtttataacaggat

SEQ ID NO: 17901 - DNA, 656 bp, Glycine max
  Intron number 1 from transcript Glyma06g47010.1 (locus Gly ma06g47010) derived from phytozome v7.0 (chr-ID Gm06; pos 49561920 to 49562575)
cagtttcttctctctgtctcgtttacctcgatcctgtaatattttcatcctttttaattcttgaaattaaagaaaaagggtatttttatctgttgaaaaaattgaatcttgattttgattcaatgttcccagttgaaaactgttgaaaaaattgaatcttgattttgatttaatgtacccagttggaaaaatagatgattctagaataatgggggaacaggggagagtgctaattttttaagttcattggtgatgcaaattttcgctttattactacttcctaggtatgagggatcaggggttcttccttagatgttgtctttgcagtagaaactaaaaacttaaaattgaattgttaagttccatcatgtagaaaaattgataggatttacatccggagtagtatttcttttcttcctgccaaatacaccataaggaatcacaagtgaagttttattggaatgtgtaggatttaatgttaacaattcatgtaccgtgatttcttataaaaatctttttatttattgtttccttaataattgttcttaggagaaaactgttatttgtttaggaagttttacttaaaataaattaaaacgaaagggtgattgaatgcaaagatgttgttttgatgctttggcaggttcttgttcttg

SEQ ID NO: 17902 - DNA, 540 bp, Glycine max
  Intron number 2 from transcript Glyma13g13750.1 (locus Gly ma13g13750) derived from phytozome v7.0 (chr-ID Gm13; pos 17482666 to 17483205)
gttgcttctgaaagaacacctggattccgcctcaggtgttaacagcaattctcatcattgccttcagacctagtgtgcataatacatatgaatttaggatagccttgatgtctatagcatttgtatttcatttgagttgaaatatacttatgtaggaagagatgcatgcatctatttgtattttatgcaggtagaaatatacttatgtatggagatgtgcaatgcatctcttgacacaggcactcacatatctgatagaaaattgctacatataatttacttaacactggtttatgttgataataggaccctgagtatgtagagatattaccatgtttgaagggttataaaatttagaaaataaagggaaaggagggaccttattcccacctaatctttcctctatgtatccaattttattttccgtttttatgttgtgtgtgtgtgtgtttggggcgggggggttggaatggcgagattttcatgtaaaagcttttaaccttgcttctttgtctgcaattttaacaggggacacatttt

SEQ ID NO: 17903 - DNA, 777 bp, Glycine max
  Intron number 1 from transcript Glyma13g09460.1 (locus Gly ma13g09460) derived from phytozome v7.0 (chr-ID Gm13; pos 10889277 to 10890053 reverse strand)
aacaacaccttaggggaagactttgaacaagctgggtaagactagtttggttgaatataattgttggattttttttttcaatccatggatgtgattgtttttaaatgcacccacgtattattagaatcttaatttatattttaacagaaaaaatgttaattagtatgaaatgattattttcattatatccgaacgcttgcatggtgcatacacccgcgcatatatttttcttttcttatcacgtcatatactacctattatatttatatagcttgtctggttgtgtgtcacttcaggaaagactcttgtttcattatcacatttatattgaaactaatttttacggcttaatctttgagttgcgatgacgcacaaccaaacataaacttattaattttatatattttaattatatatatattttacaaaaggattcgtgcttgtagtgttgtattcataatacatcttcctccccttgaaagatataaatttctaacagtaatgattttcttaagagatttctgagagaaattcaagaaaaacatttatattttcagaagcagtgtatcccaaacatgagctaaaagttaattatttacatcatgtcatgtacttttcgtgtcatattctcttataaattgtggaatgtcatatgctcttataaattgtgaatattatagtacaaactatatgtagactaattgatcaactagttaaactaagtatatattttgttgtgtattcgacagagtggtattccagaattattgtgaagcc

SEQ ID NO: 17904 - DNA, 749 bp, Glycine max
  Intron number 4 from transcript Glyma14g01870.1 (locus Gly ma14g01870) derived from phytozome v7.0 (chr-ID Gm14; pos 1079881 to 1080629)
tcacagagaaaaaaatttggacacaaaagctgttggtgaagaaaatggggaagatctagttgatgttcttttaaggcttcagaggaatggagaccaccaacaccccatgtctgactgttgtcaaagcaatgttagtaagtttctgttacaaatctatgcaaatttgcgaagataattatattagatcaaatattttgtagatattatctttaaaattttctcaattgatgatcgtttaatgcaagtcaaagtaggattgataatattggtcttgaacaccttttacaatattgtcaacttgttttatattttacctatagaaaacctagcaaaattccacatgagtcacttagtatcctttctcctatgatcatcaagagtcgtcctgttttaatttgtatgtagttatatcctcatctaatattttgaactcaagtgctggttttaaattattcacacttggactatgatgatttacattaagctaaactgaataactgataaagctatgttcagagtactgtacatttccgttagacagagttctgaaagtacttttggtgaaggatatcctttgcatctttaattctgaatgtatttttaaaaggtttgcaactgtcatccaaacatgcactaagtttgattctgtgatgaatttttggtgattatttaactcgttagtaatgtaatttaatgccccaacatttctgtcaggacattttcagtgctggaagcgacacttcatcaac

SEQ ID NO: 17905 - DNA, 670 bp, Glycine max
  Intron number 1 from transcript Glyma11g01130.1 (locus Gly ma11g01130) derived from phytozome v7.0 (chr-ID Gm11; pos 633051 to 633720)
gcttcaaaatccaggtatgtcaagctcggtgctttgtttcgctggtgtccctatttgctcttaagatctgatgtgggtttcttcaacttcttcggtgtaccgtttcacatttccttttttgttcagggtggttttctattttatggttttgatctgctgtttgaacacattttaagttgaatttcttgagttatgtggaatgccctttgcttcatttgtttaaatttcggtgcttttttgttttccataaggtgtgtgcgtgaaatttagacacgcgcttcacttcatttctatttttggttattgttaagtcttgatcttcttttgttcttgctagattatgttttttcattagttattgcatctctatctgtgtttctggccttaattctcacttttgggaagcagttattaacttactttttctttctcttggtgattttttttcttgtttgttgagtttggcttgacaatgcttttagatgctgagtttggaataaagagttggtttctgtgggcttagatccatttatttgattggatgcaaatatggcattttgttactttttagggtcttgtcttttcttttcattaaatgcattagtaatatgaaattgacattgttaatctgatagatccagtttatctgaaacacccaacaaagcaaccc

SEQ ID NO: 17906 - DNA, 470 bp, Glycine max
  Intron number 1 from transcript Glyma06g10830.4 (locus Gly ma06g10830) derived from phytozome v7.0 (chr-ID Gm06; pos 8204236 to 8204705 reverse strand)
tctgtcaaagcctttgggctttttcgtacaactaggtagtgaaagcaacaatatacgaatttttgatggaaaatactaataatttccaccaaaaacaccaatattgggagaaagaaatacaaccaaaacttaaaaagtcatcaactcaataatcacgctgtgctttcacctatttatggcttaaaatctcctgttaaacaagttagaaagaaaagccaagacaagaaagaaagaaagaaaaaggtagagaaggagagagagagagagagaaagaaaactgaaaaaaaaaaaaaaaagataagactaattaactacatttttggtttggtttttcttcatctcgcaggagacacgaagagacaagttacatcacatggttaaaacttgtttaaagagttttgtgtttgtgtgtgtgaaagtagtttaaggttgtgggggtggttgaagtttttagctttagctttgcagag

SEQ ID NO: 17907 - DNA, 907 bp, Glycine max
  Intron number 1 from transcript Glyma12g08140.1 (locus Gly ma12g08140) derived from phytozome v7.0 (chr-ID Gm12; pos 5867426 to 5868332 reverse strand)
tttaccttctcaactggtgaagatcttcacctcaggtttgttaatttctacacttttacaacatgtttacatttttttaccatttcatgaagttctttttttatttgattttatttggtaaaaagagatctgcctggctgtgaaatttatttgaacgttgaccatacaagttaaacaatcatgatttgactaagccaaaagaggatctggtagtgctcaactagttagtgacattaggttcagtaacactaataagtagtacaagttgcaataacagataaaaaaaaaaaaagttcaagtttcaataaacttcagaattggaaatatactggttgacgtgtgttaaacaaagtaaatgtgtatcttattacaatatgtgcacatcaatacgtaccatttttactcttcatgtgtaaaaatatatgtttctttcttttacaacaaaacaattctttttgactttgagacaactttttacgaccttggtaaaggatgttttcttggattgcaatcctatctcataggaaatcgttaaggtagaaaattattgttgtaaactaaaattaggttcaaatcctaaagagataacaagcacgcaaagaaccaaaagtggtataaaacctgttttcaaggatgtattcagttttcataagaaggaatcttcttactttattattgcataatagtcaaattatctttttatctcatttgtcctgccaaagataagaaaattatttgtcacttgtttttctttaattcaaagttttgagccagtgaattaatcaagaagccaccccagttagtggctagcatttccttggcaccacttttgtactactgtattattatacttactgaaaattctttactattttttattgcagctatcagcttcaaaagtacaaaa

SEQ ID NO: 17908 - DNA, 614 bp, Glycine max
  Intron number 1 from transcript Glyma09g01170.1 (locus Gly ma09g01170) derived from phytozome v7.0 (chr-ID Gm09; pos 692193 to 692806)
agggtgcatctgttgtcatctcttctcgcaaacaggttaattaatgggtccctgtccttcaatttcccatttttcacccttttctttttcttcagaagaattgtcaagcttaaatcaattaatcaaggagaaaaatatggtattttttttcctgttttaagttgaagtttcttttttcttttttttttctttttggtggtttgatttagtttggtgtgttagattcatgtcatgttggcacttggctactcttacaatattggtttgagtttaactcaattgctagttaatgaaatgagtatagctcacacttatatgtattattttaaccatatcactagttcgtgtaagatcattggaatctccaatagccaccccttcgcaagtcctgcatagttagttggatcagaagagttaagtattttatttaatagctccatcttgtcttggaaaaaaaaaggagaggaaaacggcgatgattggtgacaaaaagagcattttgttaaaaagaaagactttttttatgattttaatttgtgtttagcttttgacacttcttacagatatttgttcattactggactttttttaaaaaaaaaaattactgcagaaaa

SEQ ID NO: 17909 - DNA, 568 bp, Glycine max
  Intron number 1 from transcript Glyma13g35320.2 (locus Gly ma13g35320) derived from phytozome v7.0 (chr-ID Gm13; pos 36771312 to 36771879)
gttgtgcttcctcttccttgttctctttgttgctcgtaagctactacttttaatgttagttctactccatgtctttcttagtatgcatatataatgttacattctacgtattactgtgcatgtctctagctatatatttatgtaatcatctaatgtttaggatgcatacgtagttgaatataaacaaaaaaaaaataaacaaaccatgctgattaaaaatgtaactaactttttaatattatgaatctcttttttaaaaaaaaataatagttaacttcattttctaaagaaaacccttcacgctaattaattattcatgaattaaaacctttaattttatgggcatgaatgataatactctcttttttaaagatcacgtagttgataatcaaatgattattgaaaatattataacattttagagaaaatattactttatgcgttttatttgcatgcatatagtctttgattttgttttaattttcaatatctcttatatatcattcaattattgcattaatgtgtagaagaagttgtggtgcaaactgaggcaaagacttgcgagaac

SEQ ID NO: 17910 - DNA, 802 bp, Glycine max
  Intron number 2 from transcript Glyma13g36260.1 (locus Gly ma13g36260) derived from phytozome v7.0 (chr-ID Gm13; pos 37542382 to 37543183)
gcctaaaaaatcctgctttgaagaaaaggtgcacaattctccccccacccacattttctttcttgttaaattaatattttaaaaatgatgaaagaagataaaacgtaaccaccgcgaagcgcttggttgtttcagcttaactaggaatttcgaatttgattcctgaatatgtctattcagcttgcgcgaggatcgtttttggtagaagatacctgtggtctcaaaaataataagaagaagaacacataatctcaacttagcattttattggttttatttcctaatttttgttgtttggctcttgtggttcatttagaatttaggcttcagattatttactttaccatttttgttttatgttttaacttgaagtaacaattgaagactgaataaaaggcagtgtgaattttttgaataatctaaagagaaatgttagtcataggtttgtcatcgatttaactgacttatatgatccgtgaagtaatataattgagtgaaaatggaaattcaacaaagtttctaaaactatgatattgagcactggcagcattttagcagcatcaatgaaaagcttgccatgacaaatcctattgcatatatgatgttattatgcttaagtatgatattaaattttctttttcctgttttctttagccactctccccacatcttctttccctgtctaaaggttaaagatttttgggtttaatccagatgcttattcttggacgaagttataccatatctcttgtttattcctgttgcaggactaaatctgattcaagtactgcttctagctcca

SEQ ID NO: 17911 - DNA, 314 bp, Glycine max
  Intron number 1 from transcript Glyma09g05380.2 (locus Gly ma09g05380) derived from phytozome v7.0 (chr-ID Gm09; pos 4168671 to 4168984)
tccttctctggaatccgaaaggacgaaacggagaggttgatatttttttttggcttaaatatgtttgagttctcagataaatgatcaatctttattttatgtatctaatgcaacaaatttttttattagaagcctaaaacaaaaattatttgtttatgaaaaatctaaaacatactttaaccttttttatgacaaatattaattgttaattcttagatttttttatataaaaaatttgaatctagaatttttttttctttaattatttttcttttcatatctgaatcaatcttataagtctcaggtttatacgt

SEQ ID NO: 17912 - DNA, 1059 bp, Glycine max
  Intron number 1 from transcript Glyma13g36110.1 (locus Gly ma13g36110) derived from phytozome v7.0 (chr-ID Gm13; pos 37451001 to 37452059)
ttgatattgtcatcaaatcctttgtattggtatgtatatatactcttcattcatctacttgttaccatgttaattaattagcaccaggtcatgactttaattaattttttggtcttaaaaatggataaactttgaaaagatggacaagcaatataatggataaagatcgaacactatacatattgtggagttggaaattaggttgtaatatgtgttaacaatacaaatatagagagcagaacataaacaacggagcgatccgtgatgaaagtttgaaagagatgaaaaacctttttagtttgctcttaaaaacgattttcgtagctcacttttctctcaagaaacttctaaaaatgaatatggattagagtcgcattgctgggtgctcagaagttcgctatttacagttgagaaccataataatttattattactgtctcaagaaaatcaattattttgatcttgaaattatttgggtttaagtttgatcaagataatagattatttttagcattgatctattatttgcacatttgtgccaaatctcaaaatatactatcgctaaaatagtttattattttgtttcataatctattaatttgttgttcgagagccaatttattccataatcaatgatgtatatgtatgtaatatgtggtgcagcaaaagtgtgcattgcagtatgtatttatatcatcgcttgaagattatgtggatttatggtttacattgtagtcctttactgtattgggagttaatgtattcaaagcatatagagtctttcatttaatctcctttttttctatttggcttggtgtattatcttcatgcatgtaaccaatcaataacacgtcttgttcctggattggtaatttatcacttcaataaaatatttttacccttcaaaaaacatttaaaaaatcttaaatagaatgatgcaaacatcatattcatttgcttcatttcttaatttacaaacccccactaattacacattcatttggattacgtatttgattcgcagacagtaattcaagcaggaactgaggcaagcattac

SEQ ID NO: 17913 - DNA, 1009 bp, Glycine max
  Intron number 2 from transcript Glyma09g32950.1 (locus Gly ma09g32950) derived from phytozome v7.0 (chr-ID Gm09; pos 39485134 to 39486142)
atatcgtacacattgattaatttttcaatctccttaagaatattttggttctgtttatattttaatagaatgattttgaagaggtagtattaatagatatattgatttattacctcagtgttacattatgtatatgatttgatcaactgatatgtgccactctctcgggagggaaaagaagaaaataaataataaaaattaaaggagaaataactgtatatctattttggtattaaggaataagccatgcgtagttgaaactctcaggcaaaacaggaatgctttaccagaacaggataaaggtatatatcatacaacagcatatctttgttgagacagaattaggaatgaactttcttaagagctttacatttggtgatattacttggaatgctttgtctaaatccaagagtaattgatttctactaaaattccatctaaccaaggcagtttgagcctaaggctactgtagcttgattaatcattaaaccgagatgcattgtctaaaacatagcttgttaggagaaagatagtcctcagccagagtttcggttaaatcctattaaaattagtaacagggtcttctcccattggcactacaaagccataagttatatagcagtatagcgctgacttttgattttgttacctttgtcactgataattgcaatgagaccatttatgtatatttgaaaagcacaagagagaaagggtatccatttgtgttggcaattgagattttttggctgtcatattaaaatatttaatgtctctgcagttttctgatttgcttgtaagtttggctgaagtttgcttgtgtgtcaaaaaaagctagttgtaagtgtaagattagatgtctacttttagcttagtcataatttactgtaacagtttagatgtctgcaaaatctgaaatagatcagaccagatttgctcctctcttcttcttacgtttaaatttgctggttcttttctacagcatttctctatttttccacccaataccttt

SEQ ID NO: 17914 - DNA, 973 bp, Glycine max
  Intron number 1 from transcript Glyma11g19960.1 (locus Gly ma11g19960) derived from phytozome v7.0 (chr-ID Gm11; pos 16759738 to 16760710)
ggctactattcacttcctcattccaaagctgctaggtaaaatatcacatccttcttatattcattatatcattttcttcattccaatgatgagtttgtaaatggtatcaaagttctatgcaagaccggtctgatcgatcgaaaatgagacctaaaacaaaaattgttagacatttttttttacttcgatcaaagagaaaaaagtgatagtctaatatttaagtttgagttgtcttatccttgggtcgatctgatgctagagaaagtgtgatcatgtgattagtcaaaagtgttttgcaaaaaaagaaaaagaaaaactctttttcttcaatcatgctatgacaaagttcagtgttatttttttgttgttgataaaaaaaattgatgcataagaaaatatgttgttgataaatttgaggtcaacgatcttgttttatcagccgaggtcaacgatcttgttgcactggttttcctcgtagctaccatcatattggtttactcaccgttatttgttcgatcgtgaaatagtgagtacatagcttaaggaatcacaaattgtcctacgagcaatattcttgtggatatataatttaatttttccgtacacgtaatatcattatatcacataacttatataattttataaggttttctcattgaaattatccgtgaatttggaaataattataaatttaattattaatacgcttccattattgatttggaattgggttaattaattcaagttctatatttttatttaaattaatcaattcatttaaattttgtctttttaattactcgctaatatgtggccctgatatgaattgccatgccatctactatacatgaaatgcaggatgttctactttttctttgatttaatgtattttgattttgatttaattaatataaaatttgtccttttaattactcgctaataggtgatcctgatttgaattgccatatgcaga

SEQ ID NO: 17915 - DNA, 364 bp, Glycine max
  Intron number 1 from transcript Glyma07g31240.1 (locus Gly ma07g31240) derived from phytozome v7.0 (chr-ID Gm07; pos 36212876 to 36213239 reverse strand)
tacactgtcggattaacctttgattctttgaaagggtacgtattacgtactactcttcaccaaaaaaaaaaatactatatatgcactctttgttatatagccatatatataagtatgattattttgttttattttattttattttaatactaattcttaagataaaaacaaaaaattatcaaattaaaaagttctaactgggcgccaatgaataggtatcatagaagtattgaaaatttgctcttacaccatacataacatttttttttctgtttcacttgttaaattgtttgagtatattaatgcattgagtattaaattttgttttgatgggttttcagggactggtcagagctgctaaggg

SEQ ID NO: 17916 - DNA, 815 bp, Glycine max
  Intron number 2 from transcript Glyma13g20550.1 (locus Gly ma13g20550) derived from phytozome v7.0 (chr-ID Gm13; pos 24018200 to 24019014 reverse strand)
agcactttaagaccaaacgacacaagaagcggtatgcttcttttaattttgcttctgttttttaatcccctttgttttgaatcctatcctacattctccccatattttggtgaagattgattattagatttatagaattgcttttgagttttgaggctactcatgtttttaatgtatgagctttcagatgtgtgaaaacataaagcagttgggcactatgaaaggaacatatcttgctttttagtagtgataaaataattgagtggatttgaacagaatactagtaaactcaagcttgttaagataaattatattgagcttgagatttaatcaaaatgaaatttatccttcatctgggctctgtaacaaaaggggaataaccaagctggaagaccagtatagattatggatgggaagtggttaatgaagtcatgcatgtgattagctcatattcagttcaatgacgtatatagtcagaatttgcttatattaaattaaaaaagaaaaaccacaatttctgaagtaattctcgctcaataatagtgtcttcattcaaaatagggtgtttgtggcatttctctttattagaatcgttagacaaaaaatgcatatgaataatttagcaacttttcaccccctataatttggtgttgggttgtttagaaattgagttacgataagattggagagaaaggtaacgtgttagaagaccaaacctataatgccaacatcgctcgcacatggcatctttctatatattggagtggaatgattttgattctgatattacagtttctttgtgcagtataaaacaa

SEQ ID NO: 17917 - DNA, 726 bp, Glycine max
  Intron number 2 from transcript Glyma10g35130.3 (locus Gly ma10g35130) derived from phytozome v7.0 (chr-ID Gm10; pos 43304823 to 43305548)
gtccacctgtaagtcatggttagttttgattgaataacatcattaacatgttttgtatcacttgttgtaatttgacacatcacttccatagatgggtgatattttgtcttcacttcatgtttatttagctttgaaaatttaatttgggtgagtttttgtggatgttcatttcattctgtcttgactagggtcagaaacttggtagttttgctgagttcatatgtagtcaaacacaaaagtttctttcgttttgcaggccttattgttgttgggctttgaagcagatgaagctttgaaggtgatattatcttgatacatgcaataggatatgatagtccttgtaaagaaataatgtgctagtttcataagtgttacaagttacaagattttacctcaaacgaagcatttacaatgccttatgctgtttcctgtgcttcatctctcctctgttcctctttctattagtggccattcagtgtacttgaatttctaaccatcctttggtctgattattaatttattagcttacagtagcagcttacgaggattatccagtgatattgtactttagattcctttttcgtgaaatattgtagtttttatacattagcattcaattgtcttggccttatatatatattttttatattctttccaaatatgacatttaataatataatacgcatcctgatcttgagcagattcgacagcttttgaaagagttgg

SEQ ID NO: 17918 - DNA, 753 bp, Glycine max
  Intron number 1 from transcript Glyma12g35820.1 (locus Gly ma12g35820) derived from phytozome v7.0 (chr-ID Gm12; pos 38947347 to 38948099 reverse strand)
tgccaagttagctgaacaagctgaacgctgttctctctctctctctctctctcttgattttcactgtgaactgtgaagtgaacactcgttatggttcctttattttagctgtattccactttcaatcacgttccagcatcttcttcagcaacccattttctctttttccttataacagcatatgttctgataaagtttcaatttttccataaaagcccactactctttcacttctgcatggaactgctactttattttacatgcccaaatcaccatctcaattatcaggaaagaaaacagtaaaatctggatttgtagtagtgtattgccattgtatgctaagtttgttaatttttataataattactttaaaagttatacagacatgattttagtgttgtcaagagtgtgaaaattaaactctatttatttgttatgtgttttggaatttgattcaagagtgttgagttgtggagtatcatatataattactttaaaagtcatacatgacatgatttctgagtagatgaggctgtgaaaattaaactctatgtttatttgttatgtgttttggaatttgattcaagagtgttaagtggtggagtataataataatataataattacattaaaattcatacctggcatgatttctgagaggatgagggtgcgaaaactaaactctatgtttattttttatgtgttttggaatttgattcaagagtgttgagtggagtggtgcggtgtgcagaa

SEQ ID NO: 17919 - DNA, 958 bp, Glycine max
  Intron number 1 from transcript Glyma12g31900.1 (locus Gly ma12g31900) derived from phytozome v7.0 (chr-ID Gm12; pos 35442393 to 35443350 reverse strand)
ggtaatctagtttctctatcgtttctgttaattaggggaatattcgatgctctcaaactatgcactatgcaatgatttcaaattcgaagtctatatctgaagaatgaattgatggtgactgtgatacgctggggctagggctagagctttgtgatatcatattattatttacttattttatagtaaaaaaatagaataaaaaatcgtttaagctataagtttaatttatttttgaaagaaaaaggttatgcactaaattttagtgccatcattcaatcgtaaatcttatgtatgtatgatatgtttgttgacttttaaaatattagtctcaaaatattaatcttatgtatgatttcgtttttacactggcattgaactctttttgaaatacttgacttttctattattagtaaacatgaaataaaataatagagataagtgtatgcgtgtaaagtgtttctaaatccagtaatacattatttacaaatgtttgttgaccttttctcatgactattttaaaattcacaccaatagatagatttctaactgcttgactgtgtaaaatttattagtatatgaaaattacactcaaagattattttttttttctcaagtcaaactaccattaaacatatattccctttttagtttaattatcatacactgttaatgcatatgaaaaattattttaggaatataagagtcagtaatttttcctcagcgatctgattagatgtctaaatactgttactctgtcaatgcattttaattaaattcttcatattttaaggaaaagataattatttatctactataaaatttaaccaaatgcacattaaaaaattgtcttgtgaaccaagttatttgatttgaagggtttctttcttgtgtaatagttgcggaatttgatttttgacatatgatgatgtgggcagggtttgtgctgttcctgtctttg

SEQ ID NO: 17920 - DNA, 872 bp, Glycine max
  Intron number 1 from transcript Glyma13g05250.1 (locus Gly ma13g05250) derived from phytozome v7.0 (chr-ID Gm13; pos 5472277 to 5473148)
attggtcttgtaagttcttcatttcgaaggaaattctgttatccatttgtgtgttttttccggtttgaatttaattttgatagactgtaatgtaaacttatttacaacgtcaatcaattaggaatcactatgaattcaaaatacgtcttgctaaccagcccaaaggacccaagttaaggaattataagaagaaagtttgtaatgtgtaaatcatagaagagcgtaaaaaaaaaatcatgggagcacagttttgcgcatcccaataaaaatttctacccttagtgccttaaaacaccggttagcatttgcctaaatgtaaaagtcaacaatctgatcatatatgaggaaatccatgattgaagattgcaaacaaaacagataacaaaagccttatcctattaggtgaggttgactacatgaatcatactatgttattcagcttggttaaagatcaaatttttagagatattatttaccgtgagattcctgttaaatcttaacaattctctccaatatctttctaggtctccctctttcctttttcatagttagttatgttaggtcctcaacacacaatgtaaaacttgtcaatataccgaatatggaccatgattgaagaattcattctaataaattcaatttgttaacacatgatattgggaaaatgttttgtagtgacaatggatcaaaattaaatccccttagtgtttgccataagataagatgagcataattgttttgtacataatacattttttggtgagagtaaaatggagtttgtgttattggtggactggatagtgtactgctagcatgtctaattttatgaatttgaaattttggtcttgatggggtacagccattgctgtaat

SEQ ID NO: 17921 - DNA, 954 bp, Glycine max
  Intron number 1 from transcript Glyma06g48190.1 (locus Gly ma06g48190) derived from phytozome v7.0 (chr-ID Gm06; pos 50462212 to 50463165)
ccaacacccaattccactgcttttcaatcccaaaggtcacactcttcattcaatttacgttctttctgatttggatcccacatctgatttgatttcttgtgtttcacctcaaattcttgcttgatatcatgaccctttgagatttcatgcccgttctgttcttgatatgacccctttcagcatagttttagtactgaccagtgagtgcttattgtttttgtttggcttaaaacagttcttgttgtgttgcatccatctgacagtccttcttagagagatctcttatataagatatctaaggactagttgagtagttgcgatcggataaaatagttgaggacaataattctctgctgacaatctcaacatgtcattggcactttgactagtatcaggggttcctccatgttctactactttttccaaataaaaaataatatttgaattggggtaaattttctatgatgggtcttgtactcttgtttttgctgattggatttggaatagagtcttgtcactatcgttcttggtggcatgttattccttttcctataaaaagggtattcttttgctttaccattaagatggatttctgatcttgattggaaattttcactccttataatggcgagatggttgtccttggagctttgcttagaattgaacttttcatcttttattggtgggaatagggtttttgtattttactgcattcacctttcagagtttataagaaacttcaatttatatctcactccatgtgcatgtgctcttgcattgttgtgatccctcttagattttagagccttattttatgtgtggcactttgctgatctcaaaagttaattgatacattaacatacccttttgcttttgcatcttattgatgagctttgaatgagggaaaaagatgtgttgcctgttgttgcaggggtgtagcagtgaattgggttg

SEQ ID NO: 17922 - DNA, 881 bp, Glycine max
  Intron number 1 from transcript Glyma09g30320.1 (locus Gly ma09g30320) derived from phytozome v7.0 (chr-ID Gm09; pos 37158727 to 37159607)
aaggttggggtgctgtgattgctaaaactgtaagctttttttttttttactttcatttactccctcaccttttccttcattagcttaatttgtctctttaaagtgtttggtttgttggtaggaatgggtttgtgttatagtaaatacagatacctggagctgtgttgtgatttgggaattaaggctgaaaactgaagagtttggagttctgtggtctaaaatgccaatcttttgaactcttttgacttttgatctgttcttgtggattatgccatcgttttaagctatttagttatgagtttctgttggttgtccttgtcctgttatcgagttattataggccacagatcttcaattcttcatggtttagagtagttgacacttggatgctcctggtagatcatcaattttgcctctcaaatcttgaattgttgttgatcctgtttgcaaaatgcagattctacctggttccagaaagaatccttggatcatatttaggtgtagttgatacttttgttttcaattgaaattaaaccaatgtataaacagattctcaatgaaggcaatgccttgtatctgtaacaaaccaaacactctactcctgtgtagtaggaatatattgttaagaatagtcccacatcgggtaattcatgaacatgataagtgcttatatagctgggtaaaccactctcttatgaattggtttttaaggggacctttcagatgcctttgctgcactataaaatttaatatatacttaaataatattcccttttgaccctattttgtttatgaatgttcttgcataccatactactgattgtttgtattttgaaagattacgtgggatttgatcttattatctcgctaggtatcacttg

SEQ ID NO: 17923 - DNA, 375 bp, Glycine max
  Intron number 1 from transcript Glyma11g35830.1 (locus Gly ma11g35830) derived from phytozome v7.0 (chr-ID Gm11; pos 37428876 to 37429250)
cgtcgggggcttaattctctaccttatcatcatcggtaacgtaacggaacttcttttcccttcttttttttcttcttagtttcctttctactggaatcataaagaaaaaagagagagagagagagagagagagaaagtgtagatttcttttaaaagtttttgattcggtatgcttgttctgaattttccggggttttcagtcagattcattttgattggtgaacatgtttttttcttctcttttttacaaggtgaatttgttgctaataataagttattattttttattttttactataaatagaagatgaaagaaaaaatagatgtattttaataattaatttattagttattacctttgctgaacaacagggg

SEQ ID NO: 17924 - DNA, 520 bp, Glycine max
  Intron number 1 from transcript Glyma11g27770.1 (locus Gly ma11g27770) derived from phytozome v7.0 (chr-ID Gm11; pos 27650040 to 27650559)
ccgctgccgttgatcttcacggtcaaccaaaacaggtaattcataaataaataaaaaagaggttttcttcatttgttttttttttcctagaggtatggctttgaatttgtttaatattgccgttggaatcactaaaaaaaaaataattcaatcaattagtgatggttttttcccctcattttaatgtcaacaaaaataattagtgacaaactttattggaaaaaaatcataaattctcattttgtaacggttttaagttgttttatgtcatgtatatactattctaatttaggggttcaaaaaaaaaaagaaactagacggttatttaagaatttataaattgtttatgaacccaattaacaatctaatctaaattgttttgtcactaataattttcatttttgttgaagtgaattttgtttcatatatatgttcaatgggaaaagtggatgcaatgaaatgagttttcacatacaattttgtttacttgtttattgttaggcttttttcgggatatttg

SEQ ID NO: 17925 - DNA, 530 bp, Glycine max
  Intron number 4 from transcript Glyma13g26860.1 (locus Gly ma13g26860) derived from phytozome v7.0 (chr-ID Gm13; pos 30054414 to 30054943 reverse strand)
tgattataaaattttgtatgtttattgaggcaaatgaatagaaaaattgttagagataaggataattcaccatctatcatgttcaactaggtgagcacggatgaaaaagaaaggagaaagataaattgaatagcaacatgctttgttgaaaagaagaacctaaatttgtttgctattattaaaatttctaagaacaaaacattatgtatatgatacattttatgataaaacactttttatccccgaattatgtttgttagtctgtcgtgtgataaaatgcacaacctatacaagattcagttttcatgaattgcaacattcagctttttatcacctatttttcttatgcgcttctgactttagagtcatattaagaagcagatgagaatcaaagcataactataatgtcaaacatatttttctgtaccttattctgaatatagaaagggaaataatagttattaaatgttgaatgtttttattttctgtacactaaatcttgttgcttccatttactgttataggcaggt

SEQ ID NO: 17926 - DNA, 786 bp, Glycine max
  Intron number 1 from transcript Glyma08g41990.1 (locus Gly ma08g41990) derived from phytozome v7.0 (chr-ID Gm08; pos 41874134 to 41874919)
ggatcttccaagtaagatctgcttccactataaattccacttgtaattaagtacttaatggcacatatggtggaatatatatatatatatatatatatatatatatatatatataagtatgttgttatccttctgttaaacgtttgttgataagattgattcaaataattaaaggagttgagtgttatttgatgaagatgaattgatgtaattgaatgaaacgatgagatcgataagctaaattaaagagcatgtaatattgtttttgattcaacttttttaagaaatattttttttttctttatcataaaagaacatttaaaaaacaatgtttttcttgagatataaagctttcctaaacatacgcctaaacttctattcaatcctaattaccattcaatcatgaaacaaaaagactatactcaaaaccaaagaattttaattcaattaattgaactgtaaattattataattttttatatttgttttccatttctaatgataaaaaaataagactatacagtctacactcaaatatatagttcttgatgttcatcagttgttatttaatttttttggaaagtctccatgttttgttataggaaaggaagataaagacttggtatgctagctagaagccagtatattacatataaccctactttgaattttgatgatacataaatatatgtaatcaatacatgaatactgaatttgttatttatttttgtgtggcaattaatgcatgaagaggtgaattcatttggggagaaagagtggtatttt

SEQ ID NO: 17927 - DNA, 729 bp, Glycine max
  Intron number 1 from transcript Glyma08g09570.1 (locus Gly ma08g09570) derived from phytozome v7.0 (chr-ID Gm08; pos 6806183 to 6806911)
gtctccgccatctccgctgccagcctttcgatctggtgcgttcgttttgtgctttgttctgagttgtgaaatttgcgatttagttcttttgattctgatatcggttacttcgatcccctgatgaggaatttcagcgcataattcgtttaaatcactttaaatagaggccagattgttgtacgtctgctccaatttgcatttcacttctcaatttatagatcttttgattgggattaatgacaagtaaagggatcgtaatttcaatcaataacgtgtaaagggcctaagatctgcgattatttacaatttagaagcactcagattgacttagaattaaaattttcaagtgaggttagtttgggatccccgtgaagaattggggtaaattctcaccgtgaattttgaggggatactaaagtggatcatagtaataaatggatattatgatttaatgttgtgtcatatatttcatctaggaataaaatatgaattgcattattgttttattactgtttactgtcatatgatgaattgaacacaaatctctgaaactttggtttgtaaccgtgtcaaatgacattgtgtgatccatgtagccgacctcacctagtgggataaggctttgttgttcttgtttttgttattgctgtttactgtctaatgcctatggagttgcgagtctctctgacttttattgttccccttgtttatcatctccagtcataccaa

SEQ ID NO: 17928 - DNA, 782 bp, Glycine max
  Intron number 2 from transcript Glyma08g09570.1 (locus Gly ma08g09570) derived from phytozome v7.0 (chr-ID Gm08; pos 6806973 to 6807754)
aggtaagagtgtggcaatgtcatatatgctttctttatgtcttgactgctgaagaacaaatattgcatgtttgtggtgcatgccctttagatttctttggaacctttagaatttcagtttgtgaagattaaaaacttgaaataattattgcatcacactcagagtcaggaagagagtgatttgcttcaataagacataagctggtaacttatttatattctgatagttgagtgcatcaattaaataggagtataggacttatcaaaactcaggagcaggtagtcctcattcctaaacttcagttcaaattcaattagacaattactgcaaatcagatattcagccactaacataatggaaccccaaacaagagtgaaacacatactgagtactgcaaacctaaaacccatacatttccagtttgacacaactaaatatttgactttacacccttaacagaaaagtactgaaatatccctatagcttaaaaaattagttaaactagacagctactttactaagaactgcaagtctgcaacattacaatgagccccagacaaattgaaaccaattggtgagatattttatagttcaagcttatgttttaacttttaatgtttcaatgctgattgcaccagttcttcattctgttatagttgcagtttttttgtaattggtattctgaatttctgattgaaatgattaaaacatcctgaaggcttacaatgaatactttattttacacaggatactgtagttggatttctgttggctggagtggg

SEQ ID NO: 17929 - DNA, 656 bp, Glycine max
  Intron number 2 from transcript Glyma07g40140.1 (locus Gly ma07g40140) derived from phytozome v7.0 (chr-ID Gm07; pos 44421522 to 44422177)
aaactgaacgatatcaaaaggtacttaggtatatatagtagcacatatgtatgtctctgatatataataatccgttcggtttcttctcgttcttcttccatgatatctatctatcatgaaaccggccaggtcttaatttggttttataattcaaccctaaccagttagttttaaacctaaagtaattcatattggttttgggtttgggttttcgagattgatcgttttctttagctagctagcttttatatatcgatctggtgttctatagatgcttcacttccaaaatcaaagctagctagtttcgaagctatagcacaccaaaatacaatagctagctagctgcgtgaaacttgcagccactgatcatggcctaattaaagtcaagacactctcaagatggagaggtgaacaattaatgagtacgtgatagaaagagggatttaaaaaaaaaaaaaaaaaagagttggctgaaaatgtatcaaaacaaccagcatgcaccgtttgtcattattaattaattaattgggtttctctctcacacatatatgactgcatgcatgaattcattttatgccgtacaggtacaagtttttctgaagctctctttgatatttgcaggctgagatatcgctttgccgtgtgtacaagagagc

SEQ ID NO: 17930 - DNA, 647 bp, Glycine max
  Intron number 3 from transcript Glyma12g31010.1 (locus Gly ma12g31010) derived from phytozome v7.0 (chr-ID Gm12; pos 34640321 to 34640967 reverse strand)
gattcaatcttggtatgccttcttgttcctcactgtttgatttatattatagcatatattagcttgctaagattctctaaaatgtaagggggtaattcatcatagtgatcagttgctgcctgttgttttgtctgtattgcctttaagatgtattgtactcaaacttgacttgggttgtaaacatgatgaacgagaacgattaagtttgatttgtctgtaaattttaattgtggaaattgttcatcttccgaactaaaagttttaatatttagtaactaaacgattgattttagtatttagaaacaaaactctatgaatgtgtatttatacttattttcttagatgattgcaatattatgcctcgaatcttcaaaatggacatgtactgttagcgaaagtttttacaatgttaactaattagaaatcattgttaggatgacttttaaggtagttattataaaacttagtgagtttgtcatactggtggtttatgattgaatgtcagtgtagaagactttatattgtcagtgcatgtattgtttctttgactaccaatccctctctagcacggaatctcatgtccatgaagcctacatattttcacatatgtattgtattcaaaagtaattttgttctctgatgcagtt

SEQ ID NO: 17931 - DNA, 273 bp, Glycine max
  Intron number 2 from transcript Glyma09g07170.2 (locus Gly ma09g07170) derived from phytozome v7.0 (chr-ID Gm09; pos 6032153 to 6032425 reverse strand)
gagctgcttcctcaggttttttttctttttttaaaaaaaatatatttaatgtgaatgaattgaagaaggtggaaattccataaattccaaaattgatattttagtgtgttacagtttatttagatgagttgtttgacattcaaatggcatgaattttctgtgatcattagctgggaccgggagtgtgtttgtataagttgtaacccttatggtgtattatgattttttgatgttttagcaccgaagcaagaagaggtgaagcgtcttcctggt

SEQ ID NO: 17932 - DNA, 469 bp, Glycine max
  Intron number 1 from transcript Glyma09g16790.1 (locus Gly ma09g16790) derived from phytozome v7.0 (chr-ID Gm09; pos 20217212 to 20217680 reverse strand)
ctctcaccttcggatcccttggctcacccaagcatgtaaataatctcctctctccctttttcacccttcttcacactttcaaaatggttcactcaatattactgcacgtttagtatttaactttttattaaaaaaacatttatttgtaaaaggtgtttacttgaatccaaggccaacgttcaaactgcagcatgcttgttttgatgtttttgttttgaaaaatgtaatttttgggtttaatatcgtggatacaatccttatccaaacacactcttactcttagtatctgacaacgacaacgtagtttgagtaaaattattttttttatgaagataaatggagatgggaaagaatatttgatttttttttatgaaaagattgttataaaaaaatgtgttgttaaatactttgtatttttttgttggttatgataggtggtggagcggcgagggttctggacgtgaaccta

SEQ ID NO: 17933 - DNA, 932 bp, Glycine max
  Intron number 1 from transcript Glyma06g14160.1 (locus Gly ma06g14160) derived from phytozome v7.0 (chr-ID Gm06; pos 11165685 to 11166616)
ggtctctggacgttacaggttcaatgttaattgtgttgctatcaatgcctttggaccctctattcctgctgggcctctcacttcaaagcaaggggctcagtgttccaccacactttaaagttaaactcagcatgatcttcttactaacaacttcaacatataaatgatataaattataatctactattcatatatatcacggcgagtttttcaagttttcttgttagtagattttgttgcttggctttgtattgaagcgttattttgcagccactataagtgatttgtaaataataaaaatatatgtgaatgataggacaaaaagttacactttgtgagtgattatgaaaagaggatgcgtattagatggttaatcttatctctttgcttttagtttcatcatctctttctctttctctttttttttctcccactatctattgaaatttgttttgctctacacgtgatggtagaaaatagaaacgaaaaagagtttgattgttggatttcatgatggtatctctctagcggctttaatttggaagtggatgcatgagtagatattggggtcacctttgttttgttttgttttgtttctttggttattttgtggatgcgaagaaaaaaaactaactttgattcaagaatctatagacgagattcggagaagagagagtgaaagaaaagggaggaaattggtagctttctttgtagaatctgcagattttacatgtcaatttcttgcctttaagaatcatgtatggtatactttaatcaaacttttggtaaccatgaatcagcttacatttttctgtcttttttgagcaatacccaagcgatgatattggccaagcatgtgggactgatagttaaaacactttctcttttgaatttcagcattttgtcacgcattgattaccaagagctactct

SEQ ID NO: 17934 - DNA, 952 bp, Glycine max
  Intron number 1 from transcript Glyma12g29710.1 (locus Gly ma12g29710) derived from phytozome v7.0 (chr-ID Gm12; pos 33144906 to 33145857)
tttggaagctcgcatccctttctgcttcctcccccgtgagttttcacttccatcgcgccaattctgctgcatttaaactaagcttcaattcttctctctccctccctccctccctccataattcaagcatcacttagtttttcattcgaatatcattttatttaccattgctttccctttttaattaccaatttattaattgattaattgctaattaactgtgttgccgattaattccgtttcctggatcgaccttcgctgttcctggaactcataagtcttaaacagacaactcataagcgaacctgttgcttatttttattttttcaatctgctgtttgtttttattgaatctactttagtggttcactttgttaggaggatctcaattagagacaattgatgtgttttagcaagttagttaatatatttttcgccctgtaattacctctttgtattgctttttcagctacgggtattttgaatttgaaggttaggaattaggatgttaatatgagcttgctaataattgaaaaacagttgacttgagctttagttaaagcaaacacaatttagtgggaatttgtgaagaagatagcacaggattcatctgaaaatttttccttacttgttttgatagatttgaattcaaagttactatcagtttgtgacagcttgctttactttcaagactacagtgtttcttttataattctatataatgatgcatgcttaccatgaaattttatgattgaatgccctgtaattgatggccgaaagttttaagaggacaactgaatcggcaacccaagtctcaagtagcttaaaacttgcgtagcttattttcttgtttcctcttcaggctcctttgtaatagttgatttgaagtgcttttatatgttgatggtgttttgcaggtggagacaatattagacaaggagaatttcacttt

SEQ ID NO: 17935 - DNA, 1033 bp, Glycine max
  Intron number 1 from transcript Glyma10g06940.1 (locus Gly ma10g06940) derived from phytozome v7.0 (chr-ID Gm10; pos 5683800 to 5684832 reverse strand)
tgctctctgccttttatttgcattcctcttctacggtatatatatttcaatagcattccacttttcatttattttcttcttttctttatctcgtatgcagacttgtcttaatagttattacactcattcatgtaagaatatagacattcctgatattaattgttattatgccctatatgtcaacctggatcaaagaattaagttgttacaccttgtgctacttaataagattttcctcaccgttattttggtggtatacgtaaaccttgtgttactgaaatatagtatatacaaactaattaatcaagtcccaaaagaatgagcaactattttcacaactaaatttttacttattacacacttttatcgctttctttctcttatgatcattatatcacttattacatttatatttttttctttcttatttaaatcttacctcctagctaagaggatatgtttgagatgatactttgaaaccaaaaagagaaacaattttttttattatattttaaatagttatttaatatttataaaactattaaaaattagaatatattaaaatattaatttttgttaatcaatcattttaatttttaaactatcaaattaaataatatttatgtggaataaaagaaaataattttcattcttttctcataaaatctaattttcaaacattggttaacagccacctcaagggtattttttttttttttctgtaaaacaaatttcggtgatatttataataggaaaactgctaatatgtacagcagcactaccaaaatttataactccctccgcctttgatttctttaaaaggtcttgccttcaaattcttaatttaaatttaaccaatctttatccataagaatttaacacattttttttatataatttctgtacattttgatttttgtactatatatatagcaatgctgtttatggataaatataaatatgcttgtagcagctgatgattttggttttgtatgcagcggctgaaggagccaaggttagtttcaataacaag

SEQ ID NO: 17936 - DNA, 783 bp, Glycine max
  Intron number 1 from transcript Glyma13g23040.1 (locus Gly ma13g23040) derived from phytozome v7.0 (chr-ID Gm13; pos 26503139 to 26503921 reverse strand)
gtgcagatcattttctcctttcctgtcacgattgggtacccttcttaaaactgttcctcacatgctcatatttgtaggatgagttagaccaaaaaaactaggaatgttgagtttaataacttttcataaccatgcatgcatgtaaagagtacatgacaaattaatgtaattaaatctaatctaactcttagatataaaagtttaaaaataccattgtttaaattaccgcattaaaaagtattgtttgttttgatgttcaataattctatcgcagttttatcttcattaaaatactattaagtggattgaaggatgtgtcttttaataaagataaaattgtaagagacactaaacatcagtaaagtgaacaatacttcaaaatccagtactaacaaacttgagttcagaacaactacaatatgatatatttgttcaattaaaataagcaccctgcattcattattttgattcttagtgtttttctattcgagtattgaacaaattctaaaacaacctgatgaccctggtgtcagagaagaattatcatgttgctgtaattgaattgaaacctatagaataagtgccttagttggggcttcatatttcacgtgtattacttgggagttttttaatatctcttcatagtctttgggtgctttaaacaaaaaaaaaaagtattttataatcataccaagcggtgcttttgctgaatatatatatataacccgagttaatataaattgcttttactttacttgatgattcaggcaccagaaatctcac

SEQ ID NO: 17937 - DNA, 992 bp, Glycine max
  Intron number 2 from transcript Glyma13g37600.1 (locus Gly ma13g37600) derived from phytozome v7.0 (chr-ID Gm13; pos 38654922 to 38655913 reverse strand)
agtctcttcttcccctctacccatttcagtttcaggtatcatcaccgtcgtttcaattttcattctaagtattgtgtcgccactgcactcaccaacactcgattcgttcaacatctctgaatcccctaagggtttcaacttcttcgttgtttgttgggctctgtgtcgctttctccctttgttgttgttgttattattctctgtttttgtgattgctatttctgtcgcattgtttaaatttgttttgcattttgggtctttgtttttaattagtattacaccgaataatttaataccaggtttggtagcatttgcttcaaggtttttaaatagatataagaaaggtagtttgagttagctttagcatatttctgaagcttgaatttgatgtattttgtttggtattatgtgaagcattttatgattgaagaacttgattctgttcatattattatataaagcatttgcaggaaaaatttgttaaaatgtatttgaaatctgttctaaagcttttgaaagtatgtttaattaatgaagatgcttacattcttgttcagaaatctgttggactttgtatgtttgtgtagtcgatgaactggcacccctttaatgtttgagcaccctggttctggttgaagttgttgcctaaatgagttccatctgcattgtggttgttaatcccttgaaggctttaaacctcatttgcatctttgatatctgttgaattgggttggtgttgatataattttcacataatcatggggatcttcatttcattttagtttaaatggtttttagttatttacttgtttacaagtttgatgctgggtgaatcctactgaattttgcattttaagaggtgtagctttagatttgaatctctttggttgatatgttgccctacacttttctgttgtccaaatggaatgaaagcaatgttgtccacaatccttactccacttaacattatgaatgctttgtgtttgagcagg

SEQ ID NO: 17938 - DNA, 675 bp, Glycine max
  Intron number 5 from transcript Glyma07g38920.1 (locus Gly ma07g38920) derived from phytozome v7.0 (chr-ID Gm07; pos 43544502 to 43545176)
ctgccctgtatcttatccaggtatctatcttattttctggtctgcactattatggtatgatggtattttcttagttctcatcagtcatttctaatacactcgattaaagcataatgacatcttccctgcaactgtaatatggttgcgcttcactgttttttcttcctgcatattctgtatttttttcatggaaaagtgctctttattttggtttttattgtcacatgatgttgggcagacaccatcatgctgcagattctcattttataacctgctatggcatcaacatttagacgcccaactccacccactttgttgaaacataacagtagtggtcactagtatgggaaaaaagaacaaccgttttgggttgagagctttgatttctagaaatatcattgcatatgaattttcaggagacttgtatgtgttgattgttaaccaaatgttcaaccttaacttatttgatttggaaattattgacttttagaaggacaatcatttttgtgcattagttatggattactatgtctagtttatgcaagatgcttgttgcgcaaagcataaatgtttcaaaacaaacaagaacactttctttgatagttgatgtcaataatcataatactgaagtgtcgctttggatttaggtttgtatttggatatacctctggataa

SEQ ID NO: 17939 - DNA, 920 bp, Glycine max
  Intron number 2 from transcript Glyma10g02440.2 (locus Gly ma10g02440) derived from phytozome v7.0 (chr-ID Gm10; pos 1708473 to 1709392)
tttgtgtacaatcttatcacgccaatcataaatcagttaataataatagtaacatctccacatctttttttatttcttcttggccttgattatgcccttagactcctattaatttgtcacacccttttttttgttgcatttgaattaatatttcaatgtttatcagcagttatctaaaatttcaacatggttgaaggttagagaactcgcttgatttttttgtttagcaacttgattctttgttgtgtttgatgtcatcaatacgcttgggttatgatgattctccattctaagtatacggccaaatgaaaaagataagatgaaaaagatatgacgtgacaactattcataagtgtaggcgggtggagggcccattaccatgcatcgattacgtttatatttattttttttaataaaaaaaacagatgatgatattatatctataagatgattctttgcttgctatatttgcgttgtacaaaaggatcacatatagtgcatgctacctagctagtgcatcttgacatgtatttcatttatatgcatatattcaaatctcattaatcttaccaagctatcatttaccatgccaataccagaacgccaaaacacatctatctaactctagttaaattcgcactattacctcatttatcagataatatgtcatttgtgttcttcctggtggtactaagtagtattagcatgcctacccgttctattaaactagcatgctggtactaagtagtactatgcctgcattccatcaaacactctattgatatatattttttttcttatcacatcacatcatcaattatatcaatccatttttccaaccatatctccaacttgagttatgattcaattagtaattaattaatttcaggtacgtttctgatcttgacgagggcaaggca

SEQ ID NO: 17940 - DNA, 444 bp, Glycine max
  Intron number 1 from transcript Glyma07g06150.1 (locus Gly ma07g06150) derived from phytozome v7.0 (chr-ID Gm07; pos 4867853 to 4868296)
aattgagggtaagttcattttgttgtggtcttgtgggggttctagttatacccatttaactattctttttctctcttgattgtctagtttagttcactttgatctagttcaggttggtctcatttgttatgcaagtacaatttttttgtacgtcattaactgttgtttctcagataaccaaaccaaatctaaattctagcaagaaatttttagttttgtgaatggagtgtgagctctggcgcaataagttatgtcagtgaccggttggtcagcttgaatccacatatgaaggggaaggctgcttacaattactcgctcccgtacctttacagagcgaagagcctttggcattggagtacattagtttttaatttgtgaatgattaggttgtccctttacaatataattagcttattagtgattttttattgcagtacttccaga

SEQ ID NO: 17941 - DNA, 734 bp, Glycine max
  Intron number 3 from transcript Glyma12g08290.1 (locus Gly ma12g08290) derived from phytozome v7.0 (chr-ID Gm12; pos 6048533 to 6049266 reverse strand)
tggggcagatatttgggcagatattcagagtagcggtgaggtgttctgttcagcagggtcattttgtccctctacaattgtaaaaaatccttgcaataaagggtattaatatctatacttaaactttcagttttagaacttgactttaaatttatatgtagccacttggtttctcactgtctataactatatgcttttagttatagtactgttctataaatcttgcaccttgtttttgcttattgtttgttctcttgtcatttatatactactctaaattccttttatatgtggattgtaggtattattgtagaacaggttctactactcaggaacgtaagttttccaagtctattaattatttgatttcttttgtgaattaaatttgtttgtaatcacattttttatggttattctcattctctatgttcttaagtttatgaaatttataaaatgtgaatgcaggggtgacaaaaaaaattgtattagggttgtattacctcttgtgacaaaaacaatttaacatgttactcttaaattgtattatggttgtattattcatttgatagtcatcatgctaattttatatgctatacaactatatatttgttagataccatatgggtgtataagctgatctgtgtggcacgatataattctaataaacatttctcttttctctatttttatcttctccaggttgtttcaagttggcatcttgtgagcctaagtca

SEQ ID NO: 17942 - DNA, 384 bp, Glycine max
  Intron number 1 from transcript Glyma12g08290.1 (locus Gly ma12g08290) derived from phytozome v7.0 (chr-ID Gm12; pos 6049425 to 6049808 reverse strand)
atacgtaagtattatttatgcgcatacaacaaaagttacaaaactaattatttttatttttctatgtacttttgccattgattgacgtatgttctaccgaagatataaggttggtttaatgataaaaaataaaaggaagaaagaataagtcgtgggttctaattttttctaataaaaactaacaaactaataattaatatttattgacaaaaaaaggaggcatgccctactattgctcttacctactatgattgactttgataacttcaaacaaaagaaaatttcatatatgtggtcatgttaatgtgtttgaatgttctaatttcattcatttgttgtgtttttgaagcttgcccattaggctcttattgtccacgtgcacag

SEQ ID NO: 17943 - DNA, 784 bp, Glycine max
  Intron number 2 from transcript Glyma07g40050.2 (locus Gly ma07g40050) derived from phytozome v7.0 (chr-ID Gm07; pos 44349076 to 44349859 reverse strand)
gagcaattcatcaatttcgttattcggcctcccaggtattaattttttccttctctggttggtggcatggcactattaagtaagcaggtaccattgtgatgggtacgggaaagagaatgttaactgtctcatattcattagggctctttctcctagcaagaggattcctattttgttccccaccctagtaattacgtgtgttcctgtactcttttttttttttttttgttcttgttttcatttttatctcttgcctttaatttccttacctgtttttacttttacaaaatcgtattaaattttcatggccatgtcatcttagtggttgagaattaagggggaaagtacttgatatgcaacaaaattgtctttacctatttaatatgttttttttccttgataagcagtgtttgaactagtagatttgtttttatttgattaaatttcctctgtactgtataccgtgttcaaaatgaacttgtctcagtgtttaaacgtttgctcaacccaatctaattagagatatgcttttccgttgagatgttttgaaagttgtgaaacctgtaaaccaaatgcacactcaatcatcttcaatgaactatgttagacagtcttccctatagatcttaataactttttttactgcctgtaaataactatgtaagtggctgtgaatccattgctcaacttgcaattatctttttccaaccaatttagttacaactatatctactttatcacttttacagggcagagtataaccctgatcagtacctgtgggaaa

SEQ ID NO: 17944 - DNA, 709 bp, Glycine max
  Intron number 1 from transcript Glyma07g40050.2 (locus Gly ma07g40050) derived from phytozome v7.0 (chr-ID Gm07; pos 44350015 to 44350723 reverse strand)
tgggtggtaataactcgtacccacttttccatccggtaaagttgtttacttttcccccattctttgcagcttcgttgagaaacaaagtaagaggggaactgcatccataggctttaatgtcgcaatttggatgtgggatctcgtctgacttggaattcgtgcctcttaacttaccccacattttccctttacgaacttttaccattgtaaacaccttttttttttcttcttcttgttttgcatttgggacccttctgttgaattgacgtgtacccagtgacccaagtttgaatttttttgacatttgatatataaagtcgtttgctccctgcaatcatgctacaaccacaaggggtctaaacaaaactttatcctttctctttctctttttttctttggggggagggggtgaatgaaaatttctggttactgtgcttttttctggttttaggatatgcattacttttgagggaatttggatctggaagagcttttagtgcatgaagattcttttctctctctcactctctcttcaattcatataattacttggggaccaacttccttgtaaaatttgaaactttttagtactattagcattgggtttcactctttttatttttttcaatgcaaacaaaagtctctttcttagcttctagttggtgttgtttgtctcaggaatcgggcactggtagcttagctcgtgtaa

SEQ ID NO: 17945 - DNA, 736 bp, Glycine max
  Intron number 1 from transcript Glyma11g17960.3 (locus Gly ma11g17960) derived from phytozome v7.0 (chr-ID Gm11; pos 14431302 to 14432037 reverse strand)
atcgtactgttccgttatcaattctcgtgtttaaggtttggttcccttggaccctgtatttttcaatgtactttgatcacttttttctttcgaagtttgtctctttttttgcttcttcttctttgggtctttgactgtttgctgggtccgcttcaatttatgtcttcttagatgtttgtgtgtgtgttttttttaccagtttttccatccctttggaataccctttattttggattggtcaacttgctcatttttgtattaataatgaaaattgggttctctattttctttttctttgagaaaaaaatttggatgttagatgaagggtttaattccttatatttggttggtggatttttttttttttcatttggaccacctgctttattatctggtaagttatgtgtctcaagatggggttcattttgtttttctttgatggtggcttttgtgctattttatgtgcagacaagttttttttggtttctttcccaaaatttcagatttgggtgagatattgattatggagtttaactggtgtgatctctcttagatgacactgtaatgtggcttttgggttgtgtctttatatcagtttgttggacaatcaattagtatcagtttattaagtacctttgctatatgattctaaactagattttttctgtctcttaccatctttggctggttccaagattcaggacacaatttgcttgatacattttcaagttttcat

SEQ ID NO: 17946 - DNA, 557 bp, Glycine max
  Intron number 2 from transcript Glyma10g35930.2 (locus Gly ma10g35930) derived from phytozome v7.0 (chr-ID Gm10; pos 44150538 to 44151094)
aacaagaaaacataatcaaggtaccttttattctttttttactttcgggttaaactaaaccattcacttgtgtgtacaataattctctttgttacaagttttaatcttgtacaagaaaactgtgatttgtccctacaaatgtataaaggcttacttttggtccttgtcgctaatattattagacaaatctttctggcagtatttttttttttttgatcagcatctttctggcagtataaaaccattagaaaaccaaaacttaatttttacaaatgtgagactaaaacttaaaatgaggacaactgcaaggactaagtgaatagtttaaccttacttttatcaggtgttggtgaagttttcttcttgttcgtttggaattttgggaattttttaggatagtgaatttttgagaattgagacatttaaagggatgcagatgtttggtaaaaatgttgtctaaaagcttgaggagtagctgggtttatttattcagggcgtttgtttgttattcgttaagtaatgcttgatttctctctcttttggtttgggcctgcagg

SEQ ID NO: 17947 - DNA, 493 bp, Glycine max
  Intron number 1 from transcript Glyma05g34120.2 (locus Gly ma05g34120) derived from phytozome v7.0 (chr-ID Gm05; pos 38541144 to 38541636)
ggtaagtcctcttcatctcacccccagttccaattcctcaatcgttgtttccctctagatctgcatgttcccacttttcgatagatctatgccgctttatagtttacggttaaccctaccgatcggcgcgattttcttttacttttctttctgctcaacttcaattcattgagctcggccttgccatgtagtatatgttattgcgtgttacagtactttgtttgtatttcaatcttatcaacttctcttggttgtaagtgattttttttgtggcagtaagctgagttgcatgttactatgggccagtgacttgatttataattgttttcaatttcattcataccgaagaaaaagaataatttaaagaaacaaatgaattattgcttttcctgactcaaacaaaagcgctctactttgggggagtttgatatttacgtctgttttgtttgaaatggtagatattgaggaggacatccgttctttacagctcgat

SEQ ID NO: 17948 - DNA, 499 bp, Glycine max
  Intron number 2 from transcript Glyma13g29320.1 (locus Gly ma13g29320) derived from phytozome v7.0 (chr-ID Gm13; pos 32247428 to 32247926)
gcgtggtatactttccacaaggtcacagtgaacaggtgagtaaaatatataatgatgtttgattattgtatttgatttgctactaccccttgtggacattgtggtaacattctcttaactaatgttgagagaataaagtaataatgcgaatcttgtgtgtttctgggcatgaggatgatgctctcttgtctcttggctctgtctccgtattgcttctaatttggaggatggggtggggtttactcttacacttttgtttagcaaaacctgtttttttccttcactctggggaaccatgtgtggttttatgcttaactggttcccaagctcaattctttagtcttgaaatgttgaaaggctaatcaagtaacttcacttacctcctcccagaaaccaccaacatgaaccttttctgcataaactacatgcacatatatatccttactctggcacttttttttttcttctcaggtggctgtgtcgaccaacaaggaagtag

SEQ ID NO: 17949 - DNA, 633 bp, Glycine max
  Intron number 1 from transcript Glyma08g06280.1 (locus Gly ma08g06280) derived from phytozome v7.0 (chr-ID Gm08; pos 4460250 to 4460882)
aacaacgcaccattcgataacgtcttctggttcttgtaagtctcctctctctctcgctctctctctctccttttctccaaatcttgtattcatattttgatttttttttctattgactattgctattgatttatgcaattttttttctgaaatttcgggttgattattatgatttgtggctgttttttcattttttttttcattcctatcttctgaattgtatgttaacttcaatgttttatgctcccttgtcgtctcatgttgtttggttgctgagaaactttaggaaattttcagaaacctagaacttccactgctgttactattgttactactgtttaaaaccacgttttaccttgattttcaatacgaagatataagttttctgcaacccagttgtttatttgagagaaagttgagatttttagattttttcttctgttggatgtttgtttaagtcttttagtcactgttttgtttgcattttggtgtttggtgtgatgaaataatggtgttagttgttagatctccctttggtgttgtgatcttttagctgtagttatcatgctgagttttgggtcttgtgttttttcttcagtaaagaagaaacctttctctttgcgcgtgtcccgt

SEQ ID NO: 17950 - DNA, 702 bp, Glycine max
  Intron number 2 from transcript Glyma12g12190.1 (locus Gly ma12g12190) derived from phytozome v7.0 (chr-ID Gm12; pos 10339967 to 10340668)
tccgcaattcagatattcaccagcaacactttcaggtatgttttacatatatgcacatgaagataatctatatcagttttgtgggggttgttgttcaattttttgtagttttgaatcaaatcatggcctgagggtattcgttgatgtaagaatagtcatataagcatatttttatcaccaaatgggatatttggtacccaatggatatgattcggttggcaacacacacggcaaggagctgtattcaatttctacctaatatatcttcagatgaaactttttaagtgtgaccaagaattagtgaggagaatctgaatttacagaacacacatttagaaggaatttaagtatgactgaatttcgggtaaaaaattagtcctataacaggtttaaagggccgaagctttagaaatacctaggagttctacctgagagtcaaaaactccaattatgtagcttaaaaaaatgactctttgtatcaatgttcttatggtcatagttctatgatacctgttgattagttgtttttgtttcaagtgattttgtatattatggttcatggttctggacttcatgattgtttgtaaaaaaatagtaatatcaatctttgatgagagggaacaggatgcatagatttgaattgagtgtttgtttctttcttattcagggaagagaccgagtcaggtgagtgtgagacaaggg

SEQ ID NO: 17951 - DNA, 652 bp, Glycine max
  Intron number 1 from transcript Glyma06g03300.1 (locus Gly ma06g03300) derived from phytozome v7.0 (chr-ID Gm06; pos 2330819 to 2331470)
gtgggcccaccaaggcgaaggtagcaacatctgaaataaaagctcatgcagataatttatatgtgagtgaggtgaagcatatcatatagtagattcgtgcatctattcctcattaactttcctttgtcttttgagaatataatgtgttttgaatttttaccttagcattaattttttcttccgccgacgctccgtgtgtctgctacattattattaaccaacaccctgaaagggatttgacccttaacctgcgtgtcattcaccccaaagcaaaacgttataaatattcaaatttatctctgccatttatttctgtttcactaccacttccatcttcgttgacatgtctaccaatctctgttagtaaccttcctttttctttttcttttttctttcttgatagaaattgtatcattataggaatttttcatcgttatttcaatgtttcttggttgagaatttgcaccaagattccatttcttttatattaaggtttaatttagctgagcatagtgtgattcaatggattggatacttgtcaagaagttgagtcttcatgaaattaatcctcagaacttttgttactattgattaggctttgaaggaatggatgaaaggcgagagaggaagttgagttttgagaataattctg

SEQ ID NO: 17952 - DNA, 593 bp, Glycine max
  Intron number 3 from transcript Glyma10g40810.1 (locus Gly ma10g40810) derived from phytozome v7.0 (chr-ID Gm10; pos 48086060 to 48086652)
tatttttggtgcaggtatgtcttcaatataaagttgtattttttccacctgaacaacaattctatctgtttgggacaagttttgactactgttattttgtggagcttaacattacaataggattgaaaacagaaacaattgaactctcataatagctatatgtaaaaatttacccccttggattttcaatcaataattataaattataactcctctacactttcacctctgaaatgcaccccttactttagaggtgtcaaatttgaaataatgtaaatgacttctggaaataggaaggctttgatgttgtttagtatatttttttcccatcaagttgatctgtttagtatcgcataatgaaaatagtagtactttctaatacactttctgtaatgttgccttgtttattgttctcaagatttttctagtacacctgcatttttgcaatcattgatcctagtgaaaatatttccatttaaaatgagaacaaaaatcaaaataatgtttgactgcttggtgccactcatcaagaaatgacttattgtctttgttgtacaggcttcagcgaacactattctttctcatttccttgg

SEQ ID NO: 17953 - DNA, 608 bp, Glycine max
  Intron number 2 from transcript Glyma08g21740.2 (locus Gly ma08g21740) derived from phytozome v7.0 (chr-ID Gm08; pos 16540825 to 16541432 reverse strand)
ctcctgctcctgctccaaagtaagttttcttcatatgcctatgttttgaaccctgtttgaataaactgctccacaacgtaaacatttatagggaaaaaaaataaaaaataagaccgtaaaatgaattaagcatttgagcttctcctataaatttagattaacttatccacttgattttttataaaagttctctagtttatatgtccaaaaattgaagtgcatgaattgattttaacctgtatgacaaaaattcaatttattttattttttattatttttgtctcttgtgagtgcttatataaaagtttatctaaacataatcagttcatggttttgttaaagcttattaaaactaaggtgtatgaaactgttttcttttagtaagaccttgttaaaacattcgttgacgtattggtctactgtatttttattattttttgttcaatttttactgatttttttatcctattttcagctagatgtattggctattgaatttaatttatggatcttttttactgtttgattattgatacttgcatgatagagttttctatatgggggtgacatatatatcaaactttttgtggcagagcacaagttgtggg

SEQ ID NO: 17954 - DNA, 284 bp, Glycine max
  Intron number 4 from transcript Glyma09g03890.1 (locus Gly ma09g03890) derived from phytozome v7.0 (chr-ID Gm09; pos 2815395 to 2815678 reverse strand)
gagaactaatttgcaaagtaaatacttctttttcctgcttttagacacacttaatctatgacatagtatacaatttcaacttgctttgagacggggaagagtctctcaattctactattaatcgaaaactactgattaagaaagtagaaataagtgaatgcattcttaatttatttatctttgactttccaaatatttatctagcaaaaaaaaaattgttactaaagaaaacatatatgtttcttgcagcacttaaatcgtccaggagttagtttttgtttcca

SEQ ID NO: 17955 - DNA, 971 bp, Glycine max
  Intron number 2 from transcript Glyma09g08190.1 (locus Gly ma09g08190) derived from phytozome v7.0 (chr-ID Gm09; pos 7255529 to 7256499 reverse strand)
gctggtaagatattattctagttgaatttgaagggagaaagaaacttgtttgtgccatcgctgatgctttgtttgagttgtaaagggagtaataatgtgattattgcatttacaggttgtaattaagtgcttattttgtgaaaaaagcttgtttggataagtctcaatgtgaatttgttgaaataaactaaagaaggaaaacaaggcttataggagggtaaggtttaggcaaacacctatttaagggcttgtatgttaagatgaactcgaatacgttcaataaaagttcttccaaatgttccctctccgggcacggcttgtttgatttattgtgtgtttggatacgtgtccccaacccaagtctcactgctctttccatgttagatttgactatttgagaaaaaaacgtttaagctgctctttgtagcttctgcttgacgtggattgcttgttggcaattgtgttaccaaacatgcatttaaagtctggtagaattgattttgatagaatcagtttttaaattgttgaatgcagttgggatgtgtgccaaattaattttactgcatgtttggatgtggatacagagtacttgatgtggtggaagcttggtacattagcttctgtcagttctgtgtcttatttcactttttttacataaattttgactagagacttgaatttttttatgttgaatcaaacacactagtattaatcatagatcttatactgaaatgtgtctcatggtgagagaattggttcttgtagtttgctacatgggcacgtagtcaatctacctgacttggttttctgctgccttgaattttgctggatcactatagataactttttaagaggtcaattgtcatgttaccatagtaacagatttgaaagagcctctagaatttggattatgatcttaattttttcagttagtggattcaaatatttaaatgttaataaccttctcagga

SEQ ID NO: 17956 - DNA, 612 bp, Glycine max
  Intron number 1 from transcript Glyma13g25410.1 (locus Gly ma13g25410) derived from phytozome v7.0 (chr-ID Gm13; pos 28654535 to 28655146)
tcagacgacgatttcgagcctcaaattttcaagtgtgtaagtctgcccatgtttgtgtgtctaatgggtttacccacagcttgcagaattttaatttcttccatatgtattttgtgcatgactgcttgcttgtacctaatattatagagaactttgattttctaaatagtaatgctttggcatgattctatttttggatcattgtattttttagttagaaagtcttagaagaagaatcttggttatgttcctcgagtctgatgaaattcacatttttttactgcatctacattcgattagtttgtatgtgcagaattgcattgagattaagtacaatctttcatttttaaatcaccgtaagactggggaatattagtgttaaaatagttcttattatcatccaacgtcattctttaggtatactgtgatgtttataaaaataaaaagattaggaaaattataacaaacatttttgctaaaacaatcttgatatgttttctgaaatacatggatcccatttctttttgaaatactgtcaaatatggattacaaatgatttcatgttctcttattttcatgtcataataggctgtcactcgggtaaagccctcc

SEQ ID NO: 17957 - DNA, 539 bp, Glycine max
  Intron number 2 from transcript Glyma07g06780.1 (locus Gly ma07g06780) derived from phytozome v7.0 (chr-ID Gm07; pos 5462172 to 5462710 reverse strand)
aaattcaggtactcatccgtttatgttttggtctcatttttgctggaaaaatagtacttttgaatttaggcagaggaaaatgatcagggaaccggctaaatgaacaatgtctccctatgaaagtatgatatgcactagtgtgggattgaatatggtgctttatttctagaagagagggagaacacaaacaaatagatatattgacttataggttaaatattactctcgagtgcgtgtgttgcttactttactattcaacttttaaaatgcctcattgcataagtgaagatacttctacaagatattcattcaacttctatgtagagccttgctagacaattgtttgaaaattgaagcatttacgggtttaaaaatgtagactgatgtccttgagaatgttggcgacttatcaaagtgaggctaaaatatcattaagaagatgttcacctccacatcattttccatattttttaattatttttattatgtttattttagctcaaatattttctatcttttgcaggttttttcacttgaag

SEQ ID NO: 17958 - DNA, 780 bp, Glycine max
  Intron number 2 from transcript Glyma08g46070.1 (locus Gly ma08g46070) derived from phytozome v7.0 (chr-ID Gm08; pos 45287093 to 45287872 reverse strand)
ggtggcaagaaaaaggcttggagaaagaagagaaagtattacccatttttctaacacttttcttttaatttcattttttttgtctttttcttgaagttgcttatttttcgtcttgcacatacgatgtggtttgaataagaatgagaatggtttcaattcatctgtgtaaagtggctgttgtgttttatttattttagggcgatgaataagttcgtatctacaagtgtatttgcctgatctaggtttagtcattttcgatttttatatttcataaggcaaatagggatttcaaatggttaccttagtagtaattcgaattaaagtcatgctgaaccaatccaaaaccctctctggttgagatttggactaagatttgaatttatttcatttacaaattagaaatttagaaaggtgtttttcattcttgtttctcctgttcacaaccagagaagcatagaagactctgccgattatattctctatactccatagaaaagaaactgattgtgaggcacaatagtgacatagcagccacccaatttcactgcaagctgaattttcattatctctgccttatgaattattgttttttgcatttaaaatgtggaaatattctcaacgtttgcaccttcgtttggatctttaatttaatggagattatttgaacctactatggattattatgtgtttcttgacattttgtttgagcatgtagtgatgttctatcccaatttccgaattagattatctaagattttttttttctggtttcatataggt

SEQ ID NO: 17959 - DNA, 388 bp, Glycine max
  Intron number 1 from transcript Glyma13g21980.1 (locus Gly ma13g21980) derived from phytozome v7.0 (chr-ID Gm13; pos 25544448 to 25544835 reverse strand)
agcgttttgtaagtcatattatacttttattgtttaactgctcgtttagtctttaatgataaacaaatattatcttctaggtccgatacttaaaaaccattcattttaatctttacacgtgtcatttttattttggtttagtccctgtacatataatttatctatccattttagggactagaaaacattaaaaataatagtataatgatgatttttaaatatagaaactaaaaggtaaaatttatgtaagtataaaaatcaaatgagtaattaaacttagttttatcacgatacttctattgttttttcttttgctttttctcgtttttattttctaatttttattggtttaattgcagactcgaattttcgacaataagactgattc

SEQ ID NO: 17960 - DNA, 939 bp, Glycine max
  Intron number 1 from transcript Glyma12g13280.1 (locus Gly ma12g13280) derived from phytozome v7.0 (chr-ID Gm12; pos 11604012 to 11604950 reverse strand)
ctggttcgactccgctctctcctacgctccttcgcgtatgttcttcttctctctgattctttctcactttacaatctacattaatcccttactttacgttctaagtgatgatgataataattataatcattataaggttaggaattagaattgagagaagttagggttccattcttttgtctggaagttttgattcctaggcgattaaattgatcggaaattttggaagactggaatttcagttgaagtggaggaaattaggttttcttattggtttgatagttttattttttatatatgtggaatcgcatttttatcaaacaggagaaacaaattgttgtgttaaatgacagacatagttgatgatattatgatgtgaattcttctttcgttcactatttcagtttgtcctatactgtattatgaggttgctttgttttcaattgcttctcggattttagttgcgcgtggttctatgctattggcttaagctgaagcttttcgttctcagctttgtttcgaactctgtaatttgtctgataggaaattgatattcaattcaactccttcaccccaacacagttcaattaagtgtctggactcttggggttatatatgtatgttgtgaatggtgaatggctcttagcctacatgttgtctcagaaggtggtcaagtctgttatttgtttaataggaaattgaaattcaactcttccactccaaaataattcaattaagagtctgagggttatatgtgttgtgaatggggaatggggaatagctctcagcctaaactttagtcatttttcttctatatgttgtctcagaaagtggagtaagtcttgagcctgacacacttttaattggtttgcatttttttgtatgaaagaattacttagttgagcttttttgggttttgatattgttgttgcagcattc

SEQ ID NO: 17961 - DNA, 1059 bp, Glycine max
  Intron number 3 from transcript Glyma12g12790.1 (locus Gly ma12g12790) derived from phytozome v7.0 (chr-ID Gm12; pos 11088505 to 11089563 reverse strand)
ttacctccttgagtgcccaaaagtctattactaaggtgagaatcttatttcaatgctattacttttcttaagttgggatcattgaactgtggaaagacttcacttggtctgtaaaatggctaaataactgtattatgccgggtattacaaatcattggtttaaaatgttatattgttcatggacatgttgaagacttttcagctttgttcttgttctccactttacaacttaagatagggaaagactgggcattctgtcaatgttgaatacacatgcttgctctcacagtcataattgggcatttgtgtaattttgttgctgaaagaaatattaggatgatatcggaattttgatcgtgatgcaacatacaagtaacactcatttgatgtggccacacatcataggacttaaagaacacgcaaggacattctataaaagtaacttgttgtattgattaatatgaaaagatgatgatacaagagggaactatatgtatttataggagtgtattgaaaactgactaattgaccaactgactaatctcaactaatataactagcaatgagtaacagaggagttttaatttcattttaaaaagcatgtatactcttcctacaagtaattgttgatgaaatgttgtgtacacagttgatgcattggcttaagatgacttgtatacctgtttaatattgatttacaggacactggatttgagacttaaagaaattttaaaatagaataacgttttatatatatttttttctttttaaaggtagactttcatgttccaatgtaatgtagcaaacttttaaactatcttgaactgatggcttatcttttatggattttaccagttttcttaaatattttggacgaatctttattgaggatgtcctgagatttgattgctgtgttgttgtactgaccgagttttgtttcatgtaagagatatgtgctcctctagttttatcacttttatgtgtcctgtgttattgattttctgaaaatattgtcttttgtcagaaaaagaaaaagagcaaacaacaaaggcggcagaa

SEQ ID NO: 17962 - DNA, 960 bp, Glycine max
  Intron number 1 from transcript Glyma13g16710.1 (locus Gly ma13g16710) derived from phytozome v7.0 (chr-ID Gm13; pos 20631467 to 20632426)
ttagaccggaagatcgcgccgcattaatcgccgtaaattctccctattctctctccatcgcttcgttgcttttcctctgactcctcgagctgctccgttgaatctgttcgacttcgatttttttttttttttggaaattcttccgtgtgactatgatttgtttggcagatattgttttgtttctagactaattttctttttttctccgcgtttggatgcttctgattattattttttaatttctcgaggtgaaagttatgttagtcgatccacgcattactaataaaaagatcttgtgaaatggagtttggcaaatatgaatggttgatgaataagattggggtaattttggttaggaagtgtacatatttgatagcttagttgcctgaagatactatttgattaatttagttatagagttttacgacatagattggtcattggagggaagttgaatactaagaaaaataaaagtattcgttattcagcaaatgctattgaatatgtatagatagctagctagcttagctaggatgatttggtatcaagggaagagcaaccgtaataaagccatccttgcgagaagttgttctttcattatggtatttcaaactgaaattgaaaatatattgacgaaactctgagttaggtccgatggcatctcttttggcacttgactattgcttgactatcaatggctctgctagttcaaaactgcatggtggtccagttacatgcacgacaactttggtgaatgccaacactgttgcttgtctttgcacatgatacttgttgacaaaaaacaaatacaaaattacattaactgataagcatccaagcactcgtagaaccctcccttaaaaactagctatgaagggggaaaaccctagcaactttagtacatcactgagcatcctgtgacatgggactcaggcaccccataatacccaagtccttatc

SEQ ID NO: 17963 - DNA, 304 bp, Glycine max
  Intron number 1 from transcript Glyma07g32000.1 (locus Gly ma07g32000) derived from phytozome v7.0 (chr-ID Gm07; pos 36939239 to 36939542 reverse strand)
tggtgattcaaacccccaccaccatggattccttaacaacaaacttcacaagtcataaccaaggtcaatttggttctagttcctagcctccttcgcacctactgtgcattatcgacgagtgaggagaaggccataggaaaaatacgttgttgagattaaaaaaaaagcctaacaagaagacacgcgtgtggcttggtacctttgacttcgccatagaagctgctaaagcctatgacgctgccaccatcaagttttgtgaccctgacaaggccagaaccaactttcctatccccaaaattcacaa

SEQ ID NO: 17964 - DNA, 825 bp, Glycine max
  Intron number 2 from transcript Glyma06g07000.4 (locus Gly ma06g07000) derived from phytozome v7.0 (chr-ID Gm06; pos 5061087 to 5061911 reverse strand)
gtcgagtgaagatccccagtaagttcttacttttgtttcatttatttatttaaatcctgattatatttaggtgtgtagtccgttcaattttagatgaataaagctattgaacttcgatctgtgaatgaatcgtgtgcttgttgtgtgtctatggctaggttagcagtttaatacaagataggacaatataggttgtgccgtgtcatcaaaattgatttttcgatagttgtgagttgttgtgactggtgatggtacatgggtaatcactctgttcaacctgttcgtacgaatttaccagagttatttgtgctaatcgaaatttacctagtttgaggttttttcctggttatattttttcttctgtcatctccaacattttttttccttgcacagcatgatcttttctttttttctttaaaaaaaaattcctttgggtactgggtcctgagacaaacacctcattttacttgacaacaaatcttgtcatttttaggatgtgaaatttaatgtggcaagagcttaaaaatttacatctgaattaaaatgtggatgagttcaaagcttgttggttgcttatgtctcatggtgtttaatcaagtcaaatttagccaggttttaggaaagtcgatggtttggttaccaggagattgaaatggcaaaatttatttgtttattattcttgatgcatactgtttgttgcatatctattctctgactgcacatgggtttgctatagcagtatagcctatgaatttgattgtatattgatattggtaagtccttgtggcaggtgtgggaacaaaagattatattcttcctggaaaa

SEQ ID NO: 17965 - DNA, 1003 bp, Glycine max
  Intron number 1 from transcript Glyma13g38450.1 (locus Gly ma13g38450) derived from phytozome v7.0 (chr-ID Gm13; pos 39227249 to 39228251 reverse strand)
gaaggtatttgccaaaacttgaatttatgaagctactaagatgctgcttctttgttcaatttgaggtcttgtttttgaggaaaattcttattttcaaattagacttcttgcttttgtccattgcctttttattactcggtgcctgtttagattaatttattgggtcatctttttacttaaaaataagattgtttcttcaaaattaaggatcagcaaacatgctcttagaattcaggcaatatggatataatcttcctgtcctcgcgcttcttcacatggtatgtttcattctgtgtataattatgatcaattttgtaacttaatgaattgccatgtttgagtgtgtttcatttcaagagtatccttcagtttcttgcacaataactttgctttcttatcagtcttgctaaatcataatctgctaggcagtactgtgtgtttcattgcacgtgaaatgcctgatgcttctggttttgttgctgcgaaactaggttaggttccaaatacatctaggtctacataatcacagtcctattcgtgtcaaagtcagtggatagccaatcatttagagaacagaaacctgaattttgaacaaaggcctagaataagtacttataaaagaaaataataagaagataaaatgaatcaaacttctctcatcaacttatgtattgcaactttttaagaagttcttccattggccttcttcagaagttgaggtatataaattagttttagtttatagtagtccgattcatttaatctaatattttcttgttctgtaagtaagtactagttgagaagtttatctaaactgatccaaatcccattcattaacatcacattatgccatttgcatagctattaattaatgggacagaatttagagaagaatttctgtagactatatttgcagattctctcttatagtcccatgtgtgtgaaaaagaagtgaacaaagcttcattgatttttcttgatcatgtatgtagctttgcagttg

SEQ ID NO: 17966 - DNA, 898 bp, Glycine max
  Intron number 1 from transcript Glyma10g39680.1 (locus Gly ma10g39680) derived from phytozome v7.0 (chr-ID Gm10; pos 47312020 to 47312917)
tttgcggctagggtttggtgagagggatattgttcatgtgagtatttgatggaaggaaggagatgatgagtttttcaaaaggatactcgctcgctcgctggacactgtatcctaacggttatcttcttttgacttttgttttcagtggccacatcacatggtttgtccgtaatttaaatgctttatgacccactattataaagttctacccttattttatttgttaaaaagtatggtatgtattaaatagataaatataataacaacaaatatttcatttttttctagctataaaattcttttcagaaatttatttttctttttttataagatttttttaaatgcattaattattatttttctacatatttttatttaattattttctctccaaacattaataagaaataattaagtgaattaagagacaaaaatgataatatttaaaataatagtataactatagtattttatttgttaaaaagcatggtattaagtggataactatagtatttttgcaggtatatggtttcttgagatgtatctgatagaaacccattagttagttagctagttacattatttagttagctaggttagctggttgaagaaataaggcatgttgtccataaaatagaagagggattgagaggagttactcaattggtgagttactattgtggctagggagagtccgagatatctcaaatatctagggaatttgtgcattctttctgatcatcaacaacagtgcttccttggtgagcttattctgaaccagtttctatcagtatcttgagagaatcaactaatgtgatacatttgcattttctttgtttatgctatgttgtggacttgctgatcaaagttgttttgaattgtggataggtgtaaggtc

SEQ ID NO: 17967 - DNA, 990 bp, Glycine max
  Intron number 1 from transcript Glyma12g15440.1 (locus Gly ma12g15440) derived from phytozome v7.0 (chr-ID Gm12; pos 14292820 to 14293809)
ttattaaatcctgcatcgattcaataagacaggtagcacaagccttctgaagtagaatgttcaattaagttcaatttcatgtctgattttgttttcgtggaatgattccactggggtctgcaatgattataattttaattctcgtaattttgcaaaattaagaatcaattggatatagttataagaaaggaatgcttaatacatgttttgttgcatgtatcgttttgaatgggaagttttctgtacttcattagccaaattcaacaatgggagagattggatgtatattggtctacattagtgtccctggacatctagataaaacttgtgcaaccatttttagattaagaacaatgaatctgattcagtttaatgcagtttaacttaagagtcatggtatgaattgggtagcaaggttttaaattgcgttttgtggttttgttgctatcctcgatattgctgatacaattgaggttgcatggtggttgtggtgaccccaaaaaccacgacattgcagcagaaatcatggttgcaaattgatttttaaaaccttgtttgggagctgtatcagtggaccctccattagctagaatttgtgtcccaaaaggaaagaagttttcaccttctgatattgagattggaagaggtaatcttggtatgtttgtatagctccagggaagatagcttcaagaatgatttactgttgagtttcattttcatttgaatctataattttattttattttattttgtacttataagtaactctttgtttttcttctctttaacattgagtgaagttattcttttgtaggtttgtggccattatagttacagttaggcatcttatgctgcgcctaagaatttaaattttcttctaaaaacattacctagcttacaactgttactatgtgatccttttcatttaagtttttcatgaattggtgtgctcttttttttttttttttcagatatcagagcatattcaag

SEQ ID NO: 17968 - DNA, 901 bp, Glycine max
  Intron number 1 from transcript Glyma09g37130.2 (locus Gly ma09g37130) derived from phytozome v7.0 (chr-ID Gm09; pos 42688163 to 42689063 reverse strand)
aaagaggcaccgtcgcgaacccctgactcccttaggttccttacattcctaattttgtttgatttttagaatgcttgctgtttactgcagctgttctgtttagtgtttgattattaattcctagctgttttgtgtttgatcatttagtatatcaataacatgattaccaaaaaaacacagcatttagctcaagtttttttttttttgtggtgaatttagctctgtaaggtgagtgagacagatacactgtaaaaataaaattataataattacattaattgggaattagcagttgagctttttataattgtagtttcatgtgtatgtatttactatttaataacaatttcaaccgccgttataaaacaccttctcactcacgtttccattgattctcaatttaacattgtcgccactcaatagttttgctctgagatttttggatgttttagttactcacacaacctgtttgattaaatgtgtctttaactggttgtcttgctgtgttacttacttcaacattctggattcattcaaactgctttggaatggattttgatcagctaatcgaaattgagtgtgctttcttcaatcagctttggtattcttttgttttggcatgcctcattctcattcttttctaattatctttcactttgtctttttgtttcttaatgtcctcattttctgttctaaattcttatttattcttcaattgaaacttgaaaagttagcatttatgccgtaagttattattgttattgttgttgttgttggtttaagatgaacgagaaataagtctgagaagatgctcattttatctttttaacttttaattatagctgacctctttgtcatttatgaatgtcttcaatttcattcaattacagaatcaaagcac

SEQ ID NO: 17969 - DNA, 664 bp, Glycine max
  Intron number 1 from transcript Glyma13g25240.1 (locus Gly ma13g25240) derived from phytozome v7.0 (chr-ID Gm13; pos 28474013 to 28474676)
tctatttgaaagttaacaaacctcttaccctcagggtagatttctccatttaattttgatagttgtttcatgtcttgggagttcttaataaattgtaactagcacatgttatgatttttttttaagttgaatttttactcttccatcctaatgattggtatgaaaattttcttttgttcagagttcaaactccatataattcatgaatatcttttcaactaaatagtctatgcactttacatgtcatctagttacgaatggtcatatatggtatgcttgttgatttttgcttaaaatataccaactgatgatttaaatcacacaattccaaaggatacagttacataatttgaatcttttacttgatattgaaattcggagcagaaagtatgttaccatgaagttgatcaaaatacttgtttgtatgataaacaatatgggtctaaaggcagggtggggtctcttctttgtctgatttcttgcatgggaagttttttttattgatgaattaagcatgttctcgtgtacttcatttggatggtattggtttatgcaaaaattatcctttttgataatcaatctaatgatgaacatgggaagcaaatgtttctttacagtacaacacttcatattctactccattggtctttgttgcagtttgaag

SEQ ID NO: 17970 - DNA, 794 bp, Glycine max
  Intron number 3 from transcript Glyma10g41050.1 (locus Gly ma10g41050) derived from phytozome v7.0 (chr-ID Gm10; pos 48257821 to 48258614)
aggaaacattgtcagaggaggttcctgtcgaggaggtatgtctctgttaaatttctttctctcttggctgttaaaatatgtagctctcccattggattctgtaattttattctttttctgtcctcaaaggaggacacattgttttatgtttactattttttgttgcttttgtttgaattttctctttgtcaactgctatatgttggtgtcattttctgctatttcttacaagaaataaaaggataaatgagaagggaaggataaaataactaggaataatataaaaccaaagaagaaatcaaagcaaagagaaacttccttttccccatatatagctatcactcaccttattaaagaacaatatgaattaaaagataaaatgaaggtaaattggaaatattgtcagattttatccaaaaactaaaaaagatgtataaaatagttacacggttagctaattccttttgaagataaaatggtttgatctgttggccttcttctgcaggagaattattttatattcataattcatgtatttattacattattcatatatggattttgtttaagataaaagtactgaattgggaacaatgtttcaattttcctgttggcattccaatagttgaagtgcctgtctatttgtgttctgtcttaaatgtttccatttagtttgcagcttgtcttcatctttaaatctcagccaatgtaaagtgataaaaggactaagttgtttgcttctttttttttttttttcagtcaaagaaggcaaatcctaaggaactgaatccata

SEQ ID NO: 17971 - DNA, 284 bp, Glycine max
  Intron number 4 from transcript Glyma08g32320.6 (locus Gly ma08g32320) derived from phytozome v7.0 (chr-ID Gm08; pos 28465134 to 28465417)
ctaggcgtttaatcaaccaggtttctttttatttcaagtttcaaaatgttattttgtttttttgaatgtttcactctggaatatttgaagatcgaatggtaggagcttttagaccaattatcaacaccattgttgacttatcagacatgagttgtaaaagtggcttttattttttttctttgtaatatggaaggacatacatatgtgtcagcctccgacatatatcaactaaacactatcataattaacattaggtggaccgaaagttggtgaagcaaacagtg

SEQ ID NO: 17972 - DNA, 581 bp, Glycine max
  Intron number 1 from transcript Glyma07g07500.1 (locus Gly ma07g07500) derived from phytozome v7.0 (chr-ID Gm07; pos 6184565 to 6185145)
tggaacccatttcccatctcccccttccaaataaggtactttttttatattccctaaacaaaaaaaataaaggactgtttcccttttccaccgcaaagtttagggtttatgccatcaattttgattcaaataggctttgggtactcatctgggtcatggtgtttgctctgttttgttgtgtctggtgatgaatctcacttcgttgtttggttgctactgtgttcttgttgattgtgtggattggtttgttgaatggaaagtttgtcttttgttgaaatttgtatgctaattgtgtagtaacatgtttttgggatgatcatgaattaggttaaggcatttgtaactttttgcaactgtactctataaatctatcttgtgtaataaagactgtatgcaatttgttatgttatttatttctcaagatgaagggcttggctgttatacaacagtgtaattgaatgtttcactttgtggtgtttgcatgattttaatgtcattgattttatggccctatgggatataagtttgtttctaatgtgaaatatatttgtatgtactcttctttgacttgtggtagcaga

SEQ ID NO: 17973 - DNA, 704 bp, Glycine max
  Intron number 1 from transcript Glyma06g48230.3 (locus Gly ma06g48230) derived from phytozome v7.0 (chr-ID Gm06; pos 50496820 to 50497523)
ccacccacgacgatctcaccgattccaaatctcacgtatgcactttctcaatctccctttctgcttcactaattaattacttttctctttccctccccttttttgtgtttatttctgcgccgtttcatgtcgatgcgcaattagggtttttctggctttctccctttccctaagctctggggtttcggttcagggtttttctgtttcccctgtttttgaatcttaacaccactgttgcgtgtaaaactgactagagctgtgtaggttattgggagatttggggttggattttgttctctgatttccccctttctgtgtaattagagatacttaagttctgataaggtctgtgctttgtgtactatgctgctgtgtcttttcttgccaagctatcactaaaagttgatgctttatcatatgattttaaatataatatcaaatataaatcattaaaaattgggaacattggatttggctgcttttcaggtattttatgagcgattgtgatgtattctttgcagattggtttgtgactgtggcttgtgtggtgcctgttgtttggttcttgtatgctcagtgtgatgctgattgtgaagcatatgcttgtttttcactctacttttgtatgcatcattgctattatcaagtttgaaagataagggtttgtttactctctgttaatcttttgattttcttttggaagc

SEQ ID NO: 17974 - DNA, 377 bp, Glycine max
  Intron number 1 from transcript Glyma08g06880.1 (locus Gly ma08g06880) derived from phytozome v7.0 (chr-ID Gm08; pos 4933280 to 4933656 reverse strand)
gtttacaccaaagaggtaaaaaaaactttttttttttaactttttcgttaacagatctgtgcttgaaataaaaggaagaaaattttgaatttttgtgatatgggtatgtgttatggaaagggagtaagtccgggtatgttcctttttttaattcttttcaattttgtgtgatattggggtgttttttgttcttttaaatgttggtgatggatttgtgttgttgagtgttgtgttattcgtttttgatgatcagggcaggtgtagattaagttgaaatttgaaaattcaatgcttttgtgtatttgaaaattttcttgatctgtttaatcttgtgctgtgtaggttactggctatattttgtgtgatcaacttgttaa

SEQ ID NO: 17975 - DNA, 464 bp, Glycine max
  Intron number 2 from transcript Glyma10g06010.2 (locus Gly ma10g06010) derived from phytozome v7.0 (chr-ID Gm10; pos 4753449 to 4753912 reverse strand)
ctgcgaaaagtatttttatcttaattttcttatcttcccatgtttttttccccttatttcatcaaacttttggtctaattatgtgtctctgcttaaaatttatgtgttaccaagttatttatgtccaaagaggtctttctcctgtttattcattttatattggtcttttcatatttatctggaaggatgaattcttcgtttcatgataggcatgggtttgtttgcctcctcatataattatatgtgatagaacaaattctcagtttgagaattattgttatgatatactagtgccaaactgaaacagccaactttcagctaccccaccttttattttgatttttgttattattgttacttgcatatattaccgcaactaaatcttttttgtacactgatcaatgctgtcctcttcacgtctattgtaagaaaaattggctaggttgaagcaagccaaggaagag

SEQ ID NO: 17976 - DNA, 473 bp, Glycine max
  Intron number 2 from transcript Glyma13g34070.2 (locus Gly ma13g34070) derived from phytozome v7.0 (chr-ID Gm13; pos 35727082 to 35727554 reverse strand)
ttcttaacggaaaatgttaaaaaaatattaaaataaaatcttttaaaaacataaaagaataaaatttaacatattaaaataaaacaatcataaaatataataaatcaaaaatcacgttaagtcttttttttattcacaacttttgtccggttaaaataattttaatcctttatttatattttaatttagttattttaagttaatttgaaaacttttactttgtttctaacacgtatctctggtaaatcaaattttttcatccgtaatgttttatatatattatgacatcttccaaaatataaataatagataaaaattctattttagtcattcccataatttaaaacacactctctctctctctctgaatatatgttttgtgtgggtgtgtaaagaatttggaagataaataatgagtactttgctgatatccttctgaaatttgcatatgtatagtgcaagctctgaaagat

SEQ ID NO: 17977 - DNA, 969 bp, Glycine max
  Intron number 1 from transcript Glyma08g02970.1 (locus Gly ma08g02970) derived from phytozome v7.0 (chr-ID Gm08; pos 2050634 to 2051602)
gtaggtcaaaatggctaccgaaagattattaacatagggtatgcttatttggccctagttgaaggaaataaaatgttgtctctttcattagaaaacattttaagtgagaaagtaaaaaaaaaaaaaaaaagaattggaatagatgctggagcaaagatttttttacttaagattattattcactcatgaaaacgaatacatgtcttaagcttaactaacaaatttacaatttgaaaaaacacttatacatgcaagaaagttctattaaaactaaacatgaaatattgtaaacatactcaaaaatatttttaactaatcaaacaaattttaatcattttcaagaataacaattcaatgaattcatgatttttaagaatcacgatttttggttatgaatttatttccctctatcaaacatctccttaatttaaatctcttatattcaaattagtatatatatatatatatatatatatatatatatatatatcaatcaatttgaataattatcttaattaattcaaataaaaatatataatattcagaatcatgttaattaatgtaatcatatgtttatattaattaaataaatacaaaaattgaattatatttcagaagaaaaaaatgaataatatattaatattacttatgtggaaagtgtgcatcaatttgtgaaaagttaaggtggcgttatttttattttaattaatatccattttccaaaatattatatttatttttaattagttttatatttttaaaattgtgaaacaaatcgaaatttaacaatttcataattattaataaactaaaaataaaactattggccacgggccaatgaggggcccaatagcatccggagtccagattacagaattgaccaagaatagaaaaaggattaattaatggattatacaatacaacgggccgtgacaaagcagttaggtttttcttttttttgtttcaaga

SEQ ID NO: 17978 - DNA, 938 bp, Glycine max
  Intron number 1 from transcript Glyma13g22670.1 (locus Gly ma13g22670) derived from phytozome v7.0 (chr-ID Gm13; pos 26170838 to 26171775)
gaggaggaaaccgtaagcgtttttacctttactccgaatttagaatatagatgagtatataggcaaagttcactcgtgcatttgcaaatacagtgtgtagtatagtttatgtatatttggttgttgcaagagagtaacagaaagatgctttgacagttcgtatatatacaggatatacccgtttgatataaaatagcagaagctttcattatatgtttagcttgttattgcatttttgtttgtcaaattttggttgctgcaagtgtaaaaaaatacttagttctttgtatttaagacagctgtatgaagatgctggcattttgtgtgagattctccttatttgatgttagccctccctgcccatgagagctgaatcacttttaagtgacgtggttaaatgatcaaaggataagattataagatggtgatgttagctttcttaatatgtgtattttccttttttgagctgtttcagtaaccatattgggtttgttctgttttatataaagagctttgtgctccacaaattttaggattttaaaaaaattatgatactttttgtttatatctttttttttctctgaagctatttcttttagtttctaagctaagcactgaacagtttttgtttttaacttgcataattatcatattttttaatttaaaaaatgcttttctaaaattaaaaaacccgagcaaatgggctcttaatctcatttgacctttcaagctcccttttgggcaatgggtgtgcacaaagtattcaatgccaaaatatcttagcatccacttctggtttcctttccttcctgttcatttctggatgttaatggtcttgtgactcctattgatatactgactcacatgtgctttttttattctgaaactaagagttatacttatctgcttgtgatcacagtggggaacaggtacacgtt

SEQ ID NO: 17979 - DNA, 205 bp, Glycine max
  Intron number 2 from transcript Glyma13g25650.1 (locus Gly ma13g25650) derived from phytozome v7.0 (chr-ID Gm13; pos 28872251 to 28872455 reverse strand)
tcgcacctacagctattgtcattaattattccaaggttcattatctagtttattataacttcacattattcactttttatctataaccataatcaccgttgcaatcaaaatcaattgaacttatggaatgaacatgttttttttttgttttttcttttccattttctcagtgaagaaagtgagaggattgctctaacccaccatt

SEQ ID NO: 17980 - DNA, 817 bp, Glycine max
  Intron number 1 from transcript Glyma06g47190.1 (locus Gly ma06g47190) derived from phytozome v7.0 (chr-ID Gm06; pos 49699913 to 49700729)
gttaagtgctgcaggtactatattaattacaagcatatatggtatagtcaatacttatagacatgcgtccaagttaatttttggcaagtaactatgatgttttcacaccccatatttttttatactgcccaaacacctttcatggtaagaagagaagagaataattcaaatttgagtttcttttaccataaaaggtgagggtggaggggtagtgtacaaaaaatgagtaatgaaatgtaggaaagcttcacatctcctaacttaattgctgactaactttccttgatgccaattagttttaaaacattgccttacttaattactaaccaacctttcttaatgtcaattggttttaaaacattgcctaacttaattcttaaccaacttttcttaatgtcagtttgttttaaaatagaatctaatgtggtgttagcctataactagtttttgttatttcttagtttgcattccccgtcaactaacataaaaataataataataataaaaattggccaagctataaatttatttcttatgttccatttgtaatccttgttaaaagttttcaatatctttttacccttgttactggaattggagcatgcaaagggtagctagctgatttatttgcctgaaaaataaaaacaagctgctagaactactccaatctgatttcaatatcaattctccaaattagattacttagagctaaggtgcataattgtgtcccttttgcttgataataataagtgtataatttgtttccttgtgtgctgaaataggtacatatcagcagacttgcattgaaggctttgaa

SEQ ID NO: 17981 - DNA, 972 bp, Glycine max
  Intron number 1 from transcript Glyma08g17760.1 (locus Gly ma08g17760) derived from phytozome v7.0 (chr-ID Gm08; pos 13260419 to 13261390 reverse strand)
ctcaccagccacagattctctcttctctattcagtgtaagcttcaccttttctgtgtgaaatttcatctgggtatcccttttcaccctacaatttgtgtgtgtgtgtgttttttaattcctgtgttgatttcccccatatgagaatggacgttttgtgcctttgaaaatttggtctttgtgtgatccttcggttgtttcgatttgtgggtattgagttttcggtttttctcatttaagttttgactttgagtgtcggaattggggtatgcgttagttcattttttttcctgttttgttgttcttttttgttgatcagtagagtgatatatttgcataatttcccatggcatatgtttcataaaacttcaatttttcagtgtttggtgttgaagtaagtgtatcaactgaagcaccatctacatgttcataacacattggtatggctggctgggtgtttgcatgttccttttgaagtgaacactatctggcggggattaattttaatttttgttcttacgaaatggattaaaagagatggtaccaatttgtcatcaactggaatggaagaagtattaatttttgtaggtgcattttttgaattagtaatattatgaatatgagtgaatcactgataatttgatataaatggcagctagtctttgaaatacagatttatgcatttatatataaatgcttaaaacaggatctggtgctactgttatgtataaaagttgatagaagcaattaaaaaagaaattcaattatatattaacgacagtaggaagacttgttcttctatttcacttaaaaagccaatcttgatcaatattacccattaatttatttctgcattgtcttattgacctcaagattccccttgatctttgtttgttatttttccaagatcttattatataattcctcttttacttgcagaaacggctgttttgtatacgagctgtcccagtctc

SEQ ID NO: 17982 - DNA, 138 bp, Glycine max
  Intron number 2 from transcript Glyma12g36300.1 (locus Gly ma12g36300) derived from phytozome v7.0 (chr-ID Gm12; pos 39418509 to 39418646)
tgtttgcttttgggttgtttgtgtctcccatgtaagtttcattaaggatttttgaagattttgttgtttatttgtgttcattgtgtaactctttttctgttttgaattctagacccacatttaggaggattatcagaa

SEQ ID NO: 17983 - DNA, 342 bp, Glycine max
  Intron number 1 from transcript Glyma09g29800.1 (locus Gly ma09g29800) derived from phytozome v7.0 (chr-ID Gm09; pos 36634140 to 36634481 reverse strand)
gagaattcccaaatcggggtgtctgaaattcaaaggtattcatggttctctatttgtgtgtgtggttggaacaagaacaacatgaatttggattcagttcttcacatgtttttttacattaataaatgtttgatctgatttgtgcattggttattgaagttttatttaaagaaaagaaattgagctatttatgttatggtatgtgatagagaatagagaaagtgtagagattatgagcaatgttatgtgatttttttatttggcaaaaaaaatcactttttctttggtgtggtttgattggtgacagctgttgttgttgttggcggctggggttagtctctg

SEQ ID NO: 17984 - DNA, 412 bp, Glycine max
  Intron number 3 from transcript Glyma08g13740.4 (locus Gly ma08g13740) derived from phytozome v7.0 (chr-ID Gm08; pos 10052029 to 10052440)
gtctcatagctgctttgggaatagtgattcggcaggtggtcttccttttatgcattactagaccagtttcaccctttgctgcacttgcatgttctcaactttgttgtctatcttaatgataacgatataagcaggatttcatatgaaatttatctatgttttatttagccatcatggagagtatttcagtatgattttttccttaaaccaaagtatttgggaaaagttaaattgagattgaaagttttattctttatcacctaatttgtaattgcagacagtttttattttattctagaaaggagagttcttaaatttatcacaatttgacttgagattctgaagattgtataacatgggatatcgtgttcattttgtaattcattttgtttttgcaacttgcaggtgtctc

SEQ ID NO: 17985 - DNA, 534 bp, Glycine max
  Intron number 1 from transcript Glyma07g07540.3 (locus Gly ma07g07540) derived from phytozome v7.0 (chr-ID Gm07; pos 6224634 to 6225167)
agagtaagttctcctttgtttttatctatgttacttgctttagagctttttttgaattgtttttggtgaaaaaagttgggttgctattgcgggtgtgtggtaattaaccatatattgactttggtggctctagatttagatttgggtggcagcaataagattctcatatggaactcgtaatcttttgtctccttttaattccttttttgttacttgtattgattgctccgtgtgcattctgcagagttattgcataaagcaatttctgtttgttttcttcttttcatattgtggctttccaagtcttaatatgacactaatttttagccagaaaatattggcatgatttttatttatttatttatgctgacagtttctgtttttcacttttgtttattgttctgtccctggttctagaaattgaactgagatagaatgttttggtttgggaaaggtgctgttactgcattatggaccttaaatgttttgaatcttgtttttcatccttgtgatggttccttgcaggtccttatc

SEQ ID NO: 17986 - DNA, 528 bp, Glycine max
  Intron number 3 from transcript Glyma10g26790.1 (locus Gly ma10g26790) derived from phytozome v7.0 (chr-ID Gm10; pos 35259118 to 35259645)
cgatacaagctccttggtggactcgctgtgcgcaggtgtatattcattttttagttgataaaaatatgtaatctttttttaaaattgtttcattgcgattcatgtcgttgtgaaaaaatgtagaaaattgctgtcgccgtgactcaaaatcttcccagaaaaactttatactgcatccatagttgtattcctggagaccgtgttttaaaaccttgattgctagttgataaaacacaatttctattggtgacattgtttttatttgatttgacaatttattactgtgcgaaattaatcttgtgttgtttttcttgtatctttgtttgatttttattaataaaggtgtgtggagatatgtttgttttgataaacaaaagtatagtttttagacctaattgttcccagtgaaaacatatttttaactagtaattgaacatatactattgttcttttcccccccttgcacgaatgtgatttttctgtgggtttgtgtttactttgtgtaaacttcctgtttcagggcctgct

SEQ ID NO: 17987 - DNA, 555 bp, Glycine max
  Intron number 1 from transcript Glyma11g15000.1 (locus Gly ma11g15000) derived from phytozome v7.0 (chr-ID Gm11; pos 10744056 to 10744610)
acctccccaacctgacaattacacgtttctttcaggtcaacttttgaacctcaacgttttaaacatctcggatcgaatttgacagttatgcatgctacaattgcttctgctctatactttgtttggattatcgtcaccgtagttatatattcacacatcgcgttgtttcttattttaatttcatactctagtgttttttgactttacaaattacaatgctaatccgtattatttcaatttagtttattggttttgttctttaagacatgtatgtttcacattttcttatttaaatattttgttttttggtgatatgcttgacattttaattttaacaagttttgcggtgtttttttagtgtattggatttatgcagatgtagatgtaggctatgcagcttgtaataaaaccgtgcaataatttcttgtgatgaggacatgttatagtgtggcagatggatttcactctgaagactttttgtttgatattagtggttgcatctgaaatgaaactgaaagtactttttttttttggctatttgctagagaagctgac

SEQ ID NO: 17988 - DNA, 588 bp, Glycine max
  Intron number 2 from transcript Glyma11g15000.1 (locus Gly ma11g15000) derived from phytozome v7.0 (chr-ID Gm11; pos 10744986 to 10745573)
caggtttgtgattcttgatttctgaaggattcattaaaattatatttgaatatcattttaaagcagcagaatatgatagccccgggaaatcattaactataaatgtgaattatcttggaatttggaaaattattttgaagttctagaaatcattcacatcatctgtatctgtgtgcttctgggagatcattgtttgggatttgagagggctttttacgggtggcttctatgtatcatgtactttttggaaagtttctcaaatattaattcttcttccccatttttaaaagattagtattgcctttgtaaagactatggatactgatttttttaaagctattcatgcttttagtattttgtcatcattagcaatcatgagatgtactgtttcatatttccccagcccctcttactattgaggttaaggaggaccaaaatcaaattaaggaattctctcttttctgtttgtttttccccccatacccctttttctcatatcccttgtttagctatatttgtgaagtagatagctaataaattgctctattaccaggtactatcaagacctctattagtcctttctattgc

SEQ ID NO: 17989 - DNA, 924 bp, Glycine max
  Intron number 1 from transcript Glyma09g40030.1 (locus Gly ma09g40030) derived from phytozome v7.0 (chr-ID Gm09; pos 44997239 to 44998162)
gtggaccccacgccacccattctgctccaagccttgtaatttctcgcttagcctcttctctttcacaaggttaagacttttcccaattccccttttgaggttttcacttttggggtattagtcaagtgaaatttgtgacttttaaggggttcattagcattaaaccttgctttggtattgtagttcagttaggaaggagaacatggacaacaacaactttgccctgtttctctagacccatttttctcggttcccaacatcaggtaaaaatttgtgtttcgattgcatgatcatcactttgtccccacgatggaagcacggaatcacatgtcaagtagcctagtcacttcacctgtactagcgtactgtagtagttaactaatggaaggggtagcaattgtggtaaatcttcatagagaacttataccacagaaaaacaaaatacagtttcagtgaaaacggtaggagctaattgtctgacattcccagggaaatatgaaaaataaaatgttgcatagaaaccaaacctcttccagcattcaggaaaacttgaaaagcttatcttcttgcatgactatggtcctcaaagtagtcatgcatatctcagggaacaccagtttgtttacataagatagcgtctttgtttgaccaccccgattatagttgcaaactttgtcaactttgcccttgttattttctccactgttttgggtgcctattggaaagtatccattatccagcaaagttttgggtaaaagacatctcatttcagccttctgtaaacataaaacaaagaaacagaaagtataattaccgaaggatgaaatttcagtatgcataaccagtcttccttttgtgttttcttcagggtgaccgtatttcctgggaatctcacttttggtatcttaatcatagcaaagctca

SEQ ID NO: 17990 - DNA, 727 bp, Glycine max
  Intron number 1 from transcript Glyma06g41410.1 (locus Gly ma06g41410) derived from phytozome v7.0 (chr-ID Gm06; pos 44695758 to 44696484 reverse strand)
caagatttaatagacccgtctcagccaaggctcaggtagcagagcagcaaggaactctttttgtataagatatgttgtgcccaggaaaatgaaccaaccaaagcagaagaaaaatcaggtttttgaaaagaaagaagataaaaactgatgtgacatgatagtctctgtccttaaaaatatagagcttctgtttttaaattaaaaaacatgtatggtacttcaatttttaaatagaaaatacataaatagatttacttgattaaaatgacaccaaaattagagagcctttatgaatttaactaatgtcaaaatatattttttgaaaatattgtgattttcatcacacacatataggcatgcaactaattttcgctgtatgtgcattgttgttaagtttgatagttgttgatcctgttcatatacccaactataacaatatttcttcacctcagcatgaaaatattgatcattgatagaagtgggtctgttagtagtgaaggtgaagtattggttaacaaaaagaatgttgagcccaaaatttggcgcgtgtatgaaagaaggattaagaaaggagtcacaaagaaagtgtgatagctgaggtggcattcggttaggatattccctcaataagtagagtagtgggaattagttatgggggagattattcattttgctttcgcccttgtggttaggcagttagagagtttgttctctgctgaggagcttg

SEQ ID NO: 17991 - DNA, 753 bp, Glycine max
  Intron number 3 from transcript Glyma05g32470.1 (locus Gly ma05g32470) derived from phytozome v7.0 (chr-ID Gm05; pos 37410875 to 37411627)
aagataaggacctcgctgacaaagggattgctcaggtattctttcatttctcaattgttatgcatcattaaaattttgggttaaatatgtttcttgtctccataaacaggacaagattcacttttatttagttcctaaaataattgtctccttattatgtaaatgtttcatgtgtgatccatatatttctatagatgagagactaaaataaaaacaattttctatgaaggacaaggacaaccaaaaggagatgattactttttaagggacaaaatgcaaaccttttcctatttgtaaggattaaaatcaatttaatcattttttttttcttctggaagagctttacttaggaaacatatatatatcagtttgttgtgaactgttgaatatgtggacgtttgtgaatttgtgcctttgattgtgaatgcatatatgacataacataaggatatgtattattcttgctactgttggtatctattacacagtaacagtttaacagataatatatgaatacattttgatgttgaaatttagcgtggattttatgttgccacctattgcgttgctagtggcatcaaaatggaatttgttatttcatgttttgtcttacacctgttggctgtttgtatatgacaaaattagctgcccttctcaccacctttgtatcatttgctgattttttcacatcttattgtccttgcgaaagtatttaaattagttctcctggtgtatttttgtggcaggattcct

SEQ ID NO: 17992 - DNA, 768 bp, Glycine max
  Intron number 3 from transcript Glyma07g04650.1 (locus Gly ma07g04650) derived from phytozome v7.0 (chr-ID Gm07; pos 3449275 to 3450042 reverse strand)
gctggcagtagcccttattggagccacagttggaggtaaggtagtgagagattccctgtacagttattcttgcttgtgatcaatgttactaattctaagagcttggagagtaggaagttcattttgttgcaagatgtttgtgtggaaatgagttttatttgttgcattagttcatcggttataagataaaggactagcatattactgaaatatgttttgtatacaactacaaatcttaaaatacacgaaactcattccaaagttaaatccagctatgtgaagcatgaatgccttttgaaagctcaatgtgtttacctattgtcttcaaggtttcttgtataatataaaacaacagactttttattatcacaaagggaacactcactgatatatgcagaaactttttttaatcaaaaatgaaaaaagaaaggagaagattagaaagcaaaggagtagggatcctccttaaagaagaaaaaacaggaaagaagttaaggggaaattgagatatatctgcagaaaatttatttctctaagtacagaaatatgagttagtagaaactttagcaaaaagtaaaagatgtaaaaaacataaaggcagctaatgtccttgaatatctgatttctgatatcacaagttttataatttctgcttctacaagaatgtggtagaggtgtttcgaatgtacttctacagatgagtgatatactttccttgtcctgaattcactgatcatatgacagggttgctcgctcggcaaagaagga

SEQ ID NO: 17993 - DNA, 530 bp, Glycine max
  Intron number 1 from transcript Glyma13g41460.2 (locus Gly ma13g41460) derived from phytozome v7.0 (chr-ID Gm13; pos 41741444 to 41741973 reverse strand)
ccaggtatatataatatatatcatgttatagcatttctgtagtacatatctttctgaaaaaatgcaagttctaacttgaaaggctgaacgagtagtgtcgttcattaaacagaaactgggtagtttacatctttttttttttcctgaaaattttcatctgttatacgtatttttgatgattttaatttcacggcttggttgatgattccaatttcgctcccacaccaacagagtctagctgagttagtttagctgaatgcgttagttgttgtaaatgcctagtatttgtcttcaattcctatggattaaaaaaactccctcccacctgactagaaacctaagaggtggagctattatgatgaacgcatgtgtgtagctttgggaggttttaccttgtttattttgagttcaatttttattttcttccagcagttattgatcacgttattctgatgtagtacctagatttaactcttgattttcttcccactacagactagtttttaaagcagacagtcttggtcgggaaa

SEQ ID NO: 17994 - DNA, 823 bp, Glycine max
  Intron number 1 from transcript Glyma09g41850.1 (locus Gly ma09g41850) derived from phytozome v7.0 (chr-ID Gm09; pos 46543005 to 46543827 reverse strand)
tcaagcttatttcatcgtggatattttcacgtcttgtacgtattaatttacttccgaatatcttcattcttaattttaattcaacatctctttctttaccttctttctttaaggacctaattaacttcataactcctaaccatgcatttacttaagagtaatattctcctcattttcaaaattttcaattcattatattttttttctttatccccctcatattactcattattgtagaaaatatggtaaaaaataaataaataaatttgaataacattacttattaattaaagctacgtataaatttcttaacaaagtactgtattcactatgggaagaaaatcaaaataaataaagaggaaaaatgaatcaaactcatctcataagttaaaattaacatatatcttaatttatttataaataagttatacttacaaaagaacgtataaaaagttaaaatacataagttaatgttaatttttgaagaaaaaatgatttatttcacctttttaattttttctgaatgaattttttaatccaaaatggatcttatactattttacaaaggacaacgggtctcattgattttttttagcatatgaacatattgttactttcaatacctcattaatatttatcatttgttttatattttttctataatgtcatatcacttatatatctacttttatctctcctcttttattttattttagctttgagtgtccactagagtttagatacctacccatatattattttatgtttttaatatatatatcgattggtattgtttcctaattaaataggaaggacgtaaagg

SEQ ID NO: 17995 - DNA, 626 bp, Glycine max
  Intron number 2 from transcript Glyma07g34810.1 (locus Gly ma07g34810) derived from phytozome v7.0 (chr-ID Gm07; pos 39856678 to 39857303 reverse strand)
caggtcggaaatccagactttttcacgaaaatgggtggttctcaaaaacaatgtactcaaaggatgttctttgtaaccaatttacattgcaggggttgcttttgcgatgtaaaatttatttttttgtcctgcagtgggagcgatgactgtatgttgttgtcatactttttacatcggttgttctataaccgatataaaaaagtactgagtggcgcaacaacttatgccaaactgtttcgaaactgcactacatccgtatattgtttttctaaatcatccattttagtcaaaaaaattcgctaaatctgtgtgtctgtttggtttctctcttagaattatatgttaagtcctcatggttcatgatgaagtttgtatataagaatactggatgcatgtgtgtgtacatcatgaagaaactataactcaattgccacagtttcaccttattttcctgactcatttgctgccaacaccttatgctgggtggaatgtcttgaaaattattaccaggccttacttaagtgttcgggtatttatctacaagaatgaattccctacattattgatgctgtttcatgatatatttcatatatcttctaacacttcatgtattatttagttatcta

SEQ ID NO: 17996 - DNA, 779 bp, Glycine max
  Intron number 1 from transcript Glyma11g06080.1 (locus Gly ma11g06080) derived from phytozome v7.0 (chr-ID Gm11; pos 4295809 to 4296587)
gtagaagacgtgtgtttcctctacaaggtacttcctttctacctccttattgctcctttttactgtcaaaatttttgctcttttacacaatgtgcttcttctcttgcttcccttatttgtcaattattctaacctgcttctctatgtactgttttgctgaaacgttttaactttctaccatatttgggggtttctctatctcttttttaaaaattatttttgagtttttgttggcactttatcctcaaattctggtgctttaacttgagtggacaaggggaagaagaaatagtcacgcgggttcgaagaaaaatttgtttgaattcctgaaaagagttattgacactgatatgggtttaaagaggaacactttagcaccccccaagaaaaagaggaaaactttaagctcctttgcacgtttctgggttattatctgaattcgggtgctcattattcctcgttgtatatgtttattgatgattataaccaaatgtgtgcatctgttgtgttaaggacttgcctcgctggaattttgtttgtacatgcctcactgagattaatgctttatgcttctaaattttttcatatatttggtattagattgagcaccaatttgataatttcctgtgcttcttttacccttttatgttcttctgggatttggggaggggaggctccataaatttacctattcgacacccttcgcagtgatttaagttatcccattattcacattctagtaactttttcctcatatgtggttgcaggaaattcttgtt

SEQ ID NO: 17997 - DNA, 939 bp, Glycine max
  Intron number 1 from transcript Glyma13g20420.1 (locus Gly ma13g20420) derived from phytozome v7.0 (chr-ID Gm13; pos 23896410 to 23897348 reverse strand)
gctgctcaaccacttccacaggtatgttcctgacataaaattcgcattcatttcttctatgatccgaaaatttccgaatatttgtttgtgaagaagcaaaggagatgagttgattcttataaaattgatgacaattccaaaacttagctaatttaagctttagcattatccaataggattgcttaactattgaacactattagcacatcttaatgttctaaatgggcttagtcaactctaggtgtaaattaatactgaccacaataaaagtattattacctcgtgcattattgctacccctatattttgataatttttctcaatttgatacagcgaaatcagggtctacttaacagttgatttgcaattttatacttctgaatgtagataatgagactaagaagacttcttaatgcagtgattgtttttcctttcatttttattgttcatttacaccagccttttgctcacattctgctaaataggtgaaacttgaaagagaaggataaagactacaaagtatttgtttggttgaatgatgtgaaaacatatttggacaaattgtaggcttcttaaggttatattttttcataaaacactttcacttctcccactcaacttgtgctatgataaaacaaaaatatactaatatactaaaagtatctacttggttgtgccattggctgcatttctcaggttcatttgctgaactaaattgatgttacagctctaaatgctattgtgtctcacttgtgtacatcctgttttgtttcttctgcggtaggataacaatttttgtaattcatatacgtgttaggtattgatttgggcagtaattccatatctaaaagggtctcaaatgattgcttcaaggcatgttttacgccttgtttccattttccagtacctcttgaggttgtatcttatttatcctctatc

SEQ ID NO: 17998 - DNA, 316 bp, Glycine max
  Intron number 4 from transcript Glyma09g00300.1 (locus Gly ma09g00300) derived from phytozome v7.0 (chr-ID Gm09; pos 73659 to 73974 reverse strand)
ggagctattgctgtgggggcgcctgttacatttcagtatgttaaattagttgtttgtagagtagtgttttttcttagaactctccacatggagcttgttgttgatgagataaaggattaagtgtaattactattgttcatttgttcctttaagctaaatatgtgatcttttctgcaactgtttagcctcttctattatgtcttcaaatatgtattttcagttttgactttgaagatctctacgaataactagagcatgttgtgactttgcaaatttactggacaggtatcttcccaagactgtaaattgggctctt

SEQ ID NO: 17999 - DNA, 909 bp, Glycine max
  Intron number 2 from transcript Glyma08g39710.1 (locus Gly ma08g39710) derived from phytozome v7.0 (chr-ID Gm08; pos 39237258 to 39238166 reverse strand)
acttatccagaacttgaagtatgtttcaatctatttaaaagtttgtgcatattttataatattcggatatggctggggttgctctttagaaaacatattgcagttacgaagattaagattgtgatagtgtgtatatgataattaataggtttaattccttgttaggtccctatacttgcacaatcattacgttttagtctctacacctagaaattattcgttgtagttcctacacaaacactttttaatctgttttcctacaattttggacggcaaggactaaaacagattaaaaagtgtatgtgtaaggactaaaacgagtagtttctaggtgtaggactaaaaagtaaagattgtgtagatatagggaccaaatgaataattaaatctaattaataaatcatgaagttgatgaaattccaactgttaattttctaatcaatttttatgtttataactgaatttttatctttcaaagtgtacttcttcagtttagaggattgaaattcttttacttctgttttttctaatggtcaacgggtgtgcacaggataagtaacattaaacacatgttactaaatattattttctttttaaaaaaatatacttttgcctcctatgtccatggtacacattgaaaacatttgtgctttatggatgtgttttaacattcatgtatggttgtatgaccaagattagctcttctcacttctcgcgctcttgctttattagatacatcctctattggttacttcttatctaagtcaccaggatttgaccaattttgatttcacttgtaggattttctgttgttggttcttctgtttcatgttgaatatctcacaaacaaaaggtttccacttgttgacttcaaattttgtggctaatggttattatcattgtacagaa

SEQ ID NO: 18000 - DNA, 397 bp, Glycine max
  Intron number 2 from transcript Glyma13g18280.1 (locus Gly ma13g18280) derived from phytozome v7.0 (chr-ID Gm13; pos 21944647 to 21945043)
ttcgtggagctattttttctttccctcttcgggtattgttctcaaatgacattttttcttaaacacaaatgcagtaatttagatctaacataatcaggaagaaacttacatttatctttgttgtctttcactatgaaaaacaggatcagtcttactctgaacatgttttttgaaagcttgaagtataccactccttcctttgttgcatccatgattaatacaatctcaccccttacttttataattgcagttggactcaggtgagttgctgaaattaaactgttttcaagattagtcatattgttgtgaaattagcaaagtcttacaactataacaaaacgagctttattttgacttttattttccatgattcttttaaacaggctagaggttgttg

SEQ ID NO: 18001 - DNA, 889 bp, Glycine max
  Intron number 1 from transcript Glyma06g19250.1 (locus Gly ma06g19250) derived from phytozome v7.0 (chr-ID Gm06; pos 15465052 to 15465940)
tcttcaacatctacttcaacatctacaacaaacaggtcctaattctccccgctctctcatcagatcttatttagaaacaaatgagaaaaaaaaaacgattatttgctgaacgacgatcattttattttacctaacacgcacttagatttgtgttacttgataattactaaacttagtgagcagtgtcttagctagctgcttttcgtgtagttcttttattagaattggagttttgcttcggtaattcgtattaatttgcattggtatttcatagaaacctttaattattttttgatcggcaaatgttagttgttaattgttagttttttattagcggggaattacatggattactgaggtgaaactctatttttggtgttgttcttcagtcagaattttggagttttgttggtgaaccataataatttacctaacacgcccttagatttgtgttaattgatacaaaacttggagagcagtttcataggtgcttttcatgtagttctttgattagaaccgcagtttcacttcagtagttcgcactaatctgcattgatgtttaatagaaatgtttattactacgtgacgtggattactgaggtgagactctaatttttgtgttagaattggagttttactaagttaactctgattggaactatatctaagttttatctatttgttaattgctgaatcctgcacgtggagatttgaattatggattctgattccgcaacagcgttcttcgttacgtgaaagaaattgtaataggcgatgctagttcgacgaggatttggatttgaatttaagtttaacctggtgcatttttgttgttttctctgtgttgtttgcaggtgttgaaggcgtttcattatccggtaactgtgac

SEQ ID NO: 18002 - DNA, 626 bp, Glycine max
  Intron number 1 from transcript Glyma09g28900.1 (locus Gly ma09g28900) derived from phytozome v7.0 (chr-ID Gm09; pos 35889256 to 35889881 reverse strand)
gttttagcttactcttgcgggtctttgatggactaggcattgaccttcctgaaagaaatatgggttcttggttttgagccaactgcttccacatttgtttcgattttgtcaggttattccaacttggattctttcgggtttcatttgttggggaagtcgatacactactgcttgatcaaacttgggattgtgtatttggaggtctccctggcctactcactgatgggtatgtatgtccagttttgcctaatggatgaagcaaggaaatttttgacttgatggatgagaagtcaataatttcttggacaactatgatagggggttatgtgaaaattgggcatgttgtggaagcatttggtttatttaatcaaatgcaacataagagtactgacgcagactttgctgtgtttctaaatcttatttctggttgcatacaagtaggagagcttttgttagcttcatctgttcactcgtttgtacttaaatgcgggtgtggtgaagaggattccattgaaaatttgcttattactatgtatgcaaaatgtggtaatcttacatctgccagaagtatatttgatctgatcattgaaaagagcatgttatcatgcacatcaatgattgcagga

SEQ ID NO: 18003 - DNA, 910 bp, Glycine max
  Intron number 3 from transcript Glyma09g34250.2 (locus Gly ma09g34250) derived from phytozome v7.0 (chr-ID Gm09; pos 40683405 to 40684314)
ctcttcatcaatatccacacttcaaaatcaaggtataaatatatacatatattattaattaaattagtctgttactttttttatcggttaaaatcaaagatgtatcaagaaatttataacaattcatacatcttaaatcaagtggagtactaaaccccttgattaattactaattagtcatctgtgactaattaaattcttttggaagaacaatattaactataatcttcattgcatttctctatttcttactttctttcactttagattcaattttttatagttacaattatgtattctttttatttaaccatgtaactcatcctataattgatcatatataattataataatcttcccgtatagattgttgggcactcgcttgggggtggtactgctgcactgctgacatataagcttagagaaatgcaacaattctcttcaagcacttgtgtcacgtttggcccaggcatgcagttatactacttaaattctttagtttacaccctaaattttaatttgttcaattgagtaacgcaattcaataggttttttcatttaattgagtgatcaccacatgctcttgatgtagaattgtttcacgattgtaattttcccagctgcctgcatgacattagagttagccgaatttgggaagccatttatcatttccattataaatggttatgacatagtgcctacattgtcagcttcttctgttcatgatttcgtttctgaggtactcaaattacccgatggtttaaatagcaaatgtcactttaagttaattgcttaatttctgatcatgttatctgttagaaaattgtttgttctttggtcaaattggctttcactaggtaactacataacatatattgatcgaataatttacagggtcgcgatcggaata

SEQ ID NO: 18004 - DNA, 794 bp, Glycine max
  Intron number 1 from transcript Glyma07g11510.1 (locus Gly ma07g11510) derived from phytozome v7.0 (chr-ID Gm07; pos 9684962 to 9685755 reverse strand)
tgtccaaagtgagttatttttgctcatggaatcatattttttttgtgtgtagtaagtagtaacttctgcacatgaattcgtgaaatttcagtttttgcattttcacataaaatttgaaaggaattgttagtgcagaagtgaattttctccatccaccttgcatttaacttccaaatcaagcaagtgatctatcaatatcatctattgattctctgcaacttttactaggttaagagcaactagatattatagatataaagctttatcttaaaacgtgcagtaagaattatactttgttcatgcataataaaatttatttttggtttgattttttttaatgttagtattctttcagaagtatttttggctagtggatgagtagatttgttttataactatatcccttttgtcagtcatacaagttttttttttatcatttcttttctttttcctgtgagatagtttttagtgataatactaatttagaagaattgttgaccagtgggatggatgtatttgttttatttatacccattttgtgaatgattcaaattattttctaagtgatggtttttagtgatggtatgtaatccaaagtatttttggctggtcaatgattgtattgattttatatcccttttgttagtacacttcttccttatcatgaatattgatgatttaactttccacaattgttcgtgttagtggaaatgttccatgtcatttgaatcttaaattagatctcgacaacttaataattcaccgttaagagttttacccaaaatttcttgcag

SEQ ID NO: 18005 - DNA, 385 bp, Glycine max
  Intron number 5 from transcript Glyma11g37770.1 (locus Gly ma11g37770) derived from phytozome v7.0 (chr-ID Gm11; pos 38801431 to 38801815)
attatttgcgtagactgtggggtaagcccagtgaggtgtgtatcctaaaacagtttataggctcgttgtggccacaattccaaatatcactagaaatttgttttttttttctctccctatttttcttccattttgtgaggtgggtaggggagttggagcaacgaaagcttgtcttttttgtgcatcaaaataatgtagctaaatttcagcttagggccttgttaagtgctacatgatagcaaagaaaaataagtctttcatatgtttggctagattatttgcttgcttatatgaaggaaaacaaacaaatatttagtggacagagcatttaattaagttcacacttgcaggatctaacgtccaggccaaattaccttgtaacctt

SEQ ID NO: 18006 - DNA, 809 bp, Glycine max
  Intron number 1 from transcript Glyma08g12030.2 (locus Gly ma08g12030) derived from phytozome v7.0 (chr-ID Gm08; pos 8708470 to 8709278)
acacccagtcttacttgctccattggggtactgtgagagtttaattgtctgatcctttataattgtcctgcctagtaatttcttgtcattcccccattggtttctatgatttggaaaaaatgttatttatctgaataaatttccccttaaatttgttattggtacattatgaaatgtgattgcaatgagaagatatgatgatgtttatccatcaattctgcaattgaatgatgattactaacatgcactaccatctgatcccttgcatcttttttcataagtcattgttgttgagtaatcttgtttgactaattattagtgattactgcaatttaggttttcgttttttaattattatctgcccatggtatctgatatcctgagttcggacttttgtcttgttatagctggatatctcgttttaagggcatatataaaattcttacaggccttgcgacacagttggctttctttgctataagccttctgttactattttcctgtttaaatctcttcaatatattgttatttgtcttctaaaacgttttcatctaataatactttttactataccagaaaattgtttgatctgcaatctgtgatgacatttcaataatgtgctgattttctgtgattattatcctaaatatcaccatctttcggctgagattgcagttcaaattgttctagtttatgaaattattaatctggtgcggataaacaaagttcatattttcggacctgacaactttttgataatactattttggacagactaactggcgcagaccaaagggtatcgattctcg

SEQ ID NO: 18007 - DNA, 884 bp, Glycine max
  Intron number 2 from transcript Glyma13g43350.2 (locus Gly ma13g43350) derived from phytozome v7.0 (chr-ID Gm13; pos 43090779 to 43091662)
gaagcgttagtatattcatactttatcttactttattctatgtattagcgtctttgcttagttaagacatgtttagcaatattcaaatttactataagaaattatatataaaactttgtaaatttcacgtcttattttataaccttcaccggtaaagtataatacaaactgtcttgttgctagcactagctagttttgatggagaacggactattgacaatttgacattgattaatcatggttgagaaatgtgcattactataattatcttacactttttctttgagtttatggcatccctcctgcatagtactactatcactatgtgtgtcgtctgggtatgcgggtagtatttgttaattgagaacgtactgctaagaaacagctttatatatatatataggctgaaactgttacctgtaggatggttttctttgcacatgttattagttgttaaataaataagtaatttagggggtcatcaatgaatcaaattaaatgatttgcatgccagcgttaccagtggagactttaaagcatcgctgcgtagtttataccgtactactggccacgattatgagtaaatttatggatatcatatggttataaaaggacgatgattaaaagacaaagcttaaaatttttatttttgaactgcttttgctagctttatttatttgtttgaaataaaccactttttttagccctctttctacttgattagtttgtgttactgttacacatatttatatcatgtctgcattattttaaccccattttttggaccactctgcatatcagaactgaagcttgtagtgaaaggtaaatcaaaaagctgacatgaatgtaatgttgtaggcttttcaaagagtcaccacatcctg

SEQ ID NO: 18008 - DNA, 930 bp, Glycine max
  Intron number 2 from transcript Glyma11g11170.1 (locus Gly ma11g11170) derived from phytozome v7.0 (chr-ID Gm11; pos 7949741 to 7950670 reverse strand)
aacagtacagattggaagaaggccttgccaagtaagttgtttgttttgactaggttaggacatttttagcttttcttcaacccttttcattatggcttctatgtgttacattggtgcatggtaactcatttttcaatttactttctcatgatgataataatttcgaatcttagatggacaggattttatgttttttatttgtgggatgaagcgattgccagttgttggcccttttgtatccgtgaactaatcatgctgtctgtctgaaagccatttcatggaacataaaggaatcatgctgtccgtctttgtatctgtgaactacatgctttactttttcttataatgatcttgtcaatttccaaatgttgtttttgtttgacatttcaattcccaattaaactgctgctaagtattcttttctttgcttactgcttacattggttggatgagaatggaaatggaggggaggagaaataagggaccccatatccatccatcccatttttacctcctctacagtattgggggatttggaagggagggaaaatacttagtttgtgaattgtgttgactatattattctaaatttgaatacttgagcttaatggttttatttgtgcattgtaagggtataatagtaaattaatttctttttcctctcctccccctcctaaccaagcaacggattccttcctcccatccttccattaaaatccctctcccttcatctccccttccatcaccatagaaccaatcataccatttatgcttctctcttttagaattacttgggttctagtggctatgctaaattgtttgtaattgtgccatatatttttatgttatagtgctgatatttctttctctttatacagtttatatttcatgacccttgttttttgtgattcttctgttttgtgactagat

SEQ ID NO: 18009 - DNA, 724 bp, Glycine max
  Intron number 2 from transcript Glyma13g05880.1 (locus Gly ma13g05880) derived from phytozome v7.0 (chr-ID Gm13; pos 6182464 to 6183187)
gtccttttctcaacaggcgctctattaggactgaggtaatgccatcttgctttgtcttatgtttggtttggatgactattttgatcactgaattgatttggctgaggttgtctattcattgagttgcctatctatgattttatgtttatagtgatctatcattatcttcttaggtgttctttttgctccaacttgttcttttgagtttggtaggcatgcatgtgaaagtatttaatctgtcaatcaaccagaaattattcgtatgacctttaatgtagttactataaagatcaacaagttcggcggttttgttactatataacagtgtaaaaaacctttacagtgtaatatgtataatgtatttattcttttcttttttctaaatgctctaggaacattgttccttgctatataggatggattatatttttgaattttggataaatgaacaatgaagaaattcatgatacttgatgtgcaaaacctgtatttttattggattcaaatcaaatgcttttaactacttggtgaaataaattttgttttgttctgttttggctttgcatgtaatggttaatggcatgtaggtatttcctagtacatagaaatcccgtctgttacttcttgggaacattttgctataaattttgtctgcaaattctctttttgagacactaacagctcatattctcttgatcatgctgtaggctgtgaagggttgtat

SEQ ID NO: 18010 - DNA, 794 bp, Glycine max
  Intron number 1 from transcript Glyma08g23190.2 (locus Gly ma08g23190) derived from phytozome v7.0 (chr-ID Gm08; pos 17670966 to 17671759)
cttttcagcgacccccctaagaagaggaagtttgggtatcccttttccttcccgttaactatgtttactctttcacctctcgctctctttcgcatttcgtcgagcaccttcgctgcacttaatatgtctacttcactacctctctttggatctgttttttactaccacatttggagtttcaagctacaagtatatactctaaaaaacctgttcattttttccttaaattaaaaaatgtctgcaatgatccttttgcatttgggtgagttgttagattgagtacttgttcacaaggcttgttgctttcgagttgataccacgaacttattttgataagctaatattgtgaaatttgttgaaaaaagaatttataagatcataagtcacttttataagtcattaaatcaaaataatttcggtacaataagctttcctcatggaaaatgattactgtaaatgatgcttttttaaagtcagggactaaaacatccttcatattggtccttatcttaacattagtagaaaaggcagtggaaaatgaccagagcaaatcatgaatttcaaagttagagaccagagtgaaattaaaaaggccaagtaaggactaaagtctaaaatgactgaagcatacaatatgaagactaaagtaaggatttactcttttttattttttgacgaggtaggggagattactctatttgttatactgttaatagatgaaaaatattcttactctgcatctctatttttcttggtcaggtttgatttccatcttgtacagttcttttttgcgt

SEQ ID NO: 18011 - DNA, 983 bp, Glycine max
  Intron number 1 from transcript Glyma13g04570.1 (locus Gly ma13g04570) derived from phytozome v7.0 (chr-ID Gm13; pos 4892410 to 4893392)
agcagcttgatcagttgaaatccgaggtacatctcctcccttcccttgaccagttaaaaattgtttacttaattcggaaatttggatactgaattgcatgttgtatctgtgacttgaatgaaaaacaaggtattccctgtgaatctagaactacaagtaatgtgtggttgatcaaacttattaaaattaaataacattcctacataaaattttgtggtgtttgtgagagcttaagtatcatatgtctatgaagttctagtgggataaggtgttgttgttgtggagagagcttcagtatcatatgtctataaggtctgtgtggataaacttttctatgagtacttataagataataagatgaaaaaaaacttctctgtaaactagcatttacctatgcataagataatttgcagaaactctattgtaaattacgtcagtgcttttattttctgcaatcaaacccacttctgttaaataatgacatgactaacttgttgccatgctacaaaaattatatcacatggcaatctatatccccatgttatctttcttttcttcctcctcctctgttttgccgagaattgagcatgaagttcttgttaatttagtttgtatgattaacgaatgaaaggatgctatatgataattaatctggtgagcttatttacagtttatttcaacttattttaataagttttctaaatagtttatgaaaataacttatatgcaaataatttaatcttatttttcttcccttattgaaacaacttatacatgacaaacacttattcaataagttcctaattaaactgtttacccaaaggcaacctctagaagtgatttatattacacatatcaatatgttaatatttagaaaccacaatatgtttccgatcatacattgttcttcatctacaaaccttgtcacattcttaatggttaatgcagattaatagctcccctcgattgattgttactggact

SEQ ID NO: 18012 - DNA, 691 bp, Glycine max
  Intron number 2 from transcript Glyma07g31110.1 (locus Gly ma07g31110) derived from phytozome v7.0 (chr-ID Gm07; pos 36056346 to 36057036 reverse strand)
tattaaggagaaacaatcaagagagataaaaaagagtaattttgaaataagagtacaattaattgacagatttaatacaattaactaaattacctatttttcttaaagaacatgaattagttgaaaatgttataataattagggaaggaagtactatttatgcctcttatctcatttatttatttcgtgtcttttgatttactttttatacttgcaatagcatgatgctatgtgattggtccagcagtgctttaaatatgatagattttgaaactgttatgttgattctttcttgatattgaagtaagagtttaatttctctgtaaaaaaaatacactattaacaagtcagaaatcatgttgtcatgacttttaaaatcgttattataaaagtctacaaatttatcatacacaataatttgttattgaatgatagttgcatagaccatttgctatttaggtaacaattgatgtgaatgcatgtaatgtagtgtgagactgaaaaataaatgctgcggcctgtttttcttcttatgtttcatctgttcattaaacgatggtagacctgtaatttgattatacccacaagtttgttgcctgccttttaatttgtgtcttgttttgttaaggcatttatgttgtacaacttgttttcagcgaagaggtcacctgtgtcgtacgttttggagaag

SEQ ID NO: 18013 - DNA, 773 bp, Glycine max
  Intron number 1 from transcript Glyma11g13630.1 (locus Gly ma11g13630) derived from phytozome v7.0 (chr-ID Gm11; pos 9659352 to 9660124)
ggtatagtgctttctctagccttctagatgcatgtacactttttcatatatatatggggtatatgtttggtgcttggtataatgctgtatttgacagatggaatttggagagccttttgatcatgaaattgaattcattgaactgtaaactgaaaaaatttatgtattaaattgagttcattgtctggcaaatgtggtgctaatgtattaagctttgcatgtaaacatctgtatctaaaatacatatgcaataaattgttgaagaatttgaaatctaccagtacagaaaaagaaatatgagtgattcttatcatcacagatatagtgatgttattattactaaatgttgtttcctaaataattctgtttctcaaagtctttagcttttgatatctgatattatattagggttcttattaactgaaatggtaattttttgttgtaatttaatcagtatttgtgtgctgtttattatcttatttgttggttgcttattttggtactaaagctcttcgtacttttctgtcttggaatagtcaattgtacccactgtaacacgtctgtgaattttttatttttcatgtttgtgatgtgttggagatgataaggtaaagaacgttgactatttaaatattggaaacctaaaagtttttgatgatcctttgcaagcttctggaatgttgctctcatgtacctgatattttttttttgtttagtgtaattacttaatgtaaaaacattctgttgtttgcaggaggtgggcaagattgttg

SEQ ID NO: 18014 - DNA, 838 bp, Glycine max
  Intron number 1 from transcript Glyma11g11950.3 (locus Gly ma11g11950) derived from phytozome v7.0 (chr-ID Gm11; pos 8518901 to 8519738)
ccaagcttcgagaacaggtcgctcgccagcaacaggttcgttaccgcagatccttccatttcttctttgttctctctaaatcattacaccttctcacggttttctttacatttggtacccttcgttgctattttccgatgcaattttcgtctaactccgagcagtgtggttataaccttgtagtaattgttgttctcgtgaatatgataccgcagagtattagatctaatcgaatttcatacttgcattgcgaaaatcaataaatgaaaactgtagatcaaagttgagttttaaatcggtgtcttatcttgcttacgcgttgagctcggtagctgaattcaaaatcaccgagatgcgcatgtctgtgtttcggtgattaagcttaaatttaatatctaatcaataatagtagctgaattcaaaatcaccgagccgtgcgcatgtctgtgtttccatttcattaatggacaaaacttagatgcagtttcgttggtgtttttggtgtttctccaatcagaattgtagttttgtaactgtaatttgcataataaaggtttctattaaaggtcaacataggttactgaggtgaaactccaagtatgattggaggacaaaaccaaaaccacttatcctttggaattgcatgtaggttatgtctttccttaattaattgtgatgattaagctttcgttcatttcttttttttttttttttttggttcctgtttctcaaatgttccttcgatttgattagttcctttctcaatcatcgaggtgctaatgaaaattcagaattgttgctatttaggctgttctgaagcagtttgggggtggcggtt

SEQ ID NO: 18015 - DNA, 587 bp, Glycine max
  Intron number 1 from transcript Glyma10g05660.1 (locus Gly ma10g05660) derived from phytozome v7.0 (chr-ID Gm10; pos 4432271 to 4432857 reverse strand)
gggtaacctaataattctccattactctttagatatgcttcattgcacgtttatgttcctcttttgttttatttgctttgttcccaaaaattgaacgcatacgaatgaacttgagctcgtgaatttatatttgcttccggtggatctgtttcaaatcaaatattctcgtcgattcttcccgtgtgaaaaagtttatatttttctacaatcggattttgtatattttatcagtgtagtgtttaaattggttttccccttgttttgtgcaatgtgaattgctgcttcattggtttttgtttagtttaatttggtcgataatctaaagctgccttgtaaatatcgcttattttatttagttttttgttcttagatttagggtcaatggaattgggtttttttgttcttgtttttgaggggtgtggtggcagtggcaaatttgttgtgaaatttaactaggttttttagttctgtccttctagacttggtatggtctttgtaatgggggtggactaggaattggttgatgaacaaacaaaagaacatagaatttaaggaattatatttgttgctgtcttacaggaagacac

SEQ ID NO: 18016 - DNA, 789 bp, Glycine max
  Intron number 1 from transcript Glyma08g46830.2 (locus Gly ma08g46830) derived from phytozome v7.0 (chr-ID Gm08; pos 45821793 to 45822581 reverse strand)
gaatcccttccctgtaagcaacaacaacaacaacatcatcatcatcatcatccctaatttcctttttcaatttcaatttcatcttctatctcaatctcgtcaatttcgtctacaaagtatttaattctttatatgcatcgtccctttctattttctctctttttaattaatttttttggcttcaaacaattattattctagaataggagggcttgttatttttaacggtttattttagcacataagtctttaattttttttcttctcaaaatattttgttacataattcctatagttttgctttcttgagctgaagtttggttgcaagttagtttagtagttttggtaatgttacgatattgttaatgcatgagggtagattgatggatgtggtaagcgcttaagtattgacttcgcgggcatttaggcactgactaggttgaaaaactcctttttgttttagagctagaaccccatccaaaatttgcgtttttccaagttattttttttcaccctcgatccaatccaattacactcaatcaaataatcaccattttacattattcctaatgtactatggaattcacatgctttttttttcactgagatgaaattttgttgcgagttaatttggagttttggtaacgagagtggattgatagccatgatgaagttaatgaaagtgtttagaagaggataatatcgttgttgtgtgcttttggatggagctaatgtgcttctgttaatgctgcagggatcaatcacttcaaacacacacctagccgagaa

SEQ ID NO: 18017 - DNA, 940 bp, Glycine max
  Intron number 2 from transcript Glyma08g18780.3 (locus Gly ma08g18780) derived from phytozome v7.0 (chr-ID Gm08; pos 14123311 to 14124250)
ttgcttggctttgctccctttcagagtctgagatcgtaagtctctgctcttgttcattaacttgatggatcacattacatcattgttttctttacttttagattctctaggttggttgaattagataattattagtttagtgttttgagccctatgtgtttggtaaaatgttttatgcctgaactcatgctcggagattacagaggatgcaagaatcacactctgcagcattttcttgtagaataataatattattagataggatagacaggtgaatgtacaaatgcgatgaagattagatatcttgaaaacaaaattaataaaataaatcttaacaaattatcaagtcctctcctttgtataatgttgtagtgatatctttgctgtagctacttccctttggaataaattttttgcatgtttgatgtttattaggggtgtcccttcatttatcttcgttcatttcaatggtggttttaacatgaaagcataatttttttgtagcactttgctatctttacagtcctgtttgtttggagaggaatgcttgcaactttttaggatttagaattgccattttgtttgggaaagaattgcattatatgacttctctttggtgcttgtcattttgtcactaatattctgagactagacaccccaccccattgtacttctactatttgctctttgataaaacttattttttaaaagaatttgagcccgtgaaaacaaaatcaggtaatattaaagaatggtaatgcaatggagactgtctcttagaccaggttatatgtgcaaatctagtttaaaatagatttgatcagtcacagttagttgggttatgtgtttcatgaagttggatgcactccttcacttttgattgatttctcttgtaagctcttaattttttatgttcaaaatttgattttttttgcaggac

SEQ ID NO: 18018 - DNA, 741 bp, Glycine max
  Intron number 1 from transcript Glyma14g01930.2 (locus Gly ma14g01930) derived from phytozome v7.0 (chr-ID Gm14; pos 1129105 to 1129845)
ggtatgcagcttttgaagatcttgtttttatttatttgctctttttttattctttggggtttggatagtcgtttgagattataccaacttttctttattttgcaaaaaaattggacctttagtcaccaatgttgaaatgtcagtgcccggtttttaatttgcaaatgctaattcgttttcttgtaatcatttgttctgttgcgactttctaatggtgtctgtgattaatatgtggatatttctgagcgtgtttcgtgctcgtttccatattaggagcaagacccatttctgggctgcattaaagttacttccttttttgggtgatgacagagaaaattgaggaaaatataatgcactgtggagtgttttcctattctaagactttatcactcttcctgtcttgttaggtttttttataatatttgattcttggaatagggcgcctttttgcacaagagcatcaccttttttttttgtttctgttggatttgtggaatctcttcctcagaatttgtacacttttttttttggttttggttgttcagtcaattgtcatggtatattaggttttcaattttgttttgtaagattgggactctggtttttttgtacccaatatatgtcttgtgctgaatctttgtgatgtggttttgttgtgtttctttgtgcttgttttgtgagcagtattcactaaattttgtttacacctgctggactttttgcagtaacaagataagaatt

SEQ ID NO: 18019 - DNA, 560 bp, Glycine max
  Intron number 1 from transcript Glyma11g36510.1 (locus Gly ma11g36510) derived from phytozome v7.0 (chr-ID Gm11; pos 37955477 to 37956036 reverse strand)
attctgtttggatttcttggattacaggtaggtaggtaggtaccactaccactcatcttcattgctactttctcatcttcttccccaacttgaaataataaaattaacaagaggtcacgaatgaatgaatgcagctatcacttttcttgttttttttttttgcttcattctttcacgtaaatcccgccatcactgcatgttacttagcattgaatgaaaacccgtgttgctacaggaagcacactcactctctaggtgctcatagctttttcttcattccacaattcacaaaaccaaacatactcaaagcagcccaaaatcacacggtttgaggttcatgaattatttttgttccaaggccacattgtgatttgtgctagtgctagtgcttctacctaccataactcttaattcatgtcctttcaattcaagtggctatgagtttacttttaccacataactaactagtgattgtcattgtctgtaaaacgcatgtggcataacgtatgtatcccgttgttgcaggggaattccaaattggggacaatatagaaccctta

SEQ ID NO: 18020 - DNA, 544 bp, Glycine max
  Intron number 2 from transcript Glyma11g14980.1 (locus Gly ma11g14980) derived from phytozome v7.0 (chr-ID Gm11; pos 10732303 to 10732846)
agtgtcaccataattgggccgcccgatactctctagtaagcccccttttgattaatatatcatgcttttgcttttgccaccctctgacgaattttttctgtgattctcgattcaaagtttggatttttgggttttgattgattctgtatttctcttggggttggggtatgggcagggattcttcttcacttcctgaagatcgtgtttttaattgctttttttgggtacttggacagttttactagatttaattaatgagtttgttccttgcctaccctaatcacgataattcattgcggttgttgttgttctttaatatttagttgttgtgattcctctctcaaagctgatgcttttcaaaattactttttatgctttttactattgggattgatctagcttgagtttgtttgattgcaccggacgctgttctatattgttatcgctttgctttcctttggttggtattagaattttactgacatctctctgctgttttgtttgtcaattggttgggtttctcatagcgaggggggatttttca

SEQ ID NO: 18021 - DNA, 722 bp, Glycine max
  Intron number 1 from transcript Glyma09g29940.1 (locus Gly ma09g29940) derived from phytozome v7.0 (chr-ID Gm09; pos 36813176 to 36813897)
gaacgccatagctgagaagctccgaggaagatcaggtgaaatatgatcgtgtcatattattatcttcttattcattttcttcttgtttgtaacaactttttgtccattcaaatcaaataattatattatcagaaaatactgtggtaacaatcgaactaatatgaaaaggttagcacgacctaactcctttaactttgttgtagtgattgtgataatagttcaactctattaactatattaataattgctttatatagtgtaaaaaatttctttgcaactgcacatggggtgggaggtgggtgggggggtatgaatgaatttttgggatgaatattggatgatgtttctctctaacataagaaaaaaactttgattttgctctacttgataaatccattagggttagaaaggcagtttgaagaaaaatatagcaactaattaattatgtagtaaactaataattaagtagctaatatattagcgaagactgaagatttcactaactaatttattagcttttaatttctaaggtttgattaaaagatatgatccatgaaaatataaagatttcttatactatattaaaagctaatataaaattaaagcatatataacaagtgtataaactaccatgaatttgcaagtttgtgaagtttaattgatataacataattaagctaaattaacaagaattgttgtgcagggaaaagctgtaggttgag

SEQ ID NO: 18022 - DNA, 540 bp, Glycine max
  Intron number 1 from transcript Glyma06g39570.1 (locus Gly ma06g39570) derived from phytozome v7.0 (chr-ID Gm06; pos 42345771 to 42346310)
catcacctgtgagtgttgccccaagtgtcccttgggtaagttttccacttcaatttctcaagtttttttttttgcgatagtataattgatctctaatgtttacaacaagtatttttgttttgtattgtcataattgtacagtaaataaataatgggacaagaactgcagagcctgttgatcctttttagagccttatttttgttatttaaaattggttaaataatagttttattttgtcatttggaaaaaacaaataaatagcagatatatagatttaattttatcaaaaaaaatatgtgtgaggcagcatcactatttcttttcattttattttattagcaatataaattattattataaatataatttggatcctatgcattatttgttggtggaaacgagggagaacactgaagttggtggaaattaacatgtttgtttgtaataatcaatgaatgtcactctagaagcatttgagaaacatgctttaagggaagggagtggaaggtgaaagacaaacatctgggttcattgagaag

SEQ ID NO: 18023 - DNA, 607 bp, Glycine max
  Intron number 2 from transcript Glyma12g36400.1 (locus Gly ma12g36400) derived from phytozome v7.0 (chr-ID Gm12; pos 39479887 to 39480493 reverse strand)
tcaaggtaataaataatgaaatcaatgcccttcacttttctgatttctgcaaccagaaactcagatttgaggatgttattgtgttatcggatctggtggaatattgaatttgattatacaccgtatgttttggaaacaattaggtagtttcataattcagcttctttgttatttgaatttgtatccattctgtgattggtgctacacaattcagataactcagctgctttggttattttaatactttatattttgattttttttttcaaatctggagtaataagcccgaaagagtgaactcctgaagttgtttagtgattttattctgcctccaaatatgctcaccagacaacataattggtgacgctaaaaattatatagggtgacttgtaggagagagtaaaaggaataatggctctcttctgcttatttttagattggatatttagaagactacattaatgctggtattttactttctttatttttcctgactgaatcttaaacttgacagttcctcctttgtgtcacctaaatgactattaacctctctctctctgttctctttgcaggctagaattgttcaccccgataaaaatcctgagga

SEQ ID NO: 18024 - DNA, 367 bp, Glycine max
  Intron number 3 from transcript Glyma06g09700.2 (locus Gly ma06g09700) derived from phytozome v7.0 (chr-ID Gm06; pos 7278376 to 7278742)
ttgtcatccaatttcgaaacgtgatttccagtcaagtatggaatgcgctgttatgttaagtaggagtttagaagtgttttcgggaagtacaagcaaaaccagaattagagagtttcttttttattttgattctttggacttttggagtgagggacagttctggaaatcatattttgatttttgagaatcttccttgattaaatgaaaaaggttttaaaagaagagccatgccgactcaatatttgctctgataagtcattattaatgtttctcttgttagctattgccactcacaagcacttctttctattgtaaaacgcttttttcttcaggttcttgcaagccgtactaagatttatattatatt

SEQ ID NO: 18025 - DNA, 624 bp, Glycine max
  Intron number 2 from transcript Glyma07g02470.2 (locus Gly ma07g02470) derived from phytozome v7.0 (chr-ID Gm07; pos 1683047 to 1683670)
ctgtaactaccttcttcttttggttcatcttatttcatttgccaccacttgttttgtatgttgccatcaacaagtgccacgttcactgctttggttgtacacaagggaagttattctaaaagagtagtttagtgccagtgctatatgacaactaagtgtatggaaaatcctaagctagattgacaggatgacatattgacatattagtgagaagctaattttgatatttgcataattgactgagaaggttgtaaaatgagtatgtcttatgttcaaagtagcttaaagattactaggtttcattgttaatctgctttaatgaagagagcaaaagtatcatttattttaggcacttcaattaaagttatttctgtcagctatttatttgaatgtgcaaatgtaactcggtgttttcacatttaccgaggaatatattttcccttctctagtattgttttactcatgagaaattggttctctttggaagtgaaaatcacgtatatttgatgtcaatgcttggtgtaccttgatgcttttgtacctaaatcttcagtagcccattattatattacaatctgtttgatggtgtatacaagttttaattcttttacattacttgccagc

SEQ ID NO: 18026 - DNA, 1031 bp, Glycine max
  Intron number 3 from transcript Glyma12g11760.1 (locus Gly ma12g11760) derived from phytozome v7.0 (chr-ID Gm12; pos 9810041 to 9811071)
agttggccacaggaggcaagggcaagaaagaagaggtactttcaatttctgtctgaattgttacagttaaggaatatctattggataatccagcacaaacatgatattctcatttgtattggtgtaaaagtttaaaaaaataatagtaaaaaaatttataaaatgcagctaagggtattcaaatatccaacattggtatgtttcttgcgactcttgcttgcacacatatgacctgacacaactattttgaagtgtttgtgcttgtagccaagttcactatgagtctgtgtagccttgtttgttataactgagctatgcaatactgttctgccatcagtcagtagaatcctttcccaccatttaccattctaaaatttttgtaatgttttagttaattgtgttctgcacaatatatatgttgttgtttgggaaattcttcatacccaggtagatgatggagtagagaaattatacttttgatgatgaaattccagttttgttttgggttcctattgaagccaaggcaactgtagtaattttcacttgatagttaaaaaataagatgattatgtatcgaaatgcttgtttggtacttctactttgttgtcattgaaggctgtttgcctattgataagcaatattgtaaggcaagaaactaatcagatcagttcagagggtgcaaaggatcagtgagtctgggaaaaaaagatgaagtgttattatatatttatatttctcaagtgctttttgtatctcataatatttaatttagggcaatgaaaactattcaaacatagttccggtggtgaattttatcatattgtccaaaaaaaaaatatagtctatgttataaaacttgttttaaacactttaagtgaactttttaatcctaattagattagatagccagttttgtgtttaacaaattagtgtatcttatttgggaggtgtcaaaagtttttatcttcgctcactaaatgctataaacttttgcaggaattggcaaaagcataacactgaggtttggagaa

SEQ ID NO: 18027 - DNA, 822 bp, Glycine max
  Intron number 2 from transcript Glyma11g09790.1 (locus Gly ma11g09790) derived from phytozome v7.0 (chr-ID Gm11; pos 6999050 to 6999871)
cattggagaagttttatctactgttcctacaataggtgcgttttatactataaactcttaatttaatctaattattctataagcagatttcttggtataagctaattaagccatttctgtgttggtagccaaaggatgttaagaatatgcttgtcagttatctacttagtttttgtttctttgtctgtttgaactttgaatttgcttgtaagtatggagttgttgtgattcttcattgacagtgtgaagttatagtctatctttctgttaatggagcaggatttagtggaaactagatttcttgtgtaatgactcgtgaaaaaaaaaaaaatccccttgactggcaggctatgaagcacagacacctctcttgttcaaagtgttgttatgttgaacatgtttccaacaccgacactccgacacttcttattaggtgtccaatgtaaaaattattttttgttggcttgaacacttaaaagctgtcaccttgacactacttttacacttgaaaaaatatagagggttggtttaaaaggatgaatacacaatcatatttcatttcattagtctctttgtttgtgtgtatgcagtgttcccgtgttctatattttaaatattagttgtgttgaagtttctgtgtccgtgcttcatagctggctgggcaaatttctattagcagtggatgtgtgtgaattgactaggtcttgatgcaaacttgtaccagtatcacacttaagtttagctgaggaagaattagaagtagaaataacctatatattgtttgattaaggcttatagatttgtagtgctttgcaggtttta

SEQ ID NO: 18028 - DNA, 636 bp, Glycine max
  Intron number 1 from transcript Glyma09g35690.2 (locus Gly ma09g35690) derived from phytozome v7.0 (chr-ID Gm09; pos 41633293 to 41633928)
tgctcttagttagacctcccagaggtactctctttttctattcttctactttcccttctctttgtgtttttcgtttcttctccttcttcttattgtcatcgctttttctttatgtatttgcttatggaaaactggcactgctttccgatggaacatttcctgattgggtgacgataatgttttgatctaaggctggaaatgggggggaaaaagacgataagggtttaaggaatggaaatggtttagatctttgtgggaactgcatgttctgtttttttttctaatatgccaatgtatctaatgctttaattttagcagaaaattataatctattttttgaagtttaataaggggaaacggtggcggtggatagagccccaaatagggggaaaggagggttttccactttataggagtgggattaatattttcagatgaggaaatatcaatattaatgaacatatatatcatcataactatggataggtaaatttgttttttatggtgaatattagaaggttatagtaatgaaaaatttggaatctattctgtgcatgtgtgtcttatggaggcaataagattttggtaattgtttgtgtaggttcttcgtagacaacacagaagaacgatttgttc

SEQ ID NO: 18029 - DNA, 632 bp, Glycine max
  Intron number 1 from transcript Glyma08g43360.1 (locus Gly ma08g43360) derived from phytozome v7.0 (chr-ID Gm08; pos 43203997 to 43204628)
atttccatcatcttcttgcagctcttctgccaaaggtcaatccaatcttcaattccttgtttttttattatgtttttcaataataactagagtttctctttgataatttaagttaacaatcaagtaaatctttttatatgaagtattgaagagagactcttattctaattgaagaggaatgttaatatactctctctaccactctttctagtgagactttctttaaaagttagaagagaaaattattaaataaaacataaaacattcaaaaattaataatttttaataaatttcagctaaaaattaacaaggaatttttatctagctaaaaattgcataccaaacctagatataattgatgtgtactcgataagatgtagaattatattgattgattgaaaaaattaataattgatatcattacaaatgcatataaatatgtaataaattacacaatcattaaaatctgatttccttttaacttttagctgtgtgttttctcttaaggactctttcaagtcaaatcaatttgattattcactttaatatgatggttgattaacaatcaatgatttggcaacactaattctaattcaggtcctaaaaggaaagcatcattagaagtggtgcac

SEQ ID NO: 18030 - DNA, 821 bp, Glycine max
  Intron number 1 from transcript Glyma06g42880.1 (locus Gly ma06g42880) derived from phytozome v7.0 (chr-ID Gm06; pos 46180992 to 46181812 reverse strand)
ttatcaaatcctgcatcggttccattagacaggtagcacaagccttctgaagtagaatgttcaattctgttcattttcatgtctgttttttgctttcattgggctctgcaatgattataattttgattctcttaatttcgaaaaattaagaatcgattggatataggtttaagaaaggaatattttaatacatgttttgatgcatgtatcgttttgaatgagatgttttttgtactttattagcaaaattcaacaatgggagagattggatgcatattggtgtatattggtgtccctggacatctagataaaacgtgagcaaccatttttagacgaagagcagtgaatctggttcagtttaatgcgatttaacttaagagttatgatatgaattgggagcaaggttttaaattgcgttttgtggttttgttgctatccgcgatattgtggatacaattgaggttgcggtgaccccaaaaaccacaacatagcagccgaaattgtggttgcaaatagatttttaaaatcttgtttgggagttgtatcagtgtaccctccattagcgagaatttgcatctcaagaggcaagaagttttcaccgaactaatattgagattggaagaggtgatcttgggtatgtttgtatagctccagagaatcttatgctgcacctaagaatttgaattttcttctgaaaacattacctagttattacaactgttactatgtgatccttttcatttaaatttttcatgaatagtagttgtgcttttttttttcccccagatatcagagcatattcaagacgctattgtttattt

SEQ ID NO: 18031 - DNA, 1039 bp, Glycine max
  Intron number 2 from transcript Glyma09g02100.1 (locus Gly ma09g02100) derived from phytozome v7.0 (chr-ID Gm09; pos 1393599 to 1394637 reverse strand)
aataatattaatacaagagggtcacactggactacgtagctagttactccatcacgattcacgagctgtatgagctccttgggttggaggacatttaaagcatttactatgcagataattaaggaaactcatttgaaattttgccacatgtactacaaattatttttgagtaattctaaatcctcttacaatatcttatttattcttctacttgtttttgtacgataaattctgatcgcattttatttgctcatgatataaatatttcagttttttattagatactttctttataaaataggaggaggatttgtaggatgatatagcattactcagtattttttatgctattttttttttcatttgtcttattagtagggaaaagtgtcggtttggctacgagtagaagccaagtgtaccatatatctgcttaaggaagagtatgaaactgttccagaacaaaatgttgcagagcctgccaagtggggtgtacaggatgagcctcttttggtttatagttttctctgcacatcttgtactagcatcctctcttgttgaatttcaaggcatgtatttcaatggcttgttgattaactagttcttaatttctctttagattacatgttattatgctgcctgcaccataatttactattagtttccttttctgtatagaggcttttattttattttttaaaaatttactagaatattgcatttacctgtgatgcttaaattaaagaaaacaatcttttgagtttcattttcaaaattagaatgaaattttgaacaccaaggaagtctgtctcagttaattgagtaagacacgagttaatctaaatttgatggtagttgtcttcgaatcatacagataaaaaaaaatgaaattctgaatttgggctagtatttatgcatactaacatagcaaacagtccaatttgcagataatgataatccaaggcaaaagcaagagggtatgcagctaaatttgtaccatgtcaaaggacttgactcctctcaaacttccacatcaccattt

SEQ ID NO: 18032 - DNA, 503 bp, Glycine max
  Intron number 2 from transcript Glyma05g35240.1 (locus Gly ma05g35240) derived from phytozome v7.0 (chr-ID Gm05; pos 39319433 to 39319935)
ggaccctgatattatctgcttacaagtaaacctttcacctttcttgcctctcttctcatttctttgacactgatatttaatagaaaattcaatcatgctttcaatttagcccttaagtttaaaaagttctattttgattttttgaagtgtatctattagaccaagttagtgttttttttttttttttgtcaatttagaatttaccacattaacttgctcaacttagtgacatgtgacaaactgtgacgtttgtcatgtcagccaaagttagcttcgttagtgcaaaaaattgagagacgaactaatttggtttaaccgagatggaccaaagaaaacattttaaacttagggctccaaagtaaagccaaaaaataagatagagaacaagagtgtattttggcctattaataatctttgttagacttgatctcaaatactaacttgaaatattcgaaatgatattgtcaggaggtggacaagtatttcgaactctcagacattat

SEQ ID NO: 18033 - DNA, 1004 bp, Glycine max
  Intron number 2 from transcript Glyma13g09290.2 (locus Gly ma13g09290) derived from phytozome v7.0 (chr-ID Gm13; pos 10419046 to 10420049 reverse strand)
atttgctttggcctgactcggttatcactctcgtacatcatctgtttttttaccttcccttctaatgctttttttcacttttgaggttattatgcttgtggaggcagtgaatattgaaaagggtgattttttttttttttttgcaagtagttataaaaaaattatgatttttgttttctgatttcacaaatatctgtaacaccaaacattataaacgaaaaaaaacatgttttcactgtttggtttacaaacatttgaacacatgaagattcttgtaattatttattatttatatttatagaaataagtaatggaaacatggttttctccaatataataggccttaaacatgatccttttctatttttctgcaatttactgtctattaagtgcattcttggtctcattggtttatgatgtgaacttgaattgaatttgctatgctgcaatcttgattctgccagtaagttttcgcctaccttcatgaattactggaatagagacactgggggatgtagcaaccctctttaatttcatatatttgttttataatttatatcccattgagtttgatggattaattcctttgtataaaaggcaagtttaatgtgtatgtcattgaaactaacacatttcaattatttgagaactgacacattgtagtgtgcctctggggttaaacatttactttctaagtcaagtaatcagttgtcttttggtttttaccatgcagtggtttaaattacaactagaagttactggtattgggtcaatttggtgccaggattcattaggttgatgacttgatatacttgtttcattttgtttcctctaatctatgcaccctttaaaaactctagatcaaaacattggcttgatgtatgcgtattgtttttaaaaaatttaaacaagaaaaactgatgtatgttctatattattgggggcaatgcttttaaacccttaataaccttctttgcgtaattcctttcaggtgtagcaagaac

SEQ ID NO: 18034 - DNA, 786 bp, Glycine max
  Intron number 1 from transcript Glyma13g09290.2 (locus Gly ma13g09290) derived from phytozome v7.0 (chr-ID Gm13; pos 10420281 to 10421066 reverse strand)
aatcaaacttttctgttctctatagtaacgttctggtaatgaccatttctgtttctctcatatgttgttttctacttttacttttgatcatacacatttcaagccctgctgatatatttaaataaaacaaagagcaaaaaacaaaattttcagttagaatggattgtgggttttctcctttctttttttttttttttgttttcattttgagaagtggggttgttgttttataatgtcttgttttatcagaaaaaagttttagttcttcttctgatcaacttttttttccctggttagtttgctccttattcttatgatttgaactatttgggttcttttttacatgcatgtcaaatttgatcaaaagggttttcccttttttgaaggaggggctgtttgatcctcattctgtgatgattaagtttgatgctttgtttttcgtgtcattgagaaacatgtgatgggtatttctggaaattgcagaattcttcgtccaataagattagacccttgtgttttacttaatatacagtttcatcacaaatatgatcatgattattgttaatcaccatctttctcgggtaataacatgtggcctttaattaattaattaattaattaattaatttatgatttgtggttgttattgtttttgcgacacgttgtatatatgctgaaacaagggcttcaaggtttatctatgttccgtgtgtgacatcacttccactttatttctttgtttgtaattacaagggctaagaatatctggctttggttgaagtagta

SEQ ID NO: 18035 - DNA, 646 bp, Glycine max
  Intron number 2 from transcript Glyma10g00810.1 (locus Gly ma10g00810) derived from phytozome v7.0 (chr-ID Gm10; pos 553131 to 553776)
ggacttttgtcattgcctctcttatctatctattggtatgtttttctacacacttgaattcacttgtcacattggtaaggatacatgctgatatgcatatcaatatcattatcaaggtcaaagccaatcctgccatgactagatgaattactgtatgtccaaatttgtgaaaattacaccaatcttttttagtgcatgttaattagttcttcgctgttaaaatataaaaattattttatatgtggtagtttttgtgttagtataaaattatttgcataaatagaaaattgcaactaaattgaaagaaaaaaagttatttatcaattataataaagagatgattatgagtcaaccaatcttagaattgtgtttagataagcgcatgtctggattaaagtttataaacttaagtttgaataaactttcatttgcaaaagcaatatttccttttcttctatttcaaaccaagtttaaaagcaagattgagacaaaactcagtttacaagcaactccaactgaaaaccaaagaaaatgctgtttttagttttacttttgaaacttaaaaaacatagcctaaattgtcatgctaaatagttaattcttttggcttggttgaaaaattcatgtgtaatggcattggcagggt

SEQ ID NO: 18036 - DNA, 724 bp, Glycine max
  Intron number 3 from transcript Glyma06g03100.1 (locus Gly ma06g03100) derived from phytozome v7.0 (chr-ID Gm06; pos 2176053 to 2176776)
ttccctatacatttggtctaattggtgattaacacttcctcttctattatatgcttaattaacttaatttgttgtgcctttgaattttgttagtttgtttatgtatgcatggctaattgcctggagaaacctttggtgcatggtctttaattgggcctgtttttaaagatttgtataggaaattctaaatattgttttcacttttctcttgcacaaatctttggaagtaaaatgtaaaatgaaaatgttaaactattcaccttatccctatagtgttttcataagttttagtccctaaatagtttttttgtggcagtttatcacaggataaagtttctgttggggttttatgcttccagaagttttttttttttattattgtattagcaatgatgaccaaaacttaagttttatgcatatatataaggacttaaacttaaattttcttgtacaaggactaaaacttaaaatggagacaactatcaagatcaacaaatgaaaataaaataacaaggtagtgtaacaagaaaaatagaatatcagatttcaaagtaaaagtaggcccttaattctttagacaaataggacttgctttctcaaccataccattatggagcaggggatctgggccaaacttacaattccaacacaacgcttacccattatgaaaaaaatcctgtgaaagggcaaacaatattgtatgtgggggatctctcttatgcag

SEQ ID NO: 18037 - DNA, 825 bp, Glycine max
  Intron number 1 from transcript Glyma06g44070.1 (locus Gly ma06g44070) derived from phytozome v7.0 (chr-ID Gm06; pos 47048693 to 47049517 reverse strand)
atcttcttcctggtatgtgttttgcgtgattcatcactgttactgtttgtaatttaaacaaaatctaggtgccaagttaagtgttatgtcttggaatgtggtttagaaatgagagaagagaagagaagagagcatttttatttttaatatatattttttaatttaataaaattttaaaattagaaataaaatcataaatgaatatagtgagttcgaccctagttgtgttgaatacttggagagttttgtttggttttatccgtttgttgactctggtgaaacttacattgtggaggtatgtttcatacaacataaaactttgatttgtaatattttgtttatctgtataaatgaaatttcaataaaaaaaaaatattttgtcaaccgatcagaaatcataattgatatgacttttcaggtaattagtataaagatcaacaaacttatcattcaggttgtggtaattatataattattgtaaaaaaaatgttctaattctccttcctaaaatctaactcgaacatgctgagattgattaatgctgttttctagtcaacattggagttctatcttggtaattagccataaaggtctgtattaaacatagatgaaattctagcttcgctgcactttagttctgtcttgtaacaattgtttgatgattcctaattgttcctgacatatttcagtagtagcactagcttataatgagcatttgtaatcagctgattagtcattgaaactttttcatttaatataaatatttttcagatttttatattgtgacattattttacaggggagtttggtgtgggattgagctct

SEQ ID NO: 18038 - DNA, 605 bp, Glycine max
  Intron number 1 from transcript Glyma12g03740.2 (locus Gly ma12g03740) derived from phytozome v7.0 (chr-ID Gm12; pos 2517841 to 2518445)
tacagtgcttcataatcctccctcgccaccggtatcgtatatttttctctcttctatttctttcaattcctttccctgcatttcacttttagtttatatcattcgagaataatcgtttcccttcgaatttctagcgtgttaggagtcaccgttgtcaatgcacttgtgcaacgaacttttgatttcgagacttgtagatttgaattaggagcacttttgatttggcatcgatttctgatttgactttttgcaaattgaattcacaacataaaaaaataaaatagattgaactaatatttaggttgcctgtaactgctatttgaaggttaacttattgtggagaggagaattagtatttatttgcttgtttctgtagcaaagaatatatgctaaggaacttcattatcagatgttgactttgatgtttagtttttattatttatgtatctggatgaatagttaggttaggtagatgattgcgacttaatgcaccttccattatggttatgcttatatgtgcatgacataggatgggagtatctatgtgagcacgtggctttgtagatttggatggatttcttactggaaactatgtatgcaggtga

SEQ ID NO: 18039 - DNA, 798 bp, Glycine max
  Intron number 1 from transcript Glyma13g01220.1 (locus Gly ma13g01220) derived from phytozome v7.0 (chr-ID Gm13; pos 916136 to 916933 reverse strand)
caagcatatcagggaaaagttgggccccgaaggaggtatgcatatatatatatatataacattttcccgctcatttcttcacatcaatgattaaaaaacttgatgcaatttttttttataaactcaatgccatagtttaatccatgattctaaagtgtggtcatgaccacaattgcagtcgtaacataattgttttttttcaagtcatcactataacatcccaacaacagttatggttacattaatcgcatttgttcgtaatttcttaccatgtcgacaatctgaccataacaacaatttaggactatgctttaattaaaattagaatttgatgatgttaatgttaaatattaacataaactataaaggcaaatctctagttagaaaataacgcttacatatctacaaattagaaaacaaaggctgagttgattattttctctttagatttctaagcttgactagatatatgtgtaatgcttatcgaggctatatataaaaaaaaagagttatctagcttaggctaagtaaaaataatgttaaacaatttcataagagatgattgacccagttttcttgtattctttaagatggttggttacacgtattaatcacaccaataatatatataatgaatttgtttaactctatttttattatttgaggtaagttatacaatcacttaaaataaatttaagctaaataatattcaatttatttaggagttaataagaataatatatttgtcatgtatgttttgcagtccgggaaaacaaagaaatcgattttcttactggt

SEQ ID NO: 18040 - DNA, 687 bp, Glycine max
  Intron number 2 from transcript Glyma07g02570.1 (locus Gly ma07g02570) derived from phytozome v7.0 (chr-ID Gm07; pos 1737349 to 1738035 reverse strand)
gcaggcctttgcccagtaacatttcttcttataaggtactattctcttcagtgcagttcaaaaaaaaaaaaaaaactattctcttcagtgcatcattgtatcatagcaaccttggctgaactacaccacactttcataagcttaaccaaacaaacaccttcaattttgagcttaaaagtgctaatatgataagaccaaatgagttcaatcaaagctcttcccaacatccctaagttccccaagttaggttacgaattatcgagaatcttgtcgcatgcagtgttagtattgaagataatgcctttccttgttatggagcataacaaatttttacactgtcttttttatacctcacttcatcttcatgtaaatataatccaatggctcaaattattttgagattatattttagtagctttttctcaccttttgggataaggatgttgttgttgactattattagctttttactgtatgaaaataaataaataatggtagggattcttcttgcattctctctctaactgcagggaatccaattccctgtactatatgccaggctaacactgatttcatgcttcaagaaactgttataattcatagtcacttgacctttgtgcgacattcttatctgaatacattgcacataattttctcaaattcctaaatatttcaagggatcttcag

SEQ ID NO: 18041 - DNA, 739 bp, Glycine max
  Intron number 1 from transcript Glyma07g04760.1 (locus Gly ma07g04760) derived from phytozome v7.0 (chr-ID Gm07; pos 3511264 to 3512002 reverse strand)
cgaggtgttagaagtccaacctcaaatgtgaatgtgcaagatgctaatgaagaaagaaaaggaaatgattttgagaatggtgtagatagtaagaaggtggcatctgcaaaagtaaaacttaagaaattacaggtcaggtatgattcttatcttggatttgcattttttaagtctcaagaatttatggttttagaatttggcctttatatagttatagtgtggtctggatttaaaagcagcatggcaacaactataactggcccctagaatgaaaattataaagaatttaaataaacagaataacagatgacttttataaccagttgaataaattatttgaccaaatactatacttgttttaaccaataacttacctattgttagccgcttaactacctatacctagttgcaacaatgtcataaaccttgttcattataagcagatttctagttaaataagtttgacatgttttttggtgaataaataagtttgacatttataatggaaagtgatgtacagtgtgtctctagcattgctctcacaagtaagatttttctccaacaatgattaaataagtcaaagctgcggaagtacacattaccataaagggaatattcagttagacaaaaatgtagtgtgacataacaaacatatgaagaatgaggatagaaaaagtaattccattatctttattttttgtttgccctggaactgaaaacaattcagctgcaaagttca

SEQ ID NO: 18042 - DNA, 992 bp, Glycine max
  Intron number 2 from transcript Glyma05g35740.1 (locus Gly ma05g35740) derived from phytozome v7.0 (chr-ID Gm05; pos 39718519 to 39719510)
gccggaggagcttggggagatagtggagctgccgagtctggggacgagttttgaaatacccgacccgagtggggagttggtatttttcgacccgtggccgtattctcaggcgtggagtcacggcatttatgatgagagtgagagttatttttttggggatcagatttcaatgcaggactcagagacagagagcatggttctttgtggctttgcctttgaggcttcattgtggcagcattaatacatttactatttggtttctgaatctcatcctccttgcgcgtgttgctgttgcacaacaggtatgcctcctctgcttttgccttctcctcaatattcaatgtcttgtcttgtttcatgtaatgcaactcatgaaatccgatatacctgtagaaatcctacgtgtcagatattattattaattattctactttccattcactggaataagtataagtaaaagtagattctcgatttacacctttcatttttttccttacagctattttctccttcttctccttttcttttttaatcaatacgaagttgagcagtgaaaatcaaaatgcatggcttacaaatgggacttcaagtttttaacaagggcttccccaaaaatatttttttttgaaggttataaaaactccggttatttatcatatgattacataaaaagataaatgcatcttaaaattattgacctacactgctacacatttgtaaggctgaagtttagaccatatttagtggtagttatttaaagataagtagttgttaagaaaataaaatgtatttatataaataattattctgtataaaaaataagatatataatatacatttttttattagttgctgtgatgataaatgtactcttaaaataaaattgatcatagtaagtacaggtagcaataacttgtcgacgcgtgaagtggatgttcttagttcctctttcgttagctatactgcgtttttgggaaaccggaaactag

SEQ ID NO: 18043 - DNA, 882 bp, Glycine max
  Intron number 3 from transcript Glyma07g35460.1 (locus Gly ma07g35460) derived from phytozome v7.0 (chr-ID Gm07; pos 40637451 to 40638332)
agctcgacttctccaactcggtgcgaatcggaaaggtaggtttcgcctctgcattttctctgtttcggtggtggacgtgattttggtcaacggatttcacagcttgctgtctgatttggtcaactctttgttccaccactacatttcagcaattgtttcttaaacatggattagttgtatgctttagtgcctagagtagcaagtttgatagtgaattcaattgttgtttcgtaatcataatcgaaggacagttgtcgggttttcgatcttatttatcactgattgtgggaagaaaggaacgatttacggcctgtttgattcctctcacactttttttttaaaaaaaaaaatattgaaaacaattttacactaatcagcaatctatttctcatccacgagctattaatgccttcacttttgccaaaatcaattcttattttctacattgaaggcaaagcaactctaagttgctagttgcttccaggtttttcatggtgccaccatgattttgggtccctcaccaccaaaccaaacactaagttttgattttttatttcaatacaagtgttttaaaaaccaaaaaatagaaacaactgaaagatgttttcttttcatctttttctgttttgttgaaatgctctgttttaagtgttcacaagattttagaaaatataaatatggtcaagagacaagcatttccaaatgtgttcaatgggtgctcaaggaacaaacaaattttagaaaatacaaaactgtttttaaaaaaataataaacaaacaagatcttagcttctttttttttcaatgacttaaattgttttcttgtatttttttatgtttcatgaagggttcttttggtgagattttaaaagcccattggcg

SEQ ID NO: 18044 - DNA, 437 bp, Glycine max
  Intron number 1 from transcript Glyma13g17790.1 (locus Gly ma13g17790) derived from phytozome v7.0 (chr-ID Gm13; pos 21511356 to 21511792)
gaagaagttagtacatgtcttgttccctttatcattctctttttttttactctctgtttcatagtacttggtacttgattctgttttcacagattccaattttgttggtggatgcgggatttgtacgattatggatttttcatgcccaccctttttattttatcggtttgtttttggaatttttgtgcaatacatgcttgctacatgttaggttgtctattgatatttgcaaactgtacaaatattcttctgggacttgtatatgaatttttgaagtaatgaagtattatatgcatccttgaaattgaaattccctacccaactgaacaacagagcaaatatggtgtatttagaacacaatgtttcatttatttcattgtgtttattttatgttttctttgtcttttttaatattatttcagtcgtggaaactaagg

SEQ ID NO: 18045 - DNA, 432 bp, Glycine max
  Intron number 1 from transcript Glyma14g03130.1 (locus Gly ma14g03130) derived from phytozome v7.0 (chr-ID Gm14; pos 2008603 to 2009034)
aatttctcaggtatgtaatgatgattacgtgtcattcttttgggacaatgaatctattacagaaaggaatcctacagtattcttttcacaagctgtggtgctatagtactattttttcttctttttttgtttgtcacaaattagaaatttattaggaaggaattgacttcaaggatgatcaacattataacaatcgtaaaattcatttgggtttgacttcatttatcttcttccacaaaccacaggttcctataaaaatgtgctaaaccaacatttgaatcttaaaacaatttatagatatgagcttaaatttttctaagtccttgatccttacaagttcaccaatatttggggatattatctattttaatttatggggtttgtttcccctactactttgctagtctctttcaatttcttgagacacaagca

SEQ ID NO: 18046 - DNA, 417 bp, Glycine max
  Intron number 1 from transcript Glyma06g39140.1 (locus Gly ma06g39140) derived from phytozome v7.0 (chr-ID Gm06; pos 42035332 to 42035748)
catcacttgtgagtgttgccctgagtgtcccttgggtaagttttccacttcaatttctcaattttttttattttgcaatagtataattgatctctaatgtttcaagcaagtatttttgttttgtattgttataattgtacaataaaaaaataatggaacaggaactgcagaatctgttgatcttttttagagccttatttttgtaatttggaaaaaacaaataaatagcagatatatagatttaattttatcaaaaaaaatatctgtgagacagaatcactatttcttttcattatattttattgcaatataaattattattataaatataatttcgatcctatgcattatttgttggtggtaacgagggagaacactgaagttgatggaaacatgtttgtttgtaataatcagtga

SEQ ID NO: 18047 - DNA, 762 bp, Glycine max
  Intron number 2 from transcript Glyma13g29130.2 (locus Gly ma13g29130) derived from phytozome v7.0 (chr-ID Gm13; pos 32058918 to 32059679 reverse strand)
ctaaagcttaagcttttgaccaaagccttttcctggtaattcttggttgttgattaaattgtcctggctccttatgtatctcataaaatatttcattatgttttcggatgtttgttttctgcttgatatatggtaatatcatccgttcttgaccttgttattgattaatttttttactggggtttgttcttttacattgtttgttttgcttgcttaacaatttgcatgtgtaatgtgttgttgagtttttggtttaagtgtttaacatgttaacatagataagtggggcaataggtgggctgtacaggatccaagctctgaatcttatatgttccctcagcaactttaggtagtggatatgagcatccggaatcatatccagcgaggtcccagcaagcttagtaatgggctatacaccttattaggaccttccatccacttacttcaacaatctgcaactctatattcactgattacttaagactaaagccatgaagataagtattgccagcaatgtgtgttttaaagatagctataagttgatccttaatgctctcgctgctttttttcaatatgctgggattatttttcttattgttaattctgattttctgttcagtgatgtatgcacccatttctatgtctaaaagtgtgttagggaatgtaggtagtggtacctgttatggttgaatttgatatttaaaacaaacataatttgcattattcttgagcatttgttaataggttaactgtaattgaagg

SEQ ID NO: 18048 - DNA, 321 bp, Glycine max
  Intron number 1 from transcript Glyma08g16020.1 (locus Gly ma08g16020) derived from phytozome v7.0 (chr-ID Gm08; pos 11687768 to 11688088)
aaaggtactacatattattcttgtccctaatctatgttgaatcatatttccaaatacatagttggtttcgcttgttaatgaattcaaattcttataatttggacaagatatttagttatgtttaggctttaaaaacatgattttctttccttatactgatccagttgctttatttgtatcatttaggtttctttccttttttgtgtgtgtgatagaagagagtgtggtgtgactttgatgttttttccttgtttgtgattttttcattggcttggttttgttgcagtgagtttggtgatatatttgatttggagcacttca

SEQ ID NO: 18049 - DNA, 494 bp, Glycine max
  Intron number 2 from transcript Glyma09g07390.1 (locus Gly ma09g07390) derived from phytozome v7.0 (chr-ID Gm09; pos 6254728 to 6255221)
tagcatccacagaaatacaaacacaattttttcaggtaatctattcttctaaagaaagaaaattcccttcaaagttcaaattaatgctatatatttaactattctttaaggttatgatggtactaagtttagtttctttttttatttaattttacaggaggcaaggattaaggttcgtttgttgtaaaaaaaaatcaaaatactttatgtttttgttcctaataagtttcatgatgaaccagaaatcttatatattattgtatcttcttcttctcagactgctgttttcatggggtgtaacaaaggagaaattgagcttggtttcttaaatatgtcccaagtaagcaactacatatattctaccatatattaacatatttaatgacaacttcatatactaaaagatgaatcaatattgtattttgaatattgatttcccaaattattttttttgtacaggttgacattcaaacaacacttaggagtttgtttcc

SEQ ID NO: 18050 - DNA, 888 bp, Glycine max
  Intron number 1 from transcript Glyma09g05820.1 (locus Gly ma09g05820) derived from phytozome v7.0 (chr-ID Gm09; pos 4568039 to 4568926)
tccttcatactctttctcagattctttgttttgaggtatgtgggttcttcttctgccccctccactttttatgggtctatgccatctttcgtagtgttgggttcttcttgttttcaaccttaattatcaattttatttacttcttattttttttatttattttttgttaataatttgattgttggaattgtcaatggtggaccctttgagccaaagtgttcatatttgaagttaaatctttccaccaattggactgagactgcttacagtttcagaatttgtcagaaaaagcttgtcccgattgcatttttgttcctgtacgtatgtactactatcatacttggttcttgttgatatattttattttatgttatttgcttgttaaattatcacgcacttctcctgttgaatggtttgatggaagaataattgacacagactaataagttttaagttactgcataccattatattaagtttaataagtagttaagtacatatgttttgattcactaggaaaggagaaaagcaaagaatttatagtttaggaggtacttttaaacatgttgtatatcttactcttatgagtatattcatatcaaatgctgtactctgagatctgaaattggcttcctgcatgatctgcccatctgatcgttctactgaatttgtgttcttcaataacttgttacttttaatatccagaatttcccaagggcaaaatttatgtacgagtttttttttgtttttgtgtgtgtgtgctgatgttttgtaagaagacattacttgacaatcacatatggtatttatccaatatgccttttcctgctaatcattgaaacaatcagtgtctaataattgatattttaggtactcttattgatacgg

SEQ ID NO: 18051 - DNA, 473 bp, Glycine max
  Intron number 1 from transcript Glyma06g47810.1 (locus Gly ma06g47810) derived from phytozome v7.0 (chr-ID Gm06; pos 50197205 to 50197677)
ccagttttactcttcaggttctttctggtccttttctgcaacaagtaatttagtgtttgtttttactattggatgctagtacttaatttttcctcagaagattggatggtttttatgtcttgatgacagaaatggaataagaattgggaccagaaagttgtatccttttggctagctgatttttgtcacattatttcttggtttctggttttagttcaaattattgtatgattcttctggtcttataagtcataaatgcaaatgacatggattttatatttctaggtattaaaggttttgactatctgtaccttaagtcctgtattttcctttccactagtttgatttattatacgttgatactagttttgcataaaatgagcatatgtgataatttgtttccttgataaagcagacttccaattccatctagttgattgtttgattgaataattgcagaaggatttttttaa

SEQ ID NO: 18052 - DNA, 888 bp, Glycine max
  Intron number 2 from transcript Glyma06g47810.1 (locus Gly ma06g47810) derived from phytozome v7.0 (chr-ID Gm06; pos 50197796 to 50198683)
tttgaggtaagctactccatagttctgttatcatattctctcttagttttattatctgttatttcttatttaaattttcaatagtgtataaaattattaaggaaagtcttataaactaaagaagctttgaacctatatacaaggatgattaattggggactgattctaggtggattcattgaaacatgattgaggtttggctgacatcatacaattttattttatactttctggttcctgtatgctttgatcatcggccttctctatttccttttcttagtgtgttggtttttctaaattgtattttgtgcattccaaatgtggttctttgcaattttctgatagttgcaatccttggaaattgttttatctgtcttgggaggacgggagtcttggattgttggccagtaaaaaacacaggttgtgaagaccatggttattgaactttgactatttgtaatactgattgtgcagtttgatctgatgatacaaatcaatcattgaattgttagctggccaaaagtttggtgctaatttttttttcttgaatgaggtctctgttaacttgttgcaaattcaacttgctttggttatccgctatgctagtcgatgatccaaattatttgtacattttggatgaatttagcatctgacatccacagcatgttctatttcctgcaaatattttgacatataattaaacttatcaaactccagagtttatataaactcatggaaattctgtaaactcgactcataaatttcaagaatttattttaatttttttaatttaaaaatattaaaatacctataaataatataataatttgatgaccttatactttcctctttggtctaacattgttttcaaacatggtgcaggagaag

SEQ ID NO: 18053 - DNA, 450 bp, Glycine max
  Intron number 1 from transcript Glyma10g41730.1 (locus Gly ma10g41730) derived from phytozome v7.0 (chr-ID Gm10; pos 48736893 to 48737342 reverse strand)
tcacaccctccgtgcctgctcagtgtctgcctaaggtttgcttttgagtcactggaacaagtgttttgaaaaagaaagttttttttttttttattaaactgggttgttggtgaaatcgtgtttcatttattcaaattgggtttattggaattcgatttaaagttcacgtctttgtgagttgtgaccaaagcattcaatgggaagaaggtttaacatttatggccgtgtttaattatagaagggaccatggaaggaatggagaggatgtttttggtgtgaattaaaagaaacaaatgaagcaatgtttttgtgcagaaaaagaaaaaaataattatttttttgtgaatttctcatttttcttatgattgtgtatgtgtggaactgttaagcatgaaagttttcttggatcttgcagaggacgacaagaggactcagggcgtgtggggcgga

SEQ ID NO: 18054 - DNA, 738 bp, Glycine max
  Intron number 2 from transcript Glyma05g31870.2 (locus Gly ma05g31870) derived from phytozome v7.0 (chr-ID Gm05; pos 36901603 to 36902340)
actctgccatttcattaccaggtgggtaacccatttgctttgttgttgtgttgtatatatgtgtttttgaatttgtgacatgggttagtgggattatatttataaatgtgaggtttatcactcctagctacttagggttaggggttgtgtggaggttcaagttcaaattgtgatggccagttacttatggttggtgtaagaggtgatttttcttctttcattttttctttttgttaggattattattctattgatgagaatattgaagagcttattagtttcacaatatacaagtatatgtagagacaggagaaatgcactttagtaattttgatttttgctgctcttatttgttacgaggatttatgatatattgaatcaagtggcaccattggaaaccagaggttttcttaattcaacatttataagtcgggattatttaggattatattcggggagggagtaagaaaattacggattgtactgtccatgttattgatggtcagcgaaaagggaatatcatttttacatctaaacttaagttgttattggttagtgtatttgttattttagcgcatgatttagcagatagatctatagggtgaagggtgagagtctcatgttcatgtgttattttagcactctgtttgctactggtttgtgctatctgcttctcattttggaaggatatacggttatgcagatacttgtacgaaaagaaagcagaacttacttctg

SEQ ID NO: 18055 - DNA, 601 bp, Glycine max
  Intron number 2 from transcript Glyma07g02370.1 (locus Gly ma07g02370) derived from phytozome v7.0 (chr-ID Gm07; pos 1629071 to 1629671 reverse strand)
ctggaggcctctcttgcaaggtttcttctttttactgtcatactactccctgccctggatttacataaatcttgatattgtgcggttaacttggttatggactaaaatgatagcaagttttaaactttagagactataattacagtaagttgtatatctgagtgactaaaatgttagtaattttgatttcagagttttttttttctttttgacatttctaattctgagtactattgagacaacacctcacaaaatcagggactaaaatggggttactctaaaagggaatatatatatatatatatatatatatatatatatatatatatatatatatatatatatatatatatatatatatatatgcgtggggaggggggggggggggggggggggttgggggtggttctttttaatttttgggatttaagtgttttgattctcatgtgttatgtttttggtttgcttagcttcgaggttgaagctgtaggatgtccttgtgcaatgtcaaaagcaaatatttacacatctgatacgtatatcacacgctgatgtatgtctcaaaatccaggttcttgacaaggaggcgtttcaaaagcag

SEQ ID NO: 18056 - DNA, 392 bp, Glycine max
  Intron number 1 from transcript Glyma08g22360.1 (locus Gly ma08g22360) derived from phytozome v7.0 (chr-ID Gm08; pos 17013054 to 17013445)
tctcatttccgtcataagatcccttatcattctctgtatgcttcgttctaagtaacaaatttactttatcacaacaatttttgttcttcaaatcattattttgttctaatacatgcagtttatactgttctaattcaaattttattggtttagataaccagtagtatcatattcagttgctctacctcaaaccatagagtttaagtttaagtttatcggaaattgcggggttaccttttttgtcactcttatggataaaataaatatcgtcattattgtgtagaatgaagtgcctgtgtataatggggttataatcttttcatgttgggtagtgtaattctcatgttttgtttgtttttctcttgtgattgtaggtgtttattccgtttgtg

SEQ ID NO: 18057 - DNA, 615 bp, Glycine max
  Intron number 3 from transcript Glyma12g29270.2 (locus Gly ma12g29270) derived from phytozome v7.0 (chr-ID Gm12; pos 32675754 to 32676368)
tcgactcgatcgggcagacccgtatgttgtgttcccttcatattttagtagatggggtggaataattgttcagaacttttttcttccacattcagtgctgaatattttttatccttacttcaagtcccattttttttgtttgtgttctcaagggcttgtgtagttgtgttggtcaaaattatttgtttttcccccaatttgttatctatgatattctgtattggtggaattaactgaacttatgaaatgataacatgttgcattgtggtaacctcattgttgatgttttcttgtcgtggcatgttgatagttgtagaggcagtcaatttatgtattttatttttctctgataacatttttatgtcttctagttacgaatagagattctaattatcatcatgaggctttttatttttgtagaacattttcatttcgagggcatgattatgattctctgatgaatgctatgtttgttgtcttggacgatttcttcctctttttatctgttatattctcttgtaattgaaagaaacttctcattcatttattatttacgttttcttaaacctatcactcaaatttgtatattttgctcttctttatgttacaggtttt

SEQ ID NO: 18058 - DNA, 468 bp, Glycine max
  Intron number 4 from transcript Glyma12g29270.2 (locus Gly ma12g29270) derived from phytozome v7.0 (chr-ID Gm12; pos 32676432 to 32676899)
ggtaagagtacatttgcggttttgttgaagtttagacatagtttgacattgtgtaactgggttcatgatatcgatttcctttcttttaataaaagttcatatgcattgtgcatagttttttggtttctttctatatatgctctacattgtgctatttgaaagggataccagtattgtgctatgtcttatttacattgcgtgaagtaaaattgtttgggtgttaaatttttttttgaggtgaaaactctctcaagatattaatcttttggaactaaatttctcccttctttattcgagtgttatcttttcttgtctcatgttttttttattctcaaatccatcacatatttatcgtttactgttgctttaacccaacttttgatgtaactttctgcttgaatgatttaaccatatttctgtttgaattgttcagaaccaatccggtacagagtgtggaaagaacgtttc

SEQ ID NO: 18059 - DNA, 694 bp, Glycine max
  Intron number 3 from transcript Glyma13g13870.1 (locus Gly ma13g13870) derived from phytozome v7.0 (chr-ID Gm13; pos 17555723 to 17556416 reverse strand)
taaatactgttcttgttccaatatatatatccgaggtacatgttgatatcgactttagttttgtatataatcattttctcgttctccaactgtactaagttgacttatctgatctctacagtctacactgtagtctctacaccacaatagtatatgtatctttttgccttctgtaactcagtagcaacgttagcttctattaggtagttgtaaactgactacagtcagtaactagagtgtgacagctgtaatcaactaactctggttagttgactgttaggatcaactaaataaattgcattgtaatcctttctctgtgggttgaaattcctcacaacagattcaataatatcttcctcttatctttctctctgagttcctttatacaccatataccaaatccatgtaacttttccataagtgatgtttaattatcggttataatgaaaataaaacaggccaagttctaactgttgatttttctacaataattaattatactaaacagtcccccttccatgaagaaagtatatttatatttctaatgaaaatagtttgtacttaactattttttgtttttgatatgtggaggaaagacatttttaaacagcaaaaacaggtccttctcactcatgtttctttgctatcatgtggtgtaggtagctccaacaaaatataggggcgccctaggttc

SEQ ID NO: 18060 - DNA, 927 bp, Glycine max
  Intron number 1 from transcript Glyma11g35200.1 (locus Gly ma11g35200) derived from phytozome v7.0 (chr-ID Gm11; pos 36920115 to 36921041)
ccgtgacgccgccaccgccgccaacattgctttcggtactgttgatctaactcaacttcccttgttctcgaagtatctgtgaatgttcaatcttccttttattttctcgttccttctcaaattctcaattctatttatggcctcatggaaacgattactgctgaagcgtgattagtggttaagataattgaacttgtggaaaattgatttcgagtgtatatactttaggtaaaagtggttcaatagtcaaatttaaaaatgtatgattcttttctgacttatggattatgattgagtaaaccaccgatttagtttagatcctgaaagtgtacattgctatcacattagtctgtgaaactaagaaaattctaaataagttcctgaaagtacaatccgtcaatcacgtgagtccaaaagattttaataataatactaacatgtgtttaagattcaaaatgaccgtaaaggcctgtttggatgcatttttctaaaagcacttctaagagaaaaagaaaatgagctctccattagctaatttgtaaaatttctctcatatagcttctctaaaagatgagaggacatttacaaattaactaatggttgactaatggagagctcattttagcttatggagaaactcatttctttttttcttctctaaaagtacttttagagaagcttacccaagcaggccccaaatggttaaatttaggattttgatgaaacaattggaaattatagaaacttgtttagaatttccttaatttcaagaactaatgtgacaaggtgttacacttccagggaccaaaatggtagtttactcaattatgatttgtgtttgtatgctagcaaacatattgttaactgcttaattatgtgaaaatgaagctagtaaagctggttctgattttgtgttgttggtagatt

SEQ ID NO: 18061 - DNA, 627 bp, Glycine max
  Intron number 5 from transcript Glyma06g08730.4 (locus Gly ma06g08730) derived from phytozome v7.0 (chr-ID Gm06; pos 6368754 to 6369380 reverse strand)
gagaacgtgcaaccagcgcaaccacctatcttgatgttcgtgtttgctttgctctgatttacttattggtttagtcttcctgataaattgcgcaattttatttggggaaagttttagtcggaactcgtacttcaaatgctttttttgaaacaacaaattttagcaattgattataatcattttgagtttaggttgtgttactcaaaatttgttggatttgattgcaattcagtttgaattatttaactatgttcccttattactttactcatttacgtattcagactgatgataattaagtaaattacttaaataaaatgaattgtaagttccaacataaatttcatttgcaaattagttcagatagtctttttttgaagaattccaaacacaatagtttgattactaaaaatcaaatctattttgtattttagcggttctgaggacagtgtatgtaatttgccctgaagaatatagcttaagcctcagaagaagtaatttgtctgaaaaatttattgttttttattcttatcgtccatgtatgaagaagaaatggactttctttacaaattttttgttttctctacaacctctcctacaaaaaaatacacaggcccttatatctgc

SEQ ID NO: 18062 - DNA, 263 bp, Glycine max
  Intron number 2 from transcript Glyma13g28820.1 (locus Gly ma13g28820) derived from phytozome v7.0 (chr-ID Gm13; pos 31790081 to 31790343 reverse strand)
gctgtcggttcaaccatcctcgtgatcgtgccgtggtaactatttctcttccttcttcttgcttaaagggttttcatgatgccattgtgtgcttttacgttcgcaatttcgtctgatcttgctgaaaatcaccaagttttttcgttgtttcactgagattaagatgtttgcattgtgtactttgatttggtgttttgtaatttgtttatgtttatttgtgttgcttaggttgccggagctgagaggactgcaggggagcatcc

SEQ ID NO: 18063 - DNA, 451 bp, Glycine max
  Intron number 1 from transcript Glyma08g31890.1 (locus Gly ma08g31890) derived from phytozome v7.0 (chr-ID Gm08; pos 27938295 to 27938745 reverse strand)
tcaagtaagtccctctcctatcaccaccactttgcacatgcttctgcattttgagttttggaaagtacccttttgcatttttttctttctttttgaagagccctttttcatttttctatacattagtgtttaggggaagggggttagttctgaataatgtggcgaactatgtctcgaaaatgattatctacatgtgtatccttttgcattttcctacacattagtgttcagctgaagggattagtctttttgtaatgtggtgaagtatggtataaatttttggagagatacgttcacatttagtatttagtatctgagcgtgtctcaaaacaagaaatgttttttgtgtttcaatgtgtaaaagctgtctttttttattttttattttaccttgttcattgtgtttgattttgcaggcacgaggcagagaaccgtttgagagtacacataa

SEQ ID NO: 18064 - DNA, 390 bp, Glycine max
  Intron number 1 from transcript Glyma09g02940.1 (locus Gly ma09g02940) derived from phytozome v7.0 (chr-ID Gm09; pos 2064025 to 2064414)
ttaaagccaagcaagttcaggtaacatgttttgttttgaatttggacgttacttctcctgggatgtactgttcttgctcgtgttccttcacttcttggccttgaattttcttacgtaagaaggtttttgtttctgcaaatttgctttattttgtttctttgatgtttcttttcttttttgttatgaatatgatggaatttgagggtgtagctaattaggcttacagtgttttgcaattatagaattcatggggcggggtgtgaaggggaacttgaattgccaaaggggttttgctggtttgttttctttcaccggttctgtgcagtgattgttaatctgaactcttcatttacagttggtggataaggatccgggaagagcagtttcatt

SEQ ID NO: 18065 - DNA, 688 bp, Glycine max
  Intron number 3 from transcript Glyma13g38300.1 (locus Gly ma13g38300) derived from phytozome v7.0 (chr-ID Gm13; pos 39112504 to 39113191 reverse strand)
aggacttgatttgaaggacttggtcctgctctctggtatcatttatgaaacaaattcctaagcattattgttgaaagactaacacgtttttgagtccctcaattttggaacaagtttacttttggtcttcctaagtttaaaattgatctttttacttcatgtaatttgaagaatatctgttttagtgtctctgcataaacgttgcttatgatgtagccaacaaattataacttgtttacatgacaactcactttgattttccattttgagcatagggactgaaacaatttttttttcaagtaatatggacaaaagcttaattttatatttggaggacagaaaacagatttatcctaaatttaaataactaaaaacatatgtaatcctgattgaaaatatacctaaatatttggagtttgaaatggataaatttgtttttaggaattagttaattatctttcaaagctttagaatgctgtttagataaagataaaaatgagggtcttgttcttatcattcagactcgtcaatttgtttttaagattaaaacgttgttagtatctgaattttgcgcctctataaaaaccaataaattggtgtgaattatgaattgttcttgtgctagtaatgagcaagagttcaaattgtttcaggtgctcacacaattggtatcgctcattgttcatca

SEQ ID NO: 18066 - DNA, 749 bp, Glycine max
  Intron number 2 from transcript Glyma09g18900.2 (locus Gly ma09g18900) derived from phytozome v7.0 (chr-ID Gm09; pos 23458670 to 23459418)
acttgcaagttccattctttcagtttcatcatcaggttttagtatgtatttgctgttgtgatctgctattgattctgctatatatgctcctcatttctgattctgcttcatgtattcgtggccaagaggatatttgcactgaaattaacaatctcttttttttttttttttacttctgggaagtgtatggaagattttgtaaaattgagggggagcaaagtgattcgggctgaaagtgcccttgtcattttaagttatcatatctcacataagtttgttatgattttctttttgctataatttgacaacctagtagtttgaatgttagtttgactagcagcctttttcccgtcaagtagagagagagagagagagagagagagagtgagattatgttcactgattactaagattgacaggtgaagttaaattgaatactaaatttgttcaacgtgtatcaatatgtaaggttttttgtttttccccgttaaaaatagtgcattaatcaaatctgaaggtatctttaattggattttcctctatcaatttatcttataaaactacgttatttaacttttaaaatgagcaaatgagttggttgtcttcagaaaaggaaggaacggcaaaatcttagcttagcacccagttttctgttcttattaactgaagatgtgaacataaacagatgatgcttgtgcttacatgtttgctgcatgcaggtactttgctggtgttccctatagggaaag

SEQ ID NO: 18067 - DNA, 743 bp, Glycine max
  Intron number 3 from transcript Glyma09g18900.2 (locus Gly ma09g18900) derived from phytozome v7.0 (chr-ID Gm09; pos 23459595 to 23460337)
ggctggtcttggtatccatcactctggtgtagaaggtgcagttttaagcttttgatgttgtattttgattttgccttatctcttaatccaggcatattatgagcggtagtcatctggcttttttctcaaatgtattagtactaaatcttgagttggagggatacaaaatacttttattttgtatgaattgcatctcctgcataaccagacaactgggcaagggaggagacctagatgttaatccttgttttatatgttgcaccatttcaaccttaccaagttttgctaggtcatatgctgtctaaataacttaatgactagagaaggatatttttctagagtgtgtgataatggtgattttttgagcctaatgtgtgtgtgtgtgtcttttctcatttaattttttttacattgataacttgaggtcactctgagtgagaaaactggaaaatatcaatttgtggcttccatctataattttctaacttctacctgtccttgttttcaagtgccccaattcttctgtgcaatccaaactcatctaaaaaacaaaaagctggtaattatttatctcccatcatatgcaactgaatagaggatagttagggactttacatgcatatagcgggttccctaattctgcagcaaattgctgcttggatcagcttctctttaaatgtagctacatagttttgaattaacacttacattatctgatcaattttacctgtattttacagttc

SEQ ID NO: 18068 - DNA, 798 bp, Glycine max
  Intron number 2 from transcript Glyma09g03330.1 (locus Gly ma09g03330) derived from phytozome v7.0 (chr-ID Gm09; pos 2341583 to 2342380 reverse strand)
gattttaggtcagtcatttttctttgatttcttgtaaaaagtttttaattttgccctaattttacgggggaaatgtttggttttggttcttggtgttagattctgaatttgatgttttattcctgaatgttttgccttcaaggagtagaaagttggttttgttgtttgcttctatcaaggatggagattgttgtggattttttgttatggatagtttcttggtatgatgtagatttttgttatttgaagtgcctgagttgagtttttgggggacactagagaacatgcattcactttgaccccatactggaattatttgcataggagaagagttacattaataatttcttgaatttgaacaattttatctgatctgtgactagaagaaatggcttataaggtgaatttctactgtcaatcttggaaaggtcctggatgtaacatggtacatggtacatggtacatgatacttagatagggattatttgcatttcccaaatgtgaataactttacatgatagtacatgactgtaagagttggcttaggtggttaaattctggattggaggacccattttgaaagttcctgatcctggatgatggatctctcctagcacatgctatggagattttttagtttcattttttggttaagatggtttaaattatcaatatctttgatttttgctactcaagggaaagttgtcagtagttgaaacataggggtttgaattattatttgaaattgttttaactgcatttattgacttgtgttcatttatcttctgattgcagagc

SEQ ID NO: 18069 - DNA, 960 bp, Glycine max
  Intron number 1 from transcript Glyma09g28640.1 (locus Gly ma09g28640) derived from phytozome v7.0 (chr-ID Gm09; pos 35575261 to 35576220)
tccgccgtgaccttccatccctcaacgccccacaggtattattctcttcatgattgcacatccaactctcccttcataatacccccaaattaggtttagattatttgggaatttggggtttccaatttaatgtaattttgttatctttattgtgttactagtctttcctgtgacttagtttttatttgattgagttgccgagctgaaattacagacatgaagctttcagatgcaaaatgcattaatccgttttcatgttttaagtaaaaatgattggataaacgaagtgcatgcttgtgagagtttacgctttaagggaaaaatatttttttcttaagtttttttaagaaattgtatttttttaattcaaaataaaggaatcaatcctaattgtatttttttattggaatcaaaatgtctacttttcacctgagttttgggattttcaattttaaaaatgtgctaagtataaaacataatcaacttgttctgttctgctgcgttttatcatgtctaccaaatgctagaagcagtggagaataaacaaatttcctatcaaatttgaatgaacaagtttctagtggagaagtcattcgttttttgttttcgtttcttctttttaaaattccagtttggtaaacatcagttcctgttacttcatttgtgagtttgttatctaaagcttttcatgggagagttgctttgaataatgctaaccccttctaattgtttttcataaaaagttctatcttaacattcaaaattcctaaacttcaatataaagtgtaaggtgaagacctgcaatccacagattgagtatgtgaggtttacaagttttagatatgaggtgtatgttgttaaaactattttcatatgaaacatggggcctttatttgtttttctgattaaaattctaatgctgtagatcttcaatttgattgcttgggtcaacaatttctg

SEQ ID NO: 18070 - DNA, 728 bp, Glycine max
  Intron number 5 from transcript Glyma09g28640.1 (locus Gly ma09g28640) derived from phytozome v7.0 (chr-ID Gm09; pos 35576910 to 35577637)
tgggcttctcttgccccataccaccacagaccaaggtgattcctatttttttttttttttgttttgattcttagtactttatgatgctattttaatatcatgtgctatggcctgttaaatcgactttgtaactccctttctccacaaacaaaaattgaccctgttgactttgtgaataaaatatgtcaaatggttattcaacattagactgatgattctgtttactgttagctagcacagatgggatgaagaaatgcttatttctataaaaatatttaacattattgcttttgtatagttgtaattgaaaataatcaaactaacctactggttttattaccaaattatagacaggaagtgtttcatgcctgtcttgtggttatgcaattagctgatatcataaagattctgatttctgtttgtttttttgctagcaccttatctttatcaacactctagtctcttggcctttcagcattgttttttccatttttctctgggttttgataatctcttatttgtcttcgtttgtataaattctctatgctgaggcccgaggatgggatttcatgattatgacagtactttttttccttgcatcttgcacactatttttgttggtatataattccacattagttatgatatactgacttatgttacttgattttattgtcactcatattgctgtagagcttcaacaattgagaaacagtctacctgatcaa

SEQ ID NO: 18071 - DNA, 997 bp, Glycine max
  Intron number 1 from transcript Glyma09g40970.1 (locus Gly ma09g40970) derived from phytozome v7.0 (chr-ID Gm09; pos 45751575 to 45752571)
tcattacctcgtttcagctcaattttgttaattgggtacgatttgtctttcatcattgaattgatctttctctctaattaagcaatctcaaacctcaatttttttgaggtgatttaattgtgactcttccttcaattatccttgtttttgctaatttaattttgatggggttgtttttaatgtatggaaaatgatggaaagcttgcaacttcaactttccagatatagaaaaattggtattgatgtgatttcccgaattatttactttctggtcttttgggtttctcagcaacaaaatcaattttctgaggaaaaaccaccatgttggaagtttgtttactttgctttgcatttatgagagcttgtgttatggcattcttgctaggaatggatgaaaatttgagaaataaaccatgtgtcatgtctaaatatacattgtaattttcattttgtgttccttcattcttcttattctcatttggcttctacatggcatactctactcttcttgtgattgcggaggagtgtagggcttttgactttttgttaccctctgcttcaacttgacaaatgttgagaatgcatgcatgtttgaagagtgaaatactttatttgctctgtttgattttgccccttccgatttgtctgctatcagatttcatcttttcttgccctgtagttgtttttggttcctttttttgagaaatttatataaggatgtgatttctgatatttggttaggtgaacatttattagggtgcatattttcgtatgctgcttaatttttgctttacctgtggccttggtgtaacttgcaggctgatagatagtccactaattgagtgttgcttatgtttattaatcaacctgtgacttggctattgtgttctgtactttcccttttgttctggttgacttgaaaaaatttgatctgctgacatcggtggtcttccttctttcaggcttccattcattaaagtttacaagtttgcggctt

SEQ ID NO: 18072 - DNA, 859 bp, Glycine max
  Intron number 2 from transcript Glyma09g40970.1 (locus Gly ma09g40970) derived from phytozome v7.0 (chr-ID Gm09; pos 45752587 to 45753445)
gggagttgtgtgtctaaggtgagaatatttcaatgcatcaatcattcataatctttattgttatgctcattataagttgaaatcctcgggcctttcacctgttttctctgataagttgttttcttcatcagaaagcatactctaaaagcaaaataaatttcctgcaaagtgtgttgtagggtgttttctcattgatagtgtatgcctagatgacataaggaaaggcttgctgtttgtaatttcaaactgatagatttttactgtggcttctttttgtggttgtgtgaaatgtgttacttgtacctaatctgtagcagataggttagacagtgatgatgaaaacaagaatagagaaaaaaatttaacaggatgcaaaactaatgagaattatggaagaattagaaatggaaaattattttatgtatgcattttctattttgtaactttcttcacttctcctcctgctgccccccagtcttccttatcttttaatggtgtcaaatgaagggattatctgtaactaactgttatttcaaaatatgtctcttttccacatccccattcctgcttatctttaatattgcagtgtttttggcttatggaaaccctattaatgtagtatgatatgatagtactccttctgtagctagatgtttgattcttctgtaagcttctagccctgacttttctgtttctacctgctactggctgccagaaagaacaacggaaataaattttttaagtgtgtctttgtgggatagctttgtcaactttgtggagccttaatgcttctagaactttgaaagcattggtaagcaagttgactgagaagtttcatgtttctaatgcttgtagaatc

SEQ ID NO: 18073 - DNA, 478 bp, Glycine max
  Intron number 1 from transcript Glyma07g30270.1 (locus Gly ma07g30270) derived from phytozome v7.0 (chr-ID Gm07; pos 35311546 to 35312023)
ttgcccttctctgcagttccctttctcgctctcaggttcatttattatcccccttatgcttctattcaataaattttcttatctttttgtaatggggttttgtgtttcttgttgttgagcatttgaagttccaatttatgtgctttacttgactttaagtttgaaaacttgagatggggtcaaatggggtgctcgaaagttgtggtttttttttattgatcccttcatgaagttacatatttgtgaccacagggttgaagatttgtgctttgaaggccttgagacgtgttacctacttgactttattcctccaaaggaattcctttccgacctttctcgtaaatcaaaatgcaagtaggataatattcatgtcctgttattgtataatttctcacgtggtttggttttgtttgcatattaatttgattgcttttatctattaggattattgggtttgatcatcggaaattggtactta

SEQ ID NO: 18074 - DNA, 486 bp, Glycine max
  Intron number 1 from transcript Glyma13g32050.2 (locus Gly ma13g32050) derived from phytozome v7.0 (chr-ID Gm13; pos 34341476 to 34341961 reverse strand)
taagcttcatccttccaacaagctctacttcccttgtatgctttcctcttcttccaatctttccctctacttctttgcatctgctgctttttattcttattccactaggtgggggtgcttttgggctttcaattaaccgttccaaaatttgaatttaatcactatgcctactaataaaaaacaggtagtttttgtaaaaaacaacaaacttattatatatggagtttgtaattggattgcaggataaaactgttttactaaagaagctattttctctttttgtttatggacaatgataatcgccttctttttgtgacgttgtatccccctaatgtatccttgtattaattactaatactctataaagaaagtactatataaatccatatgattgattcaaagtctcatccttgtgttatgccatttggttcttctttcttgtcatgtgtagagccgggcaagcaggctaagagtgccgtcaggatt

SEQ ID NO: 18075 - DNA, 465 bp, Glycine max
  Intron number 2 from transcript Glyma10g43760.1 (locus Gly ma10g43760) derived from phytozome v7.0 (chr-ID Gm10; pos 50340050 to 50340514 reverse strand)
aattcaaaggaaaagaaaagaaaatcaaaatattggtatataattatgataattagtatgttttaacgtttaactaagtattagttatcaaaatacgtgaacaatgtgactagaagaacttgtgagtggaccagcctagaggtagaaatgttgtttgattgaattgaatcacacacgcctttctctgtgtgttttcatttcctatttttcatgcaataaaatctctctcacacttcactcttcaaacaactctgtttttctcatctctcttctcataagaaaaatactcccatccgaaacaaacttcggagttcaaccttaacaagtcttcatggtctctgtctctctttctctctctgtgtatctatctataattataaatatcatatatcttgattcgtgattaattttgttttggtttttctttgtgttatggtgtgcaggcgagtgaagctgagatcaaat

SEQ ID NO: 18076 - DNA, 959 bp, Glycine max
  Intron number 1 from transcript Glyma08g20480.1 (locus Gly ma08g20480) derived from phytozome v7.0 (chr-ID Gm08; pos 15502363 to 15503321 reverse strand)
gtctggaatttatgtaagttgtttgcaaattgcaatttcttattttgttattgaataaatcatcaaatatatttcttaagtattaccttctatcataagtaatctttaaagtattgaaattacattataattttgaatatccacaaactattaaagattatttgaactatttcttaatggattaaattatattggtataattttaataattattatataatttttataacttgatatataatatgatttttatttattcataacttcaacttcgtatcctattgcccagaggctcttcgctatgctaaggtataggggagggatgttgttttcggattcgaacccatgaccaacaagtcaccaaggcacaactttaccgctgcaccagggctcgccctcatttttatttattcatattttagtatattttaaaatatttatattatattaattttaatttatatgaaaggaataataaatgattttttattaatatgaagttttatacatgtgatttatgtgaagagaattttcaatccaacgatgagttttaagaaaatactatttagttaaaaattataaaatgaaataataattattaaaattatatctatataatttaatatttccttaagtgtatatatattgaaagattacttatataattttgttacgaactatttaaggtacaaaaaatactactttgttgaccgttggtctttgctcaataacttagatttgccttttgggcatggtttgagagatggatatggtttaaaataacatgagccacttcataccatgagagggagagtgaggctccacagttttttttttttttttttgtcttctaaaaattgaagttgaccttaaacagtacttgaaaacagtggtggagaaatttgatcaataattaatgcacatgtgttttgcatagtgcagacaattccaaggactat

SEQ ID NO: 18077 - DNA, 867 bp, Glycine max
  Intron number 5 from transcript Glyma13g31380.1 (locus Gly ma13g31380) derived from phytozome v7.0 (chr-ID Gm13; pos 33798877 to 33799743)
caaagtaagttggctttctttgaaagttctatactcttagatttccttgatgttgatgttcccatcctgtacattcgtgccatgacttaggattaagattaagctccatcaaaaaaaatttttgttagtcaatgtgtacaattgataactattgttattataaaataagaagtgcaccaagacgaagagaagaaaattacaaagagtttgaaggattatggatcctctttgttaaaacgaaaacaaacaacaaagaaaaaaagaagaaaaacatcaatgaagcaaagttgctgccctgatgtgtgtgtgttatgtgagtgcaaactcagaattatagtctatcatctgttcttacattgcttaaatgctatttctatctgaattcattgcttgccatttttggtgaatgtagtgtgcaccctaggtttttagatcatttttatatgattatcttaaattgttttagttgaagtaaagaaataaatttttatatgctacacttaggggtttggggcacttggttggagtataactcatatctttaaggaggttttattgcagcagctgatatgggataagattaggcattttgcttcgtatttggtctaaaatatatggtcttttcaagggagtttcccttacagatatgttgatggattttgtaggcctccttcattgatttcttcttattaattctctgtttgtgttgcccttttacatataggaggatcctctatcctccaaactctttgtcttaataaattctttctttcttttattaaaaaaaatgtgtcttattgaatcacttgtattatctctctgtctctatcaatatcatcaatttcttgctgcatcatgtatgcaggg

SEQ ID NO: 18078 - DNA, 843 bp, Glycine max
  Intron number 1 from transcript Glyma10g34880.1 (locus Gly ma10g34880) derived from phytozome v7.0 (chr-ID Gm10; pos 43031873 to 43032715)
tctcaggtgcaattttgctttttatttttctcttgtttttccctcaatttctgattcggtgttctggacttcatagctagcaatttctgaattgttatatctgcaattatttattggaatcatttgtttgacttttcaaaaaattaggaattcctgtgtttggttgggaacccttaaaactagagcaaggattataacacgattgggcgaaaattaaatgcatttgattttcattaaccatcggtttctctgtcaactattgcagaatttcttacttgttcagctaccattgtttttttttttttttttttttgtataacgcgcatgctagatctctgttttcaacactttattcctgattatatgctctaacaattaagggatgtgattgcttcctctgctcaggaatagttgaattagaatgttgtctgttattgttggtcaaagttcaaatccaatactagatatgattgattggttctttcttatttgctaacaattttcagattatggcgtggtgttgttcttttttgttactattactaggtatagaggatctgtctgaaggatctaaaagagtttggtcagatgaactagtgttcaaacgtttattttgtttttcttttaaagcttgtcggtgtagctttcaatttgtatttgcagactccccctccctccctcttcttaaattgatcatagtgtttcttaaattcaaagttgaatgtattcgtttatgtgtggttattggggttttagaattaagatgattttttattcctttttctccctcttaatatgaaattttatgcattatgattacagactgttgtcctcaaagttggt

SEQ ID NO: 18079 - DNA, 938 bp, Glycine max
  Intron number 1 from transcript Glyma06g06630.3 (locus Gly ma06g06630) derived from phytozome v7.0 (chr-ID Gm06; pos 4731114 to 4732051 reverse strand)
cctcctcagcggaggagctcctcccactcctcgacgtaatgacgccttttctccctttttcttcttcccttcaaatgtctgttttccattcctttaatctgtgatttattaatcaatcagtggagtggagcctggaaattgcaaacttgctcctgaaattatctggaattgtttttttttttttttatttcaaatggttcttctactacctcaattggtttggctgtgatgggataagtgttatagcgtatgtgttaagttgtaatagacatcctaagataatataatcatatcattactgcacgccttacatatatggggttctgattggtgattggtaatattaatatgctggaattctttggttagggatgtatagacgatgtaagtgaagaaagttgaattaggtcctatttattcagtctttatttttttttatcaattgttggtttgccggtgagtgtagtaagctaagggttggagtggtgccaagtgccaacagtgatgcgtctgacggatgttgggcttggttccagtggtgttgctgtggttatgacagaggttacaccagcttcaccgtagtaatgtttgtcctccccctcacattactaaagtaccccataatctgctgcctctagaccaaatccagcaagactcatcctccatctttctgttaatttgctgttgaatatctcggctttttttttggattggttctgtttatctaaaaaatttaaagtacagcttgagtttgaactttgaagtgaggtgaaggtgaagctgaaaaattcctctctgataaaatatatgcaagtcgaaaaacatagtcctaactaaatggttggtcaaagtattaaacacaattttgtgattttacgtattattttctcctttacactgcagcaagtagagtgttgcctatcgagggttgagcagtc

SEQ ID NO: 18080 - DNA, 525 bp, Glycine max
  Intron number 2 from transcript Glyma09g33770.2 (locus Gly ma09g33770) derived from phytozome v7.0 (chr-ID Gm09; pos 40257566 to 40258090)
gcctcgctcaccacaaggatcaccgtgcaatccaggtttgtcacatcacatcattcattagtttttgcacagaaactttgcatctggcattttttttggctcaggactcacacagtcattgtttatcaaaatcaccccttttccatttttgggactacttagattcttttcctttttttctctgatttttttttttttgctacaactcacacctttcccctaatttccttccccgcactgatttgaagtttgaactctctcattaattggtttctatttttaatttctgtgtccaattgtccctcttccaaccgtttcctgcatttaccaactcctagaatggtgtgaaagtaaccacacaatgggagaaaaaaaatatcagctttcggtgattttgagttattttcaatgcgtgtattgtgtgtccctgtgtctagtctagtgtctaacgtttttaaccattcccctctaatgtatttttttttgttgttgttaatttttgacagattaggaggtcctcatacc

SEQ ID NO: 18081 - DNA, 986 bp, Glycine max
  Intron number 1 from transcript Glyma09g38650.2 (locus Gly ma09g38650) derived from phytozome v7.0 (chr-ID Gm09; pos 43963902 to 43964887)
cgcgattcccgtgtcccgagagcacctccctccaggtcttttgctttttcttcttcttttatatgctttctttcaatctggtaattcgttccgatcacgtgtgttttcgtgatcctgttgttatcgccgatgatcatcgatggatgatcgtcgcgcttattttgttgttctgcggtctgattctgagatctgagatgctttgttttgtttcactttctttttttacgtaaggtactaacttgcaatttttttttaattggattccactgtgcttgtttgtgtgttgatgatgttttcttaaccgctttgggaatgttctgtgttcatgtttgttcatgcaatttttgttgttctgcttttttaactggacaaaaaaaccgcaatcaaagctgttttttttttttcaagttctcttaaatttaaattggtaatgaatataaactttcctgatttcgttttgcaattttaggtttagatactgtggagtactttcgggataaattgttactattactgaagtgaacactttaataatcattaaagttaaactaggtgcaatttatggaatttttgtaaactttttttttatgagtattttacaatttaaacctttatcgccagcttttttgtttttaatttttatttttgaaagaacctgaagtttagagaccatggcaaatttggaaaagtcttgggctcataacaaacggatttttgatgtggtttggacaaaataccaaacagtttcatacatattcataagtcaaagccaagtttgtagtacactgagataaataaagtgagaaatagaagtctaaattaaaatgatgtctctttttgagagatggacttgttcatatgatgttgtttcagatgcaatgtggcaaattaacttgaggtcaagtgaaacaatggaatcaggaccttatcctgagcatccaggagaaccagattgttcatactacattaggactggcctttgtaga

SEQ ID NO: 18082 - DNA, 950 bp, Glycine max
  Intron number 1 from transcript Glyma10g11010.1 (locus Gly ma10g11010) derived from phytozome v7.0 (chr-ID Gm10; pos 10961201 to 10962150 reverse strand)
tcgccgccgtcgcaggtggttttcttcctctccaggtatattttttattaccttgtttcccgggtttttatgattctattgtatgtggccattggctacaactttccaattttcactggcacaattgaaaaatgagtatgaatgaaactgttttttctctgttgctgtagctatttgtgccacattgttattgtgtttttgcaaattgcatgtttcatattaggcatttctttgtatttgattgatgattgctgttttggttgaatgaatctgaataaggctttaaacttaaaatttattttattcttccgagagtgagagctgtataagaggcttagtattatcttttttgtcttcgtaatgaaggactcctctgtgagtgtcttgcactaatttgctgcattgctgaatttcttgaatctggaatcacaactttgtccgcaattgcggtcgctattggtgttatggttgcagcaagcgtcctgcatcctcttgtcatctttggcgagtcttcggccaattaaacttgagctaatattattatctcaatatttatgcatttcatactcatttgcatacaaattaattttttatactcatataattaattgatatgtatatatacatacatacatttcaagttttcaattgctatgcgacttttgctattagcctgggacactatccgttatatgatattgcagattattggctttccgccactttccacaatccgcaattgatcacactggttatatgtatgaatttacacgttgaagctcttgtttctttgtttgatgtttgtttcctggccaacacataaaacattaaatcataatgccgtttttttttacatatagaatttggatattactacatattagaacagaaaaaaaataaatacaaaaaaatttctttcagtgtaggtatccctcttctctggaacagtg

SEQ ID NO: 18083 - DNA, 580 bp, Glycine max
  Intron number 1 from transcript Glyma13g32600.1 (locus Gly ma13g32600) derived from phytozome v7.0 (chr-ID Gm13; pos 34724883 to 34725462 reverse strand)
ttgctggtgcagcccttgcttacacacttggcaaggtagaacaaaccttttcctgacaggactttgtgaaatccaatccatatatgtgatgttttttcttagttacaacctgcaaatatgttttgattcatagatatatgcaaaacttatgttgcggtaaaataataatagtgttagaaactcatgtttgattgccagaaagtttcaagaggttggaagaaagaagagtacttttttaagtgttaatctgaataaaattatacaagtgatatatatatatatatatatgcgcgcgcgcgcgcgcataagtttatttaggcttcatagaacatttattctagagatagatttcccatatttttattttcatgaatatatttttcttgcaaccagacaaaaaataaaaagttaaactgtgggaagtccaatatctcttcctttccatgatctgttcttagaaaaacaacacaaactacatatgcagtcagattcagacttctagttatatataagctctctggtaataagaggatcaatgatgttgctctttggttcttgcttcaggaaggaaggcgagtgc

SEQ ID NO: 18084 - DNA, 858 bp, Glycine max
  Intron number 1 from transcript Glyma07g30470.1 (locus Gly ma07g30470) derived from phytozome v7.0 (chr-ID Gm07; pos 35475217 to 35476074 reverse strand)
taagtccggcactcctcaggatcgtaaacacgctggtatgttttctttttcttcttctatctctctctctctctctttgttcttttcttatttcactaacgaaactcgtgtttcgagcagaagaacaagtgctctctgagtgagtaagtaagtgtaataattccaggaattgcagagaaagaaatttgcctcagattttgtttagcgaaactttctattcttgtttaaactgtaatgaaaaaaaaaaaacaaataaataaattgattctgtactgtagtttttttttttgttattgtttcgaattcgtaaccaattaaaaatgatttttcaagataactccgtgtaatggttcatttggtcacatgaatgacaataatgaacaaggaaggaaagaaattaagttcagttgttgatgattagaatcctgttctggagatattcgggaacaaggttttaaaaaactgtcgcgttccttgatattgcgagaaattgcggacaaatacgactgatgcagtcacaattgcggtcacagacactctaaaaaccttatcgttgaagctgaaaccatagttgcagactgtttttctaaaaccttgtttgggagtttttgaataactaaaatcatgaggtaggctatccagattttatggataaaggaaatctttagctgaatgttatccatcattgaagcggcatttggcatggtagaaacggaaagaacgtgattgctttttttttttttttttctgttttggagaaagtgttcatgtattgatcctctgactgtttgaattgacgttttgtttttttgtgtattgacagagaagatattaccagttgtcaaaaaccaacattta

SEQ ID NO: 18085 - DNA, 707 bp, Glycine max
  Intron number 1 from transcript Glyma06g44270.2 (locus Gly ma06g44270) derived from phytozome v7.0 (chr-ID Gm06; pos 47205807 to 47206513)
caaaggccgttttttttagtgtgtgtgtttcacttttatttccttttcggttccaatctatgtttgagtcgtattgtaatcatgttgagtcttggtcgatgccttgtataatgtgtatggtgggttgtatcttccttggattttattgaacatgcctgcctgcccgccacctgtttgatgaaatgcttgaacttttcagaaatgaactagtgtgtgatatattggcgcttgaatttgtgatgctacacctgttggctttcttgtttgcatctgaagtaatttaacaaaaacatgagttttttttttgttattattgtattgatgttgatgttacggctgagttttggatacatgactgtttatgtgttcttaaagtgcaaggttaccgtaatactatctttgtttttagacctgaacctgaaatcaaaccaataaggcctcaaggttgttgttggattggtttaaccataggttacccaaggctttttggcttcgaatttggttcttataacattaataataatgtaatacatggaattgcacatcacaagaagatctgttgctattcttaatttcttattcttaagaagcttaaccacagtgtttattttttaaaataaaatgaaatttgttggtttgatattgatggtaatttgttctgactcttaacagttacaaaagaagtgactgtgaatccgaatccaaat

SEQ ID NO: 18086 - DNA, 337 bp, Glycine max
  Intron number 1 from transcript Glyma09g04350.2 (locus Gly ma09g04350) derived from phytozome v7.0 (chr-ID Gm09; pos 3203787 to 3204123)
tcttccttgcatctctaccttcctcttaccacaaggtaattatcaacatcatcccttttatttaatctctttcatttctctccattttttttgtgtgtttttcactcaccatataattgggtatccccataaaccattttgcttgcaactagttcttccttgcttgattgggagagtgccctgtttctattctttgggttcttctcccccctcttctctcttttcacacaaattaaaggttacatttcatagattaagaatagtctagctttgaatattagtttctgatttgttagtcacgatcgcgaattggtttttcttgaacaggtaaacaaag

SEQ ID NO: 18087 - DNA, 272 bp, Glycine max
  Intron number 2 from transcript Glyma11g11860.2 (locus Gly ma11g11860) derived from phytozome v7.0 (chr-ID Gm11; pos 8470444 to 8470715)
gggggttgcttttaaaagttagttagtgtattggaattgttttgacttttgattattctgtttgttgaaggtactggtaatcatgctgcactgctattcttcaatgagattgtcggctaggctaataatgcctttttgaattcttacattgcccatattggataatcaatctattataaactcttaacaaattgaatgataagtgcatattttttcataatcaataaatatttaggtttgtgaaagtgtagggagtttcttattgaggacta

SEQ ID NO: 18088 - DNA, 918 bp, Glycine max
  Intron number 3 from transcript Glyma11g11860.2 (locus Gly ma11g11860) derived from phytozome v7.0 (chr-ID Gm11; pos 8470753 to 8471670)
gcttcattgccttttcgagttgcaaattaaaacaggtgtgcttctgtcaattactatatacattatacaatgacatggacagtagaatagttcattgactttccatgcttgtctccatttccgagcaatgttgcttgtcagagtttctgataataccatgctgcttatggattctcacatgggaatttgtagtttttacttgagttggtttatgcagtcacttaggaggttctgttggagttatttattgctcaatttagcctacatggttgtcctgctgggcataatgccaaattgattctttaatatgcgggccccttgtcttaatctactttaatcaaaacttttcctttagattttctgtcactatttggatgccaaaaaattcaactagttctccatttcatctattctgacagctacttaaaacaagaattgtaaatatatttttatgaattttgatacaagtgttggtagtatttctaatgctaatatttcgaaaggaacaagtctaacattgcctaggtcaagatcccttgaagagtgttttaacacttatttttggcttgtaagaacttgcagaggattgagcttgtgtgcactccattacatttgcacccgtctcagtgttaactttctctgtttttttcattcatgtcccatatcaaattaattatgatctgttataaatctcataattattgcttatatgacaattttgtttctctttctgttgcttggtagaacttggaagctttatttgataaattctcaatgtgaatattgtgtgaagcataatgtaccaaaaacaaagtgtatattgtatgaagcattgtgtgaatactgaagcattttttagtacttgttttctgacttgacttgatatcattcaacctattgcaggcttgccattagcag

SEQ ID NO: 18089 - DNA, 860 bp, Glycine max
  Intron number 2 from transcript Glyma07g17110.1 (locus Gly ma07g17110) derived from phytozome v7.0 (chr-ID Gm07; pos 16787471 to 16788330)
attggaagtaccttctcgctggtattgcttttcaggttagtttccccctatgaatagtttgttctggttacccttttgtgaaaggaatgcaaaggtcatttttttttctttttatggattagagattcaaatagttttcacatgtggtcgtagtgggaactttacttgaacgctactaaaagttcttcatgttggtgtggttacttcgggagattgctagttttctttattaggaacctggtttaatatactaaaattttgtgtttaatcacttaacgttatttttttaaagattatcatttagtgtcaagaatttgatatctggacaactcaatgaggaaaaacataaggaactggtaaatgcagcattgtttgtcatattctgcaactctgaggatgtggcatttgatgcatgctcaaaatttcataaattattggatctcaaatgaaattctgatcgctgacataagtaactcatttattaaatcttaattgcaaatgtactcaagtccatgtggaacactctggttcccacatgatgaaatatttcatttctctcattgacagaaaacctttaatagtttgcatgtacttgttgaaggaagtagaaaatgttttatcaagcattttctctttttgttttttagtttgagaaaagaaaaaaagaatggaaattttttgcatatatttttctaagctttatatccttgtttagtgttatgcatgaggggtgttttgtttgtatagtatattaactaattaatttactatgtaatttgacatacttttattatttatttatttatttatgattgtttaatatctaaattcaaattaaactgtttccttacagtacatac

SEQ ID NO: 18090 - DNA, 941 bp, Glycine max
  Intron number 1 from transcript Glyma12g11560.1 (locus Gly ma12g11560) derived from phytozome v7.0 (chr-ID Gm12; pos 9639468 to 9640408 reverse strand)
cctcggtgccctacaaaaggtaactccaatcatatcattattctgagcttctatcaatcaaccctaaaagttattacttttttttcaccgtgacgtgacattgctgtgaaatataaaatattcaccagttttgtaattaattcctaattttttttgtcttaaccggttcacaaggaaggagacctcactaatccagtctcggtcggaaattatttcttttaaagtttgaactcaattaaacttgagtattacttgcaatgattcaaccttaattcttcatgacttgttaaaagaaattgttaacatgtttttttttcgttgattttctttaaaaggctgttactttgattatatacattattatatcactggttaatatgaaatagctagcatgccttttcatgttgaagattgaacattttttagttattcctaagaattgtgaatagttcaatattaaacccaacaaaaattacttaacaatattatcttaaaatttgagtttaggaataactccatttcaaacagcactttccttacttatatacactatttttttttttttgaactttggtaaagttgtttgggttgggtgcaaatgttctacgaagtggtaacgaaattcaaaaggaaaagtgaaggggaagaaataagtcatcttttttgcccgaccaggttgacctgagaacatgacttcccatgtgcgtttacgaattattagattagaaacttttttttttcttttttcggtttaacttttgcgacattgttgaattgaaccgtttctaatttgtcccgaaccatgttttcactactatttaggatttttgtttttaggtattgaaagattaattgatgataataatgttatttatttatttatttttacttttttggtttttgaaggtgaaggggtataaaaacgagacgaagggaagtga

SEQ ID NO: 18091 - DNA, 552 bp, Glycine max
  Intron number 4 from transcript Glyma05g37850.1 (locus Gly ma05g37850) derived from phytozome v7.0 (chr-ID Gm05; pos 41355373 to 41355924)
agacttgtgctgaagttaattcccacctttatcaggtacttgtttcgctgatgcataaaccattttttcttttttgccattggagtgatttgaaattttttacgcgatcatattttctacagatgaatatgtataatcattatcggtgttgtcatttaactgggcctgttagggtaagtttctttagaaacacttctaactgaagaaaataatgaaatgaactctccattagctaatttgtagaagagctctcgtataacttctctaaaagatgagaggatatctccatattagctgactgttagctaatggagagttcattttagcttatgaagaagcttatttcatttttttcttctcctacaagtgcatctagaaaagcttacccaaacaagccccttatctttgaatgttagacgtaatagatagcaaaatttagtactagtttgttgtgtttgatgtttctgttatctgacaagtgaccttatgacctttaaatcggtaattatttccatataatcgtgtttataggttaaagctgttgctgaggaa

SEQ ID NO: 18092 - DNA, 688 bp, Glycine max
  Intron number 1 from transcript Glyma10g03450.1 (locus Gly ma10g03450) derived from phytozome v7.0 (chr-ID Gm10; pos 2498946 to 2499633)
gctccaggaaaatctcacaggtaatgccttctatgtttctcacatcaaattgaaaggaaatctgttttctcttttatttctttgatgtcttatatatttgttgagattgctatgactataaggcattcaaaattatagtctataaatgttttcttttcctgctaaaagctttataatattggactggcatttgaaagtatatttcatcttcagtaatgtctgccataataatataatgcggtttaatctgttacttcaaaatttactgggacttatatgatgtcctcaagttgaaactttataaagggcatatatggatttttatggaagcatttttctgaaactgcaagtgtgtgtctacatgtatattttcaaatcatctttgttgttttaatatcttctccaaaatatttttttttaatagctttaggtgttgaatcatggatagatgtgatttattttgtttcacaaaatatcagttctttcctctagggacaggttacatgctctgtatgtgctagtctgttgagccaaagtctttttcctatattctcaattgcattgtttatttgcttaatcactcagagagatgtgacaatatttaatttttctgttatcatccatttggtgccgtttgtgttttaagcacgtttgaacttatcacaaggatatttcctcttgcacagat

SEQ ID NO: 18093 - DNA, 747 bp, Glycine max
  Intron number 2 from transcript Glyma10g28800.4 (locus Gly ma10g28800) derived from phytozome v7.0 (chr-ID Gm10; pos 37665338 to 37666084)
ttggtaattttatcttaaccttcaaaatttccaatcatcgtccaactgcgaacgtttcagtttacttcaacagccattaagattagcctctatatgtttcacagtttattattattattattattattattattattattattattattattattattttgttttcgtgggtggaatatggatgcagcattaacaagtaacaactaagactttaccttgtttgactaattcgtccacttttcaaatggttttattgtatttagtgatactttttggtcatttgtgtggattttcttctttatataaggaggttagttaatgtgttacagcttgtttcttacctattatagtacaaaggaggaaatgtaaactttgtgaatatgctgtttgaaaacaatagacatttatgatgggaaatgagaaattttatagtgctagaacgataggttcatgtaactaggctgaaatttgcactgttcactcatatgaagcaagaggtttatggcatattatttgtttgtggaattctggaagcatgatttctttgcaagtttcttctattaatttccatgcatccttgtactaaaatggggcaatgacgtgggaaatgactccttgattttgcatatcctaaatatgtttgttcttgtgtatgtatgtatgaattaattaatacatttttgatgtgatattctgaccacaattcaaaaaggcttcatcttcacagcttactggatccgtgggtgt

SEQ ID NO: 18094 - DNA, 556 bp, Glycine max
  Intron number 1 from transcript Glyma10g19040.2 (locus Gly ma10g19040) derived from phytozome v7.0 (chr-ID Gm10; pos 23562743 to 23563298)
ttccgtttcaaatttccgaaacctcacagtagctggttctctctctctttacgattttcagtagcgcatcttagaccacgaaatttgatgcatgccttgtttagaatatgttaaaacatttaaatttaatcttaggaaatccagagaacagaagcggttgactcttctttcatcttgtttttttttttaaatctaaaaaattctaagcggtgctgaatttctagatttttttttgttaattttaatctttcatttttgcttttgaaaagctagcagttccattgatttatatgtattttctttttgatgtgctgttcaattaatgaagcctgaaaataccctcgatttcagtaggactagcccttggttgaaggggttggctttaatttattcacaagtctgtttaataggcaccgtaactgctaactaggcccctaatttccagtctgtttctgaatttttccactagtcttttaccttgtcttgattatccgattcggtgagattgtttggattttaatctgactggctgtgttagtgcaattacaggcttagc

SEQ ID NO: 18095 - DNA, 208 bp, Glycine max
  Intron number 2 from transcript Glyma13g30490.2 (locus Gly ma13g30490) derived from phytozome v7.0 (chr-ID Gm13; pos 33113016 to 33113223 reverse strand)
gctagagaccccgtgccattctttcttgcacctaagtacgtatttcttggcttttctattttcttaaaaacataagtgtatctgtgtggtgaagtgacatgaataatgtttgttcttgcatccacatttggcgttagtttaatggtgagaataaaatatttgattttatgtagggtaagcaatcaagaaggattagaagcagcagtgg

SEQ ID NO: 18096 - DNA, 723 bp, Glycine max
  Intron number 2 from transcript Glyma08g02420.1 (locus Gly ma08g02420) derived from phytozome v7.0 (chr-ID Gm08; pos 1668692 to 1669414 reverse strand)
cgcaaagaacgccaagtcgaaattcgcaagaagatgtaacttcctacataactctctctactcagttttttggttttttttgtctcttgtgagttcgaaatttgttaggtcttctcgtcctttgatatcagttgaaaataaattctggagagtgagtcctactcgtacaggtcttgatcctcacttcattatctattgactgtgatgaagatcaaactgctgagattttaaaattgtgttttaagtattaaaatattatccgtccgatcttcctttaatggttctgaattgctgaatgcgtgaatgcaggcaatccagatcactaatgaaatagtctagcggatccttgtggtcttgttttactattcagtaaaatcagtaattgatatttgctccactttcaacttttgcatttagaaaatatggattgaggtttagtctcttttatttattttgtttggtttgatgttcaatttctttcaagctgttgtctgtggcaaattacttgaactcaaggatattgtcgaagtttgatgaatgaaaaattctctcttcttttaagaaaatgataagtgaaattgagagtttagtttctgaggcttgttttatttcatcatgtgaaatatggattgttgtgctgtgttccaaagtggcaaaaacagtgccagttgagatagtttaatttttgtggcacaattaattgtttgttgcagtgagtactca

SEQ ID NO: 18097 - DNA, 345 bp, Glycine max
  Intron number 3 from transcript Glyma07g03260.1 (locus Gly ma07g03260) derived from phytozome v7.0 (chr-ID Gm07; pos 2313023 to 2313367 reverse strand)
tctcaggttatcatgctatctatgtgatatacttctattttgtacacaacttaggtaaagataaacagaaaattgaaaaagaaggacatgagagaaagagtcatacccaatctaaacatgatcttctgaggtgaataaatgattttgactgtttgataactactactagatcatcagcaggctaaaatatgtttctctaatgggtccttgaacattttttgttctggatttcttttttgtcatttgacctacattacatgtttttcagtatcttatgattaatactatttaaattttctgtggttattatttattttaatttccctcctcttaaacagttgtcgg

SEQ ID NO: 18098 - DNA, 669 bp, Glycine max
  Intron number 4 from transcript Glyma06g16880.2 (locus Gly ma06g16880) derived from phytozome v7.0 (chr-ID Gm06; pos 13282250 to 13282918)
gtggaggtgaatgttgaataatttgttaattcaatggtttgctgtcttctcttgcagcactttatgatgttttgttttgagttgctatggcaggagacacacaaggaatctgtaaagtggaaatttatgactgaccatcgccttactgaaatcatgacttctttgaaggatattcaggtatctaagaagtatattggcatcactttttcatccttttaagatttaatgggattcatgttatgttgaatgtttttcttttagttggttgatttgtttacttatgtattaagatttaatgggatatatgttatgttgaatgttcatcttttagttggttgatttgtttatctatgtattaagatttaatgggatacatgttattgttgaatgcttatcttttagttggttgatttgttcacttatgtgatctctggctcacataagttttttagccctgtgaaaatggggtagagggagaccatgaaggacattagaggagattatttaaaggaatctcatggtgaataatattcatgataagtttttaaccaagctcaatggtgtcgaataaatcatatagttgatctcatgtagtgagattgttgttgttgatgatgctgacaattttatctctggctcactgtagttttatatattgacaggggaagt

SEQ ID NO: 18099 - DNA, 777 bp, Glycine max
  Intron number 2 from transcript Glyma10g02690.2 (locus Gly ma10g02690) derived from phytozome v7.0 (chr-ID Gm10; pos 1916683 to 1917459 reverse strand)
ttggcagtgagaagatacacaaggtattttacttatttagtactgaactcatcatgctctacttgaataaatatttaattggaatttggaagcacttataagaggttatatgggtttatttttttatataagcactcagcagaatgttggtgtccctgttagagcctagtttgagcttaggaaaatggctaatgactttactataattctataagttttttttttatagtttatttcaataagcttgacagaaaatcctatcaaaataagctgttcttttagcttaatttaataactttcacagttaagttcgttaataggctctttattgaactggtgcttaattgagttgtttaccccgatgcatcctatgtttttattgaatattgtaaatgcttaattatatttttactcaaatgcaatgttgttaaatggcggcgctattgccaccatgatggaatggcatggtgtttttttttgtcaaccgccataggcaatttgtgaagggagtcccgctatggcagcaccataggctgcaatggcatgtttatatggcagaactttggccttctgctgtgttcttccatccgccattgataacactgctcaaatgtgaccgtagtgttggttgttactctggagttttgtgggaattaccactttctaaaagtcttaaataattttttgaattcaataatgttaaaaatgtattgatcgtgtactaatccctgctgctacctgacatgatgtcctcctcactgcagagttttgttggcc

SEQ ID NO: 18100 - DNA, 622 bp, Glycine max
  Intron number 3 from transcript Glyma09g03670.1 (locus Gly ma09g03670) derived from phytozome v7.0 (chr-ID Gm09; pos 2618243 to 2618864 reverse strand)
actctgctacggtctcacaggttcttactatgtctctcttctgctctctagttcctatttgttgcctatgtctacactggtataaaatatgaacgtgcaattgaaaatttgcatgcgggtggcgtatgttttcactagcttacaatcacatgatctcttgttaagagttttttttttttttattggcaaatgttaattattagtttgttagttttttgttagcaggagggattaaacccgcaagctttccctccttcccttctttcttaaccacctaaccattattatatctccatctcttgttaagagtgaaaataagtgtacttatggagaaccgagagactgttgtacgtagcacatttttatatttgaattttttatgtcattccttgttgggataattggcttggcaagttatgctgaatgctacgccggaccttgcttttgaaaatgggactgattaattaacattgttttactttactttcagaatgcatttgcttgtacttttttattgatgttcttggggcatgggttatccaattatttttgttttatttttttgggattttaagaatgtgtttgtgattaatggaatggttgcaatttgtcaatgacaggg

SEQ ID NO: 18101 - DNA, 802 bp, Glycine max
  Intron number 1 from transcript Glyma06g12400.1 (locus Gly ma06g12400) derived from phytozome v7.0 (chr-ID Gm06; pos 9585505 to 9586306 reverse strand)
cttcttcattccagactcttcttttttgcttctgggtatctctccttcattcatttcattgcctccttatgcttatgttgtgtctgctttcacttctttttctgggtttgtctaactattttgtagagttttatacaactgaattgattttttttttctttatgaatattctgaaccccccatctaatatttgtttaattgtccgattattgaaattatttgaattggggtgatacctttcttttgaacaaatctgagttaacgatattttctggggttgggtcaaggtttcatgttcgattttcccatatttttcatatacttctgaatgtagacgtcttgttacacgctcctcttttacataggatcatacatatactgaaattttacttaaggtaatagtaaatcatagctgtaaaacagatgtaacactgccaatcaaggttgtatgtcaattttctggtatttggaatgatagcactacatatctcaatctgtggctctgacttttctgtattatgcatcaattatgaattatgacatgtggtattagttcttctctggaggctactgttgcatccctgccaagttggtatttaattagagtggctagtaaaagatgctttatccttttcttgaccctatttcatactgtctcttatattgattgctagtctttcacataataatatatgtggtttctgtaatttataagctttttatacaagaattttaataataattgaagatgttgctcagtgacaacttggatatcattcttttgcagacatcagtgatctga

SEQ ID NO: 18102 - DNA, 648 bp, Glycine max
  Intron number 1 from transcript Glyma09g11990.1 (locus Gly ma09g11990) derived from phytozome v7.0 (chr-ID Gm09; pos 12301574 to 12302221)
cagttggggccttgcttctcttctcaatctggtactttcgcttctttttcattttttttttcaaatggtttaaggtttatgaatctggatggttggttttggaattataaatgctgcttatggtttcaacaaacaaactaaggattttttttcccttttttgctttggctactttgttttatggtctgatgtctttcactgtttaatgatgttttttttttttaaaaaaaatttttggaaatgatgtttgaatctataatgcatgtctgggtctcttactttagtcgcaaataattcctgaagaagaaaaaaagaaataactatgtttattttttttaaaaaaatattatgtcattatctactcattgttcgtgatggtgaacaaggtgataagattctcaccactaatatacccccccgaccctttttaatttttcttaataatccgtgcttattgactctgtcttccgcaaggtttattgaaattcacatctgggttaagtttttagtcttcaatttttatttttattttttacgtgttcatttattaattaattgttctaataagttcgtttacacaaccttcaaaatctcatacatcttttaattgtcatctcgttcaggacctcaacaacaagatttttttaa

SEQ ID NO: 18103 - DNA, 463 bp, Glycine max
  Intron number 1 from transcript Glyma06g39770.1 (locus Gly ma06g39770) derived from phytozome v7.0 (chr-ID Gm06; pos 42686412 to 42686874 reverse strand)
ctgcatttccttcgactctccggtgatgtttttcttctttcgtatagttctagaaatgattaatttttgtttgaaccagcttcgtgtcgttcttccattgttctaatttggtttttcttcttagaattcgaaggcattgagtaatttgtggttaccgcgctgtttgttttgttaacttttgtttataattttaggcattaggttttgtgatgattattattgcatggttgctgagaaaacgtgggatattgatgagaatatgcgagtggttttgcggtttttcagcattgagagtttaagatattagtgtgaatggttttggattcctgaaattggaaatggtggattttttagtatgttgcaatgtgtttagagcttcacagtgcaggaatttgattcttggtgctgattttttaattttttttatgaattttagaggtcagaaggtggtttgttcattgac

SEQ ID NO: 18104 - DNA, 832 bp, Glycine max
  Intron number 1 from transcript Glyma10g35470.1 (locus Gly ma10g35470) derived from phytozome v7.0 (chr-ID Gm10; pos 43686515 to 43687346)
aaagattgcacctttacccttcaggtttgctttctcaagctaacattctttcatttcctccacaacttgtaattttcaactttacccaccatcacaaacgctgctagtgctatcttttgctttttctcatccaagggaattcaatttcaaggacaatcaacaattggggtcatacatatatacatgcataccatttttcttaaaccaaaatttgtactgattccatccacttttaatgttgtaatctttttttgtgtttccctcttgcttatttcagttttctttccaaaatattggaggttttgaattgccaaattacatacaaggtttgctggctggccttattcaactttgcctcaatttttaaaatgtttccatttccattcaattttttctttggaaaaatgaggaagcgaaaaatgggattccgtatcttcaaattgattacttcaaaggaaacaaaaaaaaaaaaaaagagaaagtgaaggtctttctggataatatcaaaatgccatattcatattgtgatatttggaccagctctcactaacatgcgaaaatcttcaatttcggattttcatttcataaactaagtaataagtaatttagtaataaaaaaacgagtcagttaccttttcttaacttttgtccctctctctctctctctaattatttccaaagaaaaatctttaaatgcctaacatgcgccacaatctccacattcaacaaaagccgctgtgatttttcttttttccatattcattttctgtttcacactctaattttctttccgcgtttgaattttctcaggatattttcaattgtcaagaaa

SEQ ID NO: 18105 - DNA, 861 bp, Glycine max
  Intron number 2 from transcript Glyma10g35470.1 (locus Gly ma10g35470) derived from phytozome v7.0 (chr-ID Gm10; pos 43687555 to 43688415)
gtgcttcggacctctcggccgagctatccgttccggtgagctttatgcattttttttttgtttaaaagtttttggcgcgttcacatgaattcggtgaactgctctgtaattatatcagcgcccaatgtttcactagcgtcctttgtggccgttggattgattcattatgacatcactgttcatgtacggatctgattggctgttttaaaagtttccttattgccagcctggctctgtgcgtaaatagataacatgaaattttggttcttcttgtggggagcattgttgagtgattgtcttcacttcttaaatagcgaagtttaaaaaaaaaattgaattttgatgacatcgcaaaaataaaaaattccaaaatatctagacagtagtcaagggaattgttttttttcgtaaaggattgtacaagttgaaaaaatttgaatttaaatttgaattcacaattatttattttttttcttcttctagaaaaaaggcattttagtcatttcaaatgacacttaattctgtcggtgacatgtggcacagcacatcccctcactctcccattatttgaacatcattattggatatcatgtgattttgcatgtgatgccaccacccacacaaataatgagcattgaaaaattggtcactctagcaatccatgtttgatgataccctttttacagtgaacacaaattcgtattcctcattcaatttggagagctcggcatatttatttataccttatttagtggcatgcaaagatagataggaattatgctatactgagtttacatgttttgcttgaactgtaaatgcaaaatatgattctgatgaatgtggtgatgctgttattgcagt

SEQ ID NO: 18106 - DNA, 506 bp, Glycine max
  Intron number 1 from transcript Glyma07g04900.1 (locus Gly ma07g04900) derived from phytozome v7.0 (chr-ID Gm07; pos 3608332 to 3608837 reverse strand)
gtttttttaagcaggtacatttgatgtttgctttataggctaataaatatgtttgagttgtgaaggaagataactacagtagctgatagtgatgctagtggcttgtatgaattcctttatttctttcttattttttgttttctatgtctacaatgaggttaatctttgatatatgcttttgagtatctgaaacttgttggaaacaattttctcttgcttgtatttattaatttccacttgatcaataatgattactgtacctttctataaagtgaaactgatcttattttagcattttatttagtagagttaatgctgcagccattaaaccataagttgttagtttttcagttttcgtatattgggaaattcattcttcaagtccacacacaaggtttgattaaacttactataggaattatttctaacatcttattgctgggtaacttttaatggttactgtattattggtttctagatttactttaatagtgagtcctagtatt

SEQ ID NO: 18107 - DNA, 333 bp, Glycine max
  Intron number 1 from transcript Glyma13g05650.1 (locus Gly ma13g05650) derived from phytozome v7.0 (chr-ID Gm13; pos 5981648 to 5981980)
ggaacaacactgccacctcaatccaccaccaccaggtatgacatgcaacatgttgctcgagaaattattacatggtttaggaccattacctgatcatcgtctcggtcaatctcctgacacctaattaattttttttgtttacaaactacatttaataaaattggattgtgtcacatgaaaattaacggagactatggtgacctagaaccgtgccataatttctccatgttttctacctttggggaagtgggtttgtgtcaaaattcaaacttgttttgttggttggtgggggtgagtcatgagtggtgtgagttttgttgttttctttgcagg

SEQ ID NO: 18108 - DNA, 815 bp, Glycine max
  Intron number 2 from transcript Glyma09g37380.1 (locus Gly ma09g37380) derived from phytozome v7.0 (chr-ID Gm09; pos 42969465 to 42970279)
ttcctctgcttcagtttgccgacaagaaccgtcaggtaaagcacttccccagttttgatcttgtaacactttttcgggtactctctttatagttttcttcaaatacttttgttttcccacattgatattgttcttttttttaattgttttgtttgattttttttgttctgtctctctcttgtggatcattaaaattgtttttttaaatgatttttattgatgctatcaattttgctgaagggtgatccttcatattcaaattccaaacccagttagagattttagaatttgattgagttggattcgtttccattggttgttggagtgtgaaaaaaattctgtcttcagttaatgggcactcttcattctcaaatgtgataaatacgatttccttgcatgtcaagtgttgatatgtgtgctaaaatattaaataagacgattgaaatatatagtcatgtgattcatgacatagttctttgtcctaaaattgaggctgatatctgttggggaccacataatattttggatttacaatctctcgtggatgaagtgaatgcaactaaatgatagataatgttttctataatttcactgtagttctgcttatcttcattgtttgtttttaacaatgcatgcccttattaatggagaaatgaaagggaaaggcaagcctattcccaccatcagtttctgaagttacatcaatcatccttaattctttcagggtcactcttcctctaaaaaagttgtcaagttttttacttgctttgctttctgcaggtttgttgaatctgcttctttttatttcaatttgg

SEQ ID NO: 18109 - DNA, 661 bp, Glycine max
  Intron number 3 from transcript Glyma06g10760.1 (locus Gly ma06g10760) derived from phytozome v7.0 (chr-ID Gm06; pos 8143322 to 8143982)
aatctagcttcatacaagctggggtaaatgaatatttattctccattgaaaatggtgtagttaaggattttttgtggtggccctcatcaattatagtcatattccactaattcagtgcatgctagttataaaatttagcattcttaaattcatctactttgcttaattttgataaatgggtgggcatctgcattggcttaacttcattgcttactctaatagtgctgatattaaaatagatatcatccttaaactatcttgaaggtattttcttcgaacaatgaataaaatctgaatattttctctttccttgaaatgttaaccatatttatatctgaactgttctaagcatgtaccttgctctacaatgatacaattatttgtctttaagtgccagaaaatcccatgggattattgagtaagtttgtcgacatctttggctaagcagcatctcctcatctacttggtgggtaattatgtcaatttttttgtaccctgcatttggagggttttgtgatagattttctgataggttatggtggtactgaatgtgaacttagttcttaaagtttgttccttgcctaaaatgttctttgattaatcatgttggcattctaaatatacaggttagaaccatactggacattggctgtggttacgg

SEQ ID NO: 18110 - DNA, 645 bp, Glycine max
  Intron number 1 from transcript Glyma12g36960.2 (locus Gly ma12g36960) derived from phytozome v7.0 (chr-ID Gm12; pos 39955915 to 39956559 reverse strand)
cccaaattcaacgaaacaacatcctcatatcagtaattccttaccccttttcactcaatttcacttttctgttttcattcacaatttttattcaattagagtttttcctcttccgattcagtttagtttaccgttattatcattgttttgggtcatgaatttttgcatttcgttcaaagtcacttatgtcaaagaattagtgcaaaatgaattgttgggtatatgagaagttgagaataatatatttttctagtgtttttgatgttggtgaataactgtatgtgtttatttcaatccacgagcatatctgagtttatttttttattgtttttatttttcaagatttgaattaggctcttgatacatatgaaatgtggttgatggcataaacttggaaaaagaactcagggtatatgtgaaatgtggttgattgcataaacatgaaaaatgaactgtatatgtttaagacttagtggaatataaatttttgggtgattgagaaatggagaataagaggtcctctagtttgagcaagtcaggaactgagtattttatgtcggagaataactgtttatgtttatttgaatccatgagcatctgaatttgattttttattttgtttttcaaaattgtattagggtcttg

SEQ ID NO: 18111 - DNA, 735 bp, Glycine max
  Intron number 2 from transcript Glyma11g07250.2 (locus Gly ma11g07250) derived from phytozome v7.0 (chr-ID Gm11; pos 5084991 to 5085725)
ccaactcgttcacacactgttgcagctcaggtgtatgagggctttgctatcatcttttttttggctcgtttcttgtgcatattgtgtatatggacagttctctgtaacattcgtattgtggctatttgttctgctttatgttattccttattgggtcttttggttgttatactttgatgtaactactaactagtatccatgtgtaaaaattatttcattgttaagtgtaatttatgaagaaaaaaaaaggaatcgtgaatgattgcatgaaggctattgaatgatgagttcaatcagatgaaatcaacagtagcttccttaggtttgtattataaattttcttttatgtaagtcatagtatgctttgtgacgtgatttaactacagtcttggatcacattcccactgtcaccacttacattcataattcattcttgtttgacacttcattattattttggatacatgacattttaaacttggctatataattatgttgtgtatcaatgatggacaacgatttaatctttcatctgccaggtttgtgcttttaaaaaatcattgagattaccccatagtgtattgtttttttctgcttgtacagttagtcatgatgtaaacagtattggatggtgcaccaaagtatattaagttgacactatcatgtcaagcatcccccctgaatatgctggcaacactaattcatgagaataaaattctgtatagggtggtataa

SEQ ID NO: 18112 - DNA, 459 bp, Glycine max
  Intron number 1 from transcript Glyma07g03660.1 (locus Gly ma07g03660) derived from phytozome v7.0 (chr-ID Gm07; pos 2535096 to 2535554)
tgaagggaatcgcagctcgttctctcagcagacccgtaagatcttcagcccttaatttttatgcatgtttaatcattacttagtttatttttcgcatctattttgtgtgaataatacaaagttacattctttacacatccctgcctaatgggtatcgtttgttttctacgtctttcttgagctttttttttttttttttttaaatttggttagtaaacttgcttcttgaacattatagtaattattctcatgaataggcgttatgtgtgccagcttcatccttgggtttttgagttaccccaaattgattttggagaaggtgctttacatataccattgcattactcttctaattagtgccaactattattattggttagtttttaattttgtaattcttcaaactgcaatttgtaatctcctattctaacagtcttcccttaacatggtggcagttaa

SEQ ID NO: 18113 - DNA, 580 bp, Glycine max
  Intron number 2 from transcript Glyma09g02610.1 (locus Gly ma09g02610) derived from phytozome v7.0 (chr-ID Gm09; pos 1790504 to 1791083)
ttcttgcccttgcagctgagatatcttctgttctggtatgtctcactcctatttttaaataaatttcttctaacattattggatgccattactttccactttataagttgagaccatctccatgtttagtgtgttgtctaaatgtgcatattatctaaattgtaatccttaattatgcctaatattttaacttttctttcttttagtttctagaatgtgtcaattttaattgttaactgacatacgaaaggaggttttgcttcttaaaatcacttttctctgatttcattagcaatcttttctaagattacttcatatactttaagaccaattttatggtctcccataaaccctcgctcataaattaagtgactatttaagaagacagagaaaatgaaagtgagttgatgaattagttaaaacaaattattagtaaggaatgtctactcgcagccaactttgaaaaataaatactataacattcttaatatattgtgttaaatcaaagtccaagttaacaggtatgacttttgcttttactttattatcccttctaaaatttacaaccatgcacagggtc

SEQ ID NO: 18114 - DNA, 547 bp, Glycine max
  Intron number 2 from transcript Glyma10g30880.2 (locus Gly ma10g30880) derived from phytozome v7.0 (chr-ID Gm10; pos 39469085 to 39469631)
caaagtaagcaatattttttggtttagaacatttcttttagacttgctcttatagtgatcttaatgccacacaatagtttacattttacattttctacaagattttgataatttattcttcttgtgagaaaaaaaagaacttagtttatagtgccaaattgtctattgtgaatttgctctttgtttgcaaacatatataaccttttcattgtatatattggttggtgagtagaaatgcttcctattacaaagccttcagtgatcacagcagagcattttatttgtttttcccgcactgcatgattaccccatgcaatgttaatcaagaaatggggcatgttttcgtaatgcagtgacttcacttctttgttccgtttactgttgctggtaatgcgtaatgactaccatacagctactagaatgatttcaggcccggcaatttgctaatttttctttaggttttaaaagtcccatcttgttgttaattgattcaaatttatagcagcatcatgactcgtattttacctgaatgcagctctggtggcag

SEQ ID NO: 18115 - DNA, 938 bp, Glycine max
  Intron number 1 from transcript Glyma13g19160.3 (locus Gly ma13g19160) derived from phytozome v7.0 (chr-ID Gm13; pos 22733097 to 22734034)
gctgctaataaaccatcctcttcttctgaaattaggtaccctctctctctctctctctctctctctctctctctctctcatggaacaagcaaccaattgggaacaatttcttaatttttgtaaaaaaaaaaatagtttcattttttcaatagttaactgttctttgattgacactttggagtgttttccggaagataaattgtgtttatataagttttttttttttatcaacaaagaagataggaagaaaaaagagagaagtgtgtgatgaggttgttggtatgttagaaagaaagaacagaagtaaaataatgttgcagaaagtattatagaaatgtgttgtagaaataatgtaaccctcttccgaatggtgtttgttatattaaagtatattctatttctaatttaattgtaatcaggatgtagagttgagatgcatgacatgatcatacatacgtacatatgcatagtacaggtagcattagcataagaggaaaatgtagctatcaattgatcattactcattagaattgatgccgagagtggcattgaatggccacaaacaaacatgtaattttagttttaagttcataatttcacatgttgatcatatatttggaattcctggtaccccttttcagttttcatgacagtgtgacacgaagcctgaaaaagaaaagaataggatcaaatgagtatggtttgcattggaattaggttttatatggagtgtttatgaggaacattccacgatgaaaggtaaaataatcattataatctgaagcatcatttagaagatctttttgtcagcaatgttgcatggttaatttgtttgggcaaacctctcaaatgaatgcagagttcactcaactttcttcttttcttatggtttctcctctttatgcaatgcttgtttcatcaggttctattagccagtg

SEQ ID NO: 18116 - DNA, 700 bp, Glycine max
  Intron number 4 from transcript Glyma10g31810.1 (locus Gly ma10g31810) derived from phytozome v7.0 (chr-ID Gm10; pos 40282972 to 40283671)
tggaggtaaatctatcagcattttactcaaatttatttgtcaatgcgtacacattttataagaactattttgaactttgataaatccctgggatcatagctaaacaaaaaacttcaagaaaaggttgtgagggaggagacaaagatgaaaaaaagagagagaaaagaggcaaggtataggaggatttcattggatatattgttgtattgttcctgtgtgtcaggtaaccttgttaatagttggttacaataggttagttagttacctagttatttgttagttgtctcgggctgggataattagagaaataaggcatgttgcctctaaataaggaaaggtgtacagagactcagagaggaggtggggggaccttatcaagttcgaaacatttggactcttggagagtgagggagaggtcagggtctctcgaataccttaagcattagtgtaattcatttcaggctctgttaccagagaattgtactagagaataattcacatttctgtcacttgtcttcatctattttcttctctgtcctgattctgttctatcactctgccttttcaaattcttaaaatttcatttatggtggaagttacttattgtttagtagctgtgtcattgtatattgataatatatgatttacactcaaatatgttaatttgggttacaggttaatttttatatccggggccccc

SEQ ID NO: 18117 - DNA, 528 bp, Glycine max
  Intron number 4 from transcript Glyma08g11080.1 (locus Gly ma08g11080) derived from phytozome v7.0 (chr-ID Gm08; pos 8096804 to 8097331 reverse strand)
gaagaactgtgggagaagcacacgaaaggctgaaggtgtgctacttgtgtctatactgttgtatttgttagttgtccatgaaaaaggaaaacttgtttgcaggtgtctagaggggggtctcagttgtagaaatgcagtccataaattaatatgtaagaggagaaaaattgttgactctcctgaattgttagaaaaaaatatattcataactttgatagatgtctcaaacttggtgaatggcgacagatggtattattaaaaaatacttaaaaatccttatttgaagtttcattgaagactctcaagatgcttttgaaatagaatgatttgactatcagctgccccttatatacaatagatataacttatttctgttcagtgattattttttagcatgttttaaaaacattattcacttattgttgctatatttacgagtttaggccaacatttgtttttgtgatggtattccgtatattgatttcttcaatctaaatgattgtactaatctgcatgactaggttctaa

SEQ ID NO: 18118 - DNA, 319 bp, Glycine max
  Intron number 2 from transcript Glyma05g36230.1 (locus Gly ma05g36230) derived from phytozome v7.0 (chr-ID Gm05; pos 40074280 to 40074598 reverse strand)
ctgcaagagtccgggtaatttggatattgaatttgagtcttcactcttaatatgttttttttttcttctcaatctattacctattaatgaacttttcttaccttacaaatttcatattttgtcattttatttttatttttgttctaatttatctggttattaatgttttaaaatttccatatttataaatttagagttcaaaaaattgacttttgacatgtgttaataaattcatagttgattcgcataatttatttaaacaaattacttctcgatttcaaaagtttttattgacttctgttttgcattcaggttgaac

SEQ ID NO: 18119 - DNA, 923 bp, Glycine max
  Intron number 2 from transcript Glyma07g37630.2 (locus Gly ma07g37630) derived from phytozome v7.0 (chr-ID Gm07; pos 42629299 to 42630221 reverse strand)
caggtattctctcttctctaggtaacaactctgttaggttctcgtttctaaattatttgttaattgttaattgctcgctttcttaaggaattgtgaattatcaacttattgatactgtctctttttatttttttcctctcctgcaatttctttatcttcatgctgtatatcgtgtgggaatttgttcgtttgaagtcctgctattttccctgtattcttgcttgctgaagttatttgcgtttgctagagaaaggctgtttaatttattttgtgtatcataaattcataatgcattttttccattttggataaatgtgtttgtttaaattttgcaacacttgactattttactatttcaagtttgagcagtcctttattttgagggataataataggggtgttcgtggtttggtttggttattcatcaaaaagtcacccgaaccaaacatataaaacatcttaaaaaagtattctagaaaagaaaatggtatacgctggataagtttcatatgcataacactaaaaaatactatgaaactcaagtgatatgcacataaaagacataacacgaaagtaatataagtgttaatataagtgttgcggtttggtttagtttcaaaaacacaaactgcaatccaaaccaaacctatcagtttgagaaaaaaaatcatccaaacaaatccaaaaagaatcggtttggtttggtttctggtttttttagcggttttcagtttttattttggattggtttggatttgaacacccctagataataatactttttcaatattttttagaatcttacattggttgttgtgttaggattggttgaacttgagcgtgctaaattttgtttatttttctgtctcattgcttatatgtctatgagatgacttagatgaacatgatattgccttagggtt

SEQ ID NO: 18120 - DNA, 488 bp, Glycine max
  Intron number 2 from transcript Glyma11g13860.1 (locus Gly ma11g13860) derived from phytozome v7.0 (chr-ID Gm11; pos 9865168 to 9865655)
ggatactttcactcataaatacccaggtatatgtatatctctccttccctagtgtttttttaatattgtttacttatgttttcgaataagagtaaatagtatcgtaactcagttggcaacaaacagcgaacatgtgggaggggagaacctgagtttgatttccacataacacatattcagggagaagaagaggagctttaagtatgccatagtcccggaccataggttaattcaatcgccagcataaaagaccgacgtttgtggtgatacttcaaaatctcaccggagagccaaatacctcaattgtagtgctcaccggaaagaagaaaaaaaaaagtaaatagtatgtgttttttaattgctccagccttgcagaattttgggtctctaggtgaaatttaggaccatttttttatcaagcaaagtaaattattacttgcaatcagaactcagaggtggttgacagagtggggggagagatcatagag

SEQ ID NO: 18121 - DNA, 896 bp, Glycine max
  Intron number 1 from transcript Glyma10g03660.1 (locus Gly ma10g03660) derived from phytozome v7.0 (chr-ID Gm10; pos 2729433 to 2730328)
tcctcctcctcctccattgacaatttccaccaagcgtgagtgaattactaatttctttttcgtttcttaacttttcttcctatgttcaacttgcattcaagtttttatttttattttttttatgtattttcgagatctcgttaccggtaaccgttagaacctcccaaactttgtttttcgttgacatttttagatcctcgctgtgctttcgttgttttcctcattcattacgcgccatgaatttcaatcagttctatcaatgctaacatggtttcacacacacggaaagaggtcataggatgagtttttgtcagtaacatgggagatatgttgttaattgtactttgtcttgtacgcttttttgtttttttttatcggcaaatgttagttgttagtttgttagtttttgttagggagaggaatttgaatgcacggcctcaatagttcaaaatatgaatagaggaaaaagagatacactatagacttatggccacggcgagagagtattttcagattaatacttgacaatgttgtgttgatatgtgtagattcagtgcggtattctctttatgttagaatggtgccaatgataacattgtactgtgtctatatttctatttctatttgtttgaaggtaggtgtattttgagtctgggactatgtttgttgttattggtgtgaatagtgagcaagttttctttattgcttctattatatactgcatattctgttcataggcatggttttagtgatctcttctagggctttgtatgctggagtttctttagttttctgtgaagtgctttttacttcaagttggggcgagcttcgcttattcctgcccaatttctgtatttacagctttcccatcgtggaacctgatcctggtcacacga

SEQ ID NO: 18122 - DNA, 943 bp, Glycine max
  Intron number 1 from transcript Glyma09g30480.1 (locus Gly ma09g30480) derived from phytozome v7.0 (chr-ID Gm09; pos 37324062 to 37325004)
tcgggacttggcagattattagaagagaagaaaaggtgtgtcttttttggtattgaattcataataattaggaaattgttttgtttttcttcacttaatgttttcttctcataatctcaattatagaattttgaaccattgattttgatgataaaggggaatgaataggagggccgaaagaaatgtgattgaatctaatagaagattatgtaaaatgtgaaagtaacaccaccctaataattatacttgtattgcttttggaatgaggtatttgtaagtgaattgggggaggggggatatagcaatgtgctttgtgatgaggatcaagtaaaagaactccactctacaagcttggtggattgtggtcttaaaagttaaaatgtgatctgttgtgctattgtaaactttttttttatatgtgtaacaagttgtgaactttgtctgaactaccatggctgaaaacgtgtattattatttgtgactgtcaagattgtgagactttgaatcaatttctgttgacattattgatctaggtaactttaataaatatgatgcatcgaggtgatataatattttctcattttcctcatcatgttttgaatttagtattatttcatctgtgcatgccacttatttcttaagtcttaacccatttaggagatttctaatcgtaggcttattgattatattgtggaatggattattgccttaatttccatctccatgatacatggatgatttgaatacacgatgttttaagaatttcattacaatcaaacattaatagtttactaatagatagagtattctgttgtaaatatttggaaaaaagttttgtggattgagtttattttatatgaactcatgagatttcatgtttggatatttgctatgcatattagctaattgaaaatttcttccatcttcaatgttgcagattaaa

SEQ ID NO: 18123 - DNA, 483 bp, Glycine max
  Intron number 2 from transcript Glyma08g04110.2 (locus Gly ma08g04110) derived from phytozome v7.0 (chr-ID Gm08; pos 2913510 to 2913992)
cgaggcctcctccaccagatccatcctcagaggtaaaattatacacattaatttagagagattctacacaatttaatttgttattgtttttctttctttctgggttttgatacgagttgcacatttcgtgaaactttactaaaaccaaatgacaattgaaattaacctttgaatttggtccccgaaatgctttcgtattgaagaatattttcaattttcattttccaatttaatatacatacgccaaaggcgtgggtcctccaacttttctttttaaacgaatatgtatgtaaaacggttcttctaatatttttctttattatatatagataaaaaaatggatcgtttgcttctctttatcttctattttcttttgggtttctactttaagtatttctttttctattgcattataattttaacgatttttttgttttttaatttcaagtgtaatagcagtactgcaactggtggggcattcaa

SEQ ID NO: 18124 - DNA, 521 bp, Glycine max
  Intron number 1 from transcript Glyma14g01990.2 (locus Gly ma14g01990) derived from phytozome v7.0 (chr-ID Gm14; pos 1169295 to 1169815)
aaatacttgttccagtgtctactctactcataaaggtatgtctttctttttgtgcttttactgactcatacacaaaagtttttttttttttttgttgggtgttcttgtttagatctttggttgttttgggtgggtctgaggaatatgcttcgtgggtttgcttctgggcagattaaagttttaaactttggttttagattttggcagtttcttgttttctccccgacccacctttcttccttttagtttcttcttaaggttattgaaatatcaagttgttgttgttgttttgggtaggattagttacggatctaacctttgttggtaaaattggtattaacacgttctatggggacgttgcatagctttgcatctttagggatttggaactagggttgtttggaaactctgtttctaaatttgaggttttatcgtttttctttattctgtgtgaataataaattataaattgaacggcttattgagattacgttgtcttattctgcaggatttgggacatc

SEQ ID NO: 18125 - DNA, 393 bp, Glycine max
  Intron number 2 from transcript Glyma13g28460.2 (locus Gly ma13g28460) derived from phytozome v7.0 (chr-ID Gm13; pos 31483212 to 31483604 reverse strand)
tggataaatgtaagggttcaagttgatgttctttacattatgtgttcttgtgtcatgtttaagtggtcttattaccagttaacttccacaatatttgactaatgaactgtatggttctttcttctgctcattattctgggcagtttttgctaaatttcgccgattgagatgcttatttgtgctctaatttactatttactatatactatctgataccctcttttaacttgatgactctagagtttcatactttaactaaaaaaaagaagaaaaattgttttctctcactttttcaagtttttaatgaatttgattagttagttttttttttccgggtttcattttttctttctcttttgtggatcaaccagttactgaaagaccctttggagt

SEQ ID NO: 18126 - DNA, 612 bp, Glycine max
  Intron number 1 from transcript Glyma06g31120.1 (locus Gly ma06g31120) derived from phytozome v7.0 (chr-ID Gm06; pos 30703755 to 30704366 reverse strand)
cccctttgtcagcttctctctgtgagtctccctctccatttaatttcatttgggtactcacagagttcatcaagattggaactttttgccttatctgtccaagttgggttttggggtttcaattagtttgtccaaattgtgccattttctttgcttcctcatgtttcatgaggtttatttatgtttttgttgtaggggaggggtttttgtttgtattgatgtgggtgtgatggacaatgggacagtatggtgtcttttgtgttaaaagtcccttttttgttaagaatgaaactattttgaaattatgtaattgaatcctaggtttattttgatgtgagtaattgagagcttggtgagggttttcattcaaagagttgttttctaaatcagaatgcaggaactgcttgattaaaaaattgagcttgattgaaaatattcttaacttttatgatagagctatgaatttggactttataagaggcaagattgagaattatgcaaggtgaatccatatttgtttttgattcacaagattgaatcgttatccaaaagctactcattgttggctgttgttaaacaggtaaactaagctccagttcaaatatagttgac

SEQ ID NO: 18127 - DNA, 614 bp, Glycine max
  Intron number 1 from transcript Glyma11g38100.1 (locus Gly ma11g38100) derived from phytozome v7.0 (chr-ID Gm11; pos 39059692 to 39060305)
gctgtcgactcctccttccaggtaacattcttaatcttcttccttacacctcattctcgctctcaattatgtctctaattaattctaagctgcattttgcattcggagttcattttttagtactttttccgacatgtcgtttaaccgaatcggaatctcaactcgtgtcgtgtttttttccaacttgctttgttttgctgctacttactaactaacaagttgatgaaatcaacgtttgtgcgaactgtggaactactttccagctttgatggaaaaagaaaggttgaaaaagtctcaacgagagtcatgtgagaaagtgaaaccacacgatttcggttctagcttgcattaattactttacagtttggaattcaagttgatttgttatttgtggtttgtggtttgtgaggagtcttacttatgatgcatagattgagctctatttttgttcagatcgcgttaggttcaaagttctcgctctacaacaattaaccgaagagtcacattgtttaatgcgttcttaattgagattcagttgttttgttttgttcttcaaatttacttgtggtttggttgcagaaagaacatcaaattcgggagtttgtggacgggag

SEQ ID NO: 18128 - DNA, 622 bp, Glycine max
  Intron number 3 from transcript Glyma11g38100.1 (locus Gly ma11g38100) derived from phytozome v7.0 (chr-ID Gm11; pos 39060501 to 39061122)
agacttcacttccagctgggttgcacagttcacatgttggttttttttttttttctcatgtagtgatctactgtttttatggatttttcaattaatttcttaatttagggaaccttttgtggctgaatgatggtaactggtatggcaatgagtctataatggggtttatcttctttaagtatgtgtttggtgagattggagattggggaaaacaacctatggaagttgacttagtttcttggcatgctgttgcttagaaaccgaatcaatttgtgacatttggcatttcaatgtagaggggggcagagatgtcaccttgttattttggaacatttggcttaattactttccatttgcttttggcattttagtcaacttgttattttggatcaaatgggaaatgcaagtcactgaagctccctttctctaactgtaaaaagaaggaccaaagggatagatataaactcaaatcaaatatttctttcaatatattacactattactggcatttcttatttgaattttgaaccacttgactgcttttatgccataagtggttctttgggaataactcaaaatgtgttttaaaaactaatgcccttccatttcttgcaggctcaag

SEQ ID NO: 18129 - DNA, 1012 bp, Glycine max
  Intron number 1 from transcript Glyma09g30790.1 (locus Gly ma09g30790) derived from phytozome v7.0 (chr-ID Gm09; pos 37569511 to 37570522 reverse strand)
gatcgtaacaaaaaggtccctttttaaaaaaatacttttttttaatgggttccataatatcgtgccttttttgtactctagctttatttgggtaatgggtattgttcaagtttcaattttttttccaacccattttttgtgcctttttggttctttggcatttattttttctctgttgggcatcactattttggttttgacttttgtgtgtttatattttttattttttttaatcctggcatagagctatatttgatgtaatgccataaagaatctggtttaagttttgtctgggaatgtgcagaaggatgggggagtactagagaggtttgattgcagagattgtaatcgatttcatttggtgcttctttcaggttatggtaagaaactaagaggtagcatttggcaattattaagttagcctgatcatggtgaactttcctttccttgctatgttttcttataaatgggaaatgaagaggaagagacatagtaagcaattagcatgatttttgatttatcccccttgcactcatgacttaaggcaagagtttaccaatatggtgagatatggttggcaaataaccatgccccttaagcatgtgctcaggggttcgatccccaggtccaacatctgttagaaaaggttaaccccttaaattccgtatcttgagggatcagtctctggctcttggccggggatacattggacactaaaaaaaggcagtagtttgttgtgctatcacaaattgcatataacaagaagtgccaactttatgcgaagtgtgaaattgtctgctatctgactgtcccatatattttgtagttatgctttttgatgcctcctacatgtgttttacatctattaccatataacttgcagtaggttgaaagacaatcaaactaagttgtagtctactcaaattggctttacattttatttgcctctttttacataatgatttctggtttatcaaacagggtgcaccggtggtagagttttttactgagt

SEQ ID NO: 18130 - DNA, 855 bp, Glycine max
  Intron number 1 from transcript Glyma08g14070.1 (locus Gly ma08g14070) derived from phytozome v7.0 (chr-ID Gm08; pos 10226111 to 10226965 reverse strand)
tttgtgatcaggtatatatcatccataaatactttagtattattttttatttttaccaaatgttaattttccgtttatgtggtgtcgatgtaagttaatctttcagctgtggcttcgattcgcctatttaatttatggatttcgttattttggagagaaaacaaagcaaaaagtcattttgaatggtttttccttagaaggctgtggatgcggattgtcatgtaatctgtcactggaatttgatgaaaattttgtcctagatttgctctttttaggtgttgtttgttgtgtgctattttatatgattttggtgtgtgcgcaagattttcgtgatctgaatttaggtatgggataaggtagcgctttttatgttttggcggtttttttttttttttttttttctaattttagaaaatctggtgagctattttttgtggcttgtaagtgaacacaaacgaagacaccccttttttccttcttgttcctattttttgggggattcatttgggagggaaaggggtttcggttctgttgtagccataattggatttgaacgggtgcaatgtttctcgcatgaacagcttgcaatttggggttttttcggggcatgtttcttttctcttcatgatacaacttttggctttatgattacaattggggatttaagttatatgatgcttggaaattttcacgaatagagagagaggagcattgtgtttttgataagattgtgtttgatttaatgaagctgcattacatatttattttatgatttttcattcttgaagctggagttttactgtttacttacatgtttgttccttaattatgcaggaatcaagtcaagtattgggc

SEQ ID NO: 18131 - DNA, 531 bp, Glycine max
  Intron number 1 from transcript Glyma09g03900.1 (locus Gly ma09g03900) derived from phytozome v7.0 (chr-ID Gm09; pos 2826396 to 2826926 reverse strand)
ggagataaccaagatcaagacaagactaagaaacagtgagtattgagtaaggaaaatgacaagtatacagttttttttttaaaaaaaatttagatgtagttcattacatgcattcttcaatcagaattaaagtcttacacatattattattaaagatgaaacttcaattttaatcaaagaagaaaaaaacaaaaatacttaaagaactatatctaatttttttcttctaattgttttaggtgcatgagataaaaataagagcatcatacaaaaaattaaataaaaaagtaaaaacatactaaattatttttaatataaaaaataaggtgaaaatagatgaatgaatatacacagttgaataattatttttgaagatagatgttatttattgccttaatgacaaaggagagataagttagcttggtgaagttgaaatggggatcctggttttatggttggtagtgtggtgatttgactgtattttgtaatccaataggctaaaagcgaagaagaagaagaagaagaagaacc

SEQ ID NO: 18132 - DNA, 478 bp, Glycine max
  Intron number 1 from transcript Glyma05g37030.1 (locus Gly ma05g37030) derived from phytozome v7.0 (chr-ID Gm05; pos 40733868 to 40734345 reverse strand)
ccaaactgaagatcaactgtctcccactgactcaggtgagtgttgttgggttcttatcttttaacccccccttacacaaaaatatacccacgtgagatttagatctgcattccagaaatgttgttgtgggttttttttctgatcataggttaagtactacatgaagttgaatggttttcttttccatgttacatacatgagtttaatttttatgtactttgagtctaatttcaactaattagaaattagacacgacgtttaaaataattattgcgtcaatttataattagatggaaaaaaaagtacatttgattgcatggatcaactaaacttgaggttgaatccagcacatacatctgccatatatattcaaagagaaatctttgttgcccatgttaagttctacataaattagttgggttgtggattaagaatgtgaatgcaaggttctaacttgaacttaattgaatgcagagaa

SEQ ID NO: 18133 - DNA, 695 bp, Glycine max
  Intron number 2 from transcript Glyma05g36650.1 (locus Gly ma05g36650) derived from phytozome v7.0 (chr-ID Gm05; pos 40468086 to 40468780)
tagaaaaatcaccaaccaaggtaaagtatttgcatatatacgcacaagtttagaaatatttaaattcaccacatactatgcacacctttcaaactatcctttgttcaccactcaatgcgtagtgagtgattcttctaacttaatcataagatttaagattaaattttaagtatacagttgtgtaaaatatttaaaggtataatttaatcatgcatatatatagtgatcttacttgttgaagtaatttgagtagatgatacatgtggatttatatatatatatatatatagttatcctgtattcaatttctagtttctagctggtactaattaattttctttaaaagtatgcgaggtaaaaatcaaaattattttcctttctctatcagattaatattcattttactccttacaaactaaaaagtactacttgtgtcttaattaatatggcttaattaattaaacaataatgacaagtttcaggattttttagtacagaagttaaacaaaggaccactgatttccgagaccaaaatggagagagagaaaaaaaagataggactatatatatgagttataaatggcgatagataattagatatatgtcttcgtcgtaactgcatttgggaatatgtgagtgtaacattaatctaattattaattaaacacccttttttgttgaaggtttcttttcag

SEQ ID NO: 18134 - DNA, 759 bp, Glycine max
  Intron number 2 from transcript Glyma08g02860.1 (locus Gly ma08g02860) derived from phytozome v7.0 (chr-ID Gm08; pos 1959329 to 1960087 reverse strand)
aggatttaagaacaagagattcagtgtacgcctttctttcagttcttttttcattttttttatgcctatgattgatctttttgtttgtattatcttttgaaagattgctgtgttacctgtgtagctatagcctataggttttatttccatgtctctttttggactttgcattgcttaatgtgctttaatctagggtatctacagtatgtgtactgggcctacattgttaatttgttatattttaattttatctctgccaaattacactcaaatgattgttgttcttcaaaaaagttgaaggattttgagcagaatattcgatttttccaaagttttagaacctttcatgacatccattattttcataaaaagtgacatggaaaaaggaagtaacaggtgtaaagaatatatgaagactggccttttttttatgcaaaacttgcacatttgaaggtgactcaccaggaataaagtcaaaagaaaaataaaaaatatacaattcatgcacgtgtaacccgagtgggtagtaaaaaaccaaacttttaaagatagatagatataggttacatttgctttggaatttctagtggacaagtgctggatggattgcactttggaactcttgtcttttactgatttaattctgtagtgttgaaaatcattatttcaaaactaaggatatgattgtgctaatattctagtaactataaattcatgaatcgaagactaaaaggttgttgatgttttttttgtaaccag

SEQ ID NO: 18135 - DNA, 737 bp, Glycine max
  Intron number 2 from transcript Glyma12g16940.1 (locus Gly ma12g16940) derived from phytozome v7.0 (chr-ID Gm12; pos 16587694 to 16588430)
tgtttaacatttattttggaataactttactagttatgaatcaaatttttggcaagaaaaatttcatgataatatatttatcataagaaatattcatttaaatatacttttgttcccttaaatttaaattattttttatttttgtcctccaatttaaattactttttagttcattaatttgaaaacatgctctttaattttagtctctaaaaaaagtaaattacaataacatcgtttgaggttttctttttaaagatatacataatatcccttgttttttacatctatactaaaccccctaattgattgaagaacattacattgacactctttccatacttatattaaccctttaattgtttgaaaaacatcataccttgcattcgtataaggggttgctgtaatgataaaaaaataacaaagaatttgtgtaatttcaagcggagttactgtaatttactcaaaaaattaacatctttgtcaccctaaaatcaatatgcatgagaatatatatatttttttatggagaggaactaaaaagtgcttgaaattgagggactacagaaaataaatttaaatttggaaaactaaagcaaaagtaactcaaatttaagctaaatttttatatcctgacttgattattgacttttgtcaaaatcaacaaaatattatttacactagactttttataactatttgtaggaaggtgatagcgacatcaaacaagttcaacaatt

SEQ ID NO: 18136 - DNA, 439 bp, Glycine max
  Intron number 2 from transcript Glyma12g10230.1 (locus Gly ma12g10230) derived from phytozome v7.0 (chr-ID Gm12; pos 8064172 to 8064610)
agccttcttccgataaaccccagtccgagaaaacggtgagcattgcttctgtttattttattttttaagtagctcatgatgataatttatttatttgttttttacattgccctctgaaccaatatgtcgttttgggacaatttttgttgagggtttgtttgcttgaaaattgtttctaggtattttttttgtttttcaaataaatgttgtgattttttttttattaatttggccgagtcataactagataggttctggttgaaatggttctcttgatagtttttttcttcaagtgatttgcaattcaaggacctaattgttagggcttaggaatagtagggtaattaaatgcatgaaaattttttgagtggaaaggagaaaaaatgttttttctcttcttgcaggtggctggaggtcaggaaagttcagggaggaggat

SEQ ID NO: 18137 - DNA, 997 bp, Glycine max
  Intron number 1 from transcript Glyma05g37360.1 (locus Gly ma05g37360) derived from phytozome v7.0 (chr-ID Gm05; pos 40969217 to 40970213 reverse strand)
ggatcggagggtttctcgctaattcaaagtttcgctcattatcctttccccaatttctatttctatttctatttcctttctcttcttctttatgttatttttttaacccttattttgtttttgttttcttttttttgttattgctgtgtctatgtatgagtgtgtgtcgttggctttggggttttggtgatttgatctgtgatattctgttgtttgtttgctggtggtcttgagcgttatgaaataatgcaaatttggaagctgggaaaatgtaatttagataatttatgagttattgtactgtctttgactgggatattcataatttttacatcattataactgaaaatgaacctagtgagtagtgacaactgctctgactacggcagcagtcttgtaattcttacacttgtcaataatattgattagaaagataacggaaggttgaacttgatgttgaatgtggaaacatgttgatattattttgtccattgatgggagaggaagttgttggagtgtatatttgaagcatgccatatatgtgtgttagttcagtgttggaggctccaacttggaggagctctgcttagtggtggagatgctcactctgtttgctcaatgcttggttttgagtcatcccccatacacaggcgggattaaaccaatgtgcttcttttgcactttgcagttgtttgacttataaatagcttttactcggactgtttcaagtaatcatctattcctaatagatattgatttcttggatgcatgccgtattggatgaattgtcccttattgggtttaggtttagcctattaatttcagtctcaacttgtgatatactcatcatccttttgcttttttattcattattacatggttttactgactcactgttattgtgccagatgttgcaagtataaaaactgtgcctgagtttccttcctgcaataaatttgtagaaactcaactctctaagaattctagtctgctgccc

SEQ ID NO: 18138 - DNA, 764 bp, Glycine max
  Intron number 2 from transcript Glyma12g11280.1 (locus Gly ma12g11280) derived from phytozome v7.0 (chr-ID Gm12; pos 9357389 to 9358152)
ggatactttcactcataaatacccaggtatatgtatatctctcctccaatagtgctttttaatattgtttacttttgttttcaaataagagtaaatagtatcatagagtgtaactcagttgacaacaaacactgaacttgggggagggggaggaccggagtttgatttccgcataatgcacattcatggagaagaagaggagctttgagtgtgtccaagttgtggaccgtaggttaatttcattgccaacatagaagactgaagtttgtggtgatacttcagaatctaatcagagagccaaatacctcaattgtagtgttcaccagaaagaagaaaaacaagtaaatagtacgtgtttttgaattgctccagccttgcagaattttgggtctctgggtgaaattttggaccattttttctttaccaagccaagtaaatcataacttgcaatcagaactcagaggtggttactagaacggggctagagatcatagagatggaagtaaaggagaggattcatagagattctatagttgattaaataatgtctatgattgtagctatttataaaacaagagagagagggagagacagagtcttctaactgtcatctaactgctcatctgactaacatctaactcctaaataatgagtaatttgcaagatgtatgagttgagtatgttctctgatacatgctttgagtgtaaattgcccgttttaatgtataatttccacttatggcatgcagaaaaaaaaataaaag

SEQ ID NO: 18139 - DNA, 462 bp, Glycine max
  Intron number 3 from transcript Glyma11g37740.1 (locus Gly ma11g37740) derived from phytozome v7.0 (chr-ID Gm11; pos 38773119 to 38773580 reverse strand)
aaaagaaaagcttcaaagaagctcaagagccctaggtttgttttttcctcaaatttttaattgttagtacaacaaagcttataaagttgtcagagtcttttcagcattatttattaggaggtgttttctcttctctgagtgtttcagaatctagttttgtataagtaacttttgtgaggttgcttttctgctctgactaggtaacatattttggcaaatctctgtatgtgggagtaagttgggcaatggcattaatctttctgctccttttttaactttaattgtttgagtgtatgattaactagggatctctctttttccttcgaaacctttttttctttccccttgtttggaactttgagtagttattggagcatttaaacattatttgggttgttaacttgattccattatcttttacattcagtcagaagaagattaagttgtctactgccgaaaact

SEQ ID NO: 18140 - DNA, 1037 bp, Glycine max
  Intron number 3 from transcript Glyma08g28600.1 (locus Gly ma08g28600) derived from phytozome v7.0 (chr-ID Gm08; pos 22930116 to 22931152)
tgttcccaacgatactcttcactaccatctccgtaagatagatatctctgattaaataatttgaataaacaaaaataatgaattcattaccaatttacaaaacaagctataaaacatatacactgagaccggcacctatcaatttttaaaaggagaatgagtgtttgacatccctttttagagaggggaaaatgaggtgtgaatgtctgatcataattttatatataaacttcaacatttacaaaatcttgatatatgtcatacgtaccaatatttgttatttattttgtaacccccttccagaaaacatggatcatcatttctgttgacattttctttaaaaaaatcttaatgaacccctccaagtagatctagccatgtacaattacatgctgaatcaaaataatttactagattgacagtagcacccctgccttatatttattttttatttttttataacagagctatgcttatttgtttttaaatgtccatgtcatgtctatgcgacaatgctgcatcccaccatgctagagccaaaataaaatggacacatacttgtgttggatgtgtcattagtgtgttgtactagggttgtgccaaacaaacaggtgttcaacaaacatgtttgatatctccttttgataaatcatggaagaagtatcattaataaagatcatttatttgtctgataacaaatgatttggacccttctttttaaattatttttaattttaatatttcagtggtgaacttcaagaatattgaaaaattatggactatatattttatcagtattcactaaggtaatagaaacacataatttattgtttgccgtgaattcattattgtcaccattattgttgcacttgaatttacaatccaagtaggttgttcagtaagttcccatcattgttataaatccatgttttaggtttaaggactttatagttcatctaaaatttgatctaaaacatgaccagtaaatttaaattttcgcaggtgaaaatagaccagttttagattggcctactaga

SEQ ID NO: 18141 - DNA, 943 bp, Glycine max
  Intron number 1 from transcript Glyma08g21270.1 (locus Gly ma08g21270) derived from phytozome v7.0 (chr-ID Gm08; pos 16153937 to 16154879)
cttgttgcttgatctagcaattgttcttccctgtggtgcttgattagccttctcaattaaaattgtgtcaaattggttgaagtagagttaggattaagaaatttcttagtgtcctcgttatccttgtagtaaaatttaattttatctagagaacatctattcttcaattgcataacatgttctgtttgtaagccagctgatatcacattgacaaacaataagctttattgttgaattgcctggatttgataatcacagtgttattcagaaaaagacttcagactatatatagtctttatgtggaagcttcttcccttgctctacggacaacattttaacctatcattttcgatcctcatacttaaactaggtatactatttgcctctaccaatgcaaaaataaaatcatactgaaaattttgactagagttgggcttgacttcatgttgagagaaaatgtgttgttattttcatcaatttttataattttaatatttctctagttaggaaaatccatattccttattgccaaggggtcacaacatgttgtggtcttctctctcccttagcttcttggcatcttgcggcccctatgtaataaagtgccattgtgattaaagcttcagttcaagattggatctatgagtcataatgattccaataatcatactgtacttttttgtaaagtatattttttatttcatcctattgcactgaactcacatcttatgttgcaggcccatttagttgtttgctttaagtgtttatatgactgttgacaacttctgcatttgtatttaatcaaagttgtttcgcttagctaaagtcatatatcatatattcacatattcacatattaagtaggtttagctggaagttcaacagccaaagaagatggcaagccccaaccacttgaaggaccttttccctttccagactcaga

SEQ ID NO: 18142 - DNA, 867 bp, Glycine max
  Intron number 1 from transcript Glyma12g05980.1 (locus Gly ma12g05980) derived from phytozome v7.0 (chr-ID Gm12; pos 4048346 to 4049212 reverse strand)
aggtccagaagttgagctcagaggtcattttgttggttagtttattttattaatcatcttaccttctttttttgccatatctaaattgtgtccatagtttaatggtatttgtttatactcacctcttacttgctaatgaaatcttatgaggaggaggatccggattctccgtattctcttttctatgcattcgaacattcaacaactcaaccattggatgaggatcttatgactcatgttttatattggtaaatcaggcttaaaacacacattaaaaatttgagccatctgattttcacccaaaagttacgaatgcactgattgtgtgaagtgcgtgaaaaaattgactactgaatcaaattcataaggatgaagggcctaaaatgcaattaaagagtaataactttgtaattggttgttttttctcaaagattcaaaagggtataattctagtctctttttcttgtaaagcttttccactttatgcttgctatttttatactcagccgagagaagattgaacgatttgttttaataaaaattgcaatgatatttagacaatatttactagttaacgttttgctatctacaaacagcaacaaacattttcaagctttataaaggttgcctttctatatgtaatgtttactctaaaggtttgaggtttattcctaactttaagaaatacccctcacacactgatatgttggcacttgactcacaaatgcatgtttggtggtcttgtatcttaccaagcacactacccttacctgcaaatttgagaccctgcaattcacttttcaaagttaatttatgattgtttgtttttgacactgtgaagggcattacttgagcgcatcagctcta

SEQ ID NO: 18143 - DNA, 800 bp, Glycine max
  Intron number 3 from transcript Glyma06g08720.3 (locus Gly ma06g08720) derived from phytozome v7.0 (chr-ID Gm06; pos 6362512 to 6363311)
tgcattttaaggtaggatggatccccgtgtatattagtttgtgttgtactggtactttttgtcttatgaagataaactgtatgatttctgaggagaattatattatcctaatttatctcacaattttctctgaagaatggtttctgattttttctaagtgatgtactgtttaaaaagtatctatgggtttgttttgtgaatggaatgggaattattgttcaaacctcaaaattgaaattgcaattccaatattgattggtttggaattatatatcctatgacttgatacaattcggctacataagatgaatctcaaatgacttttgtattttatcgtacatgaatgaatctgtgcaattttgtatcatcggtatgaatcacacaattcattattattattattatttttgttcactttcactaaaaaagttctgcaacttttattatagatatgctttagtgcttttgtatgatgtttgaaaatgatgactgtttttgcttggtcttagtttgaaaatgattaccttctcaatggtggaaagagctataatgtttaccatttatggaaggttgataagtaaaagaaacctaagctctatgtctactattagcccctttcagtttcataaggaactcattgaaaattgaaagcctttgatttgagtttgattgcatgtctttataagttgatggatgacatttttctcttagaattggagttcttgacattttttcatgacaattgtttaaacatctagtaattttccagactggagagatttgcctagatatcttgaaaa

SEQ ID NO: 18144 - DNA, 855 bp, Glycine max
  Intron number 4 from transcript Glyma05g33940.2 (locus Gly ma05g33940) derived from phytozome v7.0 (chr-ID Gm05; pos 38434699 to 38435553)
tggggaattcgcctcggccttttcctcctattcaggtatcatgatggatatatcacagtaaactatgcttgtgctcgtaccgtgctattagtggagttgcttgcttctcactgctacgcatacttttctcagttgcactttctttatttttcatattctttaattgaacagattattttctcttttctttttaattaaattgcttgttctttacaattgccaactctcgagttttagcttaactagaagtctcaagtttcagtattggggaatccaactgcgttaacaacttgccagagggaaaacttttcccctcatagtgggttgagtcaaattagtcatatatccagtgtggtattcagatatcactgtcctagacataaaaagaatttgctcattctttacagaaaatattccctagtataatacctttcagtattgcaaataagaatataaaaaaatgaatctgtgatatgattatcgtattgtattgttaatgtttttttgtttttttgtttttttgtaaaattccctttcaatagaatgctttttacactgtatactgcattgttgagcatgttcctaacatattgggttcagtgaacaatttgtggttaaacaaagtatcattgcaaggcaccatagattgttaagaaagttatttatttattcttctgttaaacatgtcaattcttcccaatttttcatgctcaatgtatattgcctttaacattgggatgcagcttagtgtcaagactattagttaacaaagtgtctttctgaatgttttatagttgatctaatttctgaatatgattatcagaattttgcagtggggagaggaccgacgctttg

SEQ ID NO: 18145 - DNA, 466 bp, Glycine max
  Intron number 1 from transcript Glyma07g01810.1 (locus Gly ma07g01810) derived from phytozome v7.0 (chr-ID Gm07; pos 1207710 to 1208175)
tgttggttcactttattatataccccttgattctggttagtcctttcttccaatcttcttcatccttttcttgtgtgtatgtggttgtgaatatatgtttgagagggttgttttggttggttttattcatttttggtggaggatgttttagacttaacgtctttattgatttatgcagcgacttattgttcattttggaatatttggatgggatggaatgtgagagttagggatgtttgagggttttgtatttggaatttgggaaaaagtgaccgaatatagtggtttttgagtattgtttttttaaggtgattaaacaaagaaaatatactttatcaagataaaagggaatttcatgatatgttattatttataaagcagctgacaaatgaaatgtgcgaagatgatgtgtacatttaatgagctgattatgaagtgaaagtgattttattcaagtagttgggaa

SEQ ID NO: 18146 - DNA, 393 bp, Glycine max
  Intron number 1 from transcript Glyma10g06680.1 (locus Gly ma10g06680) derived from phytozome v7.0 (chr-ID Gm10; pos 5424675 to 5425067)
ggagagaaggtgggattcccttgccaaagtagctggtatgtatgaagatttatatatgtttatgatgatatagataaatataagtgaatacatcaaaaaatcaagttttaagttgtgattgcgattatgattttgctacagtcttttgctattttgaaaattgtagacaaataaatgtgtctgatgcgattgtaattgcagttgtgattgcggtcggaaaaccccaaaaaccttggtgtcacaagtgtatttgtttttttcttttttcaaaccttcataaaatgttcaacttgacattaatccttaatattttgtgcttgcaaatggtgataagtggtaaaacttgattttcttgtaggcctcaagagaagtggtaaaagctgcaggttaaga

SEQ ID NO: 18147 - DNA, 620 bp, Glycine max
  Intron number 3 from transcript Glyma10g06680.1 (locus Gly ma10g06680) derived from phytozome v7.0 (chr-ID Gm10; pos 5425361 to 5425980)
aactcatttaagaaatagagctcaagctcaacaaggtgcaatgtgctttctattctttaatctttatataaatgctgcttacaaaaaaaaaattatataatgtttacttctctatggacatgtttatagtagaatatcatggaataatttgattcatgtcgtcctaaaagacttgagtctcgtttgataaaaattttaatatatatatatatatatatatatatatatatatattaaagaaagaaagtagaaggtaaaataaattaaatttctccatttctttcataagttaaaattagtttatgcagaagttctttgatttgatttttccaaaagcttatcgatttaacttatataagctaattttaatttataaaagaagcttaattcattttatcattttatttttattattgtataagtagttattgttgatcagtttatccaaatgagaccaatgcatatttcgtttagctttccatcaaatagacaattccaaacatgcccttcattgctgttgtactagtaaatgattgtacttttgattcttatccacttacactggtttcatacttccattttcagtcccgggagattttaagtacaaattagaaattgca

SEQ ID NO: 18148 - DNA, 603 bp, Glycine max
  Intron number 2 from transcript Glyma09g35220.1 (locus Gly ma09g35220) derived from phytozome v7.0 (chr-ID Gm09; pos 41418435 to 41419037)
cctttcgttgcaaggattctgcttttgatatcttggtgagttaacaatcttttgcatatctgttgttagttgttagcacatcacattcaacaatcacactttgcttgcttaattattggcttctacattgtcgtcatcatttttcctgttggttggaattgacatattttgctctaaaaacaagtttgatttttgtaaccacatcatagaaagtggacacaccaccatccaatcttgttatcaaacccgaattttctttcttcaggttgtgttgattttggcgattaaataaagtctatatcattttcagaaactgtgtgccattattggccaaaggttggcaagcttgaaccatttttaggatggagactacatagctagaaaagtaggggaggggtggaaacgaggaattaacatagacagctggtccgttcttcaaatatcataaatgtttagattacaccaacattacatgattcgtagataacctttcccttaagaaaaatgttagggattatagtttttcctttggaacattactaacattggtagtggtcatgtttggcaggcttagctttggaattgcagttattttattaattg

SEQ ID NO: 18149 - DNA, 1052 bp, Glycine max
  Intron number 1 from transcript Glyma10g02800.1 (locus Gly ma10g02800) derived from phytozome v7.0 (chr-ID Gm10; pos 1995383 to 1996434)
ctcagaatcactcctcagccaaagctctttaagaggtaccattcactaatcactaaactatttattatcccaaagctttacttaattaaaccgtagatgtttcctctttttattcattttccttcatataatttgcttgactcgagaattccttggtttgactgtttctgttgactttcactttgttgttctaatgatgattttgcttgttcacggtgggaaattatttgttagggataagggggaactgggtgccataatccctaattcattcctgcttttgctttctttctcgtaaaattttagtttttaactatgacaatgatgtttctggaacacggaaaagggttttgagtgcagcgaggttgggtggttttagtttcgctaatactcttcagaattaagaatgctatgaattatgatgtttgccaaattctcttgccctcgaaccttatatttgttgtcggaaggttgttgaatttctttaaatttagtgcctcaacaaacaaactaaccccgttttaaggtgaaaaccagattaaggccctgtttgaataaatttctcgataaatacttttattaaaaaaaataagaaggtaaaatgaattaaacttctacggtaagttaaaattagcttatgcataagcaagtttataaaagttatctcatttagcttctccaaaaagcgattttagcttttgcataagctaagtttaacttacgagaggagtttaattcattttatcttcttaaagtatttgttgaaaacttttatccaaaccaggtcttagcctaggaagctcttccaaatcaatactaatatgctgatatttttctcaagtaaagagcttagcttgagtcaactgcagtgtattaactttctacgtgagaaatgaaatagatttatctttgactgatcattgtttcattttttttccctttgctaacaatggtttctaattatttatatgaaaaatgaaatctgaaaatttactcatttttgtggctatactatcctctttgtttgtaggattgacaaacacagggatttt

SEQ ID NO: 18150 - DNA, 935 bp, Glycine max
  Intron number 3 from transcript Glyma08g21690.1 (locus Gly ma08g21690) derived from phytozome v7.0 (chr-ID Gm08; pos 16515257 to 16516191)
gagaagtgagttgctttcattacgttcgtttcttatcagtttttaatgcacattttgttttctgccgctaaatagattgttctcacttatgtgaattcagctagacctaccaccaatgtggtttttcacttgtcatattgtttttactgttttagtatttggtgttagtatacttaagtaggctacccttttgagctcaatgttgtagcgtaccttgatcaataagcagctttacggatgaaagcattaatatctttagtggatttgaattagtcattctaaattttttagtgtgttctgtctgagagagcaatgcagttttggtgaggaaaagagtgagcagtgctcattgaaattaattgtgacattgagtgtgcaactaaatgaaataaaagaaaatacgcatacaaccataccatttacctaattataggaatgattacctttatacccaaaaagagaggaaaaatacaggggacagcaatagcattttaaggcatagggtcattatatggaggattaactcctgtaattccttcggcttccattattaatctttgtgcccaggcagtagttttgtcattatttttccaaatacgtattgtttttatgacaccataggagcttgagaagatgatagtcacaactcacaagtagaatgccattttatctaaatttgtttttcatttggcaatgaaatggtggaatctcatctcgtatgatccaaaatactattctcatgataaattttgaagcaaagaagttgatggttttagtagatatctttggtcctgttttcttgttcattgtaaaatgttgatatattatgctattgatattgtttgtggcatatatatatggttctttggtttgttttgactaaaatttttataactggtccatgaactatataattggcatcttacaggaacttg

SEQ ID NO: 18151 - DNA, 669 bp, Glycine max
  Intron number 3 from transcript Glyma09g02490.2 (locus Gly ma09g02490) derived from phytozome v7.0 (chr-ID Gm09; pos 1680667 to 1681335)
gaagggagaggggcgaggtaatcaattctggattggaagttttttaattttttgtcgtttagtgagatgaggcttttgttgttatttttcacacaactagcttgcctatatacaaaacctgtaaagttcatgccagtttggtgatttgtttgtcattttatccccctttagagcatctgataagaatgacctgctagtataaaaaaatactataatttcttaacatgtgcttggtgttgactgttgacacatgatagtatagacttctatgcacttattttccaattatcttaggagagtttggactttggttctgctgcgatgttttcttacaaattccttgttgtggtttctttttcctccaactggcaaaggttcttttttgacaaacctagttggaaattcaaagctaccttcaattgtcttgcaagatgcttccctttactgtttctgtctataaatgaaaattttattgcactattataaatatgaatatgccctgaccatatctttagctgaaattttgaattgtatgctattaatgccccttaaaacaggttctagcttcatttttactggcaaatgtacctgttctctttctttgttgtatgtacattagaactcactattgccttgctttctttttcttttttaaatataactctcagg

SEQ ID NO: 18152 - DNA, 420 bp, Glycine max
  Intron number 1 from transcript Glyma08g27040.1 (locus Gly ma08g27040) derived from phytozome v7.0 (chr-ID Gm08; pos 21382276 to 21382695 reverse strand)
aaagtaattttccttatacaaaactggtgcctgtatagcttcctttgattttctaaagatgtttcctcttatgccttatttacagagaagaaacattgtaaaatgtaaagtgatgccaccttatgatatctataataattcattgctattgaattactagttaaaactgctatatgctcatactatctagtggactttaatgcactggtaattcttttttgaaccccattcatgttcatattatatgcttaatgcagctgatgggttatacttctgtttccctgtgttttataaagttgagtaggatgaaacattatccatttagattttattgtgcttttgtaaattttaatttttaatagatatatctcaggctttctgctcatctctaagtctaagggtttatggtacagggcatta

SEQ ID NO: 18153 - DNA, 560 bp, Glycine max
  Intron number 3 from transcript Glyma12g09140.1 (locus Gly ma12g09140) derived from phytozome v7.0 (chr-ID Gm12; pos 6950426 to 6950985 reverse strand)
cagcaaatagaatccatccaaataaccatagaaaggttggcgtgtaatttggttatttattatttattcttctatagacatatgaaaattactatcttatttatgcagttagagttacatatacaacaattccacgatgtttttttttctgtttataattagtttaatttccatgcattgtctatatgtaaagttttttttacgttgtcaacctattaaatatcaacttaaatttgacttttaaagtagttgtcaaaaaagtcaacaattttacttgataatctataattggataataacagtataaaaaatatttaaattatcagtgtatttaaattaatttcatatacagtatgaagcatgtataaacacgcttattaatttaagtcttgcgattttaaagttcttgcgtgctgtacatcgtttagaagcaatatgccctttcaatccatttctgaacatttaaatttatatgaaatgccaaactagggatgacatgtctacatgtgtttttttgggtttcagataaatcaatatattaatttgtacaatcgcactgg

SEQ ID NO: 18154 - DNA, 889 bp, Glycine max
  Intron number 1 from transcript Glyma08g43890.1 (locus Gly ma08g43890) derived from phytozome v7.0 (chr-ID Gm08; pos 43677615 to 43678503 reverse strand)
gcttaagtgacaatagtatcaaggctgtgattttggtaagagtattgacgttttccatcagtgttatctgcttagtagaaagtaatgaacaattcacatcttccttatggtaaaccaatagcttgttgtttccttactttttattaacttgctgttgtgtgctaataacttctgaaaagtgttagttaacttttacattgtattgagaaaatttatcatcacaaagatgtaaattattaagaagcaaaactaagtcgccacttgacactagtatagcaattccaaataagaatagaataacaagtcttatcaataagtacttataggaaaagaaaataaaaaggaaaaataaactaactttctcttgtaggctaaaatgagctttgaaaaatctaatttgtagaagttctctcatattagtgtctccaaaatgttgattttaacttatgcatataagctatttttagattatggaagaagtttatttcattttgtcttcttattttatcttatgaatccttataaagaagtttatccaaacagaaccttagccacctacactttacatcaatttacacttggaacagaacaagcaaacctgaaatatattttcaacttccaaagcacaaagttttgtataatgatctttctgtatactaggtttacatctctaacttacagtaagtcagtaagtcctatgctgcccacttgtattggactaattacttacacttattggtggattctgctattatttgggtttgattttatttccttgtgtatttcttccactgcaaattaacttgcaatgcatgttggtattccttcaaattttcctatacataaaattcatatatggcaacatcttgatgtcatgattttgaaggat

SEQ ID NO: 18155 - DNA, 566 bp, Glycine max
  Intron number 3 from transcript Glyma13g20760.1 (locus Gly ma13g20760) derived from phytozome v7.0 (chr-ID Gm13; pos 24244153 to 24244718)
cttccctgggtatattacattttaatgaggagaatatagggaaatgctatgatgctgaaaaactttcgtgtggatttgaattttgtttaaaatcaagtagtggtatttctcaaatgaattaaagctgttctttctgtttctattgctttaaatccatatctcaggaaatgacattttactttgaccattggcaagaagctattattttgggtttgcattttgttgctgaaaaaatgaataaatgaagtaagatgatgaggtgaaagaatgaagaatgaaaggagaagcaagctgtataagaacttgaatattgttgatagagattacttagaagtttagaattgatgttgcattttcaaagatattaaataaaactttttatacttgagatattatcttggattagataaattttaatggttgataacgctgtattgacgttgtcttattatattcagagcacaacaatactttttgcgttcaaactttggtgattattgtgatgttatatctaatattagtgtgtttacattcatcaggtagtttggattctcatacaactttga

SEQ ID NO: 18156 - DNA, 723 bp, Glycine max
  Intron number 1 from transcript Glyma08g03670.1 (locus Gly ma08g03670) derived from phytozome v7.0 (chr-ID Gm08; pos 2604261 to 2604983 reverse strand)
catctttgcggcatcacttttccttttgcttctcggttcgtaccttcctaatcctaaccttatgcatctcttttttcattcctactctgcttcaaacaatgtcggttcttctatgtttttcctttaaatcaaatatactaattgataactcactctatttctgatatttaaccggtactattagaaactaggtttatgattatgcatgcagttggtggaactacctactttctttacaaaccaacaaccattgattgtacttgagggatgatggaaaatgcttgttattatagaaatctgttttaattgacttcttcttcaaaaccctactacctttcaaccgagcttgcgcttcttttcaatccgtgatacagctcatgtgtaaagatcacttgttacctcatagtttgctttatgtgacatcttaccccacattgtgttgtctcgattataaaaagacaaaacttagatacagttccttatgtcttttttgtgatgctctcctattagagttcaagtttcacctctccataccattgatctttaatgcaaacccttattatatacattatgggggttgaaactccagttctgatcggagaacaatgccaaaatacacatggaactgcatctaagttttgtccttgaaacaatgtaatgagtaatgaccgagtgtttggacttgcagattgttgctctgggagttttgttggggtctgctat

SEQ ID NO: 18157 - DNA, 351 bp, Glycine max
  Intron number 1 from transcript Glyma10g00310.2 (locus Gly ma10g00310) derived from phytozome v7.0 (chr-ID Gm10; pos 107929 to 108279 reverse strand)
aaggagaacagaaaggtatttgtttatttttcacttttgctttctttctgtaaaccagacatatgcttagtctaagtttcttttcattttttaataattcattttaacatctggattggtttatagagatcattttaaattaccatagatcgtatttttttattttgattactatgcgtttgcttaatttaactgtcaagtttgatgccaattttgtcaaattcagaaagcatttaattcttctgtggtttaaaaattgaaaccggtccttcctaagtgtgtcctgattttcttacaaagttcgtaatgaatattcatgcaggaacattttggggctcaattaaagaagag

SEQ ID NO: 18158 - DNA, 533 bp, Glycine max
  Intron number 1 from transcript Glyma11g13230.1 (locus Gly ma11g13230) derived from phytozome v7.0 (chr-ID Gm11; pos 9421700 to 9422232 reverse strand)
aagacaagaacaagctgtcacccctcaatttttaggtgagaatggattagagagattgcagatttggcctttatattcccccttcaccaaaaaaatatctcatttcttaaatttttctttcatgttcttaaatagatctgacttttagcaacaaagccttaatttctgatggatgtgagataaagaaaacaagtcaagaacaagcttccaccccaagtttggtaaggataacaaacaagagtaaacaaagaaaaacttctgctggttcatttcttcaccatgaatcgaagtcgtcgtgccaagaaggtaaatatactgtctcaaacatacacattacatgtacataaatatgctgttacaacctcaaataaaaatttgatttgattaaatgttttgaaatgaagaacatgtaaacaacattgtatgtggatttggcctttatattcctcctaacccccaaaatatctcatttcttaaatttctgttttctgtaaatagatctgtttttcagcaacaaagacacactttctaat

SEQ ID NO: 18159 - DNA, 248 bp, Glycine max
  Intron number 1 from transcript Glyma13g36800.1 (locus Gly ma13g36800) derived from phytozome v7.0 (chr-ID Gm13; pos 38023030 to 38023277 reverse strand)
gtctcaatcgttggcctcgtcgtctggatagttgggtaagaacaaacaacacaccctttttcattgtcatcaattttcttcttcagtatgaaaaattaattagtaccatataattttatttcaattttgtttgttggggatgttgtgatttccagttctgaaacatgggttttggtctgattgagtgaaaatatcaaaaaggttaaaactttgtctttgattcgtaattttcgcaggctgttgttgac

SEQ ID NO: 18160 - DNA, 732 bp, Glycine max; identical to SEQ ID NO: 17642
  Intron number 2 from transcript Glyma11g04390.8 (locus Gly ma11g04390) derived from phytozome v7.0 (chr-ID Gm11; pos 2981969 to 2982700)

SEQ ID NO: 18161 - DNA, 1022 bp, Glycine max
  Intron number 1 from transcript Glyma06g42920.1 (locus Gly ma06g42920) derived from phytozome v7.0 (chr-ID Gm06; pos 46225761 to 46226782)
ggtctctcaggtaccttctttcttcatcttccaacccataccttctattggaatctcatttgccccatttcagattttgatccaaaatctctttttgatgtgttttctagccttttcagttccccccttctgttgggccactctctatttttcgttctgggaacattctctggtttacttgattaacactgtttgtgtaattttatgagagaaataaatatatataataaataaaatgtgtgctttgttcttggaatgtcacattatgatgaaatgacacttgggttttatctgcgcttgggtttgcttaattttgatctagaagtgaatttctttttttgtgaatgcatataacaatagaagaggaaataatgtatgcactgaatgatccaataacaaaccgccattaaccccccccccccccccccctggaaaaggacaaattcttcctttcttatggattgggattcggaaaaatacttccccaacttcaatttcaaaaaaacccggttaaatgtttggttattgctaggtaaaattgattttgtttcaaagcctcggtttgactagaagtgggaaaaagtagctgtgttgtcttgagtgtagaaaattcacactaagttttatagcaaacttgcttttaggtggtaaaagcatccaaacataaatcacttcacttgaaaatcaattttacgaaagcaatttcattcaaaatcaattttgcaaacactcatccaaacacacactaagtttttatacattgatagcgcacagagcaaaatgcaattgactgttaatgcttttgaatgaattgatgacgattctaatggttttattggtattacttagtgatttaccgttacacttgctgtgatatgtctatatttgtagtagaggtcattgatttttggctctgctattgctcttgtcttcttcaatagatccgttatttgaatagttgcaaaggaaatgattacgaccatgcagattcattatagttggtttgattctgaggctaaaat

SEQ ID NO: 18162 - DNA, 408 bp, Glycine max
  Intron number 1 from transcript Glyma07g11200.1 (locus Gly ma07g11200) derived from phytozome v7.0 (chr-ID Gm07; pos 9413427 to 9413834)
gttagtttaagaattcattggaattatttcggaatcacaaaagaatgcaaacataaaataagaaataatgaagtaaccatagacaatagaaaagtgagtttagttgtgtaaaagagaaaaaaatgaaaggaaattaaatatatatatatatatatatatatatttatttaaattaaaataaaaaaaccgttgaaacatcatctctcgggttaaaaataaataaatttacactctcataactaaaaattcaaattcaattggagagaaagtggagcaataatatgcaccacaatgatttctagggtttgaagcacttccccaagtcgtggctggaaaacaagggaagaaaaatgagcgaaagcacagagacctagaagcgcgaagctgctgattcagagagcaaggaga

SEQ ID NO: 18163 - DNA, 435 bp, Glycine max
  Intron number 1 from transcript Glyma12g01320.1 (locus Gly ma12g01320) derived from phytozome v7.0 (chr-ID Gm12; pos 767266 to 767700 reverse strand)
ctacctccttcgttaagttaaagggtacagttttttagaaaatttgtatacaaaattaattctgatagtggctggcgctatttttattatggttgtaaagatggatattttggttggaatcaaatatgtatcaccgaaaagaaacctataaattgatgtgtttcgaatccaggcttgttttttctgtttagttctgtttgcactttcttctatccttgctacacaattggttatatttcttaaaggagtagtataaacactaaacagttaaaagtccttactaattgctttgtttgatagaagaaacaattcaatttctacttccaaactatcaattttacgtttttctttcattttcctttctttgtgatgatcacaaagaatttgtaactgaatcacttgctggctggccaatgcagaattcagtttttgggc

SEQ ID NO: 18164 - DNA, 987 bp, Glycine max
  Intron number 3 from transcript Glyma09g32530.2 (locus Gly ma09g32530) derived from phytozome v7.0 (chr-ID Gm09; pos 39058729 to 39059715 reverse strand)
ttctcaagaaggttcatatctatctatctcttcttgctcttgttttgcatattatcctctcttgtttttagttttggattctaagttttagaaagtgagagtctttttttcctttaggctctctgtcgattaggggaaaagatgggatgaaaggaaaatagaaagtttatgatgaaaaccattttctttgatttgagagtacataaaaccgatatgaaggataacaattttttattttactgtgtcttccttgccatttttgttttttttttaaatgttgtttgcaatatttgtgaagtatcctgttgcaaatgtaaaagtgtgcaatataaacttttaggtgttagaagtatatctcttataaactatttaaaacgataatgaaaatgtagcaaatatattaacggcttcaattttcaaataggatcacgggccagagatatatccatttgaataatgagagtgtttggttgaaaggagcttcaacgatcactggtttatgttgatttttgccaaaatgcctttgttgacttttggctattgatggctacataaagatagaaaaaggaaaatcaccctagaaaactaaagaggaaaagaaacagtaccgtaggaatgagggaggggaacaaacggttcaatctgatccaaaagggaaaatataatattaaacgggtacattaatttataatgtgaaaatatttgaatgagaattaattttctaaagatgatattttctcaaattactatgaggaaaattttgtcttattctattgctctaattttctcttcccatattccaacaaagcctaagcatggagtagctgttatattattgtttaggcctgtgactttactagtagcatggaacgtgcatgttttcattgtagtattagcctattgggagttatcaataatggacaattttcaacatagcatttatgtgcacttaaacttttgcatttatgctcttttctgtttcagtgg

SEQ ID NO: 18165 - DNA, 414 bp, Glycine max
  Intron number 3 from transcript Glyma06g22250.1 (locus Gly ma06g22250) derived from phytozome v7.0 (chr-ID Gm06; pos 19048293 to 19048706 reverse strand)
attctgataatatactccatcgacaaacagcaactgtaagaaccttcttttctccctcgttttctacttttctttagttaaaattgattgaattacgctttaaagtgaagcatgattgcttgttgccatatcataaatccatttactgattctatggtatattatccatcgtttatgagtgaatttgacttgagaatgttttaattcctcagaatcattttcaagatttaacatctccttggtccttctgcacaatcatctgaattcttttatattttttgataaatttcatgtacagatactttctaatgctgatgcatgtttttgtaactatcatgcagtattaaaaaaatgcacagaaactagacttatgaagcatattgaattcattgcaggatactgacaagggtgtaa

SEQ ID NO: 18166 - DNA, 605 bp, Glycine max
  Intron number 2 from transcript Glyma06g22250.1 (locus Gly ma06g22250) derived from phytozome v7.0 (chr-ID Gm06; pos 19048725 to 19049329 reverse strand)
cagccagaagaggcttccttctggtattcaccatagtatgaacatgttcaattttactaattcagttgtgttttctgtctctaatttttcctccttgacaatctctgaaatgattttacatttgagccgttgacttttagagatgattttgattactgatggatttatcacattgatgccaaattgccaatcttgtatcagtgttagttggatatagtttactttttatttttttttattaattagcatctgactggttattcaaggtcttcagagtttggaaaggagaggggggggggggggtaggatgtgttgcttttttttttcttttcaatttttctctgtattcaataaaagtataaggtgtggataagatgcttgtgagaaactatttaaagagatttcatttcttgttttttattgtaagttcaatctgaatcatttttgttgttgtatacggtgatcctctctgtgaaatggtcagttcatgtcatttgcatcaccattgttggttcttggtcatatgtttcagtttcattagagttgagtatttgccaacttgcatctaatgcttaagttttccttaggtaattcgcccttcagtg

SEQ ID NO: 18167 - DNA, 598 bp, Glycine max
  Intron number 1 from transcript Glyma10g40270.1 (locus Gly ma10g40270) derived from phytozome v7.0 (chr-ID Gm10; pos 47736098 to 47736695 reverse strand)
ccaccattgccgtaatacccttaaggtatagaaactatatgccaatatatataatatatagtgtatgtacaaattgcaatccacattttcccatttgatattgatcatgcatgcattatgtatagttatatatatacatgtcattctctttgttttagttttattatccactcttcaaacttaacaaaactaaacttggatgcaggtgcactcacgcgttatatttattttattttcttaagttgttgacaaaaatgatttgtagttgtttcatttccctcaattccaatttccaaagcccaaatagatgtctcaattgaatgattaactaaactaccattctcataattttattgtgttaattttttcgaagtttctttaatgaattggcttgataaatattctttcaaaatgcaattatgtgattgaattaaattaaagttaattaaaaacaattcaggttttcatggccaaccgattacatttatcagtaatcacaagtgttcgaagttaaccaaattaatcctacatttttttgtaatttgttgtaactttgtttacagcttagcaactactgttcttttgagggggtgctcta

SEQ ID NO: 18168 - DNA, 746 bp, Glycine max
  Intron number 2 from transcript Glyma06g19660.2 (locus Gly ma06g19660) derived from phytozome v7.0 (chr-ID Gm06; pos 15974340 to 15975085)
gcgtgagtgtttcaccttgtttagattcaaaacttgctttctttaagaaaaaaaatattaatgatatattattgaaaataaaaattgttccttttcaattcccagtggtggattttttttttttttgagagaaaactagtcattcttaaggtggttgaaaaaacaaaggaaaatgaactgccttttctgcttttttttttttgggggggggggggggttgattctggttttgtacttttatgccagtggcaattcaggcttcttttcgctcttactattaatggagccaatttgaagttctgtttccaatttaattgaaatccttttaactatatatataaaccaagggccttttctgttatttcaacttcaagatccagatttggtactctggattctggaaacaatttgattgctacttccaaatttgccccacttgtgaaatactttttaaatattttaatagctttcaaaaaactatatttttcatacttttggattttggggcattccacacagtcaagatggaacaatgttgttaatggattctaagtaatggaatatctggttggctttaatgatatgatcattttctgtctatgttaaaaactttaagaatctccctgcccccccttttacttgagctttactttgctttttcttttttcttttccttgatttgatgagaattttggggacattctgatgcagctgaggccatacttcttggttttcaacattttctt

SEQ ID NO: 18169 - DNA, 616 bp, Glycine max
  Intron number 5 from transcript Glyma13g40230.1 (locus Gly ma13g40230) derived from phytozome v7.0 (chr-ID Gm13; pos 40766593 to 40767208)
ctagttctgcgggttctgtgagtttgaagaaggtggagaaaatactgtggatgactattgttcttgttcttgctcttggagtcacgatatgaggatttgagtcacgatcgagtttgtgattgtttttttgtgcatatatagtttgggttttgacatttactttggagcatttggggacgtatttatgtaatgtatgtctgttttgttgattaggctgcaacttgcatcttaaattgaacgaacatggtgatatatatagcttgggcattcatatcgggtagatatgttaaaaagtcgttatctgattgtagaataggactcgtctcatatgttaaggaccatttactgcggcccattttaaacgtgggcgtttctttttttagaagtgataagacaggagataaatataggacataacaattcaaaaaaaaatattgaacatcagagatctattcacagaatcattacatttcaaaaagcatcatatatcattccaaattttcctggtcccaagttgctgccaattggttttgcagagcatcttcttttaagttttaatctcagccattaaattacaatctaacagtcttcattcttgctggatagagctagccgg

SEQ ID NO: 18170 - DNA, 730 bp, Glycine max
  Intron number 1 from transcript Glyma09g27900.1 (locus Gly ma09g27900) derived from phytozome v7.0 (chr-ID Gm09; pos 34882036 to 34882765 reverse strand)
tcattattcgctttggggatcctcttcgcaaccaggttagttttgctttgtcctccttcaaatgaatttcaagattttcgttctttctttctttctttcttttctttcttgcttgtggtgcaaccatgtttaaggggttccaagaagattaattaagtcttgaacgaaatgtacgttgagataaatacattgtttattgaagaattataagcaaacccttgatcgaaattgagctcaagaatcatgggtattcaatattgtttttgttcactatatgtttatttcgagctgaattttctttctttatttgctttttttactttggtggagcacattttgttaaattattattatttattgcattggtacattagttttgtttgcttggttataaaaacttatttttttaaaaattaaattgaaaaaagtaagtaaactgaacagagatacgtacttctatcgcttcttaatattgctcaaaagttcataaattgcatctatatttttgtttagatcaatggctacctgggtagaaaaggcttggtaactaattaaccaatagtttatagaagaattaaaacaaacccttggtcgaaattgagctgattattatttttatagcaagctgattattgaacttttattttctatgtttactaattaaaggaagcttagtttggatcgatattattaacttgaaaaaaaataatcaatattgattatcaggtat

SEQ ID NO: 18171 - DNA, 448 bp, Glycine max
  Intron number 1 from transcript Glyma09g39980.3 (locus Gly ma09g39980) derived from phytozome v7.0 (chr-ID Gm09; pos 44949198 to 44949645 reverse strand)
tcttctttggatatcttgttaacggcatctgtgaggtatttatactctgttctctcttgattttcttgaattcttgagtgtgatgtttgcggtttcacagtttctgcaaatggttgcagaaataaggtctatgtttgaggagaaagaaaaaagagtttttgttgttgtttgtttgtgtgtgtgttaaaatgggcttggttttattttgtttgatttgatggttttctttcatttttttttcttctctttcataatcaatagcctaaagattaatttttgaggaaaatggtttctcaaaagtcccaagatttgtctgccttttgttattctttctggatgtcttgttggggacttttggcttcaattttgattcttttttgttttgttatgagaataatttagtatttaattatactttcttttttcattgacctgattatgcaggaat

SEQ ID NO: 18172 - DNA, 1002 bp, Glycine max
  Intron number 3 from transcript Glyma08g18960.1 (locus Gly ma08g18960) derived from phytozome v7.0 (chr-ID Gm08; pos 14312065 to 14313066 reverse strand)
gaatcccatattccaggcctcgttatttttgcctggtaggttttctttatccttggtgtattcttttcatctgaaatgtaaatgggtgtttcaaaagatttttggatgcactttatatcattgaggaatcaactggcaatagacaaatatgctttggggtatgatcatctgtaatcttttacaactgtgcttacttttttaatgttttagaaattgaaattgaagttttatagcctctgtttatccaaaaggaaatgaaacattgttgtggcctttaacacaactattgcgagggtttctaatgaaagtcttgctgacttaaattaagttcacctatgtatttaagtttgtcatccaaatatctaatataactttttgaattacttgggagttgggagtatggacctctatgatttagtgatgtcttcaatgtgtcatcaacctactgtaacttttttttttttcaaatgaaatatcatatttagagttgcaacttgaaaaacagaaaaaagaagacacttgtttataaagtagtctgatagattttttgggcagcatagccgttggtatttgggtgtttattcagatcatatattaatttatagccatgtgagaatattaaataaagataaatattggttaaaaacattttttccattcattttgaattggattgaatacttccaagagattattggagtaaaatttctagtaaaggtagtcatattgagtttgtcagtgctgataacgttactgctggtgtttctattgcacttcgacctcactgaaaattcttgttaataacttgatttgcaaatgtgtgggctatttcacatttcacagatggtgggggcagaaataaatttagttatactaatatcttcaactaggattcttactatttgaagtgtaaacttctagcttaaacatttttgcaattgttgacttgactggcatgtgtttaattttttcaggctaagagaaaaccttcatcttttgtta

SEQ ID NO: 18173 - DNA, 428 bp, Glycine max
  Intron number 3 from transcript Glyma13g37900.1 (locus Gly ma13g37900) derived from phytozome v7.0 (chr-ID Gm13; pos 38831406 to 38831833 reverse strand)
gagattatcagactgctcgaaaagctgggtaacaagtatgctcccacattcctagctaaactaaatttcccacaacattgtacaacatcaaaagctagagacactggaactattaaattttcccttatttcaacacctacaaaccaatgcatcttgcaaattccactcataattaatatgtcaataataattgggacaaaacttaaaagtagttcacacatgtttttttagtggtgtttccaaattagaattgattttttttgcttaagtaatctatataataaaagtttttattaaaagttatgcagagattattcaaaataaagttttatatttttaattgaataacaatataaaaaatatctctagaaccatatctaagtttagttggggaatattaattttgtctattctctcttcccttgcag

SEQ ID NO: 18174 - DNA, 931 bp, Glycine max
  Intron number 3 from transcript Glyma13g39450.1 (locus Gly ma13g39450) derived from phytozome v7.0 (chr-ID Gm13; pos 40058963 to 40059893)
ctgaggtgaatgtacaaagatttacaactttattaaatttctcttttcagtcatcaaaaatttagaatacatcatatcaaaacctaacttaccaatattaattggctatgtgtaaggtaactaaccgcaggcacaaactctataatgtatttagaatgatgactgatatatagacactttgcagtatatcaaacatttcatatattaataattattctttttctttttcttacctatcacatcattattatcgccgttcatgcttctatttcttatttctcttttttctttctgagagttaaataatgataatatatttggtgttcattaattatttttcatatatttagtgtgagattaaagattcatcaactagtttcaactcacaattgacacacatataagtaaggataatgataaacatctaccccattttaaaatgaattggttgaaagaaaagagaaataattaaaaaagaaagtgtagagaaaaaaaaaggtatagataatgtaatggaaaaaaaagaaagtaaaaaagaaaaaaggatgaaaatgagatgaaggaagaaaaaaaaagtgtctcctattttcctataaattaataatgtatttacaccaacaaatgacctagctagtctatacaaatttacgagtaatctatttatttcgactgatatatggcttttgggtgttaagtaaaaagctaagtaagggaaaattttaatggacaacaaactctattcaacatctgaagagatatgataggtataatagatattcaaagttcaactatcacacacctaatatattttacatagcatttttaattaatgatgttattaaatcagtacgtctgatatttgttcgcgctattatagtttttttttccttttgtagatcatagggaaggacttatttagattgctgaagga

SEQ ID NO: 18175 - DNA, 627 bp, Glycine max
  Intron number 3 from transcript Glyma11g01160.1 (locus Gly ma11g01160) derived from phytozome v7.0 (chr-ID Gm11; pos 666437 to 667063 reverse strand)
tatctcattttgccaaataaagttccaccaacaaggtgattttttaaccatttttatgaatccattccaaaactaggattagtttcgatgtggatttgctgatttgtcatccttgactttgttactataccctattaatgatcaaattcacggataagaagaaagatattttgatatctcgaatgcacacacatggtgtttacttgcttgaggcacctcacgtcagtgccttactctcttgttcatcagtagttgtttctgcaggaatgctatgttagcagttcataatttttaattgtgaaataaatgcatttgttttaaaatgtgtctttgaatagtgttctgagtttaaatgtatgtataacatcaacactttgaagtggataatttagttttcaatcacattacttctagaaaattgtctaataaaatcgatacagtcaaatgtcatatagttttatgttttctcttttaaacattgttttgctgcaatataccgatgataacaagttcaaaatgggctgtgtgcacatgtatgcactgcagtttctctagaatgtgcttgttgttgctaattacttaatatcaactgatttaattttaggttcgaagcacatttggaagttc

SEQ ID NO: 18176 - DNA, 825 bp, Glycine max
  Intron number 3 from transcript Glyma09g36340.2 (locus Gly ma09g36340) derived from phytozome v7.0 (chr-ID Gm09; pos 42112580 to 42113404)
gaaaaataggtatccacacctgaatgctgtggtccatttctcgccattgtatataccttgtgcccttgtgtattctagataccattttttttgttgcaattttctttttgtcttgttatctgcatggctgagtggaaagaatcatgtgcttaggcacctatatgagataacatagattcctaggacagtttcacagttccaccaagccagttttttccttatgacttgttttcctcacggaatcaatttgaaagatgaaacaagttattttccacaattttctcttctgcagttaagtattaggagttacaatatttcaactttctcatgtaatcaagaataaattttgattttaaatgtagttggtaaatgcaatgaggaaaatattactcaaaatttattgaaaatagaacattaaattcttccaaagatgaataaatttcaattgctcttttaggggcaaagatatgttcaataatttaaaagtatcaattcatggtgtgaaaaatgatttttcctctgatattgtttttatcttcaatcatggtttgagatggccattataattgtgttccagtaaatattgcattctcaattggagtaaataaatagatgtctgagtatcttcaaatatgaaacatgttctgtagctaactggttgttatgtgcatcatgatctttttggtttgataactagatattgcaccggtaattgagggtgctgttcaccacattgcctcaagaagatttgagtttggaggtactgacctaactaatttcctggctctagaacttggcaagtccaatccacaagtaaatatcagc

SEQ ID NO: 18177 - DNA, 974 bp, Glycine max
  Intron number 1 from transcript Glyma09g41360.1 (locus Gly ma09g41360) derived from phytozome v7.0 (chr-ID Gm09; pos 46066225 to 46067198 reverse strand)
ttcttcttctcatcacttctttttccacaaaaaaggtattctatcttctcttcattccttgcttgctttgcttccaaggaaaaccactcagaaaagtagtgttcttttttctctttgcttgccacctatcaatcctcaaaatttatcatttccaacaactttttttttcatctgatcatgtgatctattcaactattgtttgttgttaacttgttatgttaattggtcttgctaatttctattatccgtgttggatgacatcatggttcagccagattctgttttttctggttctttttcagttttgatcgttggttattgctgacaaagttattctcaactgggattttcttttctgggggagcatgaactgaattacatgttttttttttgcttgattatatcaaatcaattaaagttctgtgttggatgacatcatggttcagccagattttttttttctggttcttttttagtttgcatcgttggtttatgattatcattgctgacaaaatcattctcaactgggattttcatttctgggggaagcataaactgaattgcatgtttttttggctttgatcatatcaactcggtcgcgccatgttacttttgaagtacataaggtgatctaagagtttgagatcataaaaataaatggtcttaactcttaactcttaatatgcctttttttgtcttgtgtccaactttgtgctaaaaaccaatatggtatatatttttacaagtgtgataagagagtgtctgagtaaattatatttaattgatgatgttgttctatcaaaatggcatcatattttgatatgcccttcaatcaattcttatttcatttagcaaatgtttggaatgtcagatctttatctttgaggtttctaatagccctgaaattttgattaatttctctttttttcgtgatggaagttgtcattaaaaataattattttggtatagaaacc

SEQ ID NO: 18178 - DNA, 514 bp, Glycine max
  Intron number 3 from transcript Glyma08g28050.1 (locus Gly ma08g28050) derived from phytozome v7.0 (chr-ID Gm08; pos 22315889 to 22316402 reverse strand)
gaggagagacttcaaagatttcaggtgcaacctattctgatggaatatgtgactttgatgaaagggagggagatcataaaatagtaaaatgtaaagggaagaaaagtataaaatcaagaatgctcaaaatggatggttatgttgctttcactgatgattatcatgggcccaggcaccaccttccaaaacataactgagtgaaaaggcattgaaatctcttgtgagtgtgctagtcagcattcatcactagtcttggagtggaaaacttgttttttgatttcatgtacatatattttaattaatttgtgtgaattaatgtgcagcaatttcctaaactttgaagcccaacatccttgtcttttttgttaaggaaaattgttaatatttacgcaatataaaacgaattaaaccaatttatttttctgttcactcgttatagtgtgttatttaattcatcaaagaaattatactcatggctagctccccgtatgttttgcttctatggcaggtaagg

SEQ ID NO: 18179 - DNA, 453 bp, Glycine max
  Intron number 1 from transcript Glyma08g46870.1 (locus Gly ma08g46870) derived from phytozome v7.0 (chr-ID Gm08; pos 45837862 to 45838314)
actagcatttggattgtactaaatgttattctaaacgatttttctattctttgtttttctaaggaacttaaatgatatggttctaaaggttgatatctctactgctgctactatgtcataataaaatttgattatgacaggaataaattaggtaattaggtaaaagagtaactgcaaattgaaatcttttaaacaatttttaccgtgctcttgtgctgtgttttgcattaaacactgtttttcaaagcatatgaagctgtcaaggcaacgcaacatctgaaggccactgttcacacacaccaatagcagtttatgaagtattaatttcatttcatatgggatacttcacaccagattaaacttttaatgagctttggtgttgtgttagaccctttattagtatcttttctagaattggcaaaacttcttttctttttctggaacaggtttaca

SEQ ID NO: 18180 - DNA, 537 bp, Glycine max
  Intron number 1 from transcript Glyma08g35460.2 (locus Gly ma08g35460) derived from phytozome v7.0 (chr-ID Gm08; pos 32662833 to 32663369)
accaattgcttcttgtttcttcaagttaccagattttcccatatataagtacaacagcaagaagtgaatgtgagcagttattgatgctgcttaatcctcatttgaattaatggttgtatcttgtgttcaaattgtgtatcattatgtctaggttcagtatttaggttcaatgtatcatgtaaatatagtttgtagggaaattgaatctatattctatgaaaatattgagtttgtgatgtagataaaacagttttcagcatatgcttttctttatttcaacaccttttttctttcaaatagtgtttgattaatgtttcacaaagttcattcatttagttttgttctcttcatgttattttttgctatattcccatcacttaatcggtctactttatttggatgttgctgttgtatcttgcagttagttatttgatcagatcaatacataaattccaatatcttcatcatttaaagttcatcttatttatcggtgactttacagccagtagttcaaaatatcaaggtggataatcatcc

SEQ ID NO: 18181 - DNA, 519 bp, Glycine max
  Intron number 1 from transcript Glyma13g22330.1 (locus Gly ma13g22330) derived from phytozome v7.0 (chr-ID Gm13; pos 25883772 to 25884290 reverse strand)
aggttctcttttcttcttcttcttcttcttctttcgcctcgaatttgttttctgtttttcttctctgttgcatgtatggaatcaaaaggtgcggctttggacatgtttctttatgttgttttttttgggggggcaaattttagtttcttagtttgaatatctttgcttctgtttgtgttttgctgtctctgtcctcaacccccgcaaaaaattgtgtgtgctatttgattaaaaaaaaggttgctacatatattataaaaatgacaattgtgtcttaagcttgcacaaaacttgttggtgttttactttgtatgtaaactcatgcataataatatatttgcttcacttccatcttgctcttctttttctttttccttttttttttccttttttgttcttttttaatgtttattttgctagaattgatagcttaaaagatgtttagtttagaaatttttttgaagtgtgaacaaaagctctgtctgaattttcgttcaactttatgttgtatttgcagct

SEQ ID NO: 18182 - DNA, 687 bp, Glycine max
  Intron number 1 from transcript Glyma13g23580.1 (locus Gly ma13g23580) derived from phytozome v7.0 (chr-ID Gm13; pos 26968510 to 26969196)
tcgagaaggaggaagagtacattatcagactcaaggtactctttctatctttcgttgcgtggaagatctgtttcttttacgattttttttttaggattccttcaattcaatggtaaataactaaatattaaactgttaggatttctttcttttgtctggatgagtttgacgttattattagcttttgaatgaataggtggattttgctattttaacttgtccaataatctttctcaatatctatatgtttttcctggatatctgttagttttctttttctcccagaatttaaaataaatagcaactcgttatgtgattatggaatttaattttaattagctaagcaaattgatggattcacaagccataaacatgtatggatgacgattttttacgtgattaaacagaataccggcttttgattagataatattggtgaagttcttattggaatttggcaatgccaatttgtcttgcttttcttctgcacaagattttgactggtttgtttaggttttttggttattttcggataactgtaacctcggtttaagcgtatgatcttttttttggttgggcgtagggtgatttatattcaggaaacagttagataatgggaagttctaatgtttattgtggttggaatctacaggagttacaagatagggttgccaaagttaaggattc

SEQ ID NO: 18183 - DNA, 885 bp, Glycine max
  Intron number 3 from transcript Glyma12g09740.1 (locus Gly ma12g09740) derived from phytozome v7.0 (chr-ID Gm12; pos 7507750 to 7508634)
ctcatagcagtgccaattttattgaggtaaagagtgaatttgaatttatcagaccaattagaaatgtggtaagcatgctgattggtcatcattttcacaaagttcttttcttccagttttttttttttatctgggggttttgtttatttaatggacctaaaataagatagatagattatgttagggtacaactggaagttatagtcccacattggaagaactggaaggtatagtcccacattggaagtatggaattttagtgtggggtttattaggccttgtgctttccaataactagcttttgttttgttgtgtggttttccaaaggtttttatcaactggtatcaaagtctttcaccatgtctctcaactgcaaactgagggtgtgatatgaccattgtagtgtttgcccatgactagtcaaagtgcagaagggggtgggatgtggggtttataggggcttgagttgtctaactacaacaaatggcacttgatgcatgttctgtccatgagaccttttaaattgtttactaggacacttttttaaaaatataaaaaacaattgttttaaatttaatgttaacaatcatgaccttatagcttcttaattggaaatcactagtttaaagattagactgttattattcactctgaattggtatattatgttctttacattgtatgctgtatctagattaaaatgaaaaaaagcaacagcaagaaaaaatagatatagatctgatcaattaaatgatttacaattttgttgcacgtaatgatgggcttgttctttttcctatgtttttttgggagggaagaaactgaactatgttgaaaagttgaaatgcaggaggtagaaaatcagctcagaagcaagaagaatcg

SEQ ID NO: 18184 - DNA, 344 bp, Glycine max
  Intron number 1 from transcript Glyma11g37510.1 (locus Gly ma11g37510) derived from phytozome v7.0 (chr-ID Gm11; pos 38602000 to 38602343)
ctttgtgagttttcttgttagttttttttttttcctcccctttaaattttcttcaccaatttattaactttcccttttttttgggtactaggaaaaaagtgggaatgaagggtcttctgataatcgttgattatttcccttaatcgttttgtacttgattagttttgcaaatagaaggaacatgctcagcttacaaagaatttgttactaataataagaatttgcttatccacctgtgatcaatttgattgtgattttttatttttgtccccactctgaatttggattgtgtgttgtgccctcttctagggctgctgcaattcccagagccaagggtggaactc

SEQ ID NO: 18185 - DNA, 514 bp, Glycine max
  Intron number 2 from transcript Glyma06g08820.1 (locus Gly ma06g08820) derived from phytozome v7.0 (chr-ID Gm06; pos 6447730 to 6448243)
agagaaacaaggtctttctagtttctgagatattaattttgtttacgtctctctgcttctgttccactatagctactctgatgcaacttatagtcgaatgtttctgatatgtaatgtattgaggcaatttggataagataacaacaactatacctgcatttaacttattatgaatttctgattgtcacttctttaaggacaagggacatggttcagattttgtttgcctaacctatttaaggaggggtatagggacggtcatcataagtgttgttgattcacttggtgccataatgttatgtatttgtgtgtgtgtaggaaagtaaacagttaacactaacgagtagtgtgacaatgtttctgttattcacctctcactcttcaaacaaattgggttatgctgaatgttctagcatatttgtctttcctacattattttttctttttcaatggctttttcattcatttattagttgtgagatatcctcattttgatttgcaggcgatttggaac

SEQ ID NO: 18186 - DNA, 328 bp, Glycine max
  Intron number 1 from transcript Glyma10g39730.1 (locus Gly ma10g39730) derived from phytozome v7.0 (chr-ID Gm10; pos 47365730 to 47366057 reverse strand)
atttctttcagcatctccatcataatcctcttggggtactgtattttttttaattttttctcccctttgaatttttctactaaaaaccatttgaaagtgtgaagttttcatttttattttttaaaattaatgagcaatagcatcttctttgtgctcaatattcagatgccaatcttcattcctaggaaacaaaaaaaaaggttccaaatcacatgcaatgaaatctttgctgatactcctcactgtttatggaattaagcatttgtatttaacaacactccattttctgacaggcaaaagcatttccaggtcaagaattctcggtctc

SEQ ID NO: 18187 - DNA, 853 bp, Glycine max
  Intron number 2 from transcript Glyma12g17590.1 (locus Gly ma12g17590) derived from phytozome v7.0 (chr-ID Gm12; pos 17722031 to 17722883)
acttccggcaggtttgttgaaaaacatgctatcacagaagttctgaaagtcatgccaattgtaaacttgtataatcaaatctcctagcattgctttgaagccttggataactttaagaccattgaatgttgcgttcacttaatgaccatgacttctaaccttaactgtcttcggaattttcaattttaatcagtcctaagtcctatcattaatgattagaagaaagaacttctacaaattaatttgtacaagttaatttgagcttatgaataagctcatttcattttgtcttcttattttcttctcctaaaaatccttcaaaataagtttacccaaacagtagaatcattcattcttatcatctattgtgatctccatgagtatatctttatcatacaaaaattatgctcactaactgcaaacactaaaagacttattgtttttatgcacaatgacaaggaaaacataacattgaaatatgatctcatacatgaaacattccaatttttgtaatctatattaaaaaggattgttatttataaataaatagagttttagaaaaatgatgagattttataaataaataaataaggagatataattattaattaaaataatgatttgatagaaaatgaaaagggtatttcatttatttgtttgatagaaaataaaatagagtttgtttgtataaaataaacaaataattaaatatagagcaaataataggctgagtacctaggtataaatagttatgttaagtgaggtgcctctttttggcctcattttcgtttttccccttctcctctcaaaatcttttctttttcccgcaactcaccaaacctgtctcagaaaa

SEQ ID NO: 18188 - DNA, 803 bp, Glycine max
  Intron number 2 from transcript Glyma08g23180.1 (locus Gly ma08g23180) derived from phytozome v7.0 (chr-ID Gm08; pos 17666869 to 17667671 reverse strand)
tattccaagttgggtcaatcgtcttgctcgaattggtaagtggtaacataccattgactattcactagttcactagttactactattgctaccacaacaacaacgttaactcaacatggttattttttttttaaatgattaaattagtgtctattagtctattattggtcgttttcagctcaggtgtgttcttgtttgcttgttgaaatttgaaatttgaaaattgagaatgaagtcgtggtgttgattatttggtgaaattttgtaaacgcaataaaatatagtttttcggtgatgtggaaattagttggatataggacatagcgaccacggtaaaatttaaaaatagttattgctgacttgttttgtagaggatggaacaaagtgagtgaaaaagaaaggataatttagaagagataaaaagaaattactttggaattatatttgattcgtttgtaaggacatgaaaattgttacggaaaattgagtgacagtgatgatgctgacaactgctagtcatctgccacgtgatatgtttaaaaaaaaaattgtgatacgcctcttttttctgcttcttattttaccagctgtgaatttgttgattctatgtgtgacagtgattgaggtaaacgaagtttgggattaaaatgaggaagagagactagtatttaatttttctttggattctagtttaaacaatttaattttcccgaattttcaattgaaactttaggttgatttgttggttcaggtgattaattttatggttggatggattggtttattattgtgttgcaggattt

SEQ ID NO: 18189 - DNA, 593 bp, Glycine max
  Intron number 1 from transcript Glyma06g45120.1 (locus Gly ma06g45120) derived from phytozome v7.0 (chr-ID Gm06; pos 47925920 to 47926512 reverse strand)
ctcactcaacaacccataaccactctttccttaaggtaccatcacctttttatattttatacattagttcctttctcttctacttttttggggacaaaaactttgattcattatagtgctggttttttctttaattttattgtcatgtgactcatgttcgtgacatgaataggatcagattacaggacattagatacaggccccatatcgctctctccgtattattctgccagatttcactggctatttggttatgtatatatttgcttaagcttaatccatggttgttctagtgtttattattattcaaggcaggtctaatcataggtgcttgtatgaaatcatgaacaagagtcctgaaaaagtaatataactaataaaccaccaccagtcttttttatgcattttgttaatcttttctattaagtactatttctttctattttcttatgatatctatggaatggaaggatcccctgccactttctgataatttttcctatttactttgaatatatatatatatatatatatacttttttcttttcttgtttgcagttctggaaccacagaggggaggcagaagttcgtac

SEQ ID NO: 18190 - DNA, 476 bp, Glycine max
  Intron number 6 from transcript Glyma12g32950.1 (locus Gly ma12g32950) derived from phytozome v7.0 (chr-ID Gm12; pos 36326304 to 36326779 reverse strand)
aaacttcattggtggaattaacacttatagaaaccgtcattattggtatgtcttctttcatgtttaccaacttatttaacttattattcctatgcatttgggtaaataagctctattcagaacttatttaataaatttattaaataaaaccttggtcataagcttgactatgaagcttaataaaactaatgttaaaaaaactagtttgataaacttctcgataaaactttttaagtttatagggaggtgatatattactttcataaacttaaacaaactctttgaaatatctttttccttcttaacatcttaattgttcataatcttcattagcaaacttctttaaaccaatttagttaaacaaaactttaaaaatataaacaattttcaattcaaggaaaattttatatttgaattgataaattaattaatttatgcatgtggctatttaaggatatcactttgtggtcattaat

SEQ ID NO: 18191 - DNA, 953 bp, Glycine max
  Intron number 1 from transcript Glyma10g07280.1 (locus Gly ma10g07280) derived from phytozome v7.0 (chr-ID Gm10; pos 5994683 to 5995635)
ttacggttacgtcaacttcaagtctcagcaaggtatctctctctctctctctctctttctctctctgagacacgtatatataataattaataacattaacgattaacggtttctgagataaattgcattgcagtgttttctttatcgtttctttgattattcttttgcgtttatagagagacagagaactttcatttttatttaccgtttcttcgatttatgagataaattgcattgcgtctctttctttatcgtttcttcgattattcttttgtgtttagagagacagaattttcgtttttttatttatcgattattgcaataatgtggcaacagaataatgtacgaaactagccagctagctggtttttcgttgcttggtacatagtttgatgtttgagattttggtggcttcattgataatggagggtttgttgatactgatagtctgatactatcgttgtttttgtaaagaaacactaatcttggaagactcttgtgagtttagcgtgtggaaatgggggtaaaaactaaaattgtataaaatggtgtttgaaatgttgacatgcttaatggtgtaggaaaagggtggggataaagggaattgacattatggggtttatcagtgtggattttgatttggttggctgcatgttgtttagttatgtgtcgtaaaggatccagaccaagttgtgtcactgtcatagtgtgtggcttgaaatttgtaattgtaattttttattaactgcaagattttttctcttaaaaaattagagcatattgattgtgagatcttagagaatcttcaaaacaagatgcttacctcaatttcatttttttagttttatttgtacttgtgctttctggggttattgttgccttagtgtgtttatactgttgatgtagtgtgattccactaaccttgatttatttattgagtagcaattcgtgca

SEQ ID NO: 18192 - DNA, 683 bp, Glycine max
  Intron number 3 from transcript Glyma08g18070.1 (locus Gly ma08g18070) derived from phytozome v7.0 (chr-ID Gm08; pos 13584532 to 13585214 reverse strand)
ccaccctaagttgaagagttgcctgcagtttgtaggtttgtgattatttgattatactatttttaaaatggacaaaacttggatacaatatcttaggtactgttggttggtgttgttctccaatcaaatttaaagtttcacttcaataatatgcgaaacaaaggaatatctattaaatgacattacgcattcctgaggtgaaactccaaatcggattgaagaacagtgctaacagtaagtaactcgtaatgtatctaagttttttccttttggcattggccttagacatgttgtgaattgaacttagtttatggggatgaatgactaatctcttaggatatctcttattggtgatgatatctacataacaattttaatttggtgatgggaacataataaataatctatcactagtttgcatccttctgtcattaattgccttggtaagtgtcttgctgttttctcatttgttgcagaaattcttggttagattttggtcctctttgcataaattctcttgtaaacacttataggaaaatgaaattaagaacttctcgtatgagctaaaatcaacttatatacttcaaattttagagaaattagatgagaaaatttctatcaaaatttaaatgcataagttgattttagctcacgcaattcattttaacttcttattttctttt

SEQ ID NO: 18193 - DNA, 610 bp, Glycine max
  Intron number 1 from transcript Glyma09g04560.1 (locus Gly ma09g04560) derived from phytozome v7.0 (chr-ID Gm09; pos 3366886 to 3367495 reverse strand)
cttgtaagtacgttttcgtggttcattttgttctggttttttgttagtttttgtttttgctatgttgtctttgcccttttgaccttaggcctcctttcaaatctgggactcattgataactaagagggcattctcaaatttcaatctttggtttggttttagatgttaagtcaaagtatgtgcgatgggtcaaagttgggtcttgttttggtgttgcttttttgttaaacatgtggcaatggtgattgatgtcaatgatgggggattcaattggatcaaatttcattccatttgatctgatatacttgcattctcctttcagattggaattctctttcaacttctttgtcatctgatgtgtattatctgaagtgaattacttggtcaatgatgatattgtttatctgtttcattttctattccaattaaattgtgcttggatttttttttttttttttgtgtgtgtgtggctcttgagtcctaatcttgggtataatcctgtggttaattattgtatttgtaggatatcatcttctgagaatcaatgggttgcattttgctttttctaccctctttcaggtggcattgctcttgctggtggcattgagca

SEQ ID NO: 18194 - DNA, 641 bp, Glycine max
  Intron number 1 from transcript Glyma07g12000.1 (locus Gly ma07g12000) derived from phytozome v7.0 (chr-ID Gm07; pos 10277269 to 10277909 reverse strand)
ttggaaaccagtttctgataagatcaggtaggtataaaccgagacaaatccagaaattttaattgtgggaacaaaactcatattatttgttgacttttttttacgacatttcagattatggaaacaatttctaattatacgtatttattatattaagaaaagttattgtaaatcctttgtattgtcttcgattattatggatcaaaaaaaattatattaagaaaagttgaaaagcttatggaggcagctattcccacaaagtccaacatgattctgtttggggatgtaatatggataatttaattatatagtatcataatcttttttaatctaaatgatagtttcttaattataataagagcataccttttaatgatatatctgtggtatctttagatgcttcatgttgatttagtatcttgtgccttgctaaagttttatttcctgaaaacaagaattcaagtatagcataacactcacaatttctactccattttcgtttttttctgtttttaaggacagcttacccatttattcctttagtttatatttttctccttaatactactttgctttctttctggtagaatttgaacagctaaaataggttacctactttgtgcaggggactcgttcttctt

SEQ ID NO: 18195 - DNA, 544 bp, Glycine max
  Intron number 1 from transcript Glyma09g30390.1 (locus Gly ma09g30390) derived from phytozome v7.0 (chr-ID Gm09; pos 37240172 to 37240715)
acaaaggctgtcgccaagttgtggggtgtgtttctcttccttctttccttcttctttctgggctttcttaaagttctgatttttatgggtttcattttctaaaattaatgtttttttttataaataatattacactagtcagggattaatttctaattcaaaatttattagtttcaaaataagtgttctgaaaacttaaaaaatggaaagaggaatgaaatttagaaaacaaaaaggaattttgaaaaaaggagttaagcatacaaggccttaatctctagaattgaagatggtggacaagttttgaaatttgcaaggttttctcaattgggggttcttcttcttcttcttattattattttaaaaagggttaaaagcgcgtcctttgatttgattattggatggccggtgggggaaacacattttttttatataaaaaaagttatttttcttggtgggtttgaagttaaatttgtcttttctctgtgcatattgaattgttaatctgacttgttttgtggtggtgttttttggaaatgaacag

SEQ ID NO: 18196 - DNA, 553 bp, Glycine max
  Intron number 1 from transcript Glyma05g33170.1 (locus Gly ma05g33170) derived from phytozome v7.0 (chr-ID Gm05; pos 37900573 to 37901125 reverse strand)
aaatacatcgagcgtggccaaaaggtttctttctcttttcatatttttaaattttttttcctgattgttttccttgcttttaatcttcgattttttattaccactccaacgttttccgtttgagatgatcaacgaaggacttgtgaggttgaagctctgatttgtgaaaagtgaaaaatctaaacatgtgcatttgtcacaatttcgttacacgtgattgaaataaataatgtagaaggggatggaaaatactattataaactatttagtttttaggtgtgaggcagctccttcccggagagagttgattgtgattactaattagaattaagaaataaaaaaaaagttatcacttaatctttgagttagcaaatccaacaaatcggttgttcatttgcttgtattcttctgtaagtaaaagcaggctagatgggaaagcatgatactcctatttgtttcttgtttattttttttatatatgaaattgaaaagctattgttttggtatctgtgattataagtttttttttgccccctcctccaatttcagattg

SEQ ID NO: 18197 - DNA, 230 bp, Glycine max
  Intron number 2 from transcript Glyma11g19650.1 (locus Gly ma11g19650) derived from phytozome v7.0 (chr-ID Gm11; pos 16399767 to 16399996 reverse strand)
aaccaggctcgtcttcttccgcgcctgctaggtgttttattttttaaaacctgtcattaatgtttatgtttttcttgtcgttagctattattagtggtaataataatatttgattgattgctggttatttgtttctcttggaattagaaaaaaacgtgaacgcgagtttagggtcaccatcaggtttgcttccaggactgaccttcaccatctcgggcagtttctcaggc

SEQ ID NO: 18198 - DNA, 914 bp, Glycine max
  Intron number 1 from transcript Glyma10g00880.1 (locus Gly ma10g00880) derived from phytozome v7.0 (chr-ID Gm10; pos 610932 to 611845)
attttttgctggatctggatcatttttccgtctgggttcgtttgatttggcctttttcagtgctcgtggaaatgttcgcttttgatattgaatgcaccccagattccactttttcgattttttagttgttatgttgttgcattgaatggtgattgaattatgaactagtcttgctccttttgatgctgatgctgttttgcattgtgccggatctgggagttccatttaattccatggctaatggttatcatcaatctcattcattactatttgatttggatccaatgatgtttttcagaatcagatttgccattgcatatcatgcattcaattatcagaatcatgggggtctttctttgtggatccatcattttcattggttaggtgtcagtggatttgtggtcatcgttgctttctttcacctcattttttcgtaatctttattgtttttcacttctatgggacgattagtacacgcaatttcgactgaaaactacgagtgcttcttttggatggagtagttggatttgattaaattagcttgagttactctcctattgtggtgaattgtccttggccatttgtttcttctatgaccaagtgttactaggattattggtggggtacactattccttttgattatgttacccattattgaattcatctccttctatttctattttctttcttcatacctgcttacatctcatcaaactctggtcacacttgaaaagaaacaagttttaaactggtgtctgtgtttggatctgttctttgtttttattctttttatagctctatgatttaatcaagaagaaaaatcagtaatgaatatctgtatctatttgctgactgcagtttctttccttgcttgcaggttattctttgaatcagctatcagtgtatcaattt

SEQ ID NO: 18199 - DNA, 477 bp, Glycine max
  Intron number 2 from transcript Glyma12g10630.1 (locus Gly ma12g10630) derived from phytozome v7.0 (chr-ID Gm12; pos 8586510 to 8586986)
aaggtagttgttccaccaccatgtatgtcggaggaaaaaatgacgacgacagtgacttctcagccacaagatgcctctagtctcaacaaacaatcattagccattttcaaatttcaattcaaaatctttggttattgatgggaatgatacggttacaaaaagtgtgacaatgggggttaatgaagatttgattgttaaaatccaaaaaagaccaccatctctcaaaggtaaggagtttgaaccaattatttctaatgtggaagggggtgcaaagtccaccatgaattagtgcaagcatcaacattacaatattctatgctggttgatgagaacatcatggaacaaactgatgaaatggaattggtgtcaagggctattcccaccaacgagattgaccctgatccaacaaagggcacctggagatagttgaaggatatgataagaaaatacaaaccttttatttttatgttgtatgag

SEQ ID NO: 18200 - DNA, 983 bp, Glycine max
  Intron number 1 from transcript Glyma11g02010.2 (locus Gly ma11g02010) derived from phytozome v7.0 (chr-ID Gm11; pos 1216901 to 1217883)
gttgtgcctgtcagctgcattcaattttcacaccggtctttacttcgatccttcttcttctttttttgaggttttctattttggtttcaaggtgaaacggagtaattgtttctcccctgtcttggggtgttctatttttatttctgtaagttgatgaatggggttgaggattatggcaaatcacgcgggtctttgcttcaattattttagttgagcatcataattcatatttttaggtctgggaaatcgtatgtattttgcttttaagcgaatagcattcaatatgctggtttctttgagttgtatcctacgattaaccatgtagtctttcttagcaagacgataaactggggatattgtcttggtgaatattttgtttgagcttcatggaatgagaggaaaaaaagaggcaagtgtagactgattatgtggctgctgagttttgactgttgacaatccccatagttttcagtttggtatcatctataggcaagtgtagactgattaagtgctttgtccctagttatcacttatcaccagtcagcgagttcttaatgctctttctgaatgcctcgattttatcctccacatcagactgttgttaactcaatgaaacaactttcatcttcattttaatcagtttaacagctagtttgctgggactgctacttttagccggtctaacagtctgctagtcttcttagcttgtgttagttgataattcttggaggtgaaagtctggaagttttagcaatttttttccatttaatttatgcagtcttttatatatgtttggaaacgtccttcactccttctatattgtattattcaacaaatgctggacggcattttatactcacatggtttaagaaaaaaggaatttgagactttaaattcagcaaaactgaatgatgatgtcaatagaggactcgtttcatatctgacttcttggctaagtttccttcttgcagaaggtttctttc

SEQ ID NO: 18201 - DNA, 483 bp, Glycine max
  Intron number 1 from transcript Glyma08g47900.3 (locus Gly ma08g47900) derived from phytozome v7.0 (chr-ID Gm08; pos 46680032 to 46680514 reverse strand)
tgcgcctattcttttctcatttttgtttctcctaggtttctttcttcccgatctgcatcttcacttcttactgcttattcttcttctttccgattcccatttattccttctttcttctcgatttcgtatatttgtattttctcctcttttttcttcccgcgaagaataaaaaaaacactggagaaatagatcgtgttgtgtgttgtattttagtgaaattgattgtgaagtgatggaatctatatttgaatgtttttattctaaaatcaaattaatgataaaattgagtagtgttatttatttagggcaaaaatactcaattgctcaaactcaaatcaattttggatctagaatcaattatgtagtattatgaatatttacctatgattacgtgtgacacacacttgtcacttaattatgaattgcgtaatattgtgaaatttatcttgcagggttaagcggtgagatttgcgaatctgagaa

SEQ ID NO: 18202 - DNA, 904 bp, Glycine max
  Intron number 2 from transcript Glyma06g45910.1 (locus Gly ma06g45910) derived from phytozome v7.0 (chr-ID Gm06; pos 48636206 to 48637109 reverse strand)
ccactgtaagtacttacttcatcttttaaactctcaattaattgaaagaattttataattaagaatataataaataatagttaaatttaatcttatttgtatggaaaattcatattgtgttgtacttctgttgaaaattttactatatgtacttcacaaatagtttgaatatcccaaactttatattttttttgttgtcctttttctaccaatcttcatcacaaaccacttacatggctccgtcaagcattgtagtataagtatttttgtgacgtagagttgcaatatgacgactcttgatggagttatattagcgttttgtaaagaaatgactaagaatgaaaggttatttcatcacatatatcataaacggaaaactaattacataagtaattatataaattaaaagcaaaaatcaagatatttactaggatgaaaaatatatttaaattgagataaactataacaccttttaatatttataataacaaaaaactttctttgcccagaggctcttcgctatgcaaaattatgggggagggatgatgaatatttataataacaattttttttatttttaaaacatcatttttttcccttttaatttgttatatcaatatcatatgctatattagtggccatataattttaaaaatttattctgtccttaaaattgtccatgttgcattaaattcgtgtttgtgtgttacaaactagggttggcctgatggtagaagttagaatagatgcatgaaatttaagtttgactttcattatcatcattctaaaaaaaaaactcatgtttctgctatgttttctctatgctttcttatatagaatagaaatgagtcagattcttgttttgtgatgattgagatgggtttgcagggtggaccctattgga

SEQ ID NO: 18203 - DNA, 963 bp, Glycine max
  Intron number 1 from transcript Glyma11g01620.1 (locus Gly ma11g01620) derived from phytozome v7.0 (chr-ID Gm11; pos 958359 to 959321)
tcacaccgtcgaaaaaggtgccggtcacaagcaaggtcagttctcgcctccaccaatgcacttttcatatagatggttcatttttcattattcctacgattattatttctatctctatctttattgttcaatctaagcgtaataaggcgtagatctagaaatcacggtgttcatttatttcttgtctattttcatatgctatgtagtttgtgctggaatttctaattcttattgtgccttgttcgtgcgcagattctgtattccgtatgaatgatatgtctaaatgttatttattagttgtttatgttaatattcggtttgattctgccaattgccttcgtgacataatttggtttaagtgtggatgagttgcctgaagccgtgcaaaagcaatccgcgcttgaaacttgagtgctcgttggtaatcccattggatcatcaattaaaagtatttattcaggtctagttaaagcttaagattgagtgcttgtggatttaaggatttagtggatttggatggactgcatctataatacccacttgttaatgtagaaatctgagggagatacctatgtctgaaacttagtaattgaattgaagctgaatcttcctgttgtttttgtcttgttcttctttagagtgagaaaatcttatcaatgtaagaatttagttgctgttaaaacaagacattgagacatttaagattgaacttttttatgttattatatgttttcattgtattgaggttttctcttgtttttgtgcgaagtgtgttcaataaacaaatattgatcactaatttatacattgcttccttgtctgataatattggttagcactcatccgatgacaatctattgtaccagttttataattatttttctgttgcttctatcaccctctttaaaaaaatgttatgtattctaatatttgcccttttgacaatctcaggacccaatctga

SEQ ID NO: 18204 - DNA, 729 bp, Glycine max
  Intron number 2 from transcript Glyma07g22950.1 (locus Gly ma07g22950) derived from phytozome v7.0 (chr-ID Gm07; pos 24681029 to 24681757)
aggtatgcacttttgagttacaatttagtttgttgtttgtgattatgtcataacttattaatgtttatcataaacatgtttataatacttctatgaaatgatggagtgtaatgtatgagacttggggtacctgatatttttgacaaagataaatctccacccaaattactgcacttgggatgtatgtcaaatatattggttgcatcgaaaaatttggtttaatgttctccttttaaaacccaagttaaattggggtataaaattctacatttttttattacctctagatttttctattataggaaagcctcttagatgtaaaaaaatattttatttgtttttagtctgcatgcttgtttagctcttgaacatatatatttgttggtcttgattgatgctcgagttattatgagttgaatcatggactgaccataaggaaaatttgctattttagttaaagaagtatgtgttagcaaatggtgaacctaagctggaggaggctgtgttttatcagaaatatcttatcaatagtttaaacagtttgcaaagaatagactagaagcaactcttttgtctttttttttaatacctctcatccatgaaattgtaactatctttgtctatcatgaatctgttggaagtaaaagagaactaccctttatgttatatatattttggttgggatatttccacattttactgacattataaaagtactcagaattcccc

SEQ ID NO: 18205 - DNA, 789 bp, Glycine max
  Intron number 1 from transcript Glyma10g42940.1 (locus Gly ma10g42940) derived from phytozome v7.0 (chr-ID Gm10; pos 49784272 to 49785060)
ctctccccgcttcagatcttaaacgtctttcgctggtgcgtttttttctcttccgatccatttcctcactcatttctcttcgatcttccaataatcattcaattctgcgtttctccttctcattgtttcgcccaaatcttactatcagttcttcatttgtctgcttcaaaggtttttgagtaatcaaagtatgaacaaactagctcacagttcgatcacttatctactcgaataaaactacagtgcctttaattttgaatattgctgttttttttttattattatgtttgtgaacatctgctttattttattttattattgttcatcgtgtttagttcagccgcttaattcagtagcgattgattcggatcaatccatttttttaacatacaaatgaagtgcaatttggatccgagtgttgttattttcgctgtagtttttgttagagtgaaccgcattttctaaaaattaggctagttttaaattatatatttgaggaactaagtatatttgaagcattgatttagtggttaaaatctttagactgttttggtgataactcactaagctttcaaggaatagtttattagtttttatttattctttttttttttttactgtgatggtgtctgtgttgactttgttttggattgtgtttttggcgtttgctttgtcttaattattgattattgatcagaacaatgcctttttagtgtcgcttctcatttgtgtttgcatgaattgacttttgttcaactcctctttggtctgcttgtctgaagttccaag

SEQ ID NO: 18206 - DNA, 631 bp, Glycine max
  Intron number 4 from transcript Glyma10g42940.1 (locus Gly ma10g42940) derived from phytozome v7.0 (chr-ID Gm10; pos 49785624 to 49786254)
gtgaaaaagctgttgttcaggttagagactattccatgtataatcttcttctgtacttgcctcttgtctttgagttgatggcttgaagatttatgtgcttattttttaggcataaccaaaacattataaaattcccctgctgtttactttgtgaacaattttcttagttagaaaggccttcactgttgtctactttactaatgtagttgcagtgactttaaaaggatggcccagtgcaggaatctcccactaagtggggatgtggctgtattaatagtgtgatagattttgtgggcttcattgacataaaatcaattacaaaatatgagatcataaaataattaattattaactttcatcctaattgtgaaatgaaagttaccgggatgcatccgtcttattttactttgaaaatttagtatcattttatatcactgttaatttttccgtatttttaccgggatgcatccgtcttattttccggcatggccaggttaggattcaatagcaaataattttgtcactgttaggtttagctattctgctagtaccattatcaatggaagtttattcacctttttttaactattgaccaggtatttgaaggtacatctggaatcgacaataaatt

SEQ ID NO: 18207 - DNA, 595 bp, Glycine max
  Intron number 3 from transcript Glyma10g05480.2 (locus Gly ma10g05480) derived from phytozome v7.0 (chr-ID Gm10; pos 4258194 to 4258788)
gatcgctcggaacttcaaggttgtttcttcgttctgtcctctttctagaataatctattcatatattcgattccaatttccatggctttattttattcgccttgctttttagttatgatgttaaatattctattattgcctttttttaattgttagtcctaagtgtctgtttgttgtgttttctttaatttattctttctgtcactgttatttctcatcatgttaattaaaaactacagggactaaaagacaagatcaatttggtccctataaaccttcaagacaggccagcttggtataaggagaaagtctaccctgaaaataaggtcagtaacttaggcaacagagggtaataaggctatgtttggattaaagtttggaaagtacgtttatgaattccaatccaccaaatgaagaaggaaaatattcttgttgcttccaaagtaaaagtaattttgagctctcccaacttcaatccgaatatgcactgaattggttgttgctatgtgacttgactgagataatttgattcagccagttgataagtgactttgttcccctaaaatatgtatataggtgccatccttggagcaca

SEQ ID NO: 18208 - DNA, 980 bp, Glycine max
  Intron number 2 from transcript Glyma12g02540.1 (locus Gly ma12g02540) derived from phytozome v7.0 (chr-ID Gm12; pos 1656464 to 1657443 reverse strand)
agtaccgtttacctgacaattgcaaactacctaaggtatattattatttcaacattaactattaccatttttctttctttccttttaggcagcttgtgatttgaaaaaataacttagtttcctgccacgtgtttttcatatcacagattcatttccccccacctttcctttacgcgtcaatcaatttctcattcatattagattaattagaataaatttgttgacttttacttcaaagtcatgcaagtgatttaaacataatataacaatttaactctttaaattagtatttatatttatttataagtttaattgacataaaatgtccgagtagaatttctcctcctaaactaaaccgaaaaaatggtcagtacaaaaacttcaaaattataaataatgtgtttgacagaaagaagataaacaatattaaagaaaaaatttatattttttttttagactcacatcttttatcttttatttatatattttttattttcgtcttttgaatcaaacacacccttaattagaaattaaagatatacataacttttaacatcattattacttattatatactagtttgttattggaggacatcttaagtgtatattctatttttttttctttatttatttcgttacttttaacttcttgcaaaaaataccaggacttttcctaggtacaagtgtctcgttaagcatatggtatatctgacagggaaggaagtttcctagagacagaaaagaaaatgatagtacatagtagttactttctatacggctaggatgtgaatacatttagtgtgcgcccttttagtcttattttatgaacctccattcacaagaaagttagtaagaattatgcaacttaaagttgaagtagtagtacacattaaattacattgcaaattaatggtactaaaagtggctaataaattaagcatttgatgattatgatatttgggtacaggaaatcgtgtt

SEQ ID NO: 18209 - DNA, 903 bp, Glycine max
  Intron number 1 from transcript Glyma09g37810.1 (locus Gly ma09g37810) derived from phytozome v7.0 (chr-ID Gm09; pos 43316293 to 43317195)
agggatacccattttttctcttctttatttcagtgggtttctattgcttctttctattatgctgcttcatttgtctttccttcttattctccttttgggtgcctagatctccctttgtttcatcatttttttccctctttgttttgtttgaactgtttaaggtgataattttccaatggagacaaaagagaatgtagggagtttttgcattttggcatctctcgacctcctgttgccttttttggattcctctctctctgcgtgtgtgtgtgtgtttcttattctctctgaagttgaggtttcttgctcaaaggtttgtactttgaggttgtcgaattgatgggtcggtgaggctatgactgatgatatgtgctagcatccattccaattttcactatttaataatatttgctctgattaacaatgttatgtgtttgtccgtttcaaatcaattttcaaactttaataatttaagctcctttgtatacagtgctatgctcagaattggggaataaattttacacaatgtttttgaagttgattgtgtctgtgatttctcatgcctgatacttcaagctttttaattgagctttctgcatttgtcgttcctatgttggttaaatttataatggtgtttgtgctttcagcagctatcactagtcactactaagaaaaatatggctactttattctttcattccatattcttcttctgttacttagttcccgggtttttaacttgtttgaaatacatcctgaacttaattgatgatttttttatattcagaacttaattgataattggttacatattaaaagccacaattcatatcgagtgaagcttctatttaattaattctttactctatttgcagagttttcttaactggaagcctttgttta

SEQ ID NO: 18210 - DNA, 992 bp, Glycine max
  Intron number 1 from transcript Glyma09g38610.1 (locus Gly ma09g38610) derived from phytozome v7.0 (chr-ID Gm09; pos 43942864 to 43943855)
ttagcttcactgttaaggccatccaatcagagaaggtacaccacttcctccaatttatgttctaattagtaattactctcttttcttgttatttatctatctaattctaaccaatgtcctttttgagctagtatggatgacccttttcttttcttcttggaatatactagtcatgttaatgtagattagggcaatatattcatctttcacaatttaattttcattgtgaatatgttatcatgtatccgatttacatttacataaatccgagtcctttgctaacactacaattctataatggtattggaatctaggatagagtagtatcaaagaacatcttttggaaaagtttaatctcattgtttaggataaatatttttaaaataagagtttaattttcagaaacaaatagttattcaatatcaatatttttgcattatttgattaattaaaaatcattgaagatataattttaaattaagttattataaaagttaataatcttatgttaatatgccaacttgtaattgaatatagtttaacgagaagtgaaaaaatgggttagttggctcaaaaaaggttgtggactatagtgaggcaaaccaaggaagtccagattcaattcaaacatctaggttaagtaaggtctagtgaaagtttttttttgttgttggagatttggtgtttttgtgggctaagattggatcaaaattgagttaaaataatcctgtttaattcgaattaaacatttaaagtccaagtcttacatttcaggtgaccaaactaacccaaccttttttctattttgctgccccaaatatttaaattaaattttatatagtacataaaatctttgtttggtttaattaaataaatcccaaaatgaatatattcaataagaagtcattaatgtttttcttggttttggttattgcaaaatttaaaatttactggcagccaacctatcaagtgattcagccaatcaacggtga

SEQ ID NO: 18211 - DNA, 611 bp, Glycine max
  Intron number 4 from transcript Glyma12g10510.2 (locus Gly ma12g10510) derived from phytozome v7.0 (chr-ID Gm12; pos 8430773 to 8431383 reverse strand)
ttcctgaaattgacaagaaaaagtaggtttcttctgttctttggaaagtgcaattgtaaacattggcacagtttatttattccgagtattagtgttattgctttttaaatgtcggatagcatttgctttaaattttgtaaagtacatactatacactttttgtttgggtatggattgaagctatatatactttctatattgaagtgttaaatctactacaatggccatttggcttagtggtagtcttatacgtattgtaaactgtaagaggtttggatgattcctgactctcacttgatatcatatcacactctaaaattgaagaaaaaatggctgtgaaaaaatgtgatttaaaacttagaagaatgagtaacctggttggagcattggttgtgcatgagtatcagtttgtttgatgtggtctatgttttgatatgcctatgttaactgtaatattagatggagaacattgacaatcatttgaatgttcaagtggatacatgccatcttctttcatcttctttgtttcctctttatttatggtgtatattattgttcttttttggattaatgtaggtatcttgtacccgctgatttgactgttggtcagt

SEQ ID NO: 18212 - DNA, 651 bp, Glycine max
  Intron number 2 from transcript Glyma12g10510.2 (locus Gly ma12g10510) derived from phytozome v7.0 (chr-ID Gm12; pos 8431518 to 8432168 reverse strand)
gaacacccacttggttcgtttttctctcctttttttaacggtttctctatgctatagtgcatttttaattgggaattacagttgatgcttgtgattcttggataatactcggaggcatttgaattttcatgcatctgctttgtaatttcgcatttggggtttaattgggggtgtgaaatttgtatttttgagtctcattatgtgttcttccaagaaagttaaactttttactcatttagtattttccttttttttttttccttatgtttagcctagcatgaaaaatgacctatgttatatcacttaaatatgcacttttcttgcctttgttagttcagacttcagatttgtgtttttcttttggtttctagtatatgatataatgtgatgatatgttgctttatttcctatgaattgggtttgttgttattagtgaattcgtgcctttttttcctcttcacactcacgggagatctgttttttgtcttggtaaaggaaaaaaaactctatcaactaaacatcattagtgagtgtgtataaacttgcatttgttttgcccgtttggtgatttaggtccaccatatgttttctaatctgtggaaacatttcatgccagagaggaggcaggctgaagcatctcgaataagagag

SEQ ID NO: 18213 - DNA, 702 bp, Glycine max
  Intron number 3 from transcript Glyma06g09320.2 (locus Gly ma06g09320) derived from phytozome v7.0 (chr-ID Gm06; pos 6861373 to 6862074)
gacgacactgttcctcagaaggttctatgtgtttctacttacgctagtgacctgtttgtgtatttagttctccagttcatcaatctcaaacgcttttgctatgtattcttttgcgtttacccgatctattaagtgtctacgacgactttgctattgaatttctgtattatcgatttgttcgatttgcgggggaacttgaagcacttttttatgatttctgatacttaattgattctcagtgatgggaataataaactgagatcttgtttactgtcctaaaaaatagttgttctgttttttctaaaatttgtttgacccttaaatacatttgaaagtgtttgttctctgaacacatttccgatttctaaatgcttgttccctgaacacttgaatatagcacttgaagaaaacagaagagtataagaaaacatctaccagctgttcctattttttttggattttaaaacacttgtttttggaaacaatttacaaaattaatagattttggattaaaaataaaaattaagtgtcgagctgtgtaaatttgtctcacataacagttttgaaaacaaagaagtaagaagataatcaaacatgacctgaatctcagcaattcagcaataacaaggtgcactggcgtttatactttcgtttggcttttcaataggttgttgttcacaaggatagtccaagaggtgtaca

SEQ ID NO: 18214 - DNA, 719 bp, Glycine max
  Intron number 2 from transcript Glyma09g36880.1 (locus Gly ma09g36880) derived from phytozome v7.0 (chr-ID Gm09; pos 42466166 to 42466884)
tgtccagagatctaagccttcaaccccaaaacgtccgtatatcttttattttagctttcacaatgtaattaataatctcatctgatttgaattgacataatgtataagatcgatctcacaaaagttacataaaatcttttcgttttagctagttaaagatgctatcacatttctcaaaccatatagtacttcacttataagctcgataatggatattcctcccgcaaattattattgtgcttgagtgaaatccaagtcatgatatctgtgtcgaaatattctttgataaaaatggaagacacacagctaaatggcagctaagctgcttgaatattcttccagagtggaaagttctattatgttttatccaagagagagagagagagttttatttcatgtatatttttcggaaacaaatgtccctaagaagcatggaaccaaagcagtacgtccactgcatttattccctttacttatttttcactaactgaaatacgtacatcttactatatatacatgttcttatatatgcattgtatattatcatttattctgattacatatttaactgaaacaagctagctagcgtttcttttcttcatcatatattttgaaataaataaataaaaaatgatgacttaattagagtgtaggttgtattgattaagttaattggtgtaacgatattggcaggaggaggaggaaggaactttagagta

SEQ ID NO: 18215 - DNA, 325 bp, Glycine max
  Intron number 1 from transcript Glyma12g31960.1 (locus Gly ma12g31960) derived from phytozome v7.0 (chr-ID Gm12; pos 35516908 to 35517232 reverse strand)
gcctttattttccgcagtttgaactcaaccaggtagatgaccgaatttcataatgaattttattgaaaatgaaaatattttttattagtaaatattagttgttaattgttagtttttttattaacaaaaaaatctttcttctttccttttccttttatcatcaggtcaaccctataaaaaaatattattatatttgttactactgtaattcataatgatgaccatagtggtaattagtacatgcatatataaaccttttttgacttttggtaatgggaattatgttacaggtgatcacaatatttgggattggaagagtgaaacg

SEQ ID NO: 18216 - DNA, 483 bp, Glycine max
  Intron number 2 from transcript Glyma10g32570.1 (locus Gly ma10g32570) derived from phytozome v7.0 (chr-ID Gm10; pos 41027354 to 41027836 reverse strand)
cttcaagaggttatctatcagttcctttcacctatatatatatatatatatatatatatatatatatatatatacacactttacatttttgccccaaatttgagcattttgagtaaaagtactttgattagttaacaaactagcttctgctaaaccaattaattcatctaaatattggttattttgtcttgaaattttcttacacaatccattttggtagaaattttaagaaggaaaagtaacatgggaatgaagaaaaacatgtaatatatggcaagatgactatgttcaataatgggttatgaaattttctcctattattccctcacataaccttgacatgtattgtcaaagagaggtcaagattgagctgctttattcataaactcccctttccccctatttctggtctcttctgtgcttctaatgtttattatatatatgtcagactcatataaggagaaaaagcaaggaagctctgaa

SEQ ID NO: 18217 - DNA, 284 bp, Glycine max
  Intron number 1 from transcript Glyma12g30490.1 (locus Gly ma12g30490) derived from phytozome v7.0 (chr-ID Gm12; pos 34107041 to 34107324)
tcagatctggtaaattagttatccactttttttattccagacaccctccaacgttaaaaatatgcggatattgctcatcatagagttataagattgatttaatggttcaaaataacagatcctagatcgaatttgaattcttctctcgataaataaaactatatatatatatatacttctccccgcggagattcaaatcttagtttgtgagttttcttatgagtttcacaattttgtgttttgttccagactattaatctggctgccatttgcactcccgcgga

SEQ ID NO: 18218 - DNA, 496 bp, Glycine max
  Intron number 1 from transcript Glyma08g36590.1 (locus Gly ma08g36590) derived from phytozome v7.0 (chr-ID Gm08; pos 34678896 to 34679391)
ccggagtcctacgtccaaagggtttgttttgattctcttgctagtttcttctttttcagtctctactctctttctcacaggctggggttttcacaaaattactactatgttatggtctcaattagtagaaaactagagatgaaaagattagaatacaaatgcgacgtgaaatcttaggataagtaaaaattatctgagccttaagattttagatgaaattataatattaagttcacttgtgtaattgtttatgatttatgggtgaaaaatctctcgggtggttactcctagaagaggagattctcttttcttttaatttatttatatatatattttttgcattcatacttaggaagccactaggtcgaagtgcttgatgtataaataatgctctcttaactgtgatctcatgcaactaattctttcaattaagatgcaaacttagtatacatgttttttagggtgaccaggcctctatagtgggtggtgccataga

SEQ ID NO: 18219 - DNA, 919 bp, Glycine max
  Intron number 1 from transcript Glyma12g34880.1 (locus Gly ma12g34880) derived from phytozome v7.0 (chr-ID Gm12; pos 37987727 to 37988645)
ttgcaacaaacctatttgcaaggcagtctgcagaagtaagataaacctttctcttactcttatatatgcttgttgaattaatattatataggcctcaaatacttgttaatgctttttatctttattttatagtaaatccccatgaatgtttgtactttaatgtttaacattagccattaatattaatggaatatgtaatgataaattataaaagtatattatgaattcagttaaaaactaaattctcgttatattatttgatttaaaataacaaaattatgaactcaacactaaattaaagtgaacacctagaagaactgaataagagaaattattggtgtaataatatataagcatcccttctttaaaagaatattattagtattcatttatttttatctctcatttcctatcatatcatatcccttaccattcatatgcctctctttgcctctctttaagtgtaaagtagcaaatgggtgttcatccatttccaaattattatataatcctgaatatgtttatagtttttgttaatatctgcatgacaactaattaaatttaccaactatttttttttaaattgtaaatttggcaacatattatatgaatattagtccaaattatatacataatggtcttaaatatcatcaagcaagtgctttaattggtgtggagttgttttagttaaattaaagttagatcttgaatttaaattttaaatacatatctgtgttaaatacttataagaaaattttaactcacaataattctatccgatttaaacacactaaataataataaccgtggtctagataaaaaaaaaaaaaatgatattgaatcataagattttactcctgggaacacaatcaatacacgcaattcgttttttgcttgttaggtcgcaagccaaactgca

SEQ ID NO: 18220 - DNA, 704 bp, Glycine max
  Intron number 5 from transcript Glyma07g00630.2 (locus Gly ma07g00630) derived from phytozome v7.0 (chr-ID Gm07; pos 324079 to 324782 reverse strand)
ctgcggtgtcattggcacttggaataaaaacagaggtgcaatcagtatttataattgctaaaaaatttaagatgaacctaccacgtcttatttggtttgaataatttctttcatatggagaattgtttaacaggataaaaacagtgagatgcattagcagcaagaaaagaacacacgcgaattatgaatgctcttataatgcattaaaaagttatttcttcaaaatatactattgtcagatgtcatgtagaagctggatatatcagctcatcctgtcagtaacaacataaatgtgatgttttaatcaaaaaataaaaatgtaatgctagttttttctggaaattatgtttcagaattattgctggcctgcatcattaatttcaaattattgttgcttgagcatggcatacatgataaaataaaatgaattcatcacatcctatttacagtcaatattcactccatcatgatgtcttttgcttttttctgacattactaaattttagcagtttactttgtgcattttattttgtgacccctctgttctatttatatacctgtttctacatgacgcttggttttgaatcttctgattattcttgtcagttaaataaatttgtttggtattttctattgagttgacaaagtcattctcaaaggtttatcctttcctttatttgtaattgatagggtttggctgaagg

SEQ ID NO: 18221 - DNA, 779 bp, Glycine max
  Intron number 2 from transcript Glyma07g00630.2 (locus Gly ma07g00630) derived from phytozome v7.0 (chr-ID Gm07; pos 325224 to 326002 reverse strand)
actgcttttcagattggccggtgaacgcgagctaggtacacttattaatttttcttcttctcatcttttaatgattctgatgattgtcatctttgcttaccatgagcttaggaaataacaattttattaagcattatcctactactagtttaacacataattaacaaatcacatatttgtggcaatggtgagtttgtagtgtaaatatagatgttaagagaaattaaccggagtggtcaactattggcacaaaatctaaaaaaaaagaaacagtttggcattgatgctgttggttttaaggtactgtatcacaaaaggatctagtagcagactattgataatggtccggaaaagaattaaattatttgattttctgtaacttcattaaaatgttctgatgtgtttgataaccttaggtggatatgcaatttagaaattttaactggcgaaagtcatactctcctttagagctgttgcaatgtgaatcgcttttcagtttctagtcctatttggatttcattatatattgtttataaatcaatctgtattctgtagcatgaatcttggcagtagccttcaattaattaatcggcttttggaatgtacaagctttgtttttttgttaactgtaataataccaattgcacataactgcatgtggtcaatggttattacttttttaattgcaatctgcattttgagttacttattatggtctttcaatttatattttgaatcatccagtgataagtacagcagtgtcacccccaactccagtt

SEQ ID NO: 18222 - DNA, 378 bp, Glycine max
  Intron number 2 from transcript Glyma11g05380.1 (locus Gly ma11g05380) derived from phytozome v7.0 (chr-ID Gm11; pos 3766381 to 3766758 reverse strand)
ccggcgacgattacgttacattgattccttttcaggtgcgcatttagcttcttctgtgcttcgcgattttccgctgaaacgttcttctgctagttacttgctaagatgatcgcggtattttgtgattcctgtttgaaatagtgcaatgtggtgtgaattagtttattaaggtgaatttacgttaacattttgattttatgaacgttcatgagaaggatcgcaaatctcaaattaataatatcattgctgctcgaatattataatgttaggcatacgaatctgttggaggtttgacttgagctttgactttcaaataaatgtgtctttaatctgtgctccttaggttttgagttggtatcctcgcgctctgtattttcc

SEQ ID NO: 18223 - DNA, 838 bp, Glycine max
  Intron number 2 from transcript Glyma07g01570.1 (locus Gly ma07g01570) derived from phytozome v7.0 (chr-ID Gm07; pos 1016875 to 1017712)
aaaaacagttgcaggttttacttactttttatattgccttctttatttccatttcctttctataatgacgttatgattttgctttattcatagtcacggcctaattgcaagggaatttgaaatagtatgcttaaggccacaagttttaattttgggtcagaaattaaagagtctatctagtttgacttgtggcccataagatatttgatattttttatttatttttttactaggcttattatatatgttactgtttatttaatattttctccaaagaaagatagaaataagaacgaaaaattgcatatcactttaagttggattggattggatcaaatttaaattttaaaccaaattgatcaaatgatgaataaaaaagaaattgaaataatttgatcaaatgacttttcccttcaaaatagatccaatctaatatgcaaaaacacatagttggtgcctttattagtctaccatacaaaggacactcatccatgtatgctacttttctatggattattttttatcttgtttggtctgagacagggatctgaactgcctttgcttcgtgagttggactggaattatagattcctattagactgttgaattggtccgatcttgacaatttggaaccagtttggataactggtgtgatatctgcaaagctactccagtgcttaagtcactaagggtcctccgtaagaaatataaaaataaatgcatatacatgttacagtgacatatgttgtcttcatcctctctcatggatcccttacaaattcattatcttgttgtctaaatagggaactgttgttcttgtttttcaaccagcagagga

SEQ ID NO: 18224 - DNA, 904 bp, Glycine max
  Intron number 1 from transcript Glyma05g32950.1 (locus Gly ma05g32950) derived from phytozome v7.0 (chr-ID Gm05; pos 37724304 to 37725207 reverse strand)
catctcgctgatttcattccaaatcttgtgtggaggtaaggtaaactataattaatgtcaagaaattttattttctatagtaaaatgtgtaacactgtaacctgtaaaaaatcaataagaaataatagcagacatttttaagatgacagtataaacatttttatttagtatatgtgctatttacttgtatattaagaatttaatttctatacactatcatgtatatacaccaattgactaatcagaaatcatggcagacatgagaatgaaaagtgacagtaagagattggacaaaccttaaatagagtattataagatgtttttcctctagtcaataatggcgtttcatcgcagtaatagatgcctttttctggacaaccttagtacacttttatattataaataaaatatatcatttactattgatttctgatttctgaacataaaaaaaatggttaaaaaagatacggtaataaaagttaattactataattaaaaagaagacttagagacagactagattcgtctctaacatattagaattttaaaattcaggacattgatatacagagactgattagagacgccaaaggatagaggcggataattctgtctctaattttggtctctaatgttacaaaatttttcatctctgcctgattcattttgactgtttcagagttggtctctaaattccgtcggcatatcaaacttttctggtagtgactaaaattagctgtaattatcgagatgaaatgtcaattttatttttgaaaacaatacaaatgatatttatagtattttttcatgtagtttttgtatgagcccatgattatgagcattgtttgtttgtctttctttttttgtagtgggaaaattccttgcccatatcctggacggatat

SEQ ID NO: 18225 - DNA, 834 bp, Glycine max
  Intron number 1 from transcript Glyma09g38910.1 (locus Gly ma09g38910) derived from phytozome v7.0 (chr-ID Gm09; pos 44145058 to 44145891 reverse strand)
caaacaactcctcgttccaagtatactatatatcttttaataactttatgttaatttgtttcctttccttctatatatattgatctaactttgattttaatgcagaaaaaattaatgcttaaagccaaaccaatacttcaagaaactataacaagactgtatcgatattcttctccaactgcatgaaagtggcagatttaggttgctctgtagtaccaaatacacttcttgtgacatcaaatattattgatattgttgataccgcatgcactcgcttgaatcgtgaaccacccacgttccaattttatctcaatgatttatttggaaacgatttcaataccatcttcaagtcacttcctgatttctataaaagaatggaagaagataaggggcatgaatttggttcatgctttattaatgctaccctgggatcctttcatgggaggctctttccactaattccataaacttttttcattctgccaacactggctctctcaggttaaataaaatgattttttttttccttttccccctctaagctgattgagatgttacagtcaacaaaattgtgtgattcgttaattttcaaatttatttcactttattttttcttgttgggaattttaaaatttaaaaagatgttgaaaagcaaagcaaaacgatatttttataatgaatattaaaaatccattttaaaaatgaaaataacaaacaaatcgaattgaacaccttgatgtttgagtttatttatcatattctggttatatgatccgttgttatttgggttttgactaaggagacaaaatcacttaacaagggaaactgtcacat

SEQ ID NO: 18226 - DNA, 913 bp, Glycine max
  Intron number 2 from transcript Glyma06g47490.1 (locus Gly ma06g47490) derived from phytozome v7.0 (chr-ID Gm06; pos 49929980 to 49930892 reverse strand)
ggacaggttggaacataacaaggatttttcaatatcaatatttcaacttaattttgttttttatttaatggaacctgtaaattgtgtgtgtgtgtgcgtgtgaacttgtctctccatattgtgatttttaagtatttggtaattgattttgataaaggcccattttggataactcaataagtacttataggagtaaaaaaaataagattatgaaatgaattaaactactgtaagttaaaatcaatttatatccttaaactttttacataatctctcttatctaactttcttaaagctgaggtgcataagttgatttaacttatgggtgacgtttggttcattgccttttattttcttctcttataagtgcttattaagaagattatcgaaactgaagctgacaactctgtgtgtgcaggggggggggggggtgggggtaatgttattggaatttggaaacaatgtatctctccattttgtgattttgaagtatttgattgatgattttgactaagagcttcttctattattactgagtgcttattggggatgatactaacactaggttcacaaaatattatttactcgactttacggccagaagcttgctatatgattcatatgctttactattacaggcaacttgtatattatactttgcaacttagcaaaatttctgctctagtgtgacttgttttgttgtggtttatgaacaacttatttggaagataggcattggcaataaagcttggtaggaagaggagagttgtgaaaatttctctttattttacccctataagaatgaatcagacagacttttgatgttgtttttgttctttctatacatagttcttaccttatggatgccttttggatatcctactctaaacagttggtccgggtggaagtccag

SEQ ID NO: 18227 - DNA, 575 bp, Glycine max
  Intron number 1 from transcript Glyma05g33000.1 (locus Gly ma05g33000) derived from phytozome v7.0 (chr-ID Gm05; pos 37776844 to 37777418 reverse strand)
tagaaggtgcggtaaactttgttgttattctttcctctccagaagcatatgttgtttgaatttaatttttgattccctgtgttaccgttttaaagacttttaagctatcaatgaaccgtataatcatacatgtttgaaaaattgtttaaagttctcagtacaaatgaaaaacctcagttactgtaatgatctgaccctatattgtttatttttagtgtcaaaagtcagttaaaaagtttttatactgacaggatcaaattttaatcattgttttccacttgagtaccggtattttgataaatttgacatcaagggtcactcttgtgtagcttcattctcattagttcttctttttactagttagattactactatgtttgtttcctaagaccatttttagccatgttattctttggttcatgcatgacttcaatccctacgtgataattttttattatctattgacactcttaataaaataattcttaatattttgtcttaaaaaaaacactcttaattaaataattctgaactaattaactattttggctaatatccaggtgaagctctgcttg

SEQ ID NO: 18228 - DNA, 757 bp, Glycine max
  Intron number 3 from transcript Glyma08g23910.1 (locus Gly ma08g23910) derived from phytozome v7.0 (chr-ID Gm08; pos 18205229 to 18205985 reverse strand)
ttactgacatcaggtttcatatcgtcttcagatacttagtgatatatgcatccatcaatatctttatttttccatctagccatacttaatatactaaatcaacttttagtcaaatatgataatattcttgtaacattatctttttaaatatttttgctcattgttaaagtatatattttgactcctttaaaacaaaatgtatactttagattagagaacaaaatacacttataatcattaactaaaatcaacttcaataaaaaagtaagaaaatcaacaattgaaattgtgataaaagtaaaaaaaatatatagtaaattttaaagttaattacaatctcagtcattgattttctaattaatatttggaggagtcaaaactttgttattacatgttaatattgtagcacgataaataaatgtagtctgggtgaatccatttcttaataattgaattttttataattggtgaaaataaagttttgaaaacttcaaatctttatttatgattaagcacgaatacaagatactttatcaatacttaaaaatgattctaagtttaaaaagttcataaacagcatataaatttcggacactttcatatctatgtattgttattttcatttggccgtggtctagtttaacatcatatcataattacattgttttggaaattattagttgtattatttgcaagctaattatcacaattctcatgtccagtgaagtgcgaattgaaggattagagacactagatt

SEQ ID NO: 18229 - DNA, 680 bp, Glycine max
  Intron number 2 from transcript Glyma10g33990.1 (locus Gly ma10g33990) derived from phytozome v7.0 (chr-ID Gm10; pos 42181106 to 42181785 reverse strand)
cctcaggtcagtgattcttctttgttgcaatctatctctataaattcaaataataaaaaattcaaggttaattaccagttggtccttgaactattttagaaattttaaatagtccctaaactacttttttagtcgagtctctagttttcaaaactgccataaatgatactttttttgcggtttcagtgacaaaaattcaaaaaactaacggcaggaccttttttttttaaaagtttagggactcaatgattttttttttagttcaggtaactatttgaaaattctcaaatagttcagggaccaattagttaatttaacctgaactcaactttcaaaaattatcatcttcttcacgaaatgaatatattttttttcttccaaaaaagtgttaaacaattgaataatgttgcacaagtgtgaggattttgaaaaaaattatggtaactaaataaatagctccgttggaagtgttggtgcactttcacatgggccatggccatggggtatcattggtattggttcttttcaaaatttgtgatattttataaacaataaaaaaggaaacctgatgagtttgcacttttacttttcattcagtgttttgttttgctgaaagagatgatgtactgtaagtttgtaacataatcatgttaaatgtggcatcttttagggtggtattg

SEQ ID NO: 18230 - DNA, 984 bp, Glycine max
  Intron number 1 from transcript Glyma13g37350.1 (locus Gly ma13g37350) derived from phytozome v7.0 (chr-ID Gm13; pos 38466565 to 38467548)
taccactcctcctcttccccaattctcttatccgtgtaagtatctcatacccttctcccccccccccccccccccccccccctctctctctgctactgtcatggggtgctttcaattgggttgtgttttttttttcctttggctctttggttcatctgggtattcaaatcttcaataaaaacatgtttcccccccccctaattatcagggaaagctttgtcttttactcgatcgtctgcctattattttcaatcacggtttgtttgttgcatcttttttaatggcgtttgcagaggtttatgttgaaaactgaaacctagtattctctttttctgaccctttatattcaaaatcatggagttttagacccttctttttctttctgccatcaacgtttgttattgttcacttttttgtgcctattaaggtattttttttggctggtcaccgttgcttttttacccttctcatgattttatttttctcaattcaacaagtttgatttgatgcttaaattgtttcagtggattgcaccctggtctttgtttttcagtatagggtccattgttcgttgattattcaataatgattattggagagagatttaatcgccattggaatttctgaaaatttccactggaacgatttagccaatggttttatattagaatttgctgaagaggttctgggaattgaagatgtcaaaacaaaattcacactgattgtctagcggtgttgtatagagctttataataaagcatgaatgtcttgttctgaatgcaattttgtttttatttacacagtttctaggatttttttcccttattaaattgtttactgatttagttattttaaaactttttagatcttattgtgttgatgaaacttctttatggaggagggattatctattagcagacacttacaattctcacactttgtttttcagaatctggcactcttcagagaagactttgtaagata

SEQ ID NO: 18231 - DNA, 813 bp, Glycine max
  Intron number 2 from transcript Glyma08g18450.1 (locus Gly ma08g18450) derived from phytozome v7.0 (chr-ID Gm08; pos 13844648 to 13845460)
aaaatcttcttctcataccttctggtgcagtacaggttgctttcgaatcttttttttttcttttgctgattttttttaattcaattttctgtttatttatttttatttatctgcaatctatattcactgtttagcaatatttgctgaaaattctgaaaatacaacctttgttgtttggattggtttattaagatagcttgctttggaacagggataaattctttctttctgttcctgttttgagagttcctgtttttttcaggtttaaattaatgtttaatttggactgctttgcttaattggataattgctagtacttgctatttgtgcattgtgtgttttattatcctgaaagtagttgttttttatttttaaactcctaggtaacttggcgtgttttatgtagtgtccctttgtcacttttggttttggtaggatcaggatagaaaaaggatgtgtttgttgtgctttgtttgtcccgtttgatgtatttggatttggccggggaataaatattcagctatagattttaagtcgaagttcttcacttatttgggacagaataatgaacttggctttcatggtattcagttcatggttatttttaggggttttcttagactgatatgctgcaggattggatgcattttttgcattcaaatctttctcattttatgtttttcctctgtctcatgtttgctccttccctacttccgaagggataccttattttccacatttctatgcttattttttcctttgttaaaataatttattttctgtgtatataataaaaactttgtggcaggatca

SEQ ID NO: 18232 - DNA, 342 bp, Glycine max
  Intron number 1 from transcript Glyma09g02250.1 (locus Gly ma09g02250) derived from phytozome v7.0 (chr-ID Gm09; pos 1498905 to 1499246)
ttgtgcctttcggtctgagaagacccaaaatcacggttggtaactctattcatcaatattatttactcaattctcttctattgcgtatctaagtcttcaatttaaggttctctttttctattctattctgtgtatttcatatttcaccattgcttatttcaaggctttcacagattgaaaatccaaaggtaaataatagaacaagatgttaggttttgaatttacagccatactttggtatcgagattaagttaaaatgaaaaaccctatcatttattgcagttaatttatgtttttcttttggtagatcaggaggtgcaattaattgggtggggaaagggg

SEQ ID NO: 18233 - DNA, 628 bp, Glycine max
  Intron number 2 from transcript Glyma06g46270.2 (locus Gly ma06g46270) derived from phytozome v7.0 (chr-ID Gm06; pos 48929162 to 48929789)
gaacacccacttggttcgtttttttctctttatttttgttttaaccatttctgcatgctatagtgaatttttaattaggaattaaagttgatgcttgtaattctcggataatactcgagggcatttgaattttcatgtttgtggtttaattggggctgtgaaatttttatttttgagtctcattatgtgtcctctctggaaaattgaacttttttttttactgaattagtaattttgtattttccgcttttttttttcttttttcttttatttagcatagcgtgaaaaatggcctatgctatattacttaaatatgcactttccttgcatttgttaattcaggcttcggatgtgtgttttacttttggtttccacatgatatgatgtgatgatatgttactttacttcatatgaattgggctggttgttattagtgagccatgcctttttaatttcatctttaaactcatggcgatctgttatttttgtcttggtgaagaaaaaactctatgaactaaacatcattagtgatgtaaaaacttgcatttgttatgctcctttgttttctaatctgtgcaaacatttcatgccagagaggaggcaggctgaagcatctcggataagggag

SEQ ID NO: 18234 - DNA, 982 bp, Glycine max
  Intron number 2 from transcript Glyma13g26150.3 (locus Gly ma13g26150) derived from phytozome v7.0 (chr-ID Gm13; pos 29342410 to 29343391)
gcccttgaaaattctggttcgtctttcgttctttgtcccaattcgcgattttttgtttttggaattttaattcaattcgtttttattttattttgatcgatgccatttttttgggtttaattttcggtttttgattttatggtgtgtgtgtgtagtggtgtttgattgtggaaatttttgttgtggaaagtactgtgtcattgtgtgtttgcttcgtggtggttgcaattgtggtttgatcggtgctttggtgcggttgggagtaatgtgtgtgagaaatgggtttggattgagcggtttatacttgtttttgggcctgagtttgcttgttaaactgcatggagaggtggattttgcggatacatgactgagttgttgagatttgggatgtttggtgtgtaggagagaggatgtgaagtgggtggcgtgtatgagtgtgtgtgtggggtttgagtttgatggattcggtggagctgacatgtgaagagtttagactctagtgttaaaggcgtgtatgccagagtgaataccggcatggggaggtagaattttggaacttagttcattaaataaaattataaatcttgtttgattaaggcaatgcctgtgcttggatagtaacttatttgagtatacttagtcggcagtcccctgtattggttaatgtgcattaatttacgttacctgtggatagcagagtatgagcaagacttattttgtcgtgagggatcttttgattcatgattttgcattttaagtatgggaaaacttaatgatttgtcagttatcatctcatacgaaatggatacatagatgtctattatctattccttttgggaaagctgaatatcttagtgttctctttgtgcaattagtatttttagtctctgaactagtagatgtaagattttttctagattttccagatcatgcttgggcccattgtgatccttttttctttctttctttttatgcagaaaat

SEQ ID NO: 18235 - DNA, 529 bp, Glycine max
  Intron number 1 from transcript Glyma10g20470.1 (locus Gly ma10g20470) derived from phytozome v7.0 (chr-ID Gm10; pos 25949935 to 25950463)
aactacaaagagaaacactgctcaatgtaagggctgctgttttgatcttattatgtgttctttatagctgaagttgcttctaccttgatgttgttctcattggcagtgcaatcatgttttacatatgttcaaattgaatattacagtagttctatatgtatattaatttaattttctgacttaattcatctaatgaaaaattgaaaatagatttatgttttaattattcaagacttttttccttaacgcttgattgttttaggaatcagatttcaaattgtcacaagatgaggcaagaaatggtgagaaatcttctgaaaagaaaaaacaacaaaagaaacaggtagatgaggtagaaaaggatcaatggcgtagagagaaagcagaagctgaattaaaaaagaagcgtagttttcaaaagcaagcctcaattatggagcgttttctgaaaagaagtaaaattattccctcatctccatcatctgagaaggactcagttcatgcccaatgaatgcagatagttctcctg

SEQ ID NO: 18236 - DNA, 575 bp, Glycine max
  Intron number 2 from transcript Glyma06g43620.2 (locus Gly ma06g43620) derived from phytozome v7.0 (chr-ID Gm06; pos 46630229 to 46630803 reverse strand)
ctttggtctcattaccatctttcttgttgctattggtgtgcatatctacactggctagccttatcgccctcactcctttaaatctttaattattctattctttttggttaaagttttagtaatttttatcttgttattcttttttgatttggtcactgtattctcccatttctcatgtcctcgtcgaataataactctacttctctttagtctttgagattccaagattaggacaactttggtttgtatagaatcatagaatggaataacttgcacgtactgcacacactgatatcacatcatatggcttaatgttttatgctttgatgaattcattttcttttcatacttgaacctttcccattagtgtggttgaaaacgaataagaaaaatgaactaagtttggtgttatttaattatatcaatggtgatttgattaactataattggactctcgcactgaacccttaaaatcccttttgttcaatgcctataattgttttaaattaattatctgatacgaatgccacatcagtttttctcactcttttttttttcctttcatcttaggctaa

SEQ ID NO: 18237 - DNA, 705 bp, Glycine max
  Intron number 2 from transcript Glyma12g04980.1 (locus Gly ma12g04980) derived from phytozome v7.0 (chr-ID Gm12; pos 3311098 to 3311802 reverse strand)
tggcttgcgcttttcccagaaggcactgatttcacgtaagtcacttgataccttttctgtttactaccattaaggtattcatcaaaacatcaaatcataaatctttgcttatgatcatcatgatgctggaagcaaaacttaagtttcttctatttggaatcatacaattttctctcgaatatgtttttggtccctgtaatatgctgctttttttcggttttggtccttataattttttttttcaaaatggtccttgtaattttttttgcctgttattttgttttagtcctttgtaatatatttattttagccctatcatataattttcaaaagagctaattcaaaatgaacaaaacattgtagggactaaaatgaaaaaaatagacatattaaaaggactaaaacaaaataacaaggaccaaaaactaaaaaaagaattttataacgaccattttgaaaaaaataataattataaggacaaaaaaattctattacaagaatcaaatgcatatttaagccaaaactattagtaggaaaaatattttgtcaccacccttcagatccttgaaaccgaatgatcttcatccccagtttgagttgatgtagcatatgtatctctgtttgtatgtgtattctgttaaaaatttcttgccgcctatctttttctttcttgcagtgagcaaaagtgccttcggagtcaaaaat

SEQ ID NO: 18238 - DNA, 786 bp, Glycine max
  Intron number 1 from transcript Glyma12g09530.1 (locus Gly ma12g09530) derived from phytozome v7.0 (chr-ID Gm12; pos 7322851 to 7323636 reverse strand)
atttcgacatcgttgttgtgctctttcaccctaaggtacgctcctttctctctccccttgaaattttgcacgaagacaagttaggaattttattaatgtgtaaatattattgttatttttttatttgggatttctgtgaaatttgatgtgttgtggttaaggttgcattagtgatttagctggtagcagtgtgtatgtaccctatcttagtacgtatctgtaaatttgtggcaggaaggtgcacagattggtacgttttgtttggaaactgctattatttttctgagattggacacttcatgattctcctttttgttctgccttctcgttcctttgatgcctaattgtttgttcatcaccttgcatcatttgagtagaaaatttttcatatttacattttttgttgttcctgtaaaatcttgatttcctttgccccaagtttggctttgtgtaatataagagcttgtgctcgccaacatgccgtttgatttcgggttcctttcgccgcctttgttaatctcttttgttattgattttttgacttgcctctctgtcaatgctgttaattatgttatcatcgtccctttaataaaagtctatcgcattgcggtcgtataagcctctcattgcacggcttccactgagattcattcgctgcaaccccttgtttggcctttctttttgtttcctcctttcgatatgtgtatacttcttcccaggaattcttctggcctctgtgccttcttcacagttgcctcacgagcttgtttcgttagtttcataaga

SEQ ID NO: 18239 - DNA, 883 bp, Glycine max
  Intron number 2 from transcript Glyma10g03240.2 (locus Gly ma10g03240) derived from phytozome v7.0 (chr-ID Gm10; pos 2347952 to 2348834)
cttgacaaaattgaggtatacactcttttaatctgctaccttgtgctgccacattctagataagaaaaaaaaaatgcatgtccagtggacttggtttatttgttgcactcaatttggtctagttgggcttatttgctcagaaatttatctctttttgtatcacttatgtgctgatttaatcatttgattttttaattgaataaattcacttgcaaatcatatgagttcttttgcaaatcatataaattcatttgatttatgattcccgtttgtctgtcatggtcacatttccttgcatgaagcctatatgttattatcagcttttgcttcttctttttttcatttgatttggattacaacaacaacaacaacaacgccttatcccactaggtggggtcggctacatggatcaacttccgtcataatgttctatcaagtaccatacttctatccaaaccattaatttcgagatccttttttataacctctcttatagtctttttgggtcttcctctgcctcgaattgtttgtcttctctccatctggtctactctcctcactacagagtctaccggtcttcatttgatttggattagttgagtcttttttatttacaccatgtctgattaccacattgttgtttggtaataaactaatccaacttccataggaaactgccccatcaaattgatatcttggctctactattgatttggtttgactgccatagctcacacaatctcatctagttacataatgataaaagctcagatatcattgtaatcaccaattaactaagtgatcaaatgtattttgttttattttgtagagttatatgtcctgtagatgacctgtttcataatgtgtttctaggtggaatact

SEQ ID NO: 18240 - DNA, 1039 bp, Glycine max
  Intron number 2 from transcript Glyma07g15470.2 (locus Gly ma07g15470) derived from phytozome v7.0 (chr-ID Gm07; pos 15280759 to 15281797 reverse strand)
ggaagaggtaaattcaaattcaattttttttttcttctactttcatactattgctgtgattaactttagaatttcataacattttagtaggataatgcttggtacagattacctagactagttagtagtcagttactttacctcaaatgaagaaacacaatccgaattctgactgtttgtttagcattggcaaaaagaattcacctgactacacgtaaaattgaattattgaacgtgaggactgtgcatttggagaaaaaagtgtcaagaaactgtttggataaacttatcttaaaaataagaaagcaaaataaattaagttaaaattaacttatgcactggcttttacagaagctcctctcatccaaaaccatgagtttattttaacttatggaaaaagctcaattatattttaccttattttcttcttctataagtacttattttagaaacaaggggataactgttgattgaaaaatcgttaagattgtaacaaaatacatctacatgattaaataaacattgttaaaactgccttaatattctaatcagtggttttactatgcgttatctcttctaaagtgtaccaacgcacttgagagaagccaagtaagaagtttttaagctacttcataattttaatctagtccagttagatcattctacgaatttttgtaactagtctctatttcatcaaacagaaacatatggtattggtaatgaaaatggatcaaacatatagcggaatataatttacaaattacaaatatgaagccttaattctgtgagacaaaagaggacaagggcttatagcttcttgattttgggaatgcaaatatatttaggggaatacaatctgtttcaatgatgaatcattagttggcaacagtagtttcaaccttggagagatgcctttacttaaaatacaaatatgaagtgataataggttagattagtgcttcgatttaattgatgatgctttacctatgtctcaaatgtttcagccatttattgacttaaaaactccagaggaatcaaa

SEQ ID NO: 18241 - DNA, 271 bp, Glycine max
  Intron number 1 from transcript Glyma07g15470.2 (locus Gly ma07g15470) derived from phytozome v7.0 (chr-ID Gm07; pos 15281869 to 15282139 reverse strand)
ttctgatcctccgttaccgtttgatcctagtcggagtgagtatccctctcatcgttacgttacatcttcttacgatttctgtttttctttattcaattttctcgcgctttgaatttttgagtttagggcttcaaggagtgcattgcattgattgattttgtgattataggttgtgagttgattttatgattatggattgtgagttgataattctaattttcaattttttgttgaagtgattggtatcatcaagaggaaggccttgatcaaa

SEQ ID NO: 18242 - DNA, 585 bp, Glycine max
  Intron number 1 from transcript Glyma07g07650.1 (locus Gly ma07g07650) derived from phytozome v7.0 (chr-ID Gm07; pos 6332319 to 6332903 reverse strand)
atccccttgagtaagtttgcaaaatgtgtgtgcatatgcaattttgtttgtggattgagattatagtttggtaacttaaactgtttctattttctctttcttttttgaaattttacacaagctaaacctgcttaaattaaagtcagtggctgattccttgtagacataatcaatcaaaagttaaagataattttatagtaacagtagaaattttattaatttttaacaaatcttaggcttttaaattataattgattgtgccaatgaacattattcttctcatatgagaattgctcgtttggtgcggatatattgccttgatgaccattattttagaaattactaggtgacttgaactaaaactcaaagtggcctgaatttatgatgttttctgggtctgcttttgtcaaatcctacatttcatgtatggtttattgtttctagcagttaatttcaaggactgaatttagctgtaaaaatactttgttgtcctgtgtcaattttcattttcttatgatgatctttaacttgttcatttggatattattagtgggtgccaaatttcctgctagtgcgctgagagag

SEQ ID NO: 18243 - DNA, 811 bp, Glycine max
  Intron number 4 from transcript Glyma08g02140.1 (locus Gly ma08g02140) derived from phytozome v7.0 (chr-ID Gm08; pos 1463251 to 1464061)
cgcaatattccttgaaggatctggaaggaattcttgtaagttctaacctgggatataccattcactaaacatcttaagaacctcaatatttttcttattagtctattattttgaaaatatggtgatgctgacttgccttgtggtcactatgtgatgtagtgatttagggtttctttatctagtggctattacagttgaaaaatgaaatggcttttatttacaattgcaataaggtgcatggcacaactccatttgctaaaattgaatgaataactatgtcaataattgttggaaatggaattgggttctgatattggctgtcggattattggacttaccaaaccatgttaatttgtgcattctacctttttgttattttagttactggattctgtcaataaatttgcttctgcatttgattcaatgaaccaagaacaactagtactgttaaagattgtttctggcttgtaacattctctgatatcacagaggaagcccaactttagttccattaaacttaatttagacagagactgatcgtagattgcaatcttctcaaatttcattacatgaatggatgctttaagatcagatgccccttgcacttctttttttctttctttttgaaaaggcttgttactttaatattaactaaaatttaagtattaagctaatggtgttagcatttttgataataaagcttcttaaatgtgtatttcagttttatttgatacaaggttgtcattggttgtttacttctatgattttggtgataggttaaaaagggtgacgtatctgggagtactgataa

SEQ ID NO: 18244 - DNA, 544 bp, Glycine max
  Intron number 2 from transcript Glyma10g38050.1 (locus Gly ma10g38050) derived from phytozome v7.0 (chr-ID Gm10; pos 45929686 to 45930229 reverse strand)
aaacaccaagtatgttcttttctaaatcatctgcaattagaggatgactattagttctccataaagtgaaataagatccggggttcaaacaccttttcagttcattatgactaaatttgattttagtccgttattttagtcttcataattttttttaaaaatattttctattatcattcaataatatcgtgacatatgtgactattttttagataacatatgatgtaacaagtttgaatgcatgtcacgatatcaatgtgattttcataaagcttgaaatctacaaaatcaattggaggagtgaaatcaaatttaatcaggcattaaaaacataaccttagaatttgacatttactcgtagtagcctagtagatacttttctattttttcttcaaaacagaaggaaatcagaaactttttattttattttattttttaaaattgaagccgtttaataacgggaatttaaaagtaaaagtaaaagtaaaaatctgatttaagttgtactatatgcttgaatgttctgcagttcaagaaagtgaag

SEQ ID NO: 18245 - DNA, 173 bp, Glycine max
  Intron number 1 from transcript Glyma10g38050.1 (locus Gly ma10g38050) derived from phytozome v7.0 (chr-ID Gm10; pos 45930440 to 45930612 reverse strand)
tgaacattacccccacattgttgtctcagagcaaggtatatatgaatcacatttggaagcaagttgtattatatttgaatttgaagacatcttcattaatgttcccatggttttttttataataattttctttgtttcttcttctacatctaattttttggatgtagtgacac

SEQ ID NO: 18246 - DNA, 955 bp, Glycine max
  Intron number 2 from transcript Glyma06g42260.1 (locus Gly ma06g42260) derived from phytozome v7.0 (chr-ID Gm06; pos 45449456 to 45450410)
tgttattggtactgggagtctacaccaaagtccaggttttctttatttctctcctactgctttgatttaaagaatttcatgatttctcatgttaatgcgatgataataataataataatgtaatgtttagacatgctttttggtatttaaaaatatcatatttcctgttccagaatattaatcgtcttaaattattttatctagacaaaaaagataataaagaataataattttataaaattaactttatattattattttatttataggttttgctttcaatcactaatattattgcataagatatttaagtaaaaatataattaatgttatattaaaaattaaaagaataattattttgagataatttttttattatgacatttataataagactgaaaaaataacttttttttttctaattttacgtatatttttttttatttccaatccctatagttaacgcatataatgatgtgattttaatctctcgttacataactagacattatgttcatctattgctattggttggttcttgaaaggcaaacttctatggttttggtcttgaaagtgtgtatatcaacacaatttgtcgtctctgaaaatgtcaacggctaagaattttctacgagcaatgattcttgaacacctcacttttctataattcatacttagaatttctttgtatgttttatacatgtacttttctctcttttatctttgtctcacatggtctcaaatttgggtatccaaaaatcaattttgattttatcctatcaaattgtcaacttttaaacaatttcatccgatataaaggattaatctgcatagataaatagcttccagggacaaattgttacattcaaactattcagtatggccaaattatatattaattctagcttgtttgttttcactcaagggcaagtgttattatgcatatgcagatttt

SEQ ID NO: 18247 - DNA, 546 bp, Glycine max
  Intron number 1 from transcript Glyma12g35510.1 (locus Gly ma12g35510) derived from phytozome v7.0 (chr-ID Gm12; pos 38626606 to 38627151)
ctacaccttgctggcagatatagctggccaagcatgtatgtgtgcatgcttttgttcttattggtaggcagtagttaatatttgtgtttaactaactacttttttatggacatgaccaggttattgaaactaaaattcataagtcttatgtcatgatcattggaaattcttgtgtgttacttatttgagctctgtttggttttgttacaatctctgagaatagaattttactggcaaggatcgaagaaaatttctactttagcaagtttgtggatattgttcatatgatcaagagacaaaaaaataataaaagaatacatctgaggaatttccacaagattatttgttttttcttgtcagttatcattgtaacataaaataaaatcataaatgacatggtctaaagaactagttattgttctctgaatgtcttttatttactgtcctaagttagacacttagacatgggcaatgagctgtttgtctctttgttgttcaatcttatttccagatttgacagggagctcaacaaactagtcgccatca

SEQ ID NO: 18248 - DNA, 704 bp, Glycine max
  Intron number 2 from transcript Glyma12g35510.1 (locus Gly ma12g35510) derived from phytozome v7.0 (chr-ID Gm12; pos 38627139 to 38627842)
ctagtcgccatcaaagtaattgacttggaagaatcgtaagtttgttgtcccccttctattattttcaagaatgcttggacatattaggggtgctaaccaattttatagcaataagaatcctaaaatatgttgaaaagcatatttcattacattataaaagattgcctgtctattagaattttgggacataacactggaaaaatatcagtttctcctttttctttcaatccttgataagctctttttactaagggagggtgaagtctgaagtcaggtcaaccattccagttcacttaattccattgaagattttggtagaaataatactaatagaggagtatttggtagatgagttttctctcctgtgatatttctggcattactaattgaatatgaataggacccaggacaaaagaaagaaaggtgtggagacaaagcaggtggtttgagttaggtggttaagagtagttagttacataattggtcaagtgattaggttaaatgtacggacaagagtggaagaagatttcattctcaatagttagtattaagaaaactgagcatcagctcaattgtagaataggaaacccctggacggagtattaacatcatatttttgctgtgttgtgctctgaatctatatgcatttcttccttaatacttcctaatttatctttcctttcttttgtcacttcacagagagg

SEQ ID NO: 18249 - DNA, 700 bp, Glycine max
  Intron number 1 from transcript Glyma13g17510.1 (locus Gly ma13g17510) derived from phytozome v7.0 (chr-ID Gm13; pos 21288160 to 21288859)
gttccttatacaactgggccttatcagcgtgtgccgtatagtccccatcaatcttcgcaaatgaatcagataacagatgatcaagaaaatttaaattctgggaggagtacaaatccctcagaggctgtagggaatgtgccttctaaccaatttggccattgcttcagcaggtactctttcttttatggttcattttttcagattgctgaatgtaattgtttttgcattccctgtaaatatttggagtcatttatgtcctcacatttctgatgctgatgaaagcatccccatcaagtaaagttaaaaataaggctgaaaatgagctagagtttttgcttattgagaatctggttgtacttagatgaatgttagtctagctaagatgtgtttttgtatggctgtgctaagatgtggattttataaggctgtgctacaaagttttgatgtgatcatgtgctgatctagagatgaacctaatggtgctgatatagggtgatttttagtactgaaaaagagagtgtctggataggatcttgtttcaaattagttcttaatgtcatttgtggtacaaagatatatttgaccagtgcatcatgcatgtgcaccatactaatgatggtgaattctgctgttattgtcaaactttttgttttttctgttcttactgttattttatgtttattcttctgaaccaggagtg

SEQ ID NO: 18250 - DNA, 493 bp, Glycine max
  Intron number 1 from transcript Glyma09g24410.1 (locus Gly ma09g24410) derived from phytozome v7.0 (chr-ID Gm09; pos 30142466 to 30142958 reverse strand)
cttctgatgtaagcctcttttgttatcactcactcactcttcgtagtccctgtttttttctttttttatgactcgaataaaagttcatcagttatatggcacatgaaatcaatcgcgtgtttttaatgaatgtggctttggttatactatgttgttcgaacattattgtttggttagtttgattctagaacactgaattgatttggtcagtttaattctcacatgacctttggaataaaaaatttattaggtggtagttgcattttggttagagaagaagacaaaaatagtagcctattcttaaaaattgtgcctttcaagttaatccttgaaaggcgcgatttttaaaaattcaacaagctcttcattctaacatgttaagtgttaactaatgtactatccgccattgttcttcattctaacggtgtttggaattgtttttgtttggctaaatgtaggctttggataagattcgattcgagagcttaaccga

SEQ ID NO: 18251 - DNA, 644 bp, Glycine max
  Intron number 4 from transcript Glyma06g04540.1 (locus Gly ma06g04540) derived from phytozome v7.0 (chr-ID Gm06; pos 3208154 to 3208797)
ttctgttttgttaggattagaaaaaaaggttaaaaaatagaaaaaatgaataaaaattaaagtgtttgatactttaacctaaaaaatgtaaataaaaataaattatgaagacgtaagactttatgcttatccgtccacttaagaatttattttatctcttaaactcaaattttgtgataacaaatcaagttttgttcattctcttatatttttaatcactttttgcgataaaaatttagtttttagatccctacacaaaaaaaaaaacattgaaaaaattataaaaataatttttatttctatgtaatatcctgatttattgttaaaacttttcccttttcattctttataaatcttatttgattattttttttaatttctttccctatttttactaattaaacatatgtttttaattttctattccttatcctaaaattttgctaaaatttcttagaagttttgaactgtgcttcactcatagctttctttatttaacctacaatatattgcttaattatgaatactattgtaactgtaaaagcttataacgttacttttatttatcttatacatttcttgtctaagttttttgtttttttaatatagagagctgcaggacattcacagtcattgccgcagtg

SEQ ID NO: 18252 - DNA, 642 bp, Glycine max
  Intron number 1 from transcript Glyma05g30380.1 (locus Gly ma05g30380) derived from phytozome v7.0 (chr-ID Gm05; pos 35754786 to 35755427 reverse strand)
caaaggaaagctctttcgggctggtgacacacttggtcagttccaattattctatctcataaatccctcttaagttcttttcatttctcaattcccaaccacccactaattgatacctcaattctttgttttaaagaaatttataatacctcaaatctgattctaattaatataaaaatattttgttttaatttaacttgttaagttaaaaaaattattttggttattaaagtattttttgttagactaattaaactgatccttttgtcagattgtatatcaataatattaattttaactgacgtgataaatattgatgataaatactgatgtgacataacattttatagtttgtcacgtgtgactaaattgattacatgagtgtaataaattgataataaaagtgacttaattatatagataagtgaagagtgtgttacttaatttttattattaggtaaaattaatacaagtctcttaaaaatatgtgaagagtttgttacagtgtcttccatacagtatataacacatggaagaagtttcatttttgataattcttttatatagctaacttttgaaagcatgtgatacattttggtgtatggggtgcatcagctttcaattatagccctgggactcaca

SEQ ID NO: 18253 - DNA, 384 bp, Glycine max
  Intron number 2 from transcript Glyma06g24890.1 (locus Gly ma06g24890) derived from phytozome v7.0 (chr-ID Gm06; pos 22712251 to 22712634 reverse strand)
caaattcttttatctcacatcttccaattcatcaggtaaattcatcattggaagccttaaaagcaatgaaacaaaagctgttatagccttttcctattgggagttcttttgatattaatcaaaaattgattccaagagtagccctcaaaaccaaattagatcttcaataaagttttactatctaaaaggtaaaatgcaattaaagagaaagcaaaaaggaaaaaaatgaaagatgaaatgtggtaccaaaaccttaaaagtgaattcattgttggcttttttcatgttgcaaaactctaatatgggatcacttttcaatttaaacttttttctgtatgttttcaaaagtatttgttagtaatgctactctgatggaattttagg

SEQ ID NO: 18254 - DNA, 473 bp, Glycine max
  Intron number 5 from transcript Glyma09g35040.3 (locus Gly ma09g35040) derived from phytozome v7.0 (chr-ID Gm09; pos 41268648 to 41269120 reverse strand)
tcaagaacttgggagctgattttttctgcctacaggtttctttttttctatcatttcttcttgtcaaacgactgttagtgtgtttgtttttgcgttagaaacctactaaacagacaaggagaagtaagaatttgttgcttctcacaaaactgtgctttggaacacgtgcccttgtagtgaaacaggaaaaaacagacatgctctgtctcgcactaatatttgccattagtataattttagcatttacattgtgcattgtacaagatacatgtttgcttttatataattaagatttatgatttataataaataagtatttttgaatatgcaaattatattatgattaaggagagaatattgggaatgcttaattgatagagtgagaagagtgagtctcggtctccaatatgtgtattctaatttataatgtaggagtatatttcagctttttgatgaatcatttcaggaagttg

SEQ ID NO: 18255 - DNA, 726 bp, Glycine max
  Intron number 1 from transcript Glyma06g07700.1 (locus Gly ma06g07700) derived from phytozome v7.0 (chr-ID Gm06; pos 5638435 to 5639160)
tccctttcacttcttcgcaacatttcttcgtcaaggtatctcataattctccattcgtttcgttctatcgatttgttttctacttttctcggttatatgacaaagtaactctttttcgtgctattgatattgcttcttccgcttttccgaaattgaattgaattacagggattcatctgtggaataattggcgtgtgttgttattcttttttagctttaattcgctgaattgattaattaattattggtgtaatttaatttcatcggtgctctggggatgagttacactgtgtaattgttagattaaacactcgaacgagactgttatggtggctgctgtgagattagatgtctgctgtttatttattgtgtgactgtttgagtgtctcctgattaagggtttgtaacgtgttatgaactgtttcatgtgtgtgaaatttatgtttgagtgtctcttgtcatgtgttcttcttttattaattaatttattaattgttggtgcaatttaattttatcagtgctctggggctaggttccactgtgtatttgttagattaaacacttggggatagtagtttgttttatgttggacgagactgttatattgtggttgccatgggatatatgttgtttatttgttgtgttacttgtttgagtaattgagtgtctcttgatgaatgattgatgggtgacgtgtcatgaactgtttcaggtgtgtttgtatat

SEQ ID NO: 18256 - DNA, 240 bp, Glycine max
  Intron number 1 from transcript Glyma07g04930.1 (locus Gly ma07g04930) derived from phytozome v7.0 (chr-ID Gm07; pos 3642050 to 3642289 reverse strand)
gacgtgtcatcccagatttcattggtttgttttcagtttttactactctgtaatttatatatatacattatttgtgagaatcaaaagacaatatcagtgaatttacaattctattaacatattgtataaaagtctgatttttttttatttcggaataaaaaataggtggatattcttttttcttcatattatacatcatggttgacatataacgtgaagaatcctttatttcagctgagt

SEQ ID NO: 18257 - DNA, 919 bp, Glycine max
  Intron number 1 from transcript Glyma09g40490.1 (locus Gly ma09g40490) derived from phytozome v7.0 (chr-ID Gm09; pos 45408885 to 45409803)
agttgagaacaacggaacatcctttttaccttgaggtatttcacattttctgtttccttgattcaatggtggtggtgaggcttgaacctatgcaaactatcctagtccctcaccactaccctctactctcatgactatggtatttcacatcttatttcatatttatatagttttcttcatttctgcttcgtctactgaaatgttatttggaatttgacacatttacttctctggctgacatgtaatagcacttccattttgagttaatatcctgttcttcgtggatgttattctatatgaaataatataagatgattctggagcagatgtagacatttggtccacatctacttgctctaggaatctgcaaaattgtctcaaatggcatatggttgtgctttgttttccccattgattttgttagtttaaatgtgaagcccctcgcaaagatgtaagttgaggtttatgtaaccacaaagtagtgaccttaataaaaaaatataaaatatacatgcattatgaaaattattgtgtcatccatttgattgctctgtgattggtgattggaagctgaaagcagttttttcctctagctgtctaaatctcctggtttgtctagtaagtttgtgaagcaagggagtaatttactttatgttgaaaagaaaggcaaagaaatctatgcaacatgttttttattaaactatttttcatggtaagtggtcattttcttgcctgaatctatgcaacttatttcatttgcttcatgagtgaaacattttactttttttattccttaccgtctaaaattacctcacctagtgggataaggctttgtgattgttgttgttatagtagcagtcatcaaaatttatacacatttgtaggtggcaaagcatactcttctagaagaatcctttga

SEQ ID NO: 18258 - DNA, 690 bp, Glycine max
  Intron number 1 from transcript Glyma08g01200.1 (locus Gly ma08g01200) derived from phytozome v7.0 (chr-ID Gm08; pos 699547 to 700236 reverse strand)
aaccaaaaaggttctgaacgtgctaaagaaaaagggtacgtgctaatctcatttctcttgtatttttctcaacctggctttttgtgtggaaatcagaaagagcatttccttgattgtgtttgcttcaaggagggaggaaaatgtagctgatttttgcgtgttaggtgcactgcgttttggaatttgggccgagctgtttgttggatgtattatttactctctgaacatcttgccgttcacttgtatttgaaacagttcttaatttttctgtcatgaattgcgaaatcaaataattcaaagtgagaaaaagaatcaggctatactgctataatttgttcttcctgaacatctaccctgaccctgtgcgtaatctgttatataaatagaagccacttaattgtgactatgcaaagactattttgcttaaatttttcaaataaaagccaatttttttaactagaactcagcattttttgtcagccatgcttgtttgattttttccccccagctatccattgttttttaagtaactaattatggttctggaaatattaatctttacgttgtggtatgttcttggtgtttctgtgtgtatcatgtaagaataagattccatggtttctatatttgtatctgcaaagttagggaggaaagtgcatgaccgataacccctttttactcttgtagggc

SEQ ID NO: 18259 - DNA, 630 bp, Glycine max
  Intron number 1 from transcript Glyma06g39700.2 (locus Gly ma06g39700) derived from phytozome v7.0 (chr-ID Gm06; pos 42498989 to 42499618 reverse strand)
tcgcagaatcgtaagctgcaatcttcaccagggtgagtctgccaatttctctgcgtccatgccatgcttatcataaatgtttcttttttccttctaaaaaagaataatttgctgattttttttactgttaatgtttttgaagacgtgttaggaaaaggtcctatgaatttctttattattattattattattggatgtgtagaccatgtagcgagggattcagttcttacttgttccaggttagtcagtgctcgagtttgagccctgggtatgcactagcattaaattctcagggagagttttgccgtctctggtggtcctacctgtctcgagcaggattgtccctggtagagaatatcaatgatttatatataaataagttattggatgtgtatggtttcatatttttggttaattaaagatgtggtatggaagggcacttcatgtttttatcgttgggatttggaacaatgtttgttgccaattatttcatcagatgttgctatcctttgtttggttcaacgttcatgtctttgaacaaaatgtaagacatggtatcctttctttgttttttacttcctttttttggttataggcaggcatattgttcccatcaatacgcaccaaaaa

SEQ ID NO: 18260 - DNA, 566 bp, Glycine max
  Intron number 1 from transcript Glyma07g18570.1 (locus Gly ma07g18570) derived from phytozome v7.0 (chr-ID Gm07; pos 18595065 to 18595630)
agttgaggtgcttccagaccattacttgcttccaggtcccatatttctcccactcactctgtttttattattacttttctcaatgtaaatgcttcatgaagtttgctgaattttataataatttcaaccgcaaactattatataataaatttgttgaattttacaataactatttggtttgattagcaattaaactcaattcatatgtagttgtttaggagcttttgttctgttcaactcatacaaccagaatttcaccttgtttctacaagttaaaaccagcttttgaagaagttacttgagagaacttttataaaaaatatatattttaacttaatcatttttctcttatttttccccctataagggtctattcagaagtttatccaaacaatgctattattgagaagtttaccaaaatagagtataagttgtgtagttttgtttactttcttttgtgcctgtgatgtgtgaagtttttatttatttattttatggtgaagtcgttaatgtggttttggtgattggttttgtttgatgataggctgtggtgaataacttggaag

SEQ ID NO: 18261 - DNA, 703 bp, Glycine max
  Intron number 1 from transcript Glyma09g08830.1 (locus Gly ma09g08830) derived from phytozome v7.0 (chr-ID Gm09; pos 8241697 to 8242399)
cctttcattccacttcttcgaatcccaagtctcaggtctctctctctctcactcttaattgcatgccttttccttctcgatctctataatttcatttcgattcgttttcatctctgtttcggtttcatctctgtttcggtttcaaatcgattcgtcaattaaaacctttggatttcccaattcgtggctatttaggtttttggtggttctcattccacgcactgtctgaaccgtatactctgttagtctttaactgtaactgaagctgctttgtttgtgtgtatgcgtgtgtgagatagaggaacggggaattcattttgtttttgctgttttcgattcgaatttgatgattatttgtgttttccccttgtcacatctcatgctgttataaaccttaaaatccctaatgtagaaacctagattgggtttttctttttcgtgagaggcactgattgataatctcaatttttttcaaattcagataggtcttttgctacttgtttgattatagggaatgctccaggaatctttttatttatttatttatttgtgtgtgttttctgatttacgtgttctgtggattggttgataattgcctttttttttctgtgaggaaggattgtgtttgaagattgagctgtgagcaataacgagggttgcctttgcaggtctggtaaccttttgaggttgttgggtgcagaag

SEQ ID NO: 18262 - DNA, 1020 bp, Glycine max
  Intron number 1 from transcript Glyma06g12540.1 (locus Gly ma06g12540) derived from phytozome v7.0 (chr-ID Gm06; pos 9714359 to 9715378 reverse strand)
aaagactgttcaaggaatctcacctggccattgtacagttctataccttttccttgttctcacattttgcttcctttccttccagagtgggatctaaggacctcattgatgatcttgctttttcagaagaatatgcaaaaaatgtgcttgtgtgggtgtctgttttttttggggaaagtgagttaaaagctggatttttttttctcttgaaccgttatcttcatttcccttatttggaaacctcatctgtgttttcactttccatgttttgggctttttggtagtattttcgatttcttcatggtttctcccataaggtgtgttctgggttgtgcgattgttgctctttgcactagattttgttcagttttggctcacacactcgcatccttgtgtgaaatattccttcactggttggacttttgggagaaagcaaagatttttcttgataaaagtttatgctttattcatgaaagtttgattttttccttctttgaaaaacaaaaagaaaaacatgagcatagaacattacgcatctattaagcttgatcatgtttggttgctagtattaagtaggtacttttcaatttctcgctttctgtcttatttcacatgttcatatcgtcattgtttgaaactttgctacttcggtttatgctatttcctaccttacccttctttatgagtgttggagacgtttaaactgttgatctatgtttcttctcccttctttcaaccttcaaatttggatttagaaagaactttggttgccctctagtgttaggcttttgggttttatacatttgttgtgctgatttatttgaataatatggcaaggctacaacatggttttccttgcaatttatgtaaaggagatatcctggcaagttatttttctattttttttaaaagaaaaagcaccagcatttagctgagctacatgatttttttaatagatttgataatactttgcttccctttctaggtgtgtttatcttgaaatagcagtaattagcaaac

SEQ ID NO: 18263 - DNA, 383 bp, Glycine max
  Intron number 4 from transcript Glyma08g12900.1 (locus Gly ma08g12900) derived from phytozome v7.0 (chr-ID Gm08; pos 9444327 to 9444709)
ggcacttctgattcgtctattcttctatattcctggtatgttctcttatctatcacgtgaaatttaggaaatattgaaggagaaacaatttatacagtagatctaaaagtgtaaaataccccttttatagccctcattgaattggtgtaaatcaaagcatttttctaggaacctcaggctgggctctatatcttctctttgtataaactgcgaaacatgagaaagaaaatcctgattctggagtgtaataagaaaaataagttgtgttttttgtttttcgtacttgttggataatgattgaacattgaaggaaagaaacattttcttctgggtctttttcatttctaggtgaacttgagttgccatttctggcattgctcttg

SEQ ID NO: 18264 - DNA, 879 bp, Glycine max
  Intron number 1 from transcript Glyma13g09650.1 (locus Gly ma13g09650) derived from phytozome v7.0 (chr-ID Gm13; pos 11183989 to 11184867)
cttctctctgggtatgtatgtccatctctccaaacaccattaccctgtcaatttcgtgttttcctatgcttatgttgtccttcactttaattttgttagattagataatcccatgttgtatatctatttgttaatactgtgtatgtatttaattatcttcctgatgatcaaggtttggactatggattgttggtttaggagttttggtcattgtttttggttatttgcaactaagttgattgttttctttgtgaatttgagctttggaatcttaatcttccaaaatttcttctccctcgatcaacaaacccccattaccgaaaagggtacttgtgtgctgaataatatatttgatttgattagtgcttgcattgcaagtacttaccaaatcggttagtaatcaagttttatggtggtgaatcattaaattttgtctggtttgtataattgtatattatccatgtacatttgaattaaccctcccctttaccctctatggctatgatgaactcagataaggagaatatatatttttttaaaggaaaatttatattaatagtaaggactcaatctggttctgttgtatccaattgcgattgcatataactgtgatgtgtggctttaattttctgtgctatgcatcaattttgattcatgagatgaagctcctataacctgttagcaataatttgaatggccaaaggtcaagggtgaataatttagtaataacatatattgttcttaagacaattttggtaagtatcattgctttgtagctttgaaagttctctcaggggtttataatgtgatttttggtgttaatgccgcaatgcttaactattaggacactacctgcaagaaacatcgccaagagctgat

SEQ ID NO: 18265 - DNA, 597 bp, Glycine max
  Intron number 1 from transcript Glyma14g02150.1 (locus Gly ma14g02150) derived from phytozome v7.0 (chr-ID Gm14; pos 1280495 to 1281091)
ctaagtggaaggtaaccaaccctctctctctcgctctctctgctcaattaacactccccatgcttttgacttactcattttgttatttagtgagcatatatgtagaattaaaagaaatatcatctcattaagcggaactgctcaagttaaaatgtgtattggttgttttgaattatttgttatgataggtgcttaaggaatactattatgtctatcttgattgttgtgaatgtgtccgagttaggcaaatgaggatagcagtgtgtttggatatgcatcccgcacgtgtaatttagaagcaacgacatgtggcttctacaattttttttccctcaatattgacctgaaaacgagggtaatgtgtgttgtcaacgcattaccaaacacacactaagaatgtagtgttcctagcactacgaaattcacctgattcttatgcaattgttttgtatttttttttatggaggaaaaaggaatctttggccagattattgtataccaatatgcatgtaatgctaagaaggatgctatgccatttcctttggttagttttttctcctttattttctctttatttactatcattttggttcccag

SEQ ID NO: 18266 - DNA, 471 bp, Glycine max
  Intron number 1 from transcript Glyma08g43880.3 (locus Gly ma08g43880) derived from phytozome v7.0 (chr-ID Gm08; pos 43664358 to 43664828)
agagtattgctagcagaaaattaactaagcgtcaggtaatgaatgccttttattattcttcattcatttgggcttccctattcacagttatcatgaccttgaatttgtatatatattttttaatcactttcattactgttattttttactgtgtagtttgaatttcagttttgtgtaatgccttgcatgtgtatctatctgtattattctgtattctattatagagattttggatttgtaagtaggggtgatggatttaaaaagccccatgaactcttaattagcaaactaactagatatcagcttttcagtttgttttctgttgtaacaatttttcttcttctttctgttataggtgtttaagacagttagtgattaagttggttttaggtgatggaagctgagatggttggatatagttggcaaacaagcaatttatagtctgtgttgttaattttgtgttaattgcag

SEQ ID NO: 18267 - DNA, 1015 bp, Glycine max
  Intron number 2 from transcript Glyma06g19850.1 (locus Gly ma06g19850) derived from phytozome v7.0 (chr-ID Gm06; pos 16206647 to 16207661 reverse strand)
tccaattggttcgtaatatctgcatcaaccctgaagtcaggtctctctctctcattttctgtattgaaattggtttcttctagtttttaggttttgatcttttaaacgattgaaattggtttttatgctgtgagggtttttttcttgtttggatgggatcgtctgaattattagggatttgggattaatacttgttgcgtttttttgttaaatttctcacttgttagtctttgaccctttgtgaattgcgattatacgaattctttatttaaagataaataaaaaaattggtatttgtattgatgataaaatggtgaaggaaagggggaaaatatgataagaaacttggtaggttttgactgtgaataaaaattcttccttgactagccaagtcaaaagcacatagaagaatcagggtgaatattgattttattcattcaattcggaatctttggaaacagaataatatacaatttggacattgaaatcgacatcctatttatctttagaccttgaaagtgttggtgtatacaattcggcccttcaatattttaatcttttcagagcctaattagttctcaaaagtgtaaatgtgtccaatttgatctcttctcttcagaatgtattaatttcgctcaccatttattcacattttgagtatatatttgtgatggaaagactaaaaatgtgatttggggacttaattgtacacacctacacttttggggagtaaaaataaataggatatcactttcaaagatcaaattgcatgttaactcttttttaaaataagttgaatcaatcccaattgtagctcgagggaacagcctcaattgaaaaaaaatcaaatgttttatcaggcattgagtcttttcatcataagagttgtttctgttagttaatttgtattagtgttttggttattaatggaaaacaatggatgattcttttgttcttgttatgtatttagggtgaacaaggagggaagaaaggcaggagtgttggagaactttgc

SEQ ID NO: 18268 - DNA, 605 bp, Glycine max
  Intron number 3 from transcript Glyma05g36050.1 (locus Gly ma05g36050) derived from phytozome v7.0 (chr-ID Gm05; pos 39969964 to 39970568)
acagtgttccgcagaaggttagattctatttcatttttatcttttgggagtcaattgttgattaaaagggcctcgaaaatccccaccactcctgcactgatgaaaacataatcgtgtcacgttaatcttataataacttataaaacctatgtcgttaagggtatatacctcaaccatacatcacgaattaacgatttctccaagtatggaacatcatggtatccaaattaatgaataaccgcatggactgtttgaattgaattggaatgaacataatacgtgttacagaaatcgaatttattctgtcgcgttaatcttatataatcttgtaataataacatattataaaacgtatgtcatcacgaattcacgatttctcaaaatatggacatcatcggatcgatccaagtgaatggaaggaagaaaaaaaaaaagttaaccacttggactagttttattttattggaaaaacggtggcacgagagtttctgataggttattgtaaagtttctggaacgctatttgcgattgaagcacaagtgctttaatttatgtcatttttgctgacagataattgctaataaagatagtccaagaggggtaca

SEQ ID NO: 18269 - DNA, 671 bp, Glycine max
  Intron number 2 from transcript Glyma06g18650.1 (locus Gly ma06g18650) derived from phytozome v7.0 (chr-ID Gm06; pos 14937094 to 14937764 reverse strand)
gaggtgaaattgaaaaaaaaaaaaattgtgtttatgtgaattttttttcttacttggggcataacaaaagtaatatttgatcctatagcttcacattggacataatgcccgattaaaaggttctgatctatcaattgtgcatgaatgctttgacatttgttattttgctggatatatttgatcctatggcttcaccttttttcctgagttttggatgtgccctggaagtttctagtgtttagatggggaagggaaaagggggtgggggttggattggattatcagtaaccctcctttttttttcttttttcaaacaataagttacccaattttagagaaacttggatggttttaaacatcaaaaagcggagaagaagaaaagcttatttcttaacctcctattttcttcccttaatctttcactcccaaacataccataaagagcataagggaaccttagcaccgggccttttccttcttgttcgtattttgtgagcttgtgcatttgtagctgtgcatcacatactgctcatttatttaccctattgctctttttcttttgagatgtaccttttatggcattcaaaatggagctcctgtgccagaaatagcttagtgatgttgattccatttaaaccacactgagaattattcactgctcaattatacag

SEQ ID NO: 18270 - DNA, 302 bp, Glycine max
  Intron number 1 from transcript Glyma13g31270.2 (locus Gly ma13g31270) derived from phytozome v7.0 (chr-ID Gm13; pos 33713098 to 33713399)
attagcttccctctttcttttttatttttttatttacgtttccagctttggatttaccttgtaaaaatcggatctcacctggctttctttcttatcaaatctgtggttagagatacgttataaacttgtcaattttgccttccctgcttcaattacagaaaatggtcaataatcttaccagattatgcgtaagtttttttgctgcagttcattgtgatttgagatattaatcttccaaaatcaaacttttctaattcctgtggggtgtggacttgagacagttttctcttaattttcagctg

SEQ ID NO: 18271 - DNA, 475 bp, Glycine max
  Intron number 1 from transcript Glyma08g10510.1 (locus Gly ma08g10510) derived from phytozome v7.0 (chr-ID Gm08; pos 7621739 to 7622213)
ctctccttcccacctcacctcaatcctaactacaggttccttcttcttcttaagtcgtgtatagcgttgtcacgttagttcctcaaaccatcattcacaaaatgttatccatcaatttattagttcaaaatgagttgttttgtgtgaagagagatgccaagtgtacactcctatattcaaaaggttttttttttatcaacaaatgttatttttgacttaagtgataatattaacatatgtttatgaactaaaacaataataagaataagtgattaagtttagaaactcagatgaaacaattaaaaatttcagaaaattatttggaatttctttagtttcagggattaacatctcaacacattatacattttgtgctaattttcattttaggaactaaatagaggtcttacattatatatattatggacttaactttacaggtgcaatagctctctgttaatcgattattactgtc

SEQ ID NO: 18272 - DNA, 353 bp, Glycine max
  Intron number 1 from transcript Glyma12g37020.2 (locus Gly ma12g37020) derived from phytozome v7.0 (chr-ID Gm12; pos 39994655 to 39995007)
cttttctcaaacttctctctctcaatagcagcaaggtaaactttgatctgattctcttctctctctaattcattacgggaatatataaggtttttcgatctcttccttttttcatcagattctcttgtttgcttttcgtttttttcaacccctagagtagaggcctcatcgattctcttctttgccttttactacacagactatttattgttggtgtaatttcaccaaattatttataaaagatttttgtgtttgattgatgattttgtttttcaacaaatcgatgatctgtcgtgtccaaacttgtcttttatgcaggatcaagtgaaaactgattattttccattgagttt

SEQ ID NO: 18273 - DNA, 732 bp, Glycine max
  Intron number 2 from transcript Glyma12g37020.2 (locus Gly ma12g37020) derived from phytozome v7.0 (chr-ID Gm12; pos 39995059 to 39995790)
gcaagacaaggctgctggtttcttttcttcctctggtattgctgcgcttttctcttttttttttttattatttactttgctactgtttgaatagggaaatgtttctaggacacccaatatgctgaggttttaaatattgatcacagtcacgttgctgtttcgtcgtgtttgttgatatcgcagcaaatcacaaataaatgcggccgatatgattctaattgtggtcaccgacggttaaaaggccttgatgttgtggcccaaatcacggttgcggaccgttttttaaaaccttaagtcacttagagagagaataaaacaatatagaaaagtgatagatgtaataggtatttgatgtgacaagaagagggatagagacaattgaaaggtgtcaatggagtgtccaagtatcactactcttttgaataaaattctccataagcacttacaaaaaaagaaattaataggaagataaaatgaattaagcttctcccataagttaaattagcttatgcatgagttaaatcagcttctggagaagctaaatgagataaacttctataaattagcttatgcataagctaattttaacttatgagagaaacttaattcattttattttcctataagtgcttattgcgaaattaatccaaataaagcctttccggtctctgtttgttccaatatgagtttgatgtaggggtcaagcttaaagaagcgaaggagtcagcagga

SEQ ID NO: 18274 - DNA, 978 bp, Glycine max
  Intron number 1 from transcript Glyma06g44460.1 (locus Gly ma06g44460) derived from phytozome v7.0 (chr-ID Gm06; pos 47388848 to 47389825)
ctggttcgacaccgctctctcctacgctccttcgcgtatgttcttcttttctctctttctttctcactccacattaattactcgcttagattgcgttctaagtgatcattatcatcatcatcatcatcatcataataataaggtttctagggttaggaattagaattgagagaagttagggttccgttctttgtctgaaagttctgattcgtaggtgagtttatttgatcggaaattttggaagagtggaatttgaattgaagtggaggaatttatattttcttattagttttactttttatcaatgtgagatcgcatttttatcaaacaggagaaaaaaaattgttgtgttaaatgacatagacatagttgatgatattatggtgtgaattcttctttctttcactattttagtttgtcctatagtgtatattaacttgtgagttgtgacttgtgaggttgctttgttttcaattgcttctcggattttagttgcgtgcggttctatgctattggcttaagctgaagtttttcgttctcagcttaatttcgaactgtgtaagttgtctgataggaaattgatattcaactctttcacccctcacacagttcaattaagtgtctgggggttaaatatatgttgtgaatggtgaatggctaccagcctactcttggtgatttttcttctttatgttgtatcagaaggtgatcggagtctgtaatttgtttaatagaaaattgaaattcaactcttccactacagcacaactcgtttaagagtctggtggttatgtgagttgtgaatgaggaatgactctcagcctaagctttagtgatttttcttctatatatgtgttgtctcagaaagtgaaaggtcttgagcctgagacacagtttaattggtttgtatttttttgtacgaaagaattacttagttgagcttttttgggttttcaaattgttgttgcagcagcattc

SEQ ID NO: 18275 - DNA, 785 bp, Glycine max
  Intron number 3 from transcript Glyma08g38830.1 (locus Gly ma08g38830) derived from phytozome v7.0 (chr-ID Gm08; pos 38074409 to 38075193 reverse strand)
tattttattttgacttaattatctttaaatttagggtgtgtattttttttttttgtttttgaaatttataaatattttttaatctttaaattttcatttttttagtttctaatataataaatgagtttttagtattttgtggtttttaatcctcgatgacaattttaaaatacaaattcaaaaatgaactaacattatcacttaatttgaaaaatcaaatcattttcttacccaactagttttaataaatgtaaaattaatctttgatatgaaactagttttgatatgaaactagttttaaataatatttaattactgttatagtctctaaaatttaaaattattattttttcttaaattttgacaaattattttttagtctctaatataataaattgatattttataaaattttaattttcataaattaatttttatttttaacccttgaatttatattttaaaattattagtatttgaaaattgtcagaaaatactagaagttgtcataaaatgtcttgatttgttgtgctaagaattaaaaaatacattgttaaaatttaaagggattaaaaaattatttttaaattttaggaactaaaaaaatatattcttaaattcaaagaataaaagaataactaaaacttttatttttatatttaaacatatttttaactaaaagccaaatatgtaatatgttttttcttttccaaggttattagaacacgcgccccgacacatctttaattataagtcaaacatgcactttcttcttttcagaggtt

SEQ ID NO: 18276 - DNA, 344 bp, Glycine max
  Intron number 2 from transcript Glyma08g38830.1 (locus Gly ma08g38830) derived from phytozome v7.0 (chr-ID Gm08; pos 38075125 to 38075468 reverse strand)
tctcctcccttcttgttttcccttacattgacggcgtataactgtatttgctttggcatgcttcttttcataaaaaatcatgttcaacgtgcttcggaaatgcctgattcatgtcaaacaaacatacattaataacgtccttgggaatccgttacaaaaatttacctctaaagaaaaaataattctgtggacgtgcttcttttgtttttgcgtttattttatttctacctaatgaacttttatattagaacgcgcactgcaatacattttacatttattttattttgacttaattatctttaaatttagggtgtgtattttttttttttgtttttgaaatttat

SEQ ID NO: 18277 - DNA, 628 bp, Glycine max
  Intron number 2 from transcript Glyma12g07720.1 (locus Gly ma12g07720) derived from phytozome v7.0 (chr-ID Gm12; pos 5336908 to 5337535)
gctcttgccttcgtgttgcatatcaggtgtttgattgctgcattgcatgtagtctttttctcttcccatgcatttgatttgatcgctggaatgaaattttatttatttttatcacaaactagcaattcttacataaagcactttctatataagcacaattattgaaataataataataataataataatgataaaatagataacagatcttgtttgaaaaattgtttggatactaacttgagctttttttattagcggtgccggtgctcatgcgagaattacttcatagtttatactcattttgttttttcgtcttaccagtgtacatttctacatagctaatcttagaaatcactttagatcaatgttatcaatggcggatggcccaaaattccgccaagtaaacaccccattgcagcctatggcaccaccatagcgggtctcccttcacatattgcctatggcagttggcaaaaaatcaaccacgccattccgccatagcagccatggcgccaccatttaacaaaccactttagatatgttttcttaaagttattattacaaaatgtttgcaatcttaacatatacggcgatttgatagctaaatactgcatttttcagggggttc

SEQ ID NO: 18278 - DNA, 401 bp, Glycine max
  Intron number 2 from transcript Glyma10g38270.1 (locus Gly ma10g38270) derived from phytozome v7.0 (chr-ID Gm10; pos 46084035 to 46084435 reverse strand)
tgaattccagaaattattgtggccaggtgagactttcttccttttcttttagatttaaattttatgaatattggttttgatttgaaaataaacaaaaaaactgcatcatgtgattttagatggctgagttcatatttagtgctgaattttgattattggaggactccgttttgtgtttggaaattggaatatacatttttccattttgggtaggaggattctgttccgtgaggcaagttgctgtctctatggaagcatatataaagtgtgcattttgtaataagcaatcagatcaatggatctgatgtaaattcaatagaagcatgataaaatgaagctttattagctatactaatttgataatatggtttgcattgacccttgatttgaagacggcgttg

SEQ ID NO: 18279 - DNA, 547 bp, Glycine max
  Intron number 1 from transcript Glyma05g31640.1 (locus Gly ma05g31640) derived from phytozome v7.0 (chr-ID Gm05; pos 36758114 to 36758660 reverse strand)
ccttgaggtcgctcacttcccccttcttagcaatatcttttaagctttttaatctttcatcgcttttggtgaacaaatgcgcctcatgtgttcctaattgcattcgcggacaattaataaaccttgatgtttcggccccaaatcacgtttgccttcgttttttaaaacctttcttttatcatttgtaaaattgttgtccggtgctgaaagatttattattattatccctttttaaataaaattagtacattctctcgttcattaagattggccttttatgcatataacaatggtaatatcaaaaaatattgtgatgataactgtgatatgacctagaatgtgagaaaaataaacaaataaagtgtgggaaaattaacggcaatgagcaaatcgaaatggatacttctcattgttttaatatatagtatatacagtgcaagaacatagtaatatgcattagttaaaataggggagcatgaatgatgatgtcaatggttatctctgtctcattgtagttgtgaattttgtttggcattcaggtttttag

SEQ ID NO: 18280 - DNA, 503 bp, Glycine max
  Intron number 2 from transcript Glyma10g43030.1 (locus Gly ma10g43030) derived from phytozome v7.0 (chr-ID Gm10; pos 49851749 to 49852251)
ctgttggtgtttgagacttccttcgctagcaacatccccagctcaataggtacacagccacgcgtttttatcttcaatatttttattttttttttggagaaaatgcatttcagattttccaatatttgatgaaaatcggttttaattcccgtgttttgaaaataatgattttggtcttcctactattagaatagggtgctttttgtccttgaccctttacttcattttaatttaatcaggaacgaactctgtcacattttagaaatacaaagaccaaaaatctaaggactaaaattatgagaaacttaaaacacattttattccttttttttttctttctattattcggtgaaattttatactagtcttgttaataacagaagacgacaattcaaattatttaggatgttgatggttaaccaacttagttattaatgaaactaaactagtggtggaattggagtgcaggattgtcactacattggttacaggaacccaaacat

SEQ ID NO: 18281 - DNA, 455 bp, Glycine max
  Intron number 1 from transcript Glyma10g03430.2 (locus Gly ma10g03430) derived from phytozome v7.0 (chr-ID Gm10; pos 2479438 to 2479892)
ggtgtcgctctgtcagttcactttcctcggtactgtatctgtttctcttctcagcttttatgctttctttttcctttcgtttttcccccattttcccaaaattcatgaccgtctaattccctattgttacagcagcacgcgcatgtttagttctctgtttttgtacatttcggaataaaaacaaaatcatgggtctgtccgcgtctctgacggcaacctcagctcctaataattattcatcacctttttttttcttttctttttaaataaatatcaaatttttatgctgatattgaaactgttgttgtttctgttgagcgatatttgagcatggcatctttccctgtgtttatttgcagagtagcattgttggggcttgaaccaaccccttgttttattcgtagtcattgagctgtggcattgtttgtgtgtattagcagtgtttggttcgtact

SEQ ID NO: 18282 - DNA, 585 bp, Glycine max
  Intron number 3 from transcript Glyma13g35520.1 (locus Gly ma13g35520) derived from phytozome v7.0 (chr-ID Gm13; pos 36949517 to 36950101 reverse strand)
aagtgagaggaacaatttgttggcagaagcagaaggtatggatgggaaatcttaatcacgttattgatttattattttgttgattgtaattggatccctattattattctaaattaaactttcttgtggtaaaaattcttatttttattttcgttcttctacccaagtgcaactattcaaaattatagggggtcaatacgttttttcctttgagagttgtgaattgaatagtgagagatactaatctaacatgtatatatgcctttatctatggctaatttgattgcaagggtgccgaattacttagatgtttggtatgacttttcaataatttgatggtccaatttagctaatcatgtcagcatgttaattgtgcaatagatatcactaaatgttccatttgagggtaaaattatcaaatagtgtttccacaggttacgttggctggaattttgcactgtttctagtattgttataatgaaagtaaatagcaaaaaaaaaaacaaaaccaaaataaaataaaataacttgtagctccaacttcatattttgacatgggattgacaggaagcatttcatctactg

SEQ ID NO: 18283 - DNA, 555 bp, Glycine max
  Intron number 2 from transcript Glyma08g45990.1 (locus Gly ma08g45990) derived from phytozome v7.0 (chr-ID Gm08; pos 45225629 to 45226183)
caaggaagttgcaggattgccaattgatttgaaaggtttcacttctattctgcttttacttacatatttgtttgtaggatgtccaaacatcatatactgtgtttttatttaatctttattgtaatctatcttcttttttttactttacgatttgaagaatatatgcccttaatgaaccttcccatggttttctgaagtaatgtcaaaagtgttgtgttgtgataacatagcctcttttccctattcaagagtttacccattccaaaatcaactttgctgaaagttggtttactagactagataaagtataagaagctttgcttgttagactgtatccataaactgttgaaaggagtcctttgcatctgcagcatctgtatgataatataacaactcaatgataatgtcttaagtatttacctttttctcataaatttgttattgccaagtgtaacttttttcttactaccttttttatatctttgattcgttgtggcattccactgaatgttatgtgatgtgcaggtaaaagggctttcattgctggtgtggctg

SEQ ID NO: 18284 - DNA, 781 bp, Glycine max
  Intron number 1 from transcript Glyma11g37910.1 (locus Gly ma11g37910) derived from phytozome v7.0 (chr-ID Gm11; pos 38880976 to 38881756 reverse strand)
ggagggatattcttcaggaaatacattatcagcaggtatatctttctttctttctttctattgtgatttcaattctttttattacactctgttttcattggaagggataagtgtgttttataagtttataaccttattttttcctttttcttcttgttggaaagtggcaattactgggggtgtggtttatgtactaactgtctaacaacttaatttaatgccatttggttttaaacaatgcctttaactgtggttgcggttgtagatggagggaaattgtgggcaaatgccaccgcaattgcggtcacaaagactccaaattccttgacattgcatgggaaattgggtcaaatgtgactgcaattgcagtcgctgaaaaccttgacgttgtggctgaaattgcgacgcaaactgttttttaaagccttggtttagatggaatctaatgacatcgtattaggtcctattccttgtttatgttgcttttgtgttttgtgaagggagggatcttttgtgtgtttcctggtctggcaggcatttctggaggtgcgtgttggaaagccccatgttgcctacctcaatttttgggttgtggtttatataccttttgggcaacttcagttaaaaccccagttgattttaagatgaaatctaagagtcctctctcgtacttctgtattttgacttttatttccagtggatactatgaactacgtttctgtttagaatttagatatatttttttcttttgctgtgcttctgattagtgtatatacagata

SEQ ID NO: 18285 - DNA, 814 bp, Glycine max
  Intron number 3 from transcript Glyma13g39140.1 (locus Gly ma13g39140) derived from phytozome v7.0 (chr-ID Gm13; pos 39854241 to 39855054 reverse strand)
aacgtttagctcctgatcttgtttttgttgttcaggtatgcagtcgcattttatgctgtgattgatggtgtttttctccagttaagcaatgccattcaatttaaactgtgccatatgtgtacttatcctagattttgcttctttgttaagagtgtgcctgctatgatttagttggtttttgtttgatttgaaactgcaagataaagtaatgaaataagttcggtgccttaaaagttcaccaagggtgaaactcatcatgtggttgacaaatgttggtgttgcaattacatgataaaataggagtagccacctactttcttggcaagggaattttctgtttgtatttcagctgttacgctagttctgctcttggattccatgacatgatcttgagtcttgataggagattccgaagattctttgcttcttcaatactctttttccctcatgtctagagcttgtctttcttttgctttattttctttgcatgttactgtttgttttaatgtctttccaatatttttggggcaaatacttttgagacgcttggctgaggcagacatttttaactcttaatttatccaatgaaaataaatagtacttcgtgcttgttcctaagaaatagtagatcatccatgttttatcagtcattcagtctcaatttgtactgtatgcggtgtggtgacttattgcacttctatacttctgtggtgtttattgcttcatttaagcattggcttcaatttgtaactttgactattttttttccttttggacagatacaacatccaaggtctcatttgaataggtttga

SEQ ID NO: 18286 - DNA, 752 bp, Glycine max
  Intron number 2 from transcript Glyma06g13410.1 (locus Gly ma06g13410) derived from phytozome v7.0 (chr-ID Gm06; pos 10557124 to 10557875 reverse strand)
gtgccattgcctgctggggtttgttccctttatcatgcaattgattaaaatgttgtcttgtgttctattcagaggagaaaagtggcaatagtttttaaatatatatgttacagtttagtacttaaatctgttagtaacacctcaaaagcacatagactcatattactccaataatctcaccatgatgccttgttgccaccagaatgttatttctgtcttgaagtgccatgtctgtccctttataacccttgcatggaacaagctgtcaacatttagatgttctgtatgaacaaattaactgaagcttcaaatgctgatttttgtttattttttgtatagggtggcctatcattcttcaattgtctaacatagttgaaaggaagtttctggagttatttactaacctcttccatttctttataaaaactgagcttcttgtacctaattttgaaagctgtgttaactacaatgatttctgtcctatcattgccattgaaattgactaggcttatgccatacttgatactagtataggaatcttgtttatgtgtatataacaatgttataccaaactatatattctgttgtgttttgtataggtgtgtattagaatgatatttttttctctccttttgtatttttatattgaatttgatattgattatttacttcaaatagtcaagtttcttatggttatttccttttccctatgaacaggtttatatccaggacattccccattcaaaagcaga

SEQ ID NO: 18287 - DNA, 859 bp, Glycine max
  Intron number 1 from transcript Glyma06g13410.1 (locus Gly ma06g13410) derived from phytozome v7.0 (chr-ID Gm06; pos 10558300 to 10559158 reverse strand)
gcagatcctacccgtctttcattcaggttagattctattattctaatcatcgtaacactcgataaaaactgggttagctttaattaacgttaatcaatcaaaaatttgtttttttttttgtttggttttctgggttcagttccatacacagtttgcgatcggatccggttacagtggattgacttataaggttttaatggtcctgccatccttactggtcataagggattttgaaaaaagtttctggtttattaaaatctattatgagatgaagtgaaaaccaaataaactcgaaattcgcattcttttctttgatttgttacttactcaatcgtctatcttgctaggggtcctaggttttttcgtttatttttagttatgctgcattaatttagtatatacttagtagcttaaacttaaaaccagtttcgaattattcgtgcctgtcaatatcgaggtaactttttaccttctcttgtccctttttatatttatgtttttggtctccttttctttgttgttctccgcctgaataatattttcgagtttttaccttctaatcattttatgtcctttgttataaaattaaagttctgttattttggtctttcgagtacattcagtctggctcaatggcagaggaattattcgtaattaagcattgaagaattctttaactcctctctattaatcttcattgtaattggatcttggtgttaacgttattaaactattaatacgcttgctattttctttgtagtaaaatttttatttttattgttagttcctgggcaatgttctcatcataattatccatgctctcttgcagttcaatctcatacttgtcggtgtttctcta

SEQ ID NO: 18288 - DNA, 700 bp, Glycine max
  Intron number 2 from transcript Glyma06g17360.1 (locus Gly ma06g17360) derived from phytozome v7.0 (chr-ID Gm06; pos 13669262 to 13669961)
tttagaactttcactggaggaagctcgtcaacttggtaaacatctttttcatcttcttccattctggtgtaattgttactaaataaggtagaagtgatttggcaaaaagcatttgtatcttcaacagaagattttcctcctttttatccatctgtcttttcttattagttttctcaatgtttctctggtgtaattgttactaaataaggtagaagtgatttggctatattgggtctgttatgtatttctattttactcaagaagtcatctatgttttgactacttatagaagaggaagaacaaaggatagagtggaggattgaataagctaccctttattattacactgcaagttacagaaaagatagaagaaatcatgaaccataatgatgcaaaacactccttctatcttgtcataatcttttggttaatacttctagtacgcctatctagtcaattacaccaaacctgttcatgcagtgtgtgtgtcaccattaaatggtactctcttgctttaaatgcatttcagcttttgaaattttgttggaggcaatctgttttatttgtgtggcttgatgcttcttttctttttgggataaaaattatattaagttgtaatattttaacttgctggaactctgagctttaacctttgatattatcaggtcacaattatattggatctgagcacctgcttctg

SEQ ID NO: 18289 - DNA, 701 bp, Glycine max
  Intron number 1 from transcript Glyma10g01270.1 (locus Gly ma10g01270) derived from phytozome v7.0 (chr-ID Gm10; pos 921953 to 922653 reverse strand)
agtcggtctccgccgagttactcacttcacaagaagtcagttttttgaagaccccctttttcgtttttcttgtgattctgtgtgtttgtgttgttggatgacatagatggtcatagaccgtgatggggttctttgattctttctattcgcttgctcaatcatgtgaattctttaatttctctttctgggatcaaggtccctgcaaaaaaagaaaaaaaatgtaagacttttggatcaggggtcatcgggtatgttgagcttaggtgaatatacccgaattctgttgattttgtttaggttacttacttcgttgtatgtgcttagtttagcggcttatttatgatgatcccacttgtttgttagcgacagtaagggaatctctctttgttcatttaaatttgaatttcttgaaggagattgatgtgtgtgtgggatggatttttttggttgttagtatctataagggtaacattgttgctggtcaacacgtgttgcagatcaaatcctccttggagatgttcgtaattttgcaatagattttcgaaattgtgagtgtgaattgattgttagcttgtggtctttttgtggtttgaagaatcatattgtttctgtgatgaacacgttatgcaaaatagtacatctagtccttgaatatattgattcttgttttgctgatttgcgtttaattatccttgtgtagg

SEQ ID NO: 18290 - DNA, 295 bp, Glycine max
  Intron number 1 from transcript Glyma06g46160.1 (locus Gly ma06g46160) derived from phytozome v7.0 (chr-ID Gm06; pos 48834678 to 48834972 reverse strand)
aggtatcagaaatagtaactgaatttgttgttcaagttgacttgatgtataaattttctgcatgtactttataaaataatgcagtgtgtttgtttgatatcttaatgatgaaagagtttacttattttgaggcctgaggcaatgtaggagtatttcatttttcttctagaaatatatattcttccacaaacataattccttagctgaaaattgcctgtaatgtatgcagttatgaacaagtctcacggctcttcaatcaggttcgcaaaatattcgttttctatcactaataagg

SEQ ID NO: 18291 - DNA, 746 bp, Glycine max
  Intron number 1 from transcript Glyma08g46270.1 (locus Gly ma08g46270) derived from phytozome v7.0 (chr-ID Gm08; pos 45440441 to 45441186)
gaaaagacgaatcagaagacagagatatctatcaggttcggcctcttttcgatctcttaggaaaaaggtttcatttgtaaaaccactattcctttctgttatttttcttaggatttgttcttatatattataggacacttgcattgctctgtaggagaaaggaatttatgttatgattttataatatcgaaattatgtatttttcacaaactccttcagagttgctagatgatggtaaggtagattcttttggttttagttgctgttgcctttgatctcagaccgaataggtctaaaactcaaattttaattattttagctttagatctgaatattgtggatgctatttgtttgtcttatgtattttgaagcaagtcaaaccgcaccgataaccatgtttgatatctggttgcccaccagacggatctactactagttttcaagttctttttaatataatataatgtcttcccataattttagtttaaaaaatcaatctataatataaatattgcattcacaaatttatataaataaatattcttctcacaacataaatttttttgtatccgttttgaattggaaatgacttaaaagtaattgttttcttccctcaaccatgcatttgtgcttttagcagatctttgcataagttgattaatttgtctgtgttgtaattggcgtgttctggtttttgtgcgacataaacaggactgaaaaagcaatttagaaagagaaatccgaag

SEQ ID NO: 18292 - DNA, 667 bp, Glycine max
  Intron number 3 from transcript Glyma08g12220.1 (locus Gly ma08g12220) derived from phytozome v7.0 (chr-ID Gm08; pos 8885630 to 8886296)
aaggcgtatcaggtctgcttgtatttggacctcttgcatctgttgtggttttaattttaagcctggtgattctgattcatggtatctgtgttggagtgtggactaactatatggttgctttgcatgtcaatctaactgaagccagagaagaaaaaaaatgcttctgttttcactttcctttgttattagaatcacaagtcttgcttattggtatttctttgtgctaaatgaatcctagacaaaagtgcaaacattattgttggcctgtgtccttttttagttttcctttgaagatgattggcaagtcaaaattctattgttgtagttgtaatgcaaatcatttcattggaagaccttcaacatcatcaatattaatgtatttgttatgttggtgttaacctgtagattttttaaccacaactcttctccggtgatatgattttgaaggagtgtttctaatggttctttattataccttgtatttgtcttatgacccatatgattagttttaccagtgtggcactgtgacattcatttagatgaagtcatcactgatatggatttggctgtttcatcaccgaagtatttttccacctgttcatatttatctgaacaattcataaatattgcagtcggcttccactactgcagaggctgagttaccacc

SEQ ID NO: 18293 - DNA, 862 bp, Glycine max
  Intron number 1 from transcript Glyma11g15870.1 (locus Gly ma11g15870) derived from phytozome v7.0 (chr-ID Gm11; pos 11531269 to 11532130)
cctcgactccaatctcatcatattcatccgtagaggtattaacatctctcaaatcccttacctttcatggtaaatcacaagaaattattaagtaactcagattaccacgcggtcatcatcttgataaatcttttcctgacatatactcatatttttaagaattaatgacacttatttatcactctactaggttctgtttggataagtttatttagatttacttctatgagaagaaaataaaaagaagaaaaaaatttctccataactaaaatgagttctccatggagtgttcattttaacttatagaaaaactttttttttctttttattttttctcttatctcttagagatgcttttgtaaaaatgcatttatactgtagggatcatagtaatattggactacctaataattttggtacatcatactacaagcatataagcatcacacaagcatagtaataaaatgatcctcagtgtaatctccataaaaccatataatatgactaccgtgaatgaaagaaaaaataacaacaaattgcatgaactagaaacattggaaacaccaagagacagcccctcttaagtaatctaactatgagtttggaagcattaattttgatgcaagtttggaagcattaattttgatgcaaggttagtttgataatatcatctttaaagtacatactattagaatgtcttgagggtatgtgatgtgactatcatatcataactagtttaattattttagttaagcccaaaacattagactgaaaatgcatcaacatcaaatattatctccttagagaagttgggagttgagtttgaaattggttgcaggggaagcaaagctgggattcatat

SEQ ID NO: 18294 - DNA, 914 bp, Glycine max
  Intron number 1 from transcript Glyma09g33290.1 (locus Gly ma09g33290) derived from phytozome v7.0 (chr-ID Gm09; pos 39790044 to 39790957)
cgccactaaagacgaagagttagttctagtaagttttattgctattactgttaatctgttattaatagaaactgtgtttttaacggtcaacgtcttggttagtgttaatttagaataaaaatcttattacaatgtctgagtgaattcggatttctagtgttaagttggaataaaaatcttattacaatgtcagtgagtgaattgagatttctatttggaatttctttgttttgttcctacatctggattttatctgatagaacacgttttttttttttttttttgcatatgcatataattttgggtcctacagcctattgaatgctttcaattactttatataaacaaaaaattatatatttctgatataatactttttttaataatactttatattttgtttttcttttccttaaccagtattagcatttacctataattttatcggtggtgtcaaattgcctacaaagggatttagtgagggatttagtgtgtgtttgggtgaaggtatggaaaattgaggttatatgatttatatttaaatatttttattaaaaaacaagttaacaggaaaattccgtgtaaattttttttgtccaccttaaaaattatttaaagttttttcaactcaattaattttgtacttaaagatatgcaaaaccaaacatacaaatatttacctaaaatcatgttagctaatatttgaacctgattttttttatcatctaatctaatgtgaatccaaacatgcgaattatcctagttccatgttcggggtttcttttcatgaacttcagaaataacaccataccattgtcattgaaaaatctctattttgaaattcttttttctttatctgggtacttgtttgattgacagataactggtggaattttggctgtaaagaaagcact

SEQ ID NO: 18295 - DNA, 706 bp, Glycine max
  Intron number 4 from transcript Glyma13g16720.1 (locus Gly ma13g16720) derived from phytozome v7.0 (chr-ID Gm13; pos 20649364 to 20650069 reverse strand)
gcattactatctactagtaagctgacagacatatcacaaattccgttcctgaagtgcactgtacttgtatggtgtatcgaatcattatttcattctggaagcttatgtttgcttctagggcgagtttgagtttttgttgtagtgttcacaaggtttttgtaattactagtcactgtaatcaataatctgtaattgtcaaaacttagaggtgaaaaactgccaactgcaatgttgaggagtaatagacatctatcttattgaatatgtgtcactgttattcctaaatactaagacgaaggattagttgaattagaaatatttgcttatcattttatttttctttcttatgtggtttaactatagagaagttagcgaaaagaatgtttaattgaattgccaactaccaacatggttatgatgtgttagagaacatttagaaaggatgaatttttatgacgttaatctgattggtcagatcttttagacctggaaactctatcagtaatgacaagggcattgtcaatttgaactgtgttttcatgcattaataattaaaaattaaaaatagttggaatagtgtctttgttcccattaatcactaattcaatatcatgcagatacagtactgatattattgttttatgagtttcctgcaatgaaagttaagtagttacatgattgcccgtgtttcaggacttctgctatt

SEQ ID NO: 18296 - DNA, 890 bp, Glycine max
  Intron number 2 from transcript Glyma13g01810.2 (locus Gly ma13g01810) derived from phytozome v7.0 (chr-ID Gm13; pos 1494231 to 1495120 reverse strand)
agcacctcttctcccacctaaaaggattattccaggtctacttttattcagtttttttccttagccgcacattttttattagtagtagtattgttgcgtgttgattgggtgctactagctgcataagtcatttacttcttgtggctctagtttgaagttggcacttcaacaaattatccaaattgagaaaagaacacaaatgcttttaaccgctttaaaagttcctgtgtaacatagcagaaaggtacaaaaagttaaattatactattatctaacaagatggagtttactttatattttgaatgaaattaaaaattcatagatcattctgcctcgtcaactaataggcttccaatgttgttgtccaaccattataagaaaataacataaaaaattaagatgcaacaaatattctattgggttgttacagctggcgcctcatgccaaaataggaaagtctgcaagttttgtcttccaaacgcctattttggttatgtacatatacaagttttattggtatattctaaaaaaaattcaccattttagttcgtcagtcatgcaaaatgtgatttagatagttctttgttcaatgaaaaataatgcatgtaacggtggtctaatttaaggactaatttcactgtagtttacatgattaatggactatattaatgtaaaaaattattgaagaaccgaatccataacaacactttcaaggaccaaagtaatgacacttctatagtgtttaattttatccaatagaagtctgtcatgtgttcttcaatatttggtacatgttttttttttctttgtagcattgtcacttttaatgaagcatcactcttgactttaatttgcactatgtgttaacaatttttgcgttctttcaggtg

SEQ ID NO: 18297 - DNA, 723 bp, Glycine max
  Intron number 1 from transcript Glyma07g04870.1 (locus Gly ma07g04870) derived from phytozome v7.0 (chr-ID Gm07; pos 3593177 to 3593899 reverse strand)
ctcttttgggttagttgagttctcattttttttctttctttcttgtttttagttttattgattggatttttgttgttggtgtgttgttatttatggctagtttgattgaggtgtcatgcaagtgtttacattgggtttattgttttaagtgtttgttagtaggtgagttgaagagtaagcaatgagcgttcagtgaggacttgtgtgtggatatttctagttcgagttgttcttctaagcaatgtgatagcttaattgtttgcttacatgggtctggtggaactttatttgtgtaggtgaatgatttgtatgacatcttgcgtgtgctattatttgcttaatgggggatttttctttccaagtttttggccatttggtcaccttatctcgcacgtatctttttatcaaacgatgccttctaaaatctgcttcccccgcattttgaaatcttagtggtcctacgttgtgaatgtgacctatataacatatttaatgctataaaagaaaaattgatctatttccaagcggcactctcctctgcttgttagttgttacccaaatctgaagcagatgattctccttctcaattatctgtgtttgaagtgagattgcctctgtatgtattcataccttggctttacagtagagcttatattattttttgtcttccccatatgtgctttagacttaagcaattgacaacgtttgatatttaatctagga

SEQ ID NO: 18298 - DNA, 433 bp, Glycine max
  Intron number 2 from transcript Glyma06g22900.1 (locus Gly ma06g22900) derived from phytozome v7.0 (chr-ID Gm06; pos 19815459 to 19815891)
ctgttggggtcgaagtcaataagcaggtctcacactctcttccttacccactctcttccttaccctaacactctatttacttttctgcttctcaatctgttttgttatgtgttttttattgtgatactatggcttccaattccgattctatcttaattgttgatttttgctgttcattagcttgtaccgttgattttggtttcaaggttcatgtgcgttttgtaggaaatgatttatcttttctgcgcatgattgttacccttcatatatattttaaggcattttcttgattggggttctgcccgtgtgttaattttagtttctagggttttatgtgtatgcctcattgatttggggatttggtgtttattgaaattaccttttgatgtttcattcaggtcggcaacagaatcataaggaagaggattcacgt

SEQ ID NO: 18299 - DNA, 915 bp, Glycine max
  Intron number 1 from transcript Glyma10g23630.2 (locus Gly ma10g23630) derived from phytozome v7.0 (chr-ID Gm10; pos 29974011 to 29974925 reverse strand)
ctgaaattcaggtacttcgtttcgtgtgtgttcgctgcattcgaaattgatgctgtgaagtgtcatttatcactcaattggaacttaaattgaagaatatatacgtttagcttgagtgtgaaattgttcgaaatagtttattttgttgttgcggcttcagtgaaacctgcgaattgtggctcttaacctatatttggtagaagaaaaaatgagagggaataaaataaagagaaaaaaacacggataacaaagtattttcttgatttgagaggaagtagaaggaaaagagaggggaaagatgacttatagaaacaaaagtttaaatttttctttctattttctttccaattcaaattttaaactaattttccttccttccaaccaaacggatcattaatgttatatgatgactttgctctttggaatcttctaatttttgacacatgtaaccgaaatttatatatttcacttaattgaaagttaattgaagtgttgtttagtttgattgtggaattgttctttttttttttttttttgcagctttagtgaaacctgtgaattgtggcttttgacgttataggatggctctggtccttggaatcttttaattttgacacatttaattgaaattcatatttcacttaattgtaagttaattgaagtgttgtttaacttgagtgtggaattgttcgaaatagttcaatttttttgcggcttcaatgaaacttgtgaattgtggcttttgatgttataggatggctttgctctctggaatgtttcaattttttacacatttaactgaaattatatttagtttgaatttcaacatgttattgatcaccctatattgttgcttctgtgattgtttttattttcttagttacaaactccagacgtattgaagagtgaagagta

SEQ ID NO: 18300 - DNA, 796 bp, Glycine max
  Intron number 5 from transcript Glyma06g18910.3 (locus Gly ma06g18910) derived from phytozome v7.0 (chr-ID Gm06; pos 15197431 to 15198226 reverse strand)
tccagaactgtaaggaaacacttgcgacataccaagtacgttttctttaaagaattgacattgtttgctccctagttctgttactggtatctttttcgtttttctttatcattttgagtttttctttatgaaagaaactgaacttttgttattgaagtaagtgaactttagttataattgatatgatttaagacttggattcatgaatgatttgcaatgaaaaggctttgatgttcatatataatgtttggatggtaatgattaggatccaaatgttcttgcagcattcccttcaatcctccattttcatagctcactctaatctgttagaaacttagatttgaggttttgttgataggaacccaagttctattggtctcaaccagtggcccaatacagagaagcctattaaggtgtgcacccgaaggcccaaacacccagacattaactctcgccttaggcaagaagtggaatgggagggaaaagttagttgcgggagagagaagatagtaaaatctattatataggggaataatggaatattggggataggggcttttatttgaattgtaaatggagctcagagtttctcttgcttgggagcttagccctttcttcttgtattgcctattttcattgcataatatactgaactcaataggaatatcattggtgctattagttgtcttgctttttgtacaaatttccacatatgatagtcatattctcatatcataggtttagttgtactttttccttgcttctaaacattgaccagatcattgcattttccaga

SEQ ID NO: 18301 - DNA, 832 bp, Glycine max
  Intron number 1 from transcript Glyma07g18980.1 (locus Gly ma07g18980) derived from phytozome v7.0 (chr-ID Gm07; pos 18909058 to 18909889 reverse strand)
ccaggttttattctatccctattatctttcctatgcttgaaagaattagaagtttgattatgtatggttgtgctaaaataagatttagataaaagtttattgaattgatgccatgcaaagcattacatgtttcagcaattaacatcattgaatgttctgtcactgacaaaacttgttctgatatgaattcggttcaagggcctgagagaaaattgagggtagacaagcttgttgattatgagctctggtgataaaaaaaatgagttatgcttttttgagaaataaacaataatcaaacatttaaatagtatagtatcctcctagccgctagaactttggcttagttgtacatagtacatactgttcatttgctctaaattattctatttatgggatctattaatatgctttttatatgtgcctttttcctatgattttctggtcaccttaatagttcaatggaggaaaagatgtgtaacattaaccatggctttcaatttttattaggtacatgttttggtcaatgaccattactaatatagtcaaaacccatactaatttctaacaatttttcaactataatttccccacctgatgagttatgttatacatgcaaaacatgacagtagagaatatttgaaaaagagaaatcacatttctaaagggtctataatttttttacaacaatgagagataaaaagagaaaaaaaaaaaaaagaagactggcataatgttgtaaaatatgtctgaataataaaattccttgaaagaaatacgaatatttgatgattatcttcgaaatgaaagttgtatttcaatataaatttgcaga

SEQ ID NO: 18302 - DNA, 1012 bp, Glycine max
  Intron number 1 from transcript Glyma10g37530.1 (locus Gly ma10g37530) derived from phytozome v7.0 (chr-ID Gm10; pos 45502212 to 45503223 reverse strand)
ttctcgactttggtgctgttattcttgcatctcaggtatatatacacccccccttctttcagtaatgaaattttcagagtatttgctgctcttagtccatgtagccgatcccacctagtgggataaggcgttgttgttgttgctcttagtcatgtgcattttaaaattctctctttttatttaggtgcatttactcccatacaagggcaatttaaaccaaaaagcgaatattttttaatgagataattatataataggtttttatttttttgtgaatttgtactttttgttaacatatgatgtcttcttggtttataaaaactaagaatattttttaatgagataattatataataggttttttttttttgtgaatttgtactttttgttaacatatgatgtcttcttggtttataaaaactaagaacaaatcatttttttttattgatggcttaaaatttgagttttaattattttactgttgagtaaaccctaaatccccacagtcctcaacaggtttctttctcaattatcttgaataatcttttttatcttcatttatttatttgattttaattatgtatcttttataatctatcttcttttatttattttcctaaaattaatttcaatagttttttttcaaagaaattagcaatagttaaaaataattttatattataatttaaattattaattattaaattaaaatataatttatatatttaaaaatatttattataaattttaattataatataatttacataataaattttttttatcatatgcacaacatttactattatgattttcttctatacttttttcttatcaattcgtaattctttttttttatttttatttccatcctccctgcttcttttatcctcattttacttccaacaaagacacacaaaatatagtgtttagttcagctgcaattgacaacacacttgatatttgtttttgatactgtagtttatcttcttttttgttgttgttgaacagg

SEQ ID NO: 18303 - DNA, 385 bp, Glycine max
  Intron number 3 from transcript Glyma10g00490.1 (locus Gly ma10g00490) derived from phytozome v7.0 (chr-ID Gm10; pos 253874 to 254258)
aagaagacgtgagttattttattttattttccaaatttatttttaatttttagctctttttttgctccttatatgttgtgtgttaatcttttttctgtatttatttatgatgttattatatagcttagtttatgggtgctgaactgctgatgcagagggcatccttttttcattgttgatattttgcatttgttttgatgtcaaaaagtatttgtgattttttggttgatttcttgaatctggatagtttttttaatgatgtgtttgtttaaattattggtaatcagctagtagcttttcttctctatagatttgtattatctatgcgatatgaaatttgagatagttacaagttataacactgttctgtgtcaacagtttggct

SEQ ID NO: 18304 - DNA, 572 bp, Glycine max
  Intron number 2 from transcript Glyma13g01500.1 (locus Gly ma13g01500) derived from phytozome v7.0 (chr-ID Gm13; pos 1210545 to 1211116 reverse strand)
gcttgtaaacaattcatttattcttatttgtttaatagatatggttcctttaattcactggcacgagacgagattattctagcttaactagttatcttgagttcaagtgttggatattcctttgtgttaaagtatttggaagaagagttttgtggcatgtagcaatcctacctgagtcgaataggatcctatcccgtggaggatattattggtttctgccacaaaaattaattctaatttgaatttaataagaatgttctataaatgtacttggaagaagagttttatcgcatgtagcaatcctaccttactcgaataggatagtatcctgtggaggatattattggtttctgccacaaaaattaattctaatttgaatttaataagaatgtcctataaatgtatgtgttttatatgattatattgtagtgtgataaaaattgttaaattttataataattacttgaaaagcaatacctaagtgattttttaattggttgaatatgttaaaatctttacattaactgcatatagaaattaacctattttaatttttgttctgtgtttgttag

SEQ ID NO: 18305 - DNA, 716 bp, Glycine max
  Intron number 1 from transcript Glyma12g05960.1 (locus Gly ma12g05960) derived from phytozome v7.0 (chr-ID Gm12; pos 4032420 to 4033135)
ttgatttatgtacgtagttaaagttatttaaagtagaatcagttatatgatcattcaacttttcactttgatcaattaattgagcgagttgtcttaaatctcataatatatatttttgactcatgataaaaaataaaatagttcatccttgtacacacttaaaaactatgaactcttcatttattctcaatctattctactacacttgaaaaccttttactaaactatactaagagtgggtcacactcataattcaatgttgttaactattatcagtaggacaattgtttaaaaatttaaagtgaagattttattgaagtgtaacgttcaatattacaattacatatttagtatgctttccaataattttgatttatttattattttcttaaccattgttcttagggtaaaagatagcaaatttgcttttaatttagtggatttcgtgatttcataatgttgaataaattttaactcccaattaacgcccatttctcacaagaaaaaaacgttatattcaaagcagtccaagaaacagtgttcttaaccggcatatccttaaatactctacaagcctccaatctatatgccttagtgtaaggttatggaatgggtagacatgggttcgttcaaaaactggtgggcgagctttgtttcctcgattcttcacccttcgccaagttattggactcttgcgttcggtcgaagtctggaat

SEQ ID NO: 18306 - DNA, 746 bp, Glycine max
  Intron number 1 from transcript Glyma12g01590.3 (locus Gly ma12g01590) derived from phytozome v7.0 (chr-ID Gm12; pos 950920 to 951665)
cataagccattacttagctccactttgcttgtggggtaggatttctcctttttctcttttttcctgtgcagaggcaatttttcttcattgcacttttcaactctgtgtccttgttttttaatttctggggtgcgtttttttttggtgtttggaaatccattcattccatgttggagtaaccgttgagaggataatagttgggttgtttgtctcgacttttttgttttccgaggtggcttaaattttatgaagaaaatctttgctgtagattttcttaggattttatttcagattcactttggatgttgtcgatactctatattgcaccccccttcccactgttattaatttatcactcattttaaaaaaatattttgttgagtcaaatcaaatggaactctatttttccgaccttacttcttgcttttgacgattatgctttgtggagaacataagaaaaaatatatggtttctcttaaaatttttttacctggaattaagaaaaatatcgtctctataaactgttttgagatcgtgggggattgggacctttctattttgtatgggatatagattattttatgtgttacttgataaagtttttgtgattcatatcaatttcttactgtgcaatcggtgccaaatctattgttcggtgaagaaacggtagcatagtcagtcttgcttatttattcatttcattttttgcagttatattctatataaggggaagctcaagttcttcc

SEQ ID NO: 18307 - DNA, 816 bp, Glycine max
  Intron number 2 from transcript Glyma07g31470.1 (locus Gly ma07g31470) derived from phytozome v7.0 (chr-ID Gm07; pos 36482423 to 36483238)
tcattatcaaggtcactcacaaacctctttctatatctccaacaaccaccactccactgctaatattacggaaaccatagtaatagtaatacataatataccgtaggaaataaaagcattcatagcaacgttgaaagtaaatgatatctttgtttttataacacttgctgatgtgtttagcttcttgttcgtgactctactctgacaactctctttttttagctgagatcattgaaatgagctccctaaagataactgcactaaaatctatgaatcattgatatatcactgcgggaagactttatgaaacatgtcttctgttaaaagtaccactttggattcttaaatcttaattatattggatccgttttgatcaacacttgagacttgtttgatttttcttttacctttatgtgtttggattggaatcaccatttctactaacagatggcaccctcctgtggaatgttttcagagaaccttcaatgaggtcacgtgagaaatttcctttggttattgtttgggattgataagcatgtatatgagagattgacttgcagcagagtttttgtgttaatttgtagatagcatatctatgtttttttttttcagtcattagtgttggataaatagatataagtagaagattcttttacaaagtgtcttaagtgaattttagcacatgaaatgtaaatatattcataatagtcggagtactgaatttgttttattcctttgacaatttaatttactcaactattcaaaactttgtaaccaacaggctgaaattcaaacagagagactgagaatacttct

SEQ ID NO: 18308 - DNA, 521 bp, Glycine max
  Intron number 2 from transcript Glyma08g19150.3 (locus Gly ma08g19150) derived from phytozome v7.0 (chr-ID Gm08; pos 14455656 to 14456176)
tacagttaatttgaagtgtacagtacttgttagtaaatttgaaacctatatttgtgtaactttccttctactctttgcctgcatcagctccacttttttccatatttgcatagcctggttcttaaaatacccccatgttaactgatcaggcctgagttaagcttccttgagtttcagtttgaatcttggatgacatggttcatattttgtaaggtgatttttttatcgtatggttattccaaaactcttcttgcagggtaaagtcctttttataaataatggaaaaactattgggatgtatggttgtttcttgtttcctttttcctgctaataccagcagagtggtagggcttgtatttgtatgagctttaataaaattatgagtctgatgcttgctatttctctctttgtcaggtttgacaccatatgtttatcagtttgttacactatgtgatgccaggttattcaagttatattcttattatgtgcctttgtgctacagcttgaagataacgtgtgag

SEQ ID NO: 18309 - DNA, 753 bp, Glycine max
  Intron number 1 from transcript Glyma13g41450.1 (locus Gly ma13g41450) derived from phytozome v7.0 (chr-ID Gm13; pos 41733884 to 41734636)
gttaattgagatttgagattcaacgctctaacattgtacgtttctctttctcacactttagatttcctttttggttctgtcagttgtatgtataataaaggattttgctttctggccattttatatatatacatatacatacttgagagcgctcattatattagaaatttgggaaaatttgtgttttgattggtggaatctcgccttcaagcgagaagcatgagagatacagagaataagtgttaggtgaaatggtgaattactgctatgactcgtttgcttctcaatcattttgttccaactgctatctttggaggctattaagaaattctatgtttagttgttctatgttctctttttagcctaagttgtaaaaataagctttactcagcgtttggttgatccagtttcatacacgtttaattcccaacttagttgtattttagcgtacaaggatcacctgtgtgttcttttggaatttaacgtttaattattctgtggaagatgatactttgattacaacatcaataacctcatcgcatcccatatccctaagcaataattagttagacaacataattaagaagataaatagataatatgtttgatattacacacacacagttgtttactaacttactactgctaacttaaaaccaataattttttttttctatcaaacttcaatcatatatttgagtgaatcataaggcatggcattttctaatttttttaggggactttcagggtaca

SEQ ID NO: 18310 - DNA, 794 bp, Glycine max
  Intron number 1 from transcript Glyma10g28890.1 (locus Gly ma10g28890) derived from phytozome v7.0 (chr-ID Gm10; pos 37786424 to 37787217)
tcttcttcgaagagcgtttcggtataaaatccttccttcgtttcttctcttctctcactagatcgcgcccctgaattttcgtcattttcattctgcattgttgtgtgccgaattaggcattacttttccaggatcaaggtttttctttcgtgtctgagcctcgatctgaaaagcttcgatggttcgatttgtgttttgagttggaaatcgaggtctggcttcaaatgtcatgcttctgactagatctgttaacgcgtgtaccgttttgttattttttttctatgtgttgattgtgctggcgtggtttataatggtttatgcattagcctcaataaccgttctcaaaatagattgtatagatgaggcgagcatgggaggctctagtttttttgttttgccgcaattttaggttaaattcagcttttgataatggataattgagtaggcggcagttacagtcactcagaaatgtttgaattagtgattagtgatagtagtttttttacttaaaagtaaggagtctgtttcatgtctgaaaaggtgaacattcttcttaaacacgccgatggtactggcgaactttttattaattttttgcattttcctttatcattcgatggtacattgtctataagattaatagcttttttttaaaatttatttgtccttgcgcctcaacgggtagtcctttttcggagttcatttgtattttctttaatcctagatcagtatttcccacttttctaactcgtgtgcatgtgctttgtgtggatgccagacgggtgggaaaatcg

SEQ ID NO: 18311 - DNA, 860 bp, Glycine max
  Intron number 1 from transcript Glyma13g17490.1 (locus Gly ma13g17490) derived from phytozome v7.0 (chr-ID Gm13; pos 21267675 to 21268534 reverse strand)
agactcgatcggtaatgcccttttattcttctttccactgtttcgaaactgttgttgtagtttgcagtctgctaggggatctctttgattttgtcatgtgatttgatctttctgtgttgtagaaattataaaatatttgtggataattttaaccttcactgtagatcaatagtattatcgatgcacttgtttcttgttcatattcatatatggtgttgtatgtatgtatataatgttttagtgcatttattatcctagttgtgcaccattgtctcaaagctgcctacttgactttttttttttgaatgtttttagaaaagacttgaccagctggtcatccagtgtgttggattcttgcacgatgattagacttcaatgtgtgttttgaacttccttgctttcattgttttatgatataaaaattagtttgggcaaactagaaagaactacttagcttggttgcctcattccatgttttggtgaagttcttatcctgttcctagtttaatattcttatgtatggtttttgcctttctgaaatgcttcagaatgaaatctttatgccttttcgtttgatcatttatgtggatgcttcataattccttcttatcttaaattgggatatgttatttatctagctttgaaagtgggttgtctcttgcttctcatcatgctttagatccttggatgtatgtattatcatccctggtaatctaatatgcatactaagcttgggacatcccattcgagaaatttaatttgcaaaattgaatgttattggagttgcagtgtttatcatgcttgtcttgtacttaaaaatatttaacttctgcattttttttattccacagaacttttac

SEQ ID NO: 18312 - DNA, 380 bp, Glycine max
  Intron number 2 from transcript Glyma13g41900.2 (locus Gly ma13g41900) derived from phytozome v7.0 (chr-ID Gm13; pos 42076061 to 42076440 reverse strand)
cttctaagaatccattgagaattccaaaggtaatattgttcttaataatctgccctttttttgtcacttctaagccagttgtttcattcaaccattaggctcatttaatattttgaatgatgctacactaaagaaaatcagtgctatttaatactttaaataaaggaactggtactgaatgtatttagtgacctccccatgtgctgaaatgttttcagcatttcttcacctaaaatcatatttggattttattaaatttaaacaaacatcattaagtcactttaagtactgaatcttttgattttgagtattgatttgtgatatctgacctgtatcctaaatttattgtcttgacagattactgacaacttggagcaaag

SEQ ID NO: 18313 - DNA, 1010 bp, Glycine max
  Intron number 1 from transcript Glyma10g38570.1 (locus Gly ma10g38570) derived from phytozome v7.0 (chr-ID Gm10; pos 46353801 to 46354810 reverse strand)
gcccactttacctcctcaggtttcctccctctctctctctctctttcgctgcccgcattttcttttctggggtgttccattttacgttgtacattacttgttcggttgaggggtttgtttattatgtgcgttgaaactgtgtttattgagctaaagattgcatctttgagatttttgtggtgttgggttcttgcttttattggatttcttttgctgaatcagattggagattatttttgttttgtctttatgttaatcgctcttgtcgtcataagtcatattaggcatttctgcagtgtgctatacggtggttgatgtgaagatctgattgcttgggtgattatttagtttttatttataagtcttttttttcttctttttttgtgtctaggatctgtgtctgatttaaaccgagcatatttgttgacactgaattggggagcagaactcattgaaaaattgaggccattttcttggctaattcggttcaaggtcatggaagagctttttaacctcaactagtttcaaatttgtaactaaacgaatttttattttattttttacatatatttatactaggtaataccaaaatataaattcaagtaattacaaatattaaatcaaagcactgctattattattcttaacaaatttaccatgcactgagctaactcttaggctattgaattgaatgtgtgaaacaagatgccttggctcattgccaattctttgaaggttattatcggtatatattcaagtaatatttacctatacttttatctttatggatcttgtacagagagctcacagcagaagatggaatatcaatttagccaatttggatgtcatgatacacatgtgaaatgattcttctatccacatacaaatacactaatagaagtcatcctatgtccaattttatttatttatttttacttagttcatgctggtaacctagctactccattggtgcaggtaaatcagacaatctcaccaaagaagactgtatt

SEQ ID NO: 18314 - DNA, 443 bp, Glycine max
  Intron number 1 from transcript Glyma10g37510.1 (locus Gly ma10g37510) derived from phytozome v7.0 (chr-ID Gm10; pos 45480045 to 45480487 reverse strand)
aaggtcagtacgtcttccaatttgagactcttaattaattcttcttacatatatatatatatatatatatatatatatatatatatatattatattaatacttccaaaagtgagtgttgttaaaagaactagtaccatccatggatagatgtaagctcgagatagcttgcagggaaagcaagagagaaaatgaggaagatgaagttttgattagcataaaataaatcagcttacatgggtttttgttattacaactggttatatagttagttacaagaataaccaactcacaactaactaagctaactctagttacacacaaaggttgatcaagttgagttaatcatgatcaagcctctatctattatgctaagagttgttgagtagtactaacaagtgtttgatttttccttaacagaaagttgtgttgaaggtggaaatac

SEQ ID NO: 18315 - DNA, 275 bp, Glycine max
  Intron number 1 from transcript Glyma14g02000.1 (locus Gly ma14g02000) derived from phytozome v7.0 (chr-ID Gm14; pos 1177273 to 1177547)
acatgtcagttttttctttttatgttatttgtttaattttgagtttatttttgtttgatttttctttgataattttcatctgaagacttcaatggggttgttttgttattgttgttgcttgtttcctttttctcccacaaaatttagtggcatgctgaatttggtttgatatgattagattttgccgagtatctgattggtcttacatgtgatagatgccgagtgttaaccctgacaaagattccgagccatttgttgagaccgatccaaccggt

SEQ ID NO: 18316 - DNA, 648 bp, Glycine max
  Intron number 2 from transcript Glyma14g02000.1 (locus Gly ma14g02000) derived from phytozome v7.0 (chr-ID Gm14; pos 1177969 to 1178616)
ggaatactggccaggtgaaccattttgttcaaatcttatttttctttcagttatatcacatatgtttgattgattatcaaggtgaaagtagactgcaaaaaatgcaagaaaaagttggattttttttttctttttctaaactttcctttgattcgatgccttctgtgtgagatctacgtaattaacttgagcaagtcatggatgatgtctcctgtttgcttgacaaaaacaatcaattacattatttttagaatattaatttggtgcttactttttttccttgctctgtttttgcctataaatttctactatgaaaaaatgagaggtgaaataagtgatgcattataactatagtagggcaagaagatgtgatagcataagaaacaacacgaataatggaaaattgaaagtaaaaaaccataacagtcttagatattttgattttaaactatttttggaaactattcttatcaaacattttttttggtttagaaactcaaacttgtttgcctttggcaactattacaaccaaggctaatcttagttatgctgttatatacgtaattacaataaaggtgttgttagtgattgtatcttttttcatggttatcaggttaagattggtgacttgggtttggcaacaattgt

SEQ ID NO: 18317 - DNA, 545 bp, Glycine max
  Intron number 1 from transcript Glyma09g27450.1 (locus Gly ma09g27450) derived from phytozome v7.0 (chr-ID Gm09; pos 34258579 to 34259123 reverse strand)
agccgtggcaagctttttcagtacagcagcactgagtaatttttctttccttctccccctctcatctttcttttgctttgttgatttattttgcccacatggttgggactggggatgatgcaaagtctatatgaattaagattttatatagatgtactaaagtttaatttataaattaaactgttccaacttagttgattgaaaatgaaaaagatgtgtgtattattatgaattatctgatatatgtttttaattcctactgataaagtataattaataaagtttcagaatattctaattacttaattgttaatttttggagttgaattaaacttgattaaaatttaaaagtatatgaaaataattaatatttttctattaagaaatatatttggggtgcagcttaatttccggtcatgctgatcttgtttgtttttattttctaccaaatttttattcaaaaatcaattacacaactaaattaggaaattggagagtgaagacaaaagaatattatgcagttttggttattatatatagtgaac

SEQ ID NO: 18318 - DNA, 595 bp, Glycine max
  Intron number 4 from transcript Glyma13g29460.1 (locus Gly ma13g29460) derived from phytozome v7.0 (chr-ID Gm13; pos 32352011 to 32352605)
agtctggccaaaaggcacttgctcttgttaggactgtatgtttgcctacccattgatatccttttcattcagaatcttaggtttggggtattactggattctccacattcatcagcactgccatgatctgatattttatcatcctgtgtattcaaaattagactttgtccgccagttacgggttagtttggattagttagattcagttatttttttagtatctttaactgtaacttactttttagatatagcatactgttattatcggtttatagattgagcacattcatttcactccaatacaaagagtgatttatctcctttttcttatttttcttctggtttctggagttttctcaactttccctcaattcctctaccgattcttgatttcttataagttatcagattatggaggtgcagatgaatgtggagaagctggtaatacaggatatgaaaaggaccatttattaaatactatgaattgattatagaaaaagtaccaagaaaataatttaatgaacaaggggagggttcttttaattttgatcttgtgcattgtgaaacttgaaatgacaggtttataaactcccta

SEQ ID NO: 18319 - DNA, 844 bp, Glycine max
  Intron number 3 from transcript Glyma05g37910.2 (locus Gly ma05g37910) derived from phytozome v7.0 (chr-ID Gm05; pos 41399256 to 41400099)
gaagcttcaatctctccgagaggtaattgattactcataagtgataagggtcgtgtcttttatgattatcaatggagaggaaagtaaagttcttatgctaatgtagttgacgtcgatggggatggaatatcaaagatttgtttagtcctgtaacttatcttcaatttatttgtcctacttatatttaagtcatgtgcatctaaatcgtgattgttgcccgtgggcagaccaaactgtcacacacacacacatatatatatatatatatatattaaagctatttaactgtttgcttactcaatccactatttggtgattgtgtgcctccatagaaaggggattttttttttcctggtgtttatctgatttactaacaatttatagttgcttatgaaattaatttcattttatttgaaaacaatctcatagtctaatgattggatggtttatacatgatgtagagtggtattagaaatggtcagcgtgaatgtcttttttatgctttattctgggttatgtgcatcatccttaggaaagtaaatgaaccatgttgtgcaatcaattttccagtggattaatgaatctatccttctttttaatgcttatgtaaatcgtgtagaatcattatatgatgtatttgattttaaatcacattttctttcgttgttacctgtacttttttaatctctgtaatacttttttagtttctgtaaatcctgtaatgtgtaaaatttgaatttcttgttaggaatttttttaatgattgattttatcatatgttcttaataaatctcgttttcttttggcagccacgcaatccttgtctatcttgcttctgctttcc

SEQ ID NO: 18320 - DNA, 691 bp, Glycine max
  Intron number 1 from transcript Glyma13g42170.1 (locus Gly ma13g42170) derived from phytozome v7.0 (chr-ID Gm13; pos 42251168 to 42251858)
gagcctaagacacaaccccaaggtttcttcacattattttcattttcctcattcaattcgctatgccacagaatagattataacacatatttttcaccgctattttttttttcctttagggattgcgtttcgttgctctttaacacatcaaaaccctaaaatcctaggcattccatataattaacaatcgatttctcctgctcgttccgttgatctatatctgtttgtcatcaacatcgttcatgtattatatatctgtttcttttttctgtctaccctccttttttatatatgaattgatgcatgtataatctgaatattctgaaaacgagtttggtttctggtggaatcttgcttgaattatattctaatttattttctgaacttgttagttttgattttttttttttttttttgtatttttaattgtctgaaacagcctaacttcacctgtgcacatactttcaacgaagttcttctattcggtgtgaaattgtgaactttagtctcttatttatttattttacttgatactgataaatcatggccttccaagccatagcttgaagtatatgacacaagaatctgcataagttaatctttaatatctgaaaatttactaatgttttagctgtgcgcataaatttgtgttacagcgaatagtcctccaccaaaaccttgggaacaagca

SEQ ID NO: 18321 - DNA, 756 bp, Glycine max
  Intron number 1 from transcript Glyma06g17160.1 (locus Gly ma06g17160) derived from phytozome v7.0 (chr-ID Gm06; pos 13472130 to 13472885)
gagcctttgttgaaagccgagatccctcttccaaggtacccacatacatcattgtatcctacccaaaagagctaaagttgtcaaggtttttttttttttttacaactaaattaactgtcatcactttcttccctttttctctttttaaaagttttgttgcattttggtgtcaacggttgatcaacatagtctccgacagatatcttgtgaactatgaagtacggacaccccagttttttgtcgtgttcgatgttcgacacgtgtccatgtcaatgtccgacaccaacacgacactcgtattacgttttatattttgaacatgagagatgtccacggtcgtgtccagtgtccgtgtcaataatggtgttttatagcttgtgaatcatatggataaaactgttttttttttaccatattattagtattcctcaatgattaatttttaccagttaatctgcctcacaattcgtgactttgtttaagagatttgagccgaattagactcagaccaatcataatattggtatatggataaaactattgtgaccatgatgtttcttctcttgggataagcacaatggaacacccaacagcaaaagttgaattctttttttttttttttcaaaaactgacactgttgtgacttgtgattattataatgcaaaattaatgatgcccaattggttggtttcaccacatcaccgattagttgggaattttaatttgattgtgccttggtgggtgagcaggaagtag

SEQ ID NO: 18322 - DNA, 912 bp, Glycine max
  Intron number 1 from transcript Glyma08g43500.1 (locus Gly ma08g43500) derived from phytozome v7.0 (chr-ID Gm08; pos 43309235 to 43310146)
attggttgcggattgcacgtgagtttttcctttcccattactcaatatttttttaatgtgttatttttattatttatgaacaatgcgagattgtgtgataatttggtgggtttgtttgtttgattttatgggatatgtttcttttttgggtaaattgtgtattaggtttctcaatttagtaaaaaatggttttagtacctacattttttgtctttgtatttttttttttaaatgtgatggacttcgtcaggtcaaaatgaagtataggccatcgggtccgatgaaattcaccaaatttcagaaatatgagaaccacagcttttaaaatgagtttaatggtcatacacaaacagtttacactgtcacccaatcttaaatcactgctgacatgacatttaaaaggagggtacatgctaggattctctgtagtagatgcaccacaggtgtaatcctaggcttgggtccagctggtccctaatatgaacctctaggaaagtatttggtaccagctgtgtatatctctatcgtttgtattttcagtacccccggtactctgcatataatataattatctatttttgctgagaaaaaaaaaagttactgtacaagtcaataaatttatcttacatggagtttgtgattggatgatattatcaaattgttttacactgtgagtgcatatcctttttttctcttttataatatagactaaaaccaattttaaccaattttgagggatctaaaacacattttacccttttttttcatttatcatagttacaaattggatttatgccagtataatggtgaagatgatgtacattttcataaatgctatagttaatttttgttaatgttgtattctgcttcactttttgtttttgtttttttataatcagggtgtagaatttt

SEQ ID NO: 18323 - DNA, 674 bp, Glycine max
  Intron number 1 from transcript Glyma10g01670.1 (locus Gly ma10g01670) derived from phytozome v7.0 (chr-ID Gm10; pos 1201777 to 1202450)
tctttacctttagattacagcaatttagtgggcaggtatttttgctttatatatgccttctgatttggttttgtactaattattactatatgcaaggttggagttttatgcataacttttcaatatttttatttttatgagggcacagtgttgttaaatttcattatacctcatgtcgatagactatcagcatttattatatctgagtggttgacagttgacagctaccctcaatcagatgggctatcaacacgcttgtcctttaagtgcaaataactgacttaacatttaaaaaagggtagctgtactccatctccatggtcaatgctaatatacttaaatatttattgttattaagcatttagtgatgattctttttaattatttggagtttagtgtaggaaatgccttttaaaaataaaaataaaaaagaaaataaactaatcatgggaatgtgtgattgactctggtagaggtatcttcatttaaagattacttgcaaatagaggatgcttcatattttattccaaatatttattgtaatctggttcgaaacacttttctcttaagttagtaataattgttattttgatattacatgtaaaggcttaattattgttcattttgtgtaactacaaggtatcctcacataactaaggatcatttggtaaagc

SEQ ID NO: 18324 - DNA, 755 bp, Glycine max
  Intron number 2 from transcript Glyma12g32280.1 (locus Gly ma12g32280) derived from phytozome v7.0 (chr-ID Gm12; pos 35786460 to 35787214 reverse strand)
gtccttcaaagcggtaatattatcacctatggccctgtaaagaatatatgaagtaaaagttgtagctccacaactgctttaagttttagtaactattattgattgggttcaaagttctatgatttggaatcttggcatggagcaaggacgtgtgagtcataaccaggataatttagaaatttgtacaatttgaaacctgtcctgtgacatgttttatgaattatgagattctacagcaaaagagcaccccaattatccaaactctgtcggctagaactttacatacagttttcaccatgttgtgaatatagaagaggaaattaatgctatgtatgtactatggtgaacgtgggtttgagtaaaaagaatcttatcgttcactttgaatttcaaaatgattctttcaattgcctttgtaaaccaattgttattacagattagtcaaaataaagaatatggacataaaaaaatgtttctcatatgttaattgatgttcataaaattagagattaagagtgtcttatgtttctttgttacttagctaacagcgatcaagtttaatctttagtcaactaataacaatgttaaaattatacttctctcctatgcttggtggcaaagttcaatcaagtgactgtaattttgacgtgattctgtttgcctacaattaacttgaaatttgtgattaattagcctttgtgtgtcttttttttttatttgtcacctttctctctcttcaggttaaggactgaatc

SEQ ID NO: 18325 - DNA, 800 bp, Glycine max
  Intron number 1 from transcript Glyma08g09710.1 (locus Gly ma08g09710) derived from phytozome v7.0 (chr-ID Gm08; pos 6900217 to 6901016)
gtgagttgagaaagcctcagttagattgtgaatttgtgagtgcatcaatcaatatccacacaaactacaatgcctgtatgtatctgtatctgtgtgcaacaaaattccacacattatcgaaccattcaaaccctagaataaaaaaaagtggtccctaagaccaaacccatgattcaattcatcttcttcttctaccatcttttaaccttacctggggccctcaacagcatgccctctaagtgggacccttttgttatatgacactcaccaagttgattttccatgtggtgggagattttagatatgaccccacaatgagtgagagaatgtgcaatagaaaaaaaaaaaaaaaagagaaaaagagaaaaagaaatgtagcattggagaaacggttggtaaccataccatacaaagggtccaggaagaaaaacacaaaagaaaaagctgaaatttgaattatgtctctttgggggcatgtcttttcctcaccccttgctttacatttaagagcagaagcacaatatgataacctttgcaattatttagtcccccacatatataaccaaggaaataaaataaaaattttaaaaaactaaagtgaacacaaacattttcagaatcccaagaaacttccacttttctcattagcctgcgctgactgactcatactactactcctattactattactactctttcttaaactcatccgatgcttgctttactgttttcttccacaacttgtacataaatagatccttctcatcattttttttgccaccaagtcacactattacaaa

SEQ ID NO: 18326 - DNA, 866 bp, Glycine max
  Intron number 1 from transcript Glyma09g31560.1 (locus Gly ma09g31560) derived from phytozome v7.0 (chr-ID Gm09; pos 38242900 to 38243765 reverse strand)
gcagcggcactctcggtggctataatctttctgtggtgaggtaagattctgacacccttttaagatttgagtcactctgcaacttcttaaccaaaatcaaaggaaaacggaacaaaagttctgatttttgggttctctgcaaaatttgttcatttgcgcaatgtctgccatgaaaattcgattgatgatcgtgctttgttttgttggggttatagggaatttgctctagaaaaaagggttttcttatttatttgtatttccttgaatgagattcagagacaaggtagcacctttagcattatctggcagtgataacaatactctatttatgtgtgctcgttaactattgggttaattgttaggcttaattgttatgtcacgcttaatgtaactattgggtgttgtaactatgtttttggcattgttttattcataaatgggtgttcatctttctctcattatgtattgatcaaatgggataagcatataattgtactttcaaactagtgtttgaattttaaaatcagtaaatgacactgataagaagaagtataagttgttgtcaccagggctgttgttatcttgacaatgctgaaaatattttgtttattcatactggatatgtcctgtaatctcggcagtttgttgatgaaaatgatgggagatgtaactaggaatttgacaacgtgatcaacttgtttcttcattattttagtatcggtgtggtatctgatatagtttcaattaatctatataaacttcatgatgggctggtgcttgttgtctgtttacatattgaactttcattttatgcaactttgaaaacagcattcacctaattccgttctttgtttacagttgtcaag

SEQ ID NO: 18327 - DNA, 1055 bp, Glycine max
  Intron number 3 from transcript Glyma13g01040.1 (locus Gly ma13g01040) derived from phytozome v7.0 (chr-ID Gm13; pos 772441 to 773495 reverse strand)
agtttagcctgtcaattccaaactccactggattggtaatgcataacccactatctgctattatcttttttttgtttttttttttaattattcgtattcagtttctcattgcagttgacgcttaatagatataaaatccctttacttgaatatgctatgatcttagtcacacatgcagtcactcacacatttatagtatatttcatatacttaacatataatttaaaaggtatgatgatagtgattgctgattatttatttatttttatatattctcttccttttgaccagccatgaaacagtaacatgattcttccgaaaatctgagggtaagtgcattgcattcagttattgcttattatgagaggataaaagttcatcacatccatttttcatcattctttgtttttcaactattgagtaaaaaaaggcagagagaaagaatgaatagatttaatataataattaatttattgatgacattaagttaataacatttcattccttaaaataatatttgaatctagttattcttactgttatagtcaaatatcatgggttgtgagataaagttaactgctggattcctatagaaatattatttttcataaggaatcatgttttatctatttaaggttattaacaaatatactaaactctggaagacatcatcaaaatctctaaataactaattatgtgtacttacaaatcatttgtgtcatctaaacttcccccctcccccatgtggaattgtacttccaaatacagtgctgttggagaggatgaatattgcttgctcctttcttgagcaagttgggcttataaagttagcagcacatatctttcatttcatgggttgtttacacatttttgtgagcgctaaagaggatgaaatactcaaggaaattggaaacttgcattaatttctgtatttcatcaaatagtctaaaatgactgcaaccttcagtccgtcctcctgtctattgctcctgatttgaaattctaatttccattttgcaggggcttatagcaaccggattgaagaaggatcaaat

SEQ ID NO: 18328 - DNA, 820 bp, Glycine max
  Intron number 1 from transcript Glyma07g38210.1 (locus Gly ma07g38210) derived from phytozome v7.0 (chr-ID Gm07; pos 43042592 to 43043411)
tttcgtttcctctccctcccttccttcttcccaaggtccgttcaactccatcgcctaacctttcacaatcccttttcggtttatgctttaccagttttacgctattttcttttgcatttactttttgcatgttcagtttgtttagtgcattgttctgacatgaagacgaaaactatgttttggtccatgcgcgttacttgatcgtaacggtagctttcagttttttattttttaaatcttttttacttgacaccttttgctttacttttcaattttttttccagttgtatttttctcgaaataattagggtttttgtctgttattttaatatgttctcgtttttgagttttagtgttactcattttcttgaatgtgttcgttgcatgttttcatttggtgatgatgctaaagtagattttaaagtgtcttcacttattggttgctttttgatgtagttgttgaattgaagcattttgatctctcgctttggtcttatgtacacctccattattgtacttatttctaatttttgtagatattctgcttgttttgtgtccgacaaaaattcacatacagcaagaggtgatcacgtacaatttgtatataggtttttgttgtgattgcactgctgttgttataatggattcaatgatccaaaccatctatacttgtgttgttatcatgtttagatatgtgtttggaatatcaatgattcctacattcttttaagacttgaagtgaatgatttaggatctaattgttgcatgttattaaaaatatgcagggtgaatctgaaattgactgctgcatatagattgg

SEQ ID NO: 18329 - DNA, 449 bp, Glycine max
  Intron number 1 from transcript Glyma07g03180.1 (locus Gly ma07g03180) derived from phytozome v7.0 (chr-ID Gm07; pos 2235301 to 2235749)
tggtagctttgaaggttagagtttctccctttcatgtctccgaatctctggcttttttcaatttttattttattttgtaataaaaaatttatgctctttttttagggtgaaactttaggttcatgcatcttagattagagttgctttgtcgatcgtgtgggatgttagatagagtcaaatcgttttcgtttggccaccgaaaccgcatcgttttttttctttcttttctttcttcttaggttaattttggaaatacggaggagggttttcttccataaataaatgcttctggttagatgatttcattgacggtgcggatttcgattattagtatttttatttttatttttttgtggctgaccctagctgattttttatttttatttattttctgttttttttttgtttttgcagatctagttcactgttgctcattttagtgtgtatct

SEQ ID NO: 18330 - DNA, 523 bp, Glycine max
  Intron number 5 from transcript Glyma07g03180.1 (locus Gly ma07g03180) derived from phytozome v7.0 (chr-ID Gm07; pos 2236586 to 2237108)
aaaaactcaaggttacggactctcatcaatcaaaggtaatgtccaagcatacttatttctcgatatttgtgctttgaatatgaaataactttctgctactcaaattcaatcatttagtatctttatttacaattgatagagatcatctgccatatttggatttctgtgtttcttggtttatgaatgcaatgttactgttgttaaatcattcagaatttccatttatacgtaacaattttttttaaccaatagtaggatgggataacattagtttcatcaatctgtatctgtaattttgtatccagtgcaatgtgctgcaatatttgactgtgcattatctgcttttgtgcgtctttgctgttaaattatatatcattgttatgccagttgtggtgctaggttttgcattgaagatactcttctgtcaatttgattaaattatattctattaacaaagaatacttttattttctttaaaaaaattacagcctgaattggcagcatcaactttgcaagaatccac

SEQ ID NO: 18331 - DNA, 800 bp, Glycine max
  Intron number 2 from transcript Glyma07g07790.1 (locus Gly ma07g07790) derived from phytozome v7.0 (chr-ID Gm07; pos 6469947 to 6470746 reverse strand)
tgttgggctcaagctacttccttgtcaactgctaggtaagtatccttatttctattcatttgggaagccaagtcattaagtgtgggaggaaattagagaaactgaattggtaatatcaatctgctaggattttcattggtagagttgttacaattacttgaacttttgagaattaacaaacaaagccacaaacttagtattatacttggaaagaaaatgttttatatgtatatgacatccaaataattccttgtcatgactagtgacttctatttgtcttttttttttttttttgtgaaatatggtttagtccccaaacttcaactttgatcaatttaatcatgaactttacaaaaggaatggttatcgtccatttttacagtgaaaatcgtctgtgaggagggacaaaaaccactgtttttctaaagttcaagaatcaaattgatcaaagttaaagaacaaggattattaccaatttttactagaagtacagggactaaaaacatatttgactctccttttttaatgaataagaatgggaagtaggaataaggaggaaggaaactgatggctgtatcaagaactaatttgggatcatgctttcataatatggtcaaagaaagatctactatatattttggttgtcaattatagctgtctatattttgctattaaaagttcaaataccatgttgtcctcgtcagtcctaattttaacccctactgcaattcagagatcactgttttcttctactaaaattttcaggtacaactttggttgtgaagttttggataaaaaac

SEQ ID NO: 18332 - DNA, 970 bp, Glycine max
  Intron number 1 from transcript Glyma09g33170.1 (locus Gly ma09g33170) derived from phytozome v7.0 (chr-ID Gm09; pos 39685358 to 39686327 reverse strand)
gggtggaagctttgagagagtcagaggtaactaacccattctccaaattttccaaatttctaatcttttatgtgcatatcttagttttcccagctcagctttatctgaatttcacagtctaatcgctgttttgtttgtttaatcctgccctctcccaaatcccaattattctgatgtaagtagcaaattctggttctttttatgaaggggtcatcaagttttttttttttttttcatttggagggggggagggggttaattttagtgttttgccgttttggtgatgaaactgagttcagggctgacttaaaattttaaggtgtaagggttttaatgctaaattagtacatatttggtttcatgtttggttatccagaatcacgttgaaatatcaattacaataattttagccaaatgttcaccgtttgatttcttgttgaggaattgattttgacttgaagtaattttaggtactttttttgaccaacttgcttttagaattaaaacagctaaacataaattatatcacttcaaagttaattttaaccaaaatcaattttgtcaatgcttacccaaacgtttggaagggaagatggaaataatactggagaggatttttgtactttttaagtgggattcacacctttcaccctctactttaattaaaaaatttatcttctattttcatcctctaaatcaaacacaccataagagatggtggtgcaaggatagtggatttagttggcccaaaacttgtacacctaaacctccctagatgctagagataattagagatgttggtctcttattctatgttttgtgatgcctgctatcaaaattctagagctttactggaatttcggctcagaaatatgtacatatttggtatccttaaccttttgatggtcatataatcaatatcagtttaactgcaggtaactgagttgagagattatcaaagtccgtcagc

SEQ ID NO: 18333 - DNA, 686 bp, Glycine max
  Intron number 1 from transcript Glyma14g01060.2 (locus Gly ma14g01060) derived from phytozome v7.0 (chr-ID Gm14; pos 581349 to 582034 reverse strand)
atcctttgctgcaacttttaggtctcaattttaaggtcaactttctgtgccgggtcgttcaacttgcatctttatcatttgatctattgtttgagttgacgagtgaacttgtgtgacatcatagtttctgtgagagattgcatatctctcaagcttctttatttgataagaagcttgttgcataatagaatcaagagtgaaatcactggtattaaactttctaatttttcttctttcccgttatcactgatggattttcctgtgattattgtgtagattatgataatatgttttttcgaatgtattttgttttttggcatcagtttgtggaaaaattagggcctgattgcatactaaatagtttgataattattctctccagtctctagtctctagtacttgctttgtcttttgtaatgtttctgtgttttggaggtttatgtggagtgggggcagaggatgaaaggctgtaagcctgcaacttttagcagattatgaattttctcaagttcctcgctcatttgtaacattttagtatttaactatttgtagcataacaaagaatatgtgataatcatgtgcagtggtatataatcacctttgctagttacagacaaagtaaatattttttgggtaggtcaccaggctctaacataaaacagaagcctttgtgaaaaaaaaaaaga

SEQ ID NO: 18334 - DNA, 643 bp, Glycine max
  Intron number 2 from transcript Glyma10g17560.1 (locus Gly ma10g17560) derived from phytozome v7.0 (chr-ID Gm10; pos 21213948 to 21214590 reverse strand)
ccaccgtcaccagaaccattgtcgaagtcgtgcaggttcgctaccatatcttttcgcttgtgttttaaaaaattactgcgtcttcttctcttcgctttaattctatgttaatgtgaaggatgcacccattttaaaatggagtggcatttttgatatgtaattgtgtatgtgctaatatgaagtgaagaacgttttttggggaagacaagtatctttaatggagtgacaagcgtttaataagttcagagcatttggacaagatggtttaaaattgcatgtgcatatgaaaatttgaaaactactacgttttcatgtcttgtgttctgttttgtttcttttttaattgttgtagtttgccattttgtctggatggttcagcatgagtgtgggatatatatttaaaatggcatttactttgatttctgttgaagaagaactgtttttgtgtatctcactcatcaaacctgcaaataagttatatattgggcgaggtataatttgtttcttggttagtatgtcctatgaagattctttgctctttactacactatgtgcttggagtgtttatctccttttttctttgtgttggttattctaaatttgatgttaaatcgtgattattttgtattctgttgttgtttag

SEQ ID NO: 18335 - DNA, 995 bp, Glycine max
  Intron number 1 from transcript Glyma08g47070.1 (locus Gly ma08g47070) derived from phytozome v7.0 (chr-ID Gm08; pos 45997433 to 45998427 reverse strand)
ctcaggtatatatgcttaattacccttttcaatttggtttcacttttctgttcatttggtatctgaaataccgttttgttcctatacacaagtgaaattatctatagccaaataattggtaactgcaccatatttattcctcttaattttatgttagattttgaggtttgttgttccagaattctataattcacaatatttggagtaattgaaagtgtatgctgccgttcttatagtactttttggggttctgagacagattttggtaccgaaatagaaaaacttttattggtttactgaaaaaagtgttctttcggaattgacctatatgtatggcatcattctaaaacaagtggtgctctgtttgtttctcaagaacatattctgaagcatggatacgtaatgaactactgtatattgttgactttaaacatttcccactttacttcatctatatagtaaagtactttaactcctacattccttttccaacacttgtttcagatctggtgcttctgtaagattcataaaattgaatcttacaaattcaatggattatattttccctttttaatttttcaagttattcatatgatataaaatcccatctctctctctctttcttttctttttttttctggcctggtggttaagtttgaagtttagttctcaatacaataccgactgtgagcaagactctaatattatcgtgcattaatctttaaaacatgaatatcacttaataatgagaaacatatgtgataatgatcagagcatcatatctagctttcacttgagtgtgcaaacaccgacatatacaatacaactatgactagttagccaaaccaaatgacaataacagttgttgtattttcttcatataggatctttaatatatttgaaagaataattaatatagtttaatagtagtactaaatactattattattttcttggaagttggttgataaggacccagaagcagcaatagtgtt

SEQ ID NO: 18336 - DNA, 782 bp, Glycine max
  Intron number 2 from transcript Glyma13g19010.1 (locus Gly ma13g19010) derived from phytozome v7.0 (chr-ID Gm13; pos 22603422 to 22604203)
gcgaattcgaccaccaaatctggctcaattctaaggttattttacttctatgattattattgttgttgtttcctacattggcacatggcattcacattttcttatctcttttcttatagtgattacttaattaaagggctctctagttaggtgtgaaaattgtctgtttacgatttggatattcttgcaatgcagcaataggtgttatgctaaacaagttagtgaaatagaattataaattgtcaagagctcatgaaggctgtcatgcatgactgtcaaaaaatttcaagggctaatatcaactattatatattcttgataacttgaagctactgtaatgtttgtgcctgaagttttaatataaatttgtgtgttgaaaatatgactgtatacatacactcaatattttgcagataatcatgctttatatcagctgcatcttaaaacaaatctaccagattatattcttcctggaacatgaaaatttttttttcttaatttctaaatgttctaccaacaagaaaagtcaaattatttttggatgaaatcgtggttgcttgctctctttaaattagaaggacaaaacttgctaacatgaaaagtaaccactaacctttagctaagtgttgtgtagtttcttctcgtttttaatgttgtcttctggcattgctttgtttttacttgcacatgctggatctggatttctattatgcttattgatgtcattgtagtactgtgacatttcccttaggaccatcgatcaatagcaaggtttatagcat

SEQ ID NO: 18337 - DNA, 875 bp, Glycine max
  Intron number 1 from transcript Glyma13g35740.1 (locus Gly ma13g35740) derived from phytozome v7.0 (chr-ID Gm13; pos 37122764 to 37123638)
acgtttccaaagagctcaacgccaagcacaagaaggtttctctcttcgtgctttttctttttattattatttcaatttcgatttgtgaatcctgcattcgctgattaaataattgcctcggatcattaatcggaacttgttcttggatttgaatccgtcgctgtccgatatgcatatcgcgaaattttgaaagtgagaaagtttcgattctatctgttttattgcgaatgtatatggcgtaattagcgatgttgcagacaaatgactgaatgagtgattggttggttagttttgattgttatgatgttcagttactgatggctggtaggttcatcgatctttcgtgtttcggtatttttggggattaatcaatcggaatattgtggttcggtagtttggatcctttttttttctgatgctcgcttagttttgatatttccttttagaggtgtgttagtgctatttacttgctcaatgaaagagtatgaagctaatagaagcttggctgatgtgattcttcaaaatctctgtccttattataaagaacagtccaaaaaatataatttaggtatttttagtggttttcttgagtagttgtagatttttaattctaaggaggatttaatctgtctggactgaagaggtggatttgagtcatcttatatactgatcttgagaaatgaatagacattggggtttaaaaaatttatggtgttttattcagcttatgttttgagtgaaaaaaaaaaaaacaaacttaatgtgtttgtgttatagactagtctcattttttgctttccttctctttacattgtttctttctttactctaaatgtgcagatactggaaggacttcttaaattaccagagaatag

SEQ ID NO: 18338 - DNA, 758 bp, Glycine max
  Intron number 2 from transcript Glyma08g01960.4 (locus Gly ma08g01960) derived from phytozome v7.0 (chr-ID Gm08; pos 1286624 to 1287381 reverse strand)
agactgtgttgagcgctccacctgcgtactattatgtcagtatacttttcatgttttgaattttgtgcttttactttattttatttttttgcttttgcctaacttttcttttctgagaaaggtttaatttaattgttgcgggacatgcatcgatttcactgctttgattaggtttgaaaatgtctccagtaagtagtattcagtactttctcttcaacaaacccaaacaggagagcttgtgtagtagtatatagatgtgtgatttttagacttggcagggaagacgtttgtaactcgatttgccatctacttaagggatggttcaagtgtatgctcaatgaagtgtgtttgtccatgtgagaaaagaaacaaataattggtcctccagtgataactgaatgccatgagtttcatctttttaggaactaatatgatcatgtcactttgaggaccaatttaatggcataacaatgaaagactagtatgatgcattcataaagggaggattaacctattaacgcctaattttttaaaggaccaaaatggttattttgctgttggtaaaataaaaaaatctgaacatgtaaggtggacctgttttatgttttgtttgtgggattttgaagtctgcttctggtaattatgagtgtataattgctatccattgtctattttctatggttgtggtatcaattgttataacattgcttcatttgctgcattatcttctcagcagtatccaagagcatcagaagagc

SEQ ID NO: 18339 - DNA, 761 bp, Glycine max
  Intron number 2 from transcript Glyma08g21780.1 (locus Gly ma08g21780) derived from phytozome v7.0 (chr-ID Gm08; pos 16587431 to 16588191)
ttgctaggcagcgtggaattctcatagtttgggtaacatcattctttttatgttgttccttgtctctggataatgatctttcatgttggggaaggtgggggtgatgtttcaaatgtaaaccaatgtcttcctttctatgaaatgaaacaaatattaatgagttacttgtttgcctgatgaatgcctccgtgcttggtgaagttgctagaaaaagtttaataggaatgcactaaccaatcagaaataattattagtatgactttttaaatgtttattataaaagtcaataaaattaccatatattacagtttgtgattaaccgacaatgtaaagaatctttatactgtatatattattttttcattcaagtattgtttgatattagggaaagaatatcaaaatgtatataattaagtttgttttagttttcataattcattaggttcttgatttttaagattttatttatacatacccggatatgtgctctgaattttggatcagaggtttgttttttgcttgtcttcttgaatttgaagagacaaaattatctctttgcttatgttttcttacaaactaatggtgacatgacaaagttattttccgtgggcaatgctctgcacatgtttagcagccaacacagagaaatcaaagtcttatactgttgttttcactggacatttcggtctgttgaccatcaataaaatagttccatgatgttgaattctgtctcctaaaatgtttccaggtagtacgggaac

SEQ ID NO: 18340 - DNA, 593 bp, Glycine max
  Intron number 2 from transcript Glyma08g27620.1 (locus Gly ma08g27620) derived from phytozome v7.0 (chr-ID Gm08; pos 21929248 to 21929840 reverse strand)
ttaggtaaagttagttgattcatcaagaaatattatactcaaattcgttatttcaagagcttaattttcatataataaatcaatataaagaactttacattataaaactatattttgatttgtgcgttcagtgactggattaaaaaatcttataaaggggttaaatttttttttttctttatagttatttaaatgtctaacttttaataaataataatttttcacttaaaattaaaattattttttatattaaataacaataaccttatttgttattataataacaacaaacacaattaattttatataattttacattagttatcatcttaatcattataataagatcataaacataactaattttatactaattaatattaatcattattacaataacaaccaattaattttatataatttatattaatcaacttaataaatgaaaaaaaatcaaaaaaggagagccgagctactgctaaacagtattatcatacatgaccatctactaaaaaaatcttcatactttgattgcactattttgctcatgttgtttggcaatttgctgtaggattaacaaaactcggagaagc

SEQ ID NO: 18341 - DNA, 447 bp, Glycine max
  Intron number 1 from transcript Glyma06g20600.1 (locus Gly ma06g20600) derived from phytozome v7.0 (chr-ID Gm06; pos 17020563 to 17021009 reverse strand)
caactcatcacaaactccttcatcaacttctttaggtaataaaattgcttattaattattatctctcttttattacccatcattttcaaacttttgtttacaccaggttcagtttggttggtttgttatgttctgtttatgtgtgtgtgtgtgtttgtgtttccatttatggtagattttactttggtgacaattgtctagagtttcttcaatttgggtcactaattttttgtcaaattgccaattatttttggccttcccaagaaaagtttgaactttttagagcgtgttcttatgcttaacgtgatgattccgtgtaaagatggtaccttggaagtgggttttgttcaaaatttgattttgaggggagatatatgcgagtttggtgctaaattaaaagggtctatctcagattctccaaattcaaacacggggcaaagatcaaag

SEQ ID NO: 18342 - DNA, 523 bp, Glycine max
  Intron number 1 from transcript Glyma14g03300.1 (locus Gly ma14g03300) derived from phytozome v7.0 (chr-ID Gm14; pos 2131417 to 2131939 reverse strand)
ggcgaatttggcatcttgcccgcaagaagaaacaggtaacaatcatatttcatttagtgctaattgcttaaggttcgaactcctgtccggagagttgtttacatttagtgtctgccaatacttcaaacaagattggttctgaagaagaatacttgttaggaatgaagaaaaaaataacactaaacatgacaataacacttgatttcaaagtagaattgatagtagtatatatgtacatgtgcacgtaagttttttaatacctgtttaatgtttatttgtttgattttgttgaatgctatgcaatagaatctcgagtggccaagcaaaatgttgtttggtttaaattgtaaattttcgtttttgttgtatttgctttttcattcgatgaatttgggggatgtgtgtgtgtgtgtgtatatatatatatatatttatttatttatttaccagagtgattgtcagtgaaattaatggggcactacttgtagttggaaggggaggagctgcagagatttgcaaacag

SEQ ID NO: 18343 - DNA, 597 bp, Glycine max
  Intron number 3 from transcript Glyma06g43790.2 (locus Gly ma06g43790) derived from phytozome v7.0 (chr-ID Gm06; pos 46814218 to 46814814 reverse strand)
atcatttttgtggtaagcatttttttcctgtttttttatacgttgtacttctttttcctgtttccctatctgagttttgttcaggtctgtttgttatagcactttgcacatgtctgtggagtttttccaaggcaaaagaatggactagagatctaagtaattactagttacaacctaaagcctaaagactttgtgttctgaaaaagatggatagtcaatgtcttcctttgaagttatctggacagtgaattgcataaacatttcttaatctccatattttcctctactaattgatttgaatggcctttataaatgaataaaattttgattgacttttggtgtattgtctcatacggttcttgacctgatttaaactcattacctatttgagattaaattataaatagatttaaattcattaatacctgaatttaagttgcaaccaagctggtttagcatttcatatgagcaatctgttttcgcataaattggcaatggagattacttttcctggggatcaagatatttaggcctgttctgccttcaactttgagttccaattctaattctcattcaatattgctgcagattgttgtg

SEQ ID NO: 18344 - DNA, 630 bp, Glycine max
  Intron number 2 from transcript Glyma06g43790.2 (locus Gly ma06g43790) derived from phytozome v7.0 (chr-ID Gm06; pos 46814864 to 46815493 reverse strand)
agcctggtatgtatgccggatgatgaattttatggctgtgttgtttcctatttacagataattctatgattcatcaagagttgtgagggtgctcgagttatagtaaactccttggtacctgttttcgatttctacggataaaaaaagaagataattttgcgattcagggaaacttgaaaaggacaaagactttgatgcagttccataggtattttagtgctgttttctaaatagtattggagttttacttcgattatttgcgtaataaaggctttcattaataggttactgagattaccaaggtggaactccaattctgattagagagcaacatcaaaagcacctatagaactgcttttaagttttgtcccaattgaaaatttgacaagaaaagtatttgatcatcttaagccttggtttttaatgtcattgacttttattctttgatcttatgcaaaatgttggtaatttgattgtttctctaggtttcaataatttttgttaccttttcatgtacatcactttagcaaaatcatgacgtgaattatcataccatttataacttgttaggatgttgttgttcatttgactacagggacttcggcttgccccaacggaaaattttattgc

SEQ ID NO: 18345 - DNA, 1048 bp, Glycine max
  Intron number 4 from transcript Glyma07g38340.1 (locus Gly ma07g38340) derived from phytozome v7.0 (chr-ID Gm07; pos 43104233 to 43105280 reverse strand)
tcaagcaagtttgacttccacgtcgcagattggaggtactttcaacttgtatgctatctacctctacaacattgcacttctgttgattcttggtgcactatgtaaattgcattttcttaattcttatcagccgtttgtttaatttattttattcatgaaatgagttttagaatgctgagttttacttctacttggcagtatagacttactggcaatgtagcaacttcagattcttgcaagctcatttccttatcgtgaggactatataaaagaaattggcatgcacttcagaaaactgctggccatagagactgaaatatgaataaatacaacacttttatcctttgaatatgtagtcagtatcttattatttggatgtctgcactggcacatattgtgtttcctgtggtttaaagtttaaattcttaataatggcaatggttatcgattaactactacgatttggatcctctccctttccttggtgaccatgataatgccacgtttggaggtaaaacaatacagattttcctgtacaacatttcctacgcagggggtcacaaatcttgcataggagttgtttgtgtctttctctatttggacaatacattattgtcaggctgctaaagaaaatgagaggatcaataaagagtggaaatggcttatgatgttgttagtctggttctgtcattaatgttggccgacaatccaatgcataagctgtaagtaaaccatttgatgattttaatcaatctgatctctataaattatttaaatttgatggacagaacaccaatggaaacaattcaggttctatttggaagaggggagagagagtgatagggtcaaagggagatgaatggaaggaaacctttctatttttagtacgcattgtagctttcacctttcatagttctctccctcctgcttttgcacataacaccctcacagttgaggtccttcagcagcacttttctcatttcctcttttgagcaattttaatattattgcagataacgaagcttcattgccaccggctatatcttct

SEQ ID NO: 18346 - DNA, 593 bp, Glycine max
  Intron number 1 from transcript Glyma07g19140.1 (locus Gly ma07g19140) derived from phytozome v7.0 (chr-ID Gm07; pos 19035007 to 19035599)
tggaggtggcagcctcaccactgtgaccttaccaggtgtgtgtctcttctctcttcctctccccccttagaaattatagtatggtccacatcaccatgtgttcatggttccggtcaagggtttcaaattgaaattgtgtttatttttttttatatttcttgatattgtaaaaattacaaacaaatgcagccgatacatcaacattattcattacagtcataaacatcccaaaaaccttaacattactgctaaaatcgtggtttcaaactgttaattttttaaaattttagttctatacgtaatctctatgagccacacttggttgaaattttttatttttatgaaaaaagttaataaaactcagctatgtattacatagagattaaccaaaacaatgaataggcaatagttcagaccatataataatttttcttccccatgatatattttaatattgttatattttatacatacctacgtgtatgatatacatgattaatcaggtttggctatgtttttgagctttgtggaatgtggttctttctatgttataataaggttcaacgccacagcattgcttgaaaggctaagga

SEQ ID NO: 18347 - DNA, 997 bp, Glycine max
  Intron number 3 from transcript Glyma07g18100.1 (locus Gly ma07g18100) derived from phytozome v7.0 (chr-ID Gm07; pos 17843877 to 17844873 reverse strand)
caatttcaggaaatctaggagaggtagcagcaaaggtatactcacttcggaaacttattttagagtagaaatgtgtgatttctggtaaatggtaatagtattttcttgtgattatatatctatgaagcctcgagttttatgaaaactgcattgatatttgttattttcatgctttaaaccattagttttaatttttaacgctcctatccatgaatgtatgtttctcttatcaagaaagattctgtctgtgttgctctctgtattaacgaaatggtggagacttgttttttttcataattcacaataccttcttaattccatccaaaaacttgaataaggctattcggtaggaattgatccactgacctgatgagtaatatataagttatgggccttagctgaggatgtaggcactgggatgcagtcatttaccctttttttataggcaaagggaatttcattaaaggaaatctgagctgtagcacaagaaattccactatccacttatccagcatataagagtctgatacaaagaatatactaaagttgaccaaataaagcaaagacctccaccagtcattgaccttaagctgatattatactaatgctaagaagccttcaatatacataatctttatgataaaatcactactaaatattaatactagatgcttgtgatctctctttttatttcttagttacatatgcctggccaggttatgcctaagcttttaatatgttcttccgagtgaactggtctatacaaatgttattcgctcaacagttgtgtcttgattcaccaattgtcattaacaagttccctttaggttgaacatcttgacttcatttgacttttagaaatcttttataaaggcttgctatatatgccggttattctctgatataccactggaaaatgtaaagggttttcctcatataattgtttcatctaaatttctcaggaagaagtttgggaagtggttgctcaactggttgg

SEQ ID NO: 18348 - DNA, 1001 bp, Glycine max
  Intron number 1 from transcript Glyma05g33420.1 (locus Gly ma05g33420) derived from phytozome v7.0 (chr-ID Gm05; pos 38070207 to 38071207 reverse strand)
gctgggcaggaaccaacccactgaaagaatttcaggtgctttttgtgtgtctgtgtgtgtgtgctgattttggtttttcagcttctttatttgcttggctttactttggttgtgatcgatttctttcagcttatttatttgtttgcttgctttgacagctttgtgttgtggtttttagtgttgtctttgtgattattgtgggtgtttgatattaagatctgctttggattgaggttgattacgatatttgtacttgtttttgcttgtgatgttattatttcaaccacaagaattgcttcttctgcattgaacgtgggtgattattactaaggatcctaactttgaattaccaagccttccagctagatactatagtactgaaatttgatagttttttttagtgggttgctttttgacatagttcctaaggtccaatgcctgcgatcagggtcagagtttggaagatgaataattgcatagggcgtgaacctttaatgataatgcatgccaaatgacgccttagaagataattaataggttgtgcttgatttccaatagacacatgaaagctaattagagtatctgagacacgtattggttggtccccttcccctcgttgaacttgctcacactagaagattgtagattggtagccaaaatatgaaagctgctccttaacagtacttaagtttgaattttatgaagacgttaatatcaactcacccagtggtatatagattttgaacatgttgcattagattggattgcaattcaccggggaagtaactggaatgggtgttaggtaaaagatgtaaacaaacaaatggacatccttggtcccttgggattttaaggtgtttataagaagttgtgtgctatttctcaatgacttacattagcaattctatttctggagatacattgtagtcaactacactttttaaattctgcgtgaggctaaatgcatgttgtggttgaatcaattgcaggtagtgctggtg

SEQ ID NO: 18349 - DNA, 744 bp, Glycine max
  Intron number 1 from transcript Glyma08g18900.1 (locus Gly ma08g18900) derived from phytozome v7.0 (chr-ID Gm08; pos 14278278 to 14279021 reverse strand)
tcttattcttcctcaccagccctctcacgtccccggtcagtctcttttcttttcctcacaccttcttcttgttgctcttttttttttttctttcttttggatgtacgatgttttagtgatccacgatttgatgcaagatccctcttttttcccgttcatttttatatgggacacgtcggtcccttcatgaaaccgtgcagctgacagaacctttttcccgtgattctcaaaattaatggatattttcttcttgtttgaaatgatgctttgaatttattttcactgtaaaatatgttagggattgtttctcagctcttttcttgtttgattctgattcagtcccagtcaaattctggactaccactttaatttgcttgtgcattttgtcttgcattcttgtatcaaagtgtttttttatctttcatatcattctaacttttatgctgaaacatgtttggccggagatataagattggttggatgattaaaaaaaagataaggagagaaaggtcgtgaattcaatccctcctgctaacaaaaaactaacaattaacatttgcctaaaaaaacatgttagctgcatagaccatagagctgctcatcatgtcccaatgctaaactttggaattcagtttattctccctctttggtttttgtctttgggtgtcatgtcactattgttaagttaacctctgttctgttcttatatacaatgcagggcaagcaaacacttcaaattcttca

SEQ ID NO: 18350 - DNA, 748 bp, Glycine max
  Intron number 1 from transcript Glyma13g00610.1 (locus Gly ma13g00610) derived from phytozome v7.0 (chr-ID Gm13; pos 346698 to 347445)
tctgctttttccttccctcaactccaccattcctggtgggtactctctccctttttgttgatttcaaattaatatcgtcgcttaattgttggggggcttaaggatcaagaaactagacacgcacaacacaacggaacaattctctctttttttccccatatattatacatattttctttttcgtgtaaataaattgggtgagattgtttaatgtcttgcaaattatttttcggtataaactctctgttacccaacaggggtttcgatatctttttgatttcgaccccgaggcggttgtctgtttcaattctaaaaatctcaactttccagatttatcgttgggattaaggttgttttagcttgtgtttttttgttgaatattaaagttgtatttagcttttaggatactccgaaacaaacttccaatagattggtccgtactcctgtcctgttgttaaggtttttaacaagcatgaaataattaattgcttgagtttttacatgttttgtgcatttttcttttatattttattttccggaacattagtccatgttccttaatgttgccaaatgtttagtaaaattagaagaaaaaggttaggttgggtggatgatgtgtttgggtcgttgcatgatgtgttatctgtctctctcttttgatgatgtcgcgagggttgttatattgctaatgcactttttttttttgttttcagatttttctccctcagtctattcaagttcattgtag

SEQ ID NO: 18351 - DNA, 938 bp, Glycine max
  Intron number 2 from transcript Glyma13g00610.1 (locus Gly ma13g00610) derived from phytozome v7.0 (chr-ID Gm13; pos 347884 to 348821)
tgccatttgaaagattgtgggacaagtttttccaagtaagaatttgttacttgtctaatttgatatgttcaagctgttgtttctcaattctcacttcagaagattgttaatgttcctcttcaaaatatatttgtcatattttatcacaaagaaggtagccagttcaatagtgtagtactgtagttgatatcttgcatttcttttatcggtaagcaaaatagcttgttgcatgctcaaatgagatgctaagaatttgtctatcattggaactgatgattcttttactagaagtgactggtaaaagaaacattaaatggttaggactagggagacattgagaatttcattcctttagtcagaaaacagaattggaattattagaaaaaagaactgcttattgcttccttcactggcacttacctctgcatgaaattttttagtggtctcttgcttttggggaataataggcagagtaaactgtttcatgatttaaacaattaaaatggcctgtgattttgattcagtattttacaacattgcatttgaaagcaacagttaacacaatagatattttgctagttcttccaacattggataaaaattgtttttgcacacagttgtgacaatgatgttttttaattcttttcacagccttgggcacttacctctaactgaaagtgctatttaatgtttagtatttgacccttgaaatttctgttggtatagatatacaacacaagatgcaaaatatgttttacacttttactaatagattcctcataaatgtattgtgtgaatatacatcctttgtttttgtaatttcattggtttgtacatggtttccttttcttttgaatcctgttcatcttgtggtgtgcatttacctggaatatgctctcctccttttttgcagggtcacgaagggaagttctctgttt

SEQ ID NO: 18352 - DNA, 884 bp, Glycine max
  Intron number 2 from transcript Glyma09g21200.1 (locus Gly ma09g21200) derived from phytozome v7.0 (chr-ID Gm09; pos 26122052 to 26122935 reverse strand)
aaaggtgtcctatctatgtccttttattattctctcatattttcatacaccaccaaggtttggtcatttttatagccagaaatggaataataaaccaaactattttaatcttcttattgtaggaattacaaatgaaagatgaatagaccaaggtctgttttcagactaacatttgctgataataaaaccttctattgtaggagtagtaaactaattaattttgttttcaactcgataaacaacaatttcatacaccaagatttgatcatcttttgaacagtagcataattttgtgacacaaaagagtcatttaatacagttccacaaacttaattatgtgacactgagagattatgagaagtaggtcttgttaaagatggggaagtacatttatttatgactgtttcttttgtgaaaagtacatactccttataagaaaagaacaacaaaaacaggactttttttttgtttgttttcattcttttcttgtttctcagctatattcatggtcacaaggtggcataataactacaacagcaatatgttggtaaacggtaaacctaactgcagtttctatttgtgatccgctagaaaccttcacagtatctatttgtataccaactatagttttttttcaacttctttcttataaaaatttgcattatttttttgtcatctttttcatctattcttatattataaattaaattacacgattcaaaaaaataaaataaattacaatgactataaaaaatacaacaaaaatccctaaattagatgaaggaaaaaaaggtatttaagtctatattatatgacttgagctaaaccaatttggaacaataaatgcaggtgtgaagcaagtagaggtgaacagaaagcaaagc

SEQ ID NO: 18353 - DNA, 410 bp, Glycine max
  Intron number 4 from transcript Glyma09g13560.1 (locus Gly ma09g13560) derived from phytozome v7.0 (chr-ID Gm09; pos 15147206 to 15147615 reverse strand)
gaacatacaatcctaagtatctaacttggtaatcgatgcatgttgccatcttcaaaattttaaggattatttgttggttatgataagaaaagaatatataggatacgctgataagagagcaaaaaaaatagtggaaaaatatacaagcataataagctcttatcaaataattaacgcacaatagataactcggtagatagtaatacaacaacaacaacgattgtgttatctcattggtgaggttggcaaggtgaaccacataatgaaattgagcttgatcaaaaaaacaaattcttataaatattatttatgaagagatcccatttaataatttcctctaatattcttcttgattttcctctacctagttatgtaaagctaggaaccatatgatttacttagttttctca

SEQ ID NO: 18354 - DNA, 981 bp, Glycine max
  Intron number 1 from transcript Glyma13g30060.1 (locus Gly ma13g30060) derived from phytozome v7.0 (chr-ID Gm13; pos 32829421 to 32830401 reverse strand)
gctgaggataaggtacttttccggcaaaaaaggaaaaaaaatcctctctttttagccttgttgttatgctgattgttttgttggttagaaagttgagtgaccccgaaatgggagagttgaaaatgtctttggggtttttgtagttgttatgagggtgaagctaaaattatgtgggatgtctaatttttgtttctctatttctttttttttttccttccttagttgacaaaggggtttattaaggtttctaattgggaaaattgttttttttcttcttctaaaatctggtctttgaggttaacgctaaagacccttttagcgcatttacgtgttgatctatggttttctgtgaagtctaatttttttcccccttctatatttctggatagaggttctgaactgggttttgtgccgagttgaagatttatttgttggtgacacacttgtatcataaatctgatgatgcttcttgtagttgtagtcctatgctgatgttggactctcaacaattcggttttttgtttgtcatgaacttaggattatttgctagttatttaccggattttttttttctgattctgatcaaagtattttttttttccagatttttgtactctgctgctagctgttgctttgtttgaatttatttttagccacataacacgttgtgttccgatcagttcttactttcaacattttcaattgaagtttgtcctctcaacatagtgctgctatagttaatggtttcttgtctttaatttttttagcagcttatttcctccactggatttctgcaatattatccttaagttgcttagctgattttttccatgttatatcttacacttgacttttgagttattagatgtgctgttgaaatgtgatgtctttacctagtgttttttatatgtctgccaattttgtgaaagttaaaattctaatatttcatataccttgttaacatttctatcttaccaggag

SEQ ID NO: 18355 - DNA, 872 bp, Glycine max
  Intron number 3 from transcript Glyma07g08600.1 (locus Gly ma07g08600) derived from phytozome v7.0 (chr-ID Gm07; pos 7166839 to 7167710)
aataagtaacaacaagggttggcggttttagaaacttccttcatcttccataaggattttagtctaaagatctgaagatcagttcttataaaataaaaagtcatcatctacatctatttaaaaaaaaaaaaatttactctctctttataaaaattatttgcataaaaaaatatttaaaatgttaaaatgagatttattataagaataaaagatggagaagatcttagacaatattgtgacaatgcatatccataaaaatgactaagatctcaaaacgaaatcttctcttagagatacaattaggattttcaaatggaaaaattaagttaaaataatctaatatgattcatttaaatgtttgatgattggcctgttttaaattgaaaaatgttattggtcttttattttttggttaaatgcagtctaggacttttatacaatttggagatttggttctcaaaccttaaaaaatatataaatttacttctttcttaactttaaaagatgcaatgaatttttagaaaagatgaagaaaattcacatgttttttaaaatttgaggacttgattcatcaatataaaagtataaagactttgcctatatattaagatttaaaaaaaattaagattcataaattaattttaaattaaagaaaaatcaatttattttcaaatttaattcattccatttttttctcttataagtataattaaaaagctttatatcgttataatattattttgatgatagtaatattatccaaacttatcttgatgacaagtatttttttatatctaatggttgaaaaactggcactccgtgtcttgtgtcttaactatatttttttttagttagatattgctataactatc

SEQ ID NO: 18356 - DNA, 857 bp, Glycine max
  Intron number 4 from transcript Glyma13g21450.1 (locus Gly ma13g21450) derived from phytozome v7.0 (chr-ID Gm13; pos 24974248 to 24975104)
agctgctgtccacaacttttgccttcagttttcttgtatgtaagcttagagttaatatttggagtgtgaaagttatgtggtgtctgataatttatttactggtcatgtttgtctgtttatatacttcagggtgacatgtattctctggattaatgtctcttcatgagattagcattttcttcacgacactgcagattttgaatgttgtgtttttacttgcaaaactagcagatgttgaatgctagtttgtttgttcttcatatcaaaggttttcttcaatactgaagaactcagttatacttacaaataccaatatggtataggtagattatttttcaattccatcgtacagatatacttgaactgaaaatatgaacaaatatcccattgttaaatttaaacaacagcaatgtagtcttatcctattacttgggcttgactatatggaacaattcaccattgggctctatctgaaacctaattttcagtaaaactggttaggatgaggtatttttaaatggtttgtctaaagttttctttgacattcctttaccccatttaattgaactattccgtttgatccattgttaaacttaattgaagaaaaaaaatatgactaacttttggacttcaataccatcttcctgcagtttgtgttacttcaattccatctaactgcggtttgtgttattctcttacaattttgacgtaagatgcttaatttgaattataatgtgttattcttattattctgcacagcatgatatttatcttctcttttggtcatcagttttgttcatctcttgcacatataaatggcaggtaaccctgatattgcatttttccggttgcaagtc

SEQ ID NO: 18357 - DNA, 426 bp, Glycine max
  Intron number 1 from transcript Glyma13g26770.1 (locus Gly ma13g26770) derived from phytozome v7.0 (chr-ID Gm13; pos 29988117 to 29988542)
gattgagaggctcctaaaaacctcttcctttcgtactttttttgtccactatttgtttttatctcttttaatgtgcacttatattgctatactaccaaggttttgaaaaatggtcgttgaccgtgatttcggctgcaacgtgtctctgtgactgcaattatgattgcatcaaccacatttatgtgcaatttcctgcaatatcaaagaacgcggcgaaactgtggccgtgatcttaatttaaaaccttgatattgtcatgtgatggaagaaacatatgatatgagcatgttgtttgtataatcatttatgctattttttctgaaggtgggatttggggtaaggaatttgataactgatgtttgattcttgtgaatatttttttaaatcacagttactacactggactctgccactaaggccttaaaa

SEQ ID NO: 18358 - DNA, 992 bp, Glycine max
  Intron number 1 from transcript Glyma11g03300.1 (locus Gly ma11g03300) derived from phytozome v7.0 (chr-ID Gm11; pos 2181668 to 2182659 reverse strand)
cccgtcttggcaacaggttttccattttttacttgctcagcttcccagcattgtctctagtcttacttcaagacaatatgatttgggccagctttacatcattcttaattatataccaaaaaaattaacaacttattgtataaaaattagttaaggccacataattttagactatgtaataaagttctcgttaatttagagtttagctatgaaccatgcatgcgctttagcttggtttctccttcactcatgtttaaagtaattgccatcggttacatgtataaacaaccacgtataatgttcaaaaagatcctacatttgaaatcatgtctaaactgggctaacttaagcaaagtgattgaaggtttattattacattccgcataaaacatataacgaccatacaaaaatatggtcaattatattgttcatattcgccatattatatattagctaggaaaaagagagatactttatttctctttatttttttaaaagtagcaataaaataaaaccagagagagaaaattaaataaaatatgagagtgaacagttaatttttgttgtagtttacttaataaaaaataaaaataaaaagtttataaaaaaaattagactaaaatgataagttagtttttgttttatctttgttataatagtttattgtttataattgtggattgttctcttcgtacgatgcaaaagtcattaaattggtgatgattgatgacgtgaagaataatgacatatacttatttgttaggagatagatggcactaattcaattgaagatcttactttaagcgatctatacggtttatttgatatcagaacttactttgggactaagaaagacccgcagatcaagcttatccgtaaatgttgcgacttaacttacggatgaggtaataagttttgtttgatgtatgattgattgttgtagtttgtctgtctcaggtggtccaagattgctgccaggttaccaggaagga

SEQ ID NO: 18359 - DNA, 629 bp, Glycine max
  Intron number 1 from transcript Glyma09g34510.1 (locus Gly ma09g34510) derived from phytozome v7.0 (chr-ID Gm09; pos 40883600 to 40884228)
ctttccctgctgattactctgagcttctggaacacgtaagtgtttcattgtcctccctttgcaccaatcttttgttcattgcaacattcaactttgtagtggtggtcttgttaatttgttatatgtcaatcctttgttgatcaacagagcaagtaaattttactgaataaaaaggtttcaatacctttttcgaacctacaaatatgctatttttgtagttatgatctaggtaatattcaaatatttcatcagtctcctttacaaaggatgtggttccatctaatgttgctatgtaagcaatttgtaacgtggcattgctatgtggcaacactttgatggagtcatgtaagcattttttttgtaacagaagaataaaaattgaaagtttcgacattatcgggactataaacaaaagaaaattacaaagattaaaagtgaaaagtagtatattttacaagaatggaaaaggtatttaaaccacccaaaacaatataagaaaaagatggtgggacttatagttgtgtgtcatgtacactcagacacatgctaattgaacactaagattggtgtctttgttattgaatcaaccaacaggcaagagtagctgcagatttggctataaaggataa

SEQ ID NO: 18360 - DNA, 485 bp, Glycine max
  Intron number 1 from transcript Glyma08g20580.1 (locus Gly ma08g20580) derived from phytozome v7.0 (chr-ID Gm08; pos 15579034 to 15579518)
gccaatttatctggcttccattctcacacatacaggtgtgctctcatatatatcatggtgcttctgcttataacaaagttataaaattattaaattttagttttttttaatgtaattaacttgaattcaaatatatttatacaaatacaaaaatatatacaagatgcttattaatgtcgatatgaaaattttcaaatatttatttcacttttaaaaaaaaaatcacaacattaccaaaaatgcaatcaagcctttactttaattatggaataaattctattttttttatttcttcaagtggaatctagtggagtagtggtgtatgaaagtgtaattgttcttaaatgaatttcttattctctcaaatattgatttattttcaattaaggtttacttttatttattaacttattatatgtaattatattcttttatttaatctttgtataggactgaaactgacttgattgaagatattatcaaag

SEQ ID NO: 18361 - DNA, 405 bp, Glycine max
  Intron number 3 from transcript Glyma11g13220.1 (locus Gly ma11g13220) derived from phytozome v7.0 (chr-ID Gm11; pos 9413969 to 9414373 reverse strand)
aatcgaactcttacaaaaaaggtaaatatgttttctcaaacatatacatacaagttaccaatgaatatagcctaattgacaatgcactttgagtttgtaggaaagaacttaagttcaattcctgccgaatatattcttagagagaaatgaggagtcttaagtgtgactaagtcttgaattgaataattatgattcttgttaataaaaaaatacatacaaatggtaattccagcctcaaagtgacaaattcgatttgacaaaaatgttttgaaaggaagaacatgtaaacagaattacagattggcctttatatttccccctctcccctaaaaacctatttcataaattttggttttatgtatgtaaatagatctgccttccagcaacaaaggcacactttctaaa

SEQ ID NO: 18362 - DNA, 847 bp, Glycine max
  Intron number 1 from transcript Glyma09g31880.1 (locus Gly ma09g31880) derived from phytozome v7.0 (chr-ID Gm09; pos 38476326 to 38477172)
tctcctccttctctctctcgtctggatcttctcaggtaccaccagcacaacacttttctccaagtttttagtaaactctccacaacccatcaagtattacactttcgcttaaatattctttcaaataatgatgaagtagtcttaaaagtattaaatatccatcaatttagttcctacattgatatacgaggaaaatgtggttttagtctttatatttttcaggaaatgtgctcgaagtccctgtatgttattaacattgtggctgaatgtcatttgttattcaacagtatggcctgatcctgatgctttgttatttgatataatccaaattggattacccctgtattctttgaacctattcattgttctgtatgcttggtaacaggctaacaatcataccacaattaagttattaaccctaattccaaagggtgtgtttggtttagaggataaaaatagggaggatggaaatagaaggagattttttttaattaaagtagagtgtaaagaggtgtgagtctgacaaaaaaaattacaaaatttctcttgtatattatttccatccttcaaaacaaacacaccctaaatgaagatggttgcctcgaataagaatccaagtctaaattctacaagcggaatatgtagtttgtggaataaataaatccatatcagttgttgtatgctgtctgagttcactctatatgttctcttacttgctttggtttttagagtatactttttcttcttctttatcattgttatttgaatttctgtcatcagattggtggaaatggttttaggcttctgattttgtttacatgactttggtattctcccaggacgcctt

SEQ ID NO: 18363 - DNA, 844 bp, Glycine max
  Intron number 3 from transcript Glyma10g36120.1 (locus Gly ma10g36120) derived from phytozome v7.0 (chr-ID Gm10; pos 44291853 to 44292696)
gcaacttacgtggtaattatttttatttgatagatgttatgtacaaaaattactttactaaagtcaatctttatagttctctttttgttttttttttgcaaataatgtcttcttgtaacaagatttgattaagagaaaagaaatacccaggaagcactcttactatcaagttaataatgttacaagatgttctatgtgtgattgtctctctctctctccctcctgtttctggtttaataatgtgtaatcatttggcatgtctgaaggaatggaatgaggattgcattcatttttggagggaatgaccattccctctttctgtgaagtttctaaaaagaacattcgttttcccattcctactatctgactcttgaattctccctttccatttaaagttcagaagcaagttttgaaacagaattttatgctatcatctctaaactttctgttgcttgtctcacttgtgtcagtttgtcatgatgtggatgctatttcttctatatcaaaaacaaaaaaatgtggatgctaatctccatgaaaataatagcgaaattgtaattgcacacaagtattaccataccaaataatggttataagagtgtggctataaatggacatgttatcaattgagttctactttacaaatgtagcgaaattataattacacacaagtatgaccataccaaatattgtttagattgattggaaaatttgtaacagatttcttcttcttaactctccttttggctttcattcacatgcttcttctttaagtgttcatgaggctgacagcattttttattcccttatacagaaaaattgctgtatttttcggagaacttcg

SEQ ID NO: 18364 - DNA, 874 bp, Glycine max
  Intron number 3 from transcript Glyma07g35230.1 (locus Gly ma07g35230) derived from phytozome v7.0 (chr-ID Gm07; pos 40326818 to 40327691 reverse strand)
cgtctacccctcaagtcctaggtatgtttcttgattatcatgggtcttatttgattttgtattggtttactagttatgcatattcaatgaatttttagcctattgagtgtgaggttggaatcttgaggaaaattcctcctctctgctggacattttattcttccatcctcaaataaatcatttttcttgtacaaaaatgtaaatgtcattttttacccagtttttctattcttttatagtcttttttcaagtttccacttttttctttgaggtgatggaaagcattggtaattttcagcattataccctattttacttaatgtctaattttcacttagcataatctaaacgaaaatttgaaaaactgggattcatttgatttaatttcaaaactggcaatgtagctctgaaactagtttgttttatacacaaagctaaagccccattttcatttgggttcatgtactcaccttcctgaaggggaaatgctgaattacattcttacagagaagttatcttattactagcaatgtcacacatgctaattctgttgaaatatgagctggcattatttggatgtttcacaaacatttcctatgtctgtacttatgtataatatgtaatttaatcaatgaaattggttattcatcctaattttcttcaagacctattacatatattgattgttttatcggcaaatgttagtttgacagctttagaaatgtcagtagagggattcaaacccgcgacctcttccttcacccttaagtttcattgccaaccaccaagccaaccttatattcccatatattgatctttttgttttggctttcttgcagcaatacaggaacaacaccatctattggttcaccac

SEQ ID NO: 18365 - DNA, 472 bp, Glycine max
  Intron number 5 from transcript Glyma12g28730.2 (locus Gly ma12g28730) derived from phytozome v7.0 (chr-ID Gm12; pos 32088991 to 32089462)
taaagctttatacctaccaggtatgtaattgcttgcttctcagttagatctggaaattcatagcaagaggcaatcccagagtatttaaataacctacatttattacggtgtcaataataatatattaattagcccgtgaaattctaactcatctcttgtaatccctgcttaattgtttttcttaaatttttgtattaagttcctcagctttgactttatctgatatgacgaatttgagtttctcacatatggcattctttttcaaaagaattgtgaaaacagtaaaaaaaaaaactcataatagatgttgcttttgtatatgagcagtagacttttagaaggaaagtaaggtattgtgtgatttactcattttaaatccctattaatttcttgttcattgattatttatttcttcttttctctgattttggctgcagatttgcagggcccttgcttatatacataactgcat

SEQ ID NO: 18366 - DNA, 841 bp, Glycine max
  Intron number 1 from transcript Glyma05g30690.3 (locus Gly ma05g30690) derived from phytozome v7.0 (chr-ID Gm05; pos 36002877 to 36003717 reverse strand)
ccattatcgatcttcccctcatccaagcttttcaggtaaattgtttttattatcatattcaattcaattatttcctttgcctaaccagtttgtttactaatttgaatcacctcatcatccttatcttctttgctattaatcttatcatcgctgatgtgttggcgcatatttgatggcgattggctttgggtggttattgaaaatagctccaaccaacttcctgagtaattgccatttatgttgcagatattgactagaatatgtttttgttatttgtctaaatttacaaacaaattctcggtttatactttctaattccaatcaacatccagcattaaaaataattagtaatttaatttttaaaattttaaataatcatatgttttatgaatttaatgtctatgcgtaaaattatttgacattatcatctaattataaattacgtttaagttactttaaaataattatttaaaaaactaataaatttatcatattatatatagaaagaattataattggatggttgtgtaaaatttactcatcatgtatgatttttttttatcgataaatattaattttatattattagcagaacccatagacattaagttttttattttttattataaaataaattttattaattaaattatttttttaaaatattatttttataatggacagtttcttggtgggtattttttaagggtaacatattttaagagtacgaatcacactctcaactaacttacgtatagtatgagtttgttcaagtttgagttgagtgtgggcaacattttgtgatgacgataggcagtggtgaaaagtctcggtgacaacg

SEQ ID NO: 18367 - DNA, 1049 bp, Glycine max
  Intron number 1 from transcript Glyma12g17950.1 (locus Gly ma12g17950) derived from phytozome v7.0 (chr-ID Gm12; pos 18424453 to 18425501)
aatttctcaattgatcaaagatcttcagcaaaccggtaaattctctctctttttctacgattcggttccgagaattttcagattcacagatctgtggcatttctggcttcgtttgatctgcatttgtcatccgttaatctttttctggttctgtaaatgattgcatgtgcgtcgataatcttgaagtctcgcgcgcgttgtttgtgaatgaacatgtcgtgtgtgaattgtcgattgatggcgtgcgattagggttttgaattcgtgatcgtgttccgatttgtgttatttcagggtttgtccttgaattcgttgattcagatctagcttgatcgagtgtggtgttgcttctgatattatctgaatggtttgcttaaatcattatattttttttttcgaaatcactgataagggaatgttggattgcttcgtttgtattagtcaatgcatttaccaaaagtttgaattttgtaattgatagtattattcaagcttctaattttattattattattattattattattattattattattattattatatgaaacatttgacgttatttgtgttaattcatggggtacatgacttgtagagatgacattctttcattaattcaggagtgatttttccccttttcttttcttttttttaatgtaatttttgttgtcattgttttatttatgcatggttgaatgctcatattcaataatatcagaagcccaagttatacttttttaatatttttcttaatgattgcaagtacatgcatcatgggttttcgtgaccagatttcatgtgaaatcttcttgcagctcctgttccctccaaattccatccaataaagcaaaataaaagaacttaataaagaattattatgtcatgtctactttttcattacttggtttctgtgtttttttaattgtcatttggaggctgaggtatgcttttaaagtacagtttttgttttcctcgcctctttggaaatcctcttatctatgccttttaaccatctggtgcaggtcaagtttgtgtagtttggccag

SEQ ID NO: 18368 - DNA, 872 bp, Glycine max
  Intron number 3 from transcript Glyma12g29810.1 (locus Gly ma12g29810) derived from phytozome v7.0 (chr-ID Gm12; pos 33271362 to 33272233 reverse strand)
ccaagagaggtaatgttaaggtgttttggaagcatttcattggaaataaaaagaaagaccaaacacatatgcagggggacacacagaattatctacatgtttttccctatcttagcacaatataaatgcccttgttccaatcctttggcatccaagtgaatttccaccatacttttgttatcccaatatctgagcttcacacttgtccttttttgtgattcatgtgcggttccaagtgagtggaactagtatattgagctcactcacaaacaagtcacattttatttatttattatccatgaatacacctggcaatctggggtcttcccttctgaaccattttgtccttctctcctaattccatatagccactttagattctggtggcattttaaattaaattggtatgattgagaaagtaagagagttttgttgatgacttttctcttgcacatatttggattcttggcccgaggagaaaaagggtggtaacatgatttccaatagagcccacttctaacaagactgtaatatttatcattgcaatataaatatataaggttaattgaatggttaaaaaaaattgtaatttttatttcttttataatgaaaactaacaatatataaggttatataacgtttgtcaataaattgaaaacctatcattgcaccgttccctctccctccctagcttcctaatattccgtggcatgtattgtattgtagtattgatattgtattgtagcaattttcactcttctctctcacacgcgcaaaagctgtttctactttactatgaagctgtttttgtttgagttattatcatttgggttgcagctcactggagaaacagtgggggaagtgaaggcagt

SEQ ID NO: 18369 - DNA, 929 bp, Glycine max
  Intron number 1 from transcript Glyma12g03750.1 (locus Gly ma12g03750) derived from phytozome v7.0 (chr-ID Gm12; pos 2524810 to 2525738 reverse strand)
aacccctcactccgaataatttccaaaatccaaaggtatgaactttctgttattcatgattgctgcttagatctcgtctgtgtttcatgctgcatgctcattacatccaatatcatgctcattttcaagttattatatcataaaccgtatttatagagtatcctccttctgatttcaatcttcaatcaaaagcatctaaccttgtattggtctatttggaatctctataattttagtattatgctaagtaacattttctattaatgtgcttcattccgttactctttttattctattttttgcagcaaaattattgaaaggggataaattactcatttactctcttacttttgtaaaatgccgggagatttcttatgcatgcataagtatgttatattctgaaggccggctttcatctaatttgcatgtatgttgaaacttaaaacttaaggtgttacgtttcttatgtactatatatatagcagttttgatactgatactttaatctgcagctctgttttggtaatacggtttgttgctggtatcaaattgaatcataaccaaacttagctttttaatcacgtgttttctaaagtaaaacacgatcattaacattcttgttgaatcgggtgtaactgagttgaaacctggatatgcatgtaatgcttcactgaaaggttacactgttgaaagaggtgagtttgacctggccgtatgttattattactgatattcacgaatcatgatatgttttggtttcaagttttttattttttcgctgaaggttacaagggtttttattatatagactcaatgcacgcagttattgccttttagaggtttgaacattccagtgaagcttaaaaaatatcatttgctatgtttttttctcaggcaataacagctcgaacgtttgcaatactctcttc

SEQ ID NO: 18370 - DNA, 834 bp, Glycine max
  Intron number 3 from transcript Glyma13g23110.1 (locus Gly ma13g23110) derived from phytozome v7.0 (chr-ID Gm13; pos 26574083 to 26574916 reverse strand)
gaggaactggaactgtggaggttatgcttggattgttaatagagtgagcctttacagtatggtaatttagagacatagatatatacgactatgccagaaggctacggttgggattcaaatccaagatttgagctaggtaaacaacccttctatcattgaacattttttttttcttttcaggatgtaaaagaaatttgtttatcttttcttaataataacattaaattatcattaacttatatactaaggtggcaggaactgcaggcctccctgttgtacagaacactgacacagtcctcttccctaacaaggaatatcctccttcaaatcaacaccaacaatttaacatgcagttacacaatccctcagaaatctgccacacatattattcaagaaatatacgcataactgtcatatagttactaaacacacaataatatcaaatttctgttgcggtgaatttattgggtctttgttgtttgttagttaatagaaggtttcttcttcacatctagtccagggaacaagtaaatttagacattacttctgtgattgaggatgattaaagtgagcggtgctaaattccatgcataatatcatttctaatccaatgtttgtgccaaatctgatttttttgtgaatgtaatgtctattgtcagtacactttagatagaactaatacatatgttttttgttaggttcagatcactcagctaattcagtatcatcacccatcccttccaactcatcaaactcttcatatggtgatcagagtaatcagcatagttcctccttgcagctagtttcagatacagaaatctatcagtatcaaca

SEQ ID NO: 18371 - DNA, 1005 bp, Glycine max
  Intron number 2 from transcript Glyma11g04450.1 (locus Gly ma11g04450) derived from phytozome v7.0 (chr-ID Gm11; pos 3020788 to 3021792)
tccaacgacttttttgataacttgccccgtgcttggtatgtatgctgctctctccttgctacttttggggcatatagattgatttatgtttattcttaactagctaatggtttagtttttggttatatttgctgcatcagtttgctatctgttatctagtttggctgcaggttgtattcatgctgacaaagcttttttttttcccaagggtaggggggaattagcttgaatgactcataaccatgtaataatcagtattgtatgaaatgcatagttaagttaaaacaagtttagcttgctttagaaaaaatatggttaaaatgcattcagtactttatgccagagataacagggctttggagttggaatcgacctcttaattagattttaaggcatgacctctagttttaagtgtgtacttctatatcattatgtttgaatttggtgacatttagtgagattgtcaaggtgaaacttttggaatggttggtcaatagactgtggacttgtggttatgaaagaattggagcttcaaaaggtaaagttgaaggctaagcatgcttgacctttcattggcgtaattggtccatcattgattattcttgccattgactaagaaaagaaacttcaataaaatttatgcactttttagaatggtgcacaaaatgtgaatttgaattatcttttattttttatggtgtagtatttttttactgactaatctatttgtgtgagaaaaagaaaatgaccaataaaatatcacatgtagtattttgtccttttatttcttctattattttgttcgttcttgagttatgactgatatattacatttatatatgataaactgccccatttttcactcatagtacatcactaatcagttagtgcacatgctcaacacatttcattacttttgaagtggacaaagaccaatctcactctaattcattatttcattttttggcaggtttatttacttatttattggtattggagtggttc

SEQ ID NO: 18372 - DNA, 817 bp, Glycine max
  Intron number 1 from transcript Glyma08g14960.1 (locus Gly ma08g14960) derived from phytozome v7.0 (chr-ID Gm08; pos 10887857 to 10888673)
aagattttgagatcatctctggtcgtctagctgttcgtaactattgtatttcataaataaaacttgcactttccactttttttttttttttttttttttatggttacaactacaacttttactacccatcaaaataaatttcaattttattcatcaaatcattcatttatttttctttactaattcatctttcaattttccatgcatgtagagattttttacactattaccataaatcttttactttataatattttcgttaatcatgaattaacatgtgtagtgaggttgttaattcatataatagttactttaaaaattatatttaaaatggttaacctttaattaatacggtatgacatgattaattaatagataactttgtttaaacatgtgctcaggatttgatcctcagtttctatatatagaaatatagaaaaatatctgttgtgtaaaattagtcattgaccggaagattccctgttcaaaaatagtatatcgaaattatatttactaatttttttccattgaataaagaaagtattaaaaaagggtgaggaacatcaaatgcgtatacagtgattagcatatagaattatcttaaaaattaaatgccaggaagtgtggtgtacccttgccgtttccttcttgccataatttgtgtcaatgttccttttaaatttatactcgtgcatgcaatttaaactcatagttataggagaaaaaaagaattaggtactagatccttcttttttttttttttacttttttgatgatattttagatcaatatgtgatgttaattatgtttggtgcag

SEQ ID NO: 18373 - DNA, 379 bp, Glycine max
  Intron number 1 from transcript Glyma06g42900.1 (locus Gly ma06g42900) derived from phytozome v7.0 (chr-ID Gm06; pos 46210871 to 46211249 reverse strand)
ccgctccggcgccgaaatcgaaaccctaaaaaaatgttccttcccaaaaccctcaccgattgatcaatttattgtcttttcttcttttgtttttaaatataggatctgaacttcttgtttcttgggattattgcagctggatttgatgttttggtgttttaaatgattaggaaaaaaatgatcttgatatttatttagtcggaaaggggggttgggaaaaaaatttataaaacaatttcttatggaatgatcgtggatgtgtcgtatgtgtttgtgtgtgcttgtgtgtgtttgtgtgttttttttattcttgtttttggtaagcttttgtatttggatggtttgaattgtgattgttcaattgttgttgttacagata

SEQ ID NO: 18374 - DNA, 518 bp, Glycine max
  Intron number 1 from transcript Glyma08g12150.2 (locus Gly ma08g12150) derived from phytozome v7.0 (chr-ID Gm08; pos 8838926 to 8839443)
aaagctgaattttggggtatgaacgcttttctcactcttttggaatcaatttgatttggtttctttgttattggggtgtgtgtgggttgaaagcctgagatcaggtgaagaggaaagataaaattgaatctttgttattttttaagaaaaaaagatgtccaaaaagatgggcttgctgagaataggttctaaaaagagacaaggtgacatcaaaagatcaaaacccagatgtagaaatagcaagtaagaattgattcgaaccttctttaacatggcataaaaaagtatccaatgattcaccctttatcctgcaacaataccagtggatgtatatatgcactgtgtttctgatatttgtttgataccagctttaacagactgttgattgcttgtcacagttagtaatgcatgattcatgcctataataatgaatttactgttgtgagtttattactagtctcctcctgtgtgtgtttacttattgagaatatattgtgttgctgttaatttgcaggaaa

SEQ ID NO: 18375 - DNA, 825 bp, Glycine max
  Intron number 2 from transcript Glyma08g12150.2 (locus Gly ma08g12150) derived from phytozome v7.0 (chr-ID Gm08; pos 8839841 to 8840665)
atcattgcaaatatttcttgtttcaggtactaaccagtttgttttggcattttccattcctttagctcttctttctaatttctaagcctttgtggtagtgaatttttttggatttgcagaaatgtataaaaataatcatttgaaggagattttgttggggtttgaagtatgattgcaatgcattcttgcagcgtttaaatgacattggcatgcttcgaagtgaattcccattttctattattaacatacaacttaaaagtgaattaactattaaatatcctctttcatgcattcttatacacaatcatcaggctgcttttgaggagttgggacaatttgagttgtggctttacattttctagtttgaatgtatgttgcctgagtcaaagaatttagtgtttcagttccattatttttcaggtgaagtaacatatactatcattctgtaaattagtgaagtctagggaaggggtatctgtattctcttcttcaggctggatattgacatggtactagacaaagaaaaccattggcccaaattgggaaattgatatgaccttagcattgtttgattaactgacgaagcttcttatgaaaaaaaccctattatggactattcttgtcactcatattttctacatttttatgaattttgcagtagaatgttgaacagaattgacaataataatctacaagtagaaagcagttaacggattctttttgaacttctaacctttgcatattttaactattcttgtgaatgatactaaaccacatactcttactttagctccttcgaggtcttaaataccttcattcagcaaa

SEQ ID NO: 18376 - DNA, 1004 bp, Glycine max
  Intron number 2 from transcript Glyma13g37880.1 (locus Gly ma13g37880) derived from phytozome v7.0 (chr-ID Gm13; pos 38806292 to 38807295 reverse strand)
cttattccctacacctacttctttgtccctccagggtacgttttgttttcctacacaactatatttatcatcacgttagttcttacatcttcaccaaattagtccttaagagatgcagaaaagatattgctttagtccttgaaagattttgtcatcggattacttagttataggtttaatttgtcactaaacttgctcttcgattttattttggagtaaatagtttatgcactatagtgtaaagggtttgtacatcgtaattcaatcacaaaacaccaataacattgttgatttttacaataactatagtgtcaagggctaatgtcgtgtcgtgtgtaactttggagaactaagttccagaagtatgaattccccaaaatataaaataacaggtgttggtagtgctcctgtactaataggatcagctttaggggattcttttatttgatggtacttccataagaagcttttctcttaaacgttgaataattagcttctgctttgctacatgcgcagcctctttttcaataattgtactattacttgaagctaatttgtacatgttacttttggtatcattattatcattatattgatttttgtagtgggatggaaagaagcgatggaagttaaaaatttgcacatttctaacattgggggaggagtactgaattgattatttcttactgtttggaattttgcctcaattctttagttttgcatccttgtcacactggtttaaattttaaaagctatcttctgaacttaaaatgtcagttgattcaaagaggaacatgttaaagtttcattgaaagggaagaaaatctatcatattgctcattacttgttgcatgtagcatccaaaagtttgataattaactcttaaccttccattccaatgtgctgctttttattattcaatcccagtttcttcatctatattaagctgactggggaaaaaaattacagttcaggttcttcagctggcggtactgttgccaagg

SEQ ID NO: 18377 - DNA, 846 bp, Glycine max
  Intron number 1 from transcript Glyma07g13320.1 (locus Gly ma07g13320) derived from phytozome v7.0 (chr-ID Gm07; pos 11910446 to 11911291)
agttggaagcttgtagattgattttcactgccaaggtgttgtttttgctttatcacacagcatcaattgttaatctttgagaaattattattattattattgtttactgtataaaattagaaattgttgttagtgtttgcaaaatgaaggtcgaagggaaccaccaaatgggactttgatttcctttgagactaatgcatgctagattgaaatcagaggataagggtatcccaattcttattcaccaaaaagcaattgttatgatttgaactttgaagttatgcttgttatcttatttgaattgggggaagaaggtcttgaatctgattgattgtgaattaaatttgtgttattttatagtactcacgaggtgaagactgaaaatcgattagtgttatatcaatgctggtttctttctcaattaccaaactttttgttttttttactttgttgagtccagggagtgtagttttgcatagaaagctgcatcagagttttgctttgttgagtcctgctttcactttggggtatagttgttttggggttaggttttctgtggtgttttgtggtttgtttactggtcaaatttgtcatgcatttgaatttgattcgaaatcttaatttagttagtgtttttttttctctttcttttctgcaagttgctctctttggcatttccagttgccaatgtatcagttttgttttgaataaatgaggtaacctgaacctgaaaattcttgcttcaagtggagggtttgaagtctgaactatatgggaagctcatttgattttttttttttttttgtttcagcaaaagaaagtgagggaatctaacccttaattgaa

SEQ ID NO: 18378 - DNA, 1022 bp, Glycine max
  Intron number 4 from transcript Glyma11g09390.2 (locus Gly ma11g09390) derived from phytozome v7.0 (chr-ID Gm11; pos 6686556 to 6687577)
cttggaagggctaatattgggtgtctgttctgcaggtagaattttctcttcaaaattaatgaatcctggaaggcaaacatgttatctgtgttatgttttcactgtttatatcccctgaattttattgttgaatttttaatatcaaagactgtatagaccttcttggctacatgggttactggcaatgaaaagtttatctgagcaatcttaaggaacaaaactcatggacacttctcttggtgtctacatcaagaaagagacggaaataaaggagatataagtgagtgatatgatcggtgatgtgatttatataattggtgatgaatatgatagaagaaagagagagaaaaattgagagtgtcaattagctgttttgactgtttaagtgttcataaatcagcatcccaagaaaaaagatctttggacacctctactggagtctacaccaagaaagagatgagagatatgattggtaatgtgatgtaattgaagagagatagagggaaattaggagtatcaatcaggttttagactgtttaggtgtttataaattaacactccttaaggaaaaaaaaagcatggacaccaagagagaaataggaagagaggagatacaatgatttatgatgtaatgtgatagaagagagacatggagagaaattgaaattgggagtgtcaattaggcatttggattgtttaggtgttcataaatcagcactccaatcttgtatggtctgtacatttactaattttgctaacaaacaaataattggaagtcctaatattctccagttcctgaatgaaatgaaggcctttagttaactgtagacatgaaagttgcacaaaaacttcttgcatcttgttgtcctgttgctgcatgccataatgtttgaaatgtttcatattttatctaaagctcaagctgtagcatcggttcttgccggatacatcttgcagttaagcttattttcagacttacatgaacaggaaatttaggaaacttgcctataatcattatcccg

SEQ ID NO: 18379 - DNA, 715 bp, Glycine max
  Intron number 1 from transcript Glyma13g05270.1 (locus Gly ma13g05270) derived from phytozome v7.0 (chr-ID Gm13; pos 5497721 to 5498435 reverse strand)
cgccttcccctctttcccacctcatcactttcaaggtgagaacacacacactcacacacaacaaaacacactcaccatcattcctctcttcaagtgtaattccaagtcaattcatagttactattttttccatgcatgtcaaggtctttaaaaaccagtttgtaacagtgaattcagacataacatcaaagtttttttttttttttttacactctacgctattgcatcaactgtttttatctgtaatatcatgaatcgcaacgaaactgtggtaacaaccacaatttgaaaccttgatgtatatatagtaatcaagattctaaattgagatcacagtgttattgcggtgcttgataattgtagtaaaagatccttaactctttcgttgaggttgaactcatagttgtggatatttcttgaaatcttgaaaataatattagcccggaaatgattattcttttgtaaaaataatatgggacatctgataaaaaaaaagtaattgtttttttaagaatacaagataaaggaagaaggcatattgaaaaaatattaatggacactcctaataaaggataagatgtatgatgtgatagaaaaagagagagataatgagaaataaaaggtgtgaatgaggtgtttaaaataacagatgtggatatctttgtatcattactatgatttcatttcaggtggtggggcaggtgcaggaggtttt

SEQ ID NO: 18380 - DNA, 298 bp, Glycine max
  Intron number 2 from transcript Glyma11g27080.1 (locus Gly ma11g27080) derived from phytozome v7.0 (chr-ID Gm11; pos 26629860 to 26630157 reverse strand)
ctggtgctgaagaagtgcattatgtattttacgctgattgtgaatgtatttttttatgagacataaaaagatataatgattaaaatttgggggttttgaattcttctcattatgtctgaagttgaagatgtcatgtccctgctatttgctttcatatactaggaccatgattatttcctccttgatacttttagcagtatatagatttttctttttttgtttttgctttatgatatgtgcactatgcatttaagtttcttgatctggaggatatgaccttgtgcctgcagtattactg

SEQ ID NO: 18381 - DNA, 537 bp, Glycine max
  Intron number 5 from transcript Glyma07g09270.1 (locus Gly ma07g09270) derived from phytozome v7.0 (chr-ID Gm07; pos 7739421 to 7739957 reverse strand)
aggttatacttccagtaccaatataatattgttgagtcattttgtttttctcatggaatagatggaaactatccttgcactttattcaaccacttcgtaggtttctattgtttttctcaaggtttatttgttggctaccgtggaaacatataatagtttattacttcatttttgtgtcctctaacgtgatagcatattaacatatttttacttctttcttgccaatctcaaatgtacctgactgccatcttatggtttccatatggcctcttcacccattatgatattttcttgtttcctcgtttgttctagaaaagagcataagcctttcttctttcctatgtttcctgcatataatgtctataataatagaatgacatagcagagcatttcaccatttttatgaaaactgatgtgtatttcactttggttaaatgacagttgtttacttttatgctttccaatataaattcttatgaataatttctcattgtaaaattgtgcattttcagtgcggcaacaaacaacttgtttggc

SEQ ID NO: 18382 - DNA, 751 bp, Glycine max
  Intron number 1 from transcript Glyma07g09270.1 (locus Gly ma07g09270) derived from phytozome v7.0 (chr-ID Gm07; pos 7740912 to 7741662 reverse strand)
tctctgagcaaaaccgaggatccctcatagtattggtgcgtattcacttcagccatcactttttcagttcagatttccttttcttttctcttttttcgttttgcttgatctcgattcagtttttgtttttctacttcgttttacatttttttttatagtaacttatcataaactctgctctgttgcctctttattttttgtttttattttattgctttttgtttctgagaagaaaaaaaaaacagaggaactcgtttgctgcttaggatcatcaaattttctatagtgttctctgctaaaaacatatgtgaatacgtgatcaaggttaatgataaggataacgaaggaaaaaaaagagtatgttattttttttccgcgatgcatgaaccaattgattgacagagcaatcgaatttctagcgttaatgtagttttttttttgtgacttttgtttgaataggtagggtaaactgatggtactgtggtttgtaagttctgtagtttgtaacgcattactgagtgatgtttgaatctatttgatgaagttaaaattgcaaaatagtgttgtgagtgtttgaattcagcatcatgtctttttatgtatgcagctgccagctagtgcccgagtttcagtttaagcttggatagaatggaactattaagattttactttgctttgaagagttttcatgtgatatattagttgaagacttttttatattaataaaaaaaggcaggtcaaatattggcta

SEQ ID NO: 18383 - DNA, 588 bp, Glycine max
  Intron number 3 from transcript Glyma12g05460.2 (locus Gly ma12g05460) derived from phytozome v7.0 (chr-ID Gm12; pos 3636129 to 3636716)
aatcagaagaagtttggtggtgataccccttataggttcgccaacttcttatgccatatgcattatccttgtttccttatattttacttttagaggatgatatatgctaacttggttaaaaataggagatgagcttttatagacatcaagtatatcatatcgagagatggtagtagcacactttttattattaattgaaacccatgaaacgatgaaagagacttgttatacagagagtgggactcacattgtttcgtaaatttcaataaattccagttaacagaaaaaatgttagaaagaatgttgtaaaaattaagtgcataagttgattttagcttatgcaagaaattcaattcattttactatcttattttcttcttctataagtgcttatgaacaattttatccaaacaggattgcacttactattttcatacatataaattatgtttttctttttcccacttggcattaattgaagtgaggctttgatttgtttaatgttgtaaaaatatttgattaaacgttttagttagtctatcactgtgctagtagagtgaactgattggtcttgcttgatgcagtttg

SEQ ID NO: 18384 - DNA, 736 bp, Glycine max
  Intron number 2 from transcript Glyma09g41350.1 (locus Gly ma09g41350) derived from phytozome v7.0 (chr-ID Gm09; pos 46059678 to 46060413 reverse strand)
tgctagagaactggctaaacctgatctattaagcagtaatacagcaaactctgacacttctcataacatcattccctaatttcatttttgtctttctttgatttttactatcctgcttaggaagtcaatagagtggaagaagcatgtattgtacatgacattttcagtcccccatttttagtctgtttggtgaacgtgaaaaatttgaggagtggcaggttggttatgcatacattatacccaccaactcttagaaaaatgttggcattggcaactagtcaattgtcaaaagtaagatcagattaaaattaagggtggttcgaaaagtttatagttagaaattattgaggtgagataagtgacgcgagaatgggaaggagtattgaagtaatggtattatagttcaaccatgtaaacttaatgagtttcaattttatcagaaaccttttttctttagatgacatgctatagtgtaggtgaagaatgaagtgaagaattttaacttaaacactcttaagtttaatactaatggtgccaattttgtcaaaactactagtcaatttgataggctttctacttttcattagtccactgatgcaaatgtgggttgattgaacatcatgtgcatatctttgaaactttgaataattttctgttaaatatagtttgaaatgcaaatgcggtgtaaatatcttgttgacctatcttcaaatttcagaactaagcagaaaaccag

SEQ ID NO: 18385 - DNA, 709 bp, Glycine max
  Intron number 2 from transcript Glyma06g08580.1 (locus Gly ma06g08580) derived from phytozome v7.0 (chr-ID Gm06; pos 6263774 to 6264482 reverse strand)
ggtatgacttgctaccacatatactcctgctatactctcacagtatgttaaagattctggcctctgtgaagtcttaaagattggaaatattgactagtatatttgatatcaatggactagtatgctgtggataatgtgaatctctatgacatggatcaattacgtaataatgtgaatgctaggtcgttgccctgaagcaacgcgctgtatggctcgagtacagtgtcaaaagactataagagaggttatcaaaaaggatctcgaaattaatggtttggataaaagtatggtacttgatagaacattatggcagaagttgatccatgtagccgaccccacctagtgggataaggcgttgttgttgttgttgttgttgttggactagtatgctgtgcaaatgttgttgatgaaatttgagtgtcagacttcaattgtgtttttacttctcttaggttgactgattaaatattcaaggttgcaaataatttcatatgttgatgtgttgtcttatgatttttataaaggctttttctgtgatacattatccacatgagtccctgaagtgctcaagctctgttttgacatttcttttgcctttatttaaatgctaatttatactgttttttaaggataactattgatgaataatatgatcttgttattcttaagccaatgacatttatttgccattatgttcttgtcattaggt

SEQ ID NO: 18386 - DNA, 691 bp, Glycine max
  Intron number 2 from transcript Glyma11g03450.1 (locus Gly ma11g03450) derived from phytozome v7.0 (chr-ID Gm11; pos 2319072 to 2319762 reverse strand)
tactttgaaggaaacgatagtagaggcagcttcaggtgcttaattctcttgaaatcttttctcccttttttagttagcacgagcaatcaagatagctcaggcaatagagaaataaacttcacggatggttgagaactgtaaagttacttgtcgatctatttccatcacttaaaggaattagaaacattataatgaactagtaccttatatgtgtgttggaaaaaaaatttaactcacgggagatgaatgcatatattttgttcaataataatctgtttaaatataaatttttgtaactaaaccaaattataaaagtaataattgactttctaaacaataaccactaacataataattattataactgaaaggaatcataaaaaacaataactgaaaataaaataaacaatcctaaacactctctcaaaatattaggttgtatttgatagattaggttgtatttgataggtaattgttgatatacatgttcaacaatgtgagggtcatgttgtattatatatatatatatggtgcattaggttgtatgccattttacactctctcaaaatattgtagctatatgtgattttttgttttatgaatttttacaatcttcccactaccactccagccttatgcaccataatatctccctttctagtaaacataataccaagtgacggtggtgagc

SEQ ID NO: 18387 - DNA, 810 bp, Glycine max
  Intron number 3 from transcript Glyma12g05620.1 (locus Gly ma12g05620) derived from phytozome v7.0 (chr-ID Gm12; pos 3733617 to 3734426)
gttccctggatttaagtgatccaaagagtacttctgacatggaacaggatagactagtcaaaactcggattatttttgaaactgacagtaacaatttcacatcagtaactgatgaatgggtatagtgctttctctagccttctagatgtatgtacacttttttttacacacacacacacacacacacacacatacatatatatggggtatacgtttggtgcttggtatattactgtatttagaagatgtaatttggagagccttttgatcatgaaattgagtccattgaactgtaaactgaaaaattttatgtcttccgaatgtggtgctaatgtattaagctttgcatgtaaacatctctatcttgaataaatattcaataaattgttgaagaatttgaaatctaccagtaccgaaaaagaaacatgaatgattcttatcatcatagttacattgatattattactaaatgctgttgcctaaataatttgtttctcaaagtctttagattttggtatctgatattataataggcttcttattaactgaaatggtatatctttcgttgaatttaatcagtatttgtgggctgtttatgatcttattatttgttggctgtttattttggtactaaagcacttcgtacttttgtgtcttggaatagtccattgtatccactgtaacatatctgtcatctgtggattttttttttcatgtttgtgatgtgctggagatgataaggtatatgttttacttaagaaataagaaaagaacattgattatttaaatattggcaatataaaagttttg

SEQ ID NO: 18388 - DNA, 720 bp, Glycine max
  Intron number 1 from transcript Glyma06g38530.1 (locus Gly ma06g38530) derived from phytozome v7.0 (chr-ID Gm06; pos 41483530 to 41484249 reverse strand)
caaaagtaagatcatccattctagaattttactctaaagtaagggtaaagtaagtaatctcagccgttaatgagaaaatcactgattgatattctaatatagtcatgatttgtcatgcatgtacatctaatatcgacagtagttgattttctcatgaaagagttagatccttcattctatacgttcaattgagaatgatcatttcatgttaaatttttgcataattatgtactagagatctcatgttaattagtttttttttatcgattaacgttagttgttagttagttattttttgttagcgggagaattcaaactcaccacttatctcacattaatcagtgatatagttaaaataataaatacaagttgggataactctcactctataaattagttttttgagttaaattagacccaaactcaaattctaatatgacattagaccttattctaactatgttgttggactcattagaccacttgaatcattataagacagcctgcaattatctatacttcacgcttgagatggtcaatcctagacataaaagagtgtgttagatggtctgttagagatcacactcttgatacaaatttttacatcatgtaaaatttcaatatgagatgattcattccaaacatttaccattttgaagaagcttaacaacttttctttcctatgcttaatcatgacaacagctcgcaaaccaaattgca

SEQ ID NO: 18389 - DNA, 253 bp, Glycine max
  Intron number 1 from transcript Glyma10g35010.2 (locus Gly ma10g35010) derived from phytozome v7.0 (chr-ID Gm10; pos 43171023 to 43171275)
gttgcttgggcagtcacagctctagcatttgggtaagtcatacatactaaactaacctcactatgtggccttaattttttttctatcaccaaatgttagtttgtttgattaaccactagtcttttttttttctttaattaaccattgaattcatcttatatatcttcgtgtgttatgaggggtaacaaaaagttgtgtgtgtggatatggaactgcaggttggcttgcaagcaaatacacttaggagggcata

SEQ ID NO: 18390 - DNA, 947 bp, Glycine max
  Intron number 2 from transcript Glyma12g33070.1 (locus Gly ma12g33070) derived from phytozome v7.0 (chr-ID Gm12; pos 36436663 to 36437609 reverse strand)
aggaaccgaggtgaaatcccagtcatttaccgcaggtacgcatgacatgacataatgtgtacatttttttctctttttttcttttcttaaccttgttgcacttgaaagagccgttacataatcattggtatcagtgaaattgagttgtgatatggaagaagaattttatatgatgagttttggtcaatctgtgcagtagaaatgttcaacagaagacaaaaaagataaaaacgttagcatgatcagaatgactgactcttttgtcttggttagcaagtgatttttagtttttcacaaggacacttttttaacccgagtcaagtaactcgggctgaaagagaaattgtgtttgtaagataaatttgtataatttttttgcactaaaaagagggggatacagaaatgtaagaacatggttgatgtgataaagaaagatgaaaaaaatgctaagaaggcatgttttgtatttttttttagttttaattctctggttcaacggtgaaaaaaaatattaactaatctaaaatttagttcagtcaaaaaataagtaaatataatataactaataattattttcaccaaaaattaaatttaaatactactcaaataattcaactttaattttcacatattaattacttgtctccaatcataagatattttagaatgtagttgtacgacatttttcaattgataatttgcttgggaagtcagaagtattgcggtttgtcttttggtatttgttgctgcagcattgactattgttttgtttttctttttctatttgtggattcaaaaagatggataaaaggtagaattcaaaggatgggttgaaaaaagcatgctgaagttacccttttgttttgtggattaaaaaggaaaggaagatttacactgaatgacctttgtcctctgttattgtatttttggcagaacaccgtgcaagt

SEQ ID NO: 18391 - DNA, 471 bp, Glycine max
  Intron number 1 from transcript Glyma13g42880.1 (locus Gly ma13g42880) derived from phytozome v7.0 (chr-ID Gm13; pos 42706253 to 42706723)
caggtctatatgatttctatatattcttctttctttccatttactgttaccatgtgcttgtaattgtgtcagggttctagcttttcaattattattattatttatcgttatccgagtgctggatcaactgatttgaagttgttctaacttaattattagtaggtctcggattcgagtcccttgactgtgataaatacttgaaggaagaactttcctacatgtgcatgcagtgattctgcacaactcgaacatgatttccttccatggaggatacctgtagtctataccaaaaaacttattattgttatgaaatccatccatttgagtttgattaaaaactaatgctttgcctctaatcaaattttcattattagccctcctacccttttccagtttatgggttatatttctaagagctacactgtttcggctatattttgttgatttattttgcttctttaaccttaggaa

SEQ ID NO: 18392 - DNA, 748 bp, Glycine max
  Intron number 2 from transcript Glyma13g42880.1 (locus Gly ma13g42880) derived from phytozome v7.0 (chr-ID Gm13; pos 42706839 to 42707586)
agatacgagtatggtcctttgcttcatagtttatacatataaaacttgttgttttacttttttgtttttttaaaaaaaaatgttatactgctttcattttgccatctcgacaatactatgagatttgactcctctaaaatgattagtttcccttaaggagaaaagtgagacatttcagcctttaatgagaaaatcaacagaatagataaattttaacaaatttataattggtcttgcatgcacttgtaaattgtaataccggcagttggtttttttgtttagcagttgagattccttacttttccatccaaggttgtgactcttctgatggttatgtagttttgctgttaaaaatttttctgccttttcatttttattgtaatcatgtcaaagtcaaacatgacttctgattcagacattggcaaactgctaccggttatgactgctcattaggccaactttgtgtgttacaaactttcaatcatcctatcatccggcttacaaatttagtcttaaaaacataatgcatctgtgtgtaattgtaacgaaaacataatctagaagaagactggaaaaggaaaatagttggccactatatcatctactattgcaagacagttacttcagcttactacttttttttaaattgtgttttcctattgttttagtcctcttatggatcctttatatcattccttaatttatctctatagggaactgttgttcttgtttttcaaccagcagaaga

SEQ ID NO: 18393 - DNA, 700 bp, Glycine max
  Intron number 1 from transcript Glyma13g36760.1 (locus Gly ma13g36760) derived from phytozome v7.0 (chr-ID Gm13; pos 37993485 to 37994184)
ctccactcttctttcagtgtgtactgcaacaacaggtaaattctcttctgtactgcacttcttgtttttatcaccatccgttcatttatttgactaatattttaagtggattttgttttctgttttcaagtttggcttttgtttacatatttagctatatgttgttattgttggataatggatagtccccctttttttgtgtttttattttggaggggggttgttaattttagccatttctttggcatgtttatattctttccttgtttatggtaattttgatcaggttaacttggaattttcatgctgttttgttcatgagaaaatagttaaaagtaaaggattgtcaacagtatgcagtgaattactgaaagggtgtagtatgattttgtagaattatggactagacgactagtcatcatttttatagttggctagtaattaggacagtgaaaggttgtggttgagtttgtcaatattaggtgagaaccagtttgattgattatttaatataaatgtgtcctgggatgggatttatctgcaatcctttttatgcttttgtaatatcaccctctgatcaatgtacatttagttttaggcctatagaaatgatcaccatcgattgtggctctttcttgatttttttccatgtgatttgttgccagataatcaggtagaaccaccttcaagtttggatttt

SEQ ID NO: 18394 - DNA, 716 bp, Glycine max
  Intron number 2 from transcript Glyma10g35630.1 (locus Gly ma10g35630) derived from phytozome v7.0 (chr-ID Gm10; pos 43897802 to 43898517 reverse strand)
gctctcgtatatctctttttactttaattatgattgtttttattattgttatggaccttttctcttgaattccctgcatctcttaacacttttcgtagaatcaattctgatttagaaagttaattctttaggaacatctagaaaatcatgatcttttcatttttttttggtccagggtagtaggggttgttattttctttttctttctttctttctttcttttctttttttatttaaaaaaaaatatgtaaattgcattggttctctatgcgaactcgtgttgtatgggtaaattatttatattttgaatactaaactttatgcctttaaggctaacaccctctaagaagtgaaaatattgaggtttgatatttatagtctaacaaaaaaaaatgttatttatattctgcactgttgagtaaaatattttattagattattgtaaaaaaatggttttatagtgatttgtgaacattctgtatcgaacaattttattttatgtagcatgtttgatttgttctgttattcatgtagtcttttatattaaatcagcatctatgagggtggtaacttgtgtaaattattctagtgggatatcagctgatttttaataaactaaggtttcacaaatgctttgcttttagtcatattataatttgttatcttgttctcacagtcactaacacactcaatgttgataatgagttttcctgcag

SEQ ID NO: 18395 - DNA, 349 bp, Glycine max
  Intron number 1 from transcript Glyma10g35630.1 (locus Gly ma10g35630) derived from phytozome v7.0 (chr-ID Gm10; pos 43898524 to 43898872 reverse strand)
cctaccgccgtcgacacctccgccgtttctcagaggtgaataaaattggaaatctttctttttctctgtttgattcgtcaaatgaaatctttcaaaaatttgaactttttcttacccatgtagaaataaaaaagatttttttttcggttttcgattattttttgcgtgatcaggttttggattcttcgtggcaagcgaattagagttcagaaattttgatcctatatttgatgatgaccgtttattcatttttaaaaaattttaattttattttctgatattgagtttttcgttggaattgttcttgatggttttgttttcatttaattgcagactccagaaggaatta

SEQ ID NO: 18396 - DNA, 509 bp, Glycine max
  Intron number 2 from transcript Glyma14g01810.1 (locus Gly ma14g01810) derived from phytozome v7.0 (chr-ID Gm14; pos 1043866 to 1044374)
gagccactgctctcgatgtcagtattgactacttctcaggctttcttcattttcattcttctttgctaattctatgttttagaatcatattgggggtttaaatatctaacctgaattgggttgatgagctggtcattggaatgttgtttcctgttatatgaaatgctctgcacatgctatgaatttaacgtttacatttgttcaacaaatttacttttggctccatttcattgcttgtatagtttgggtgacagtttcgtcgctctacgtaaatatacagtgggtttttttttttattgattttgtaaaacgcttcagtgatatcggattaaagcctattattttgcttcgtggaaatgccctaagtggaccttacttttacttaattttggattctgcctggttttgatatgttaatgataagtttcttaagtttaatgtatagtaaggtgacatgttctagtccatatcttgcgcagaaatttcaaggtttgctatactcaactgca

SEQ ID NO: 18397 - DNA, 679 bp, Glycine max
  Intron number 3 from transcript Glyma14g01810.1 (locus Gly ma14g01810) derived from phytozome v7.0 (chr-ID Gm14; pos 1044378 to 1045056)
acaggtgtgttccccgagctttattctgtacacacctattctgtattactgttattatgttcccttaaataagttgtgcttttgtttcttcacgtgaacttttgtttccctgaagtgttgctgttatatgaataggaaaacttgagctcgtcatttagatggttctatatttcttgttttgtgattttatgaagtgctctttgttatggataagcatggacatctttttaattttactcaactgaaaatagtatgtaaaggtcccatggggaaaacacggtttccattagtattaagtgcaacaaatgctaaaattaatggtcattttcaaataaaccataggggcttcccaatcatagccattatatgcccctacttttgctgcagaaaaaatttgcaaatggatgagaatgtgggatatagcatgtttgttgccaccacctttggagggtagggggtagaaaaggcaagtgagcagtggcaagaacttgttgtattgtagatgttgaagaagatcattgccgacaaattaacattgtatgcacttcttggggggtcggggtattcaactcccaattagttatatttatgcatgcctttgacctctgttattaacagcatgctgattcttttgcatgtgacacctcagtgcctgctaaagcagtagagctttatttgg

SEQ ID NO: 18398 - DNA, 449 bp, Glycine max
  Intron number 1 from transcript Glyma06g09000.1 (locus Gly ma06g09000) derived from phytozome v7.0 (chr-ID Gm06; pos 6609686 to 6610134)
tgcaagactagtgggaaaattgtaagttcattactcatctttctatctctaattaatacatattatgatggatatcgataggacaaaactttgatatataggtgtttttggtggtgttcttcatcataattgattttttttttaagatcaatatcagttcttaatttattagtttatgttagtatgaaagatttaaacccaaaacatttttctttcctatttctcgcttaatcaccaagtcaacttataacttctatcagaattgaaattttaacttagtattttatgttgaccattaatggaaacttttattatgttgattgaaaggtacatatatattgatatgttgtgtgtttgtttcactaattaatctgtgttatggactttgttaacgatggatgtgtgatttggaaggtggcaagtgtggaagtgcctctgtttgttacttt

SEQ ID NO: 18399 - DNA, 548 bp, Glycine max
  Intron number 2 from transcript Glyma11g19250.1 (locus Gly ma11g19250) derived from phytozome v7.0 (chr-ID Gm11; pos 15960587 to 15961134)
tgcaaggatctcttttcttctctctctcaccaactgtaagcagcatcacatcctttctaatcttaatgacccattttaccccctaattattattaatgaatttcatcatttgagattttcttttcttttttgaaatttattttaccatttaagtttttttttggtgcattttatcatccaattttatttttcaggattcttactaccaaattttactgcctcaaaatgacgttgttaagtagaaattaaaaactcgattgataaaactcctgaaaaacaaactataaaattcacaatacaatgataataaattatgcaattacgcctattttctaacatgtttttttttttttagttaaaatttattaaaaattataaattttagtggccccacgccgagtgcgttgctggcgcttctctctctctctcccttttttttttcttcctaatttataaatttaggcttcttagtaataattctttggcttcgttgatcggtttgtgactcctccttctcctcgtgtgcagtgaccaggagagggttaatt

SEQ ID NO: 18400 - DNA, 1033 bp, Glycine max
  Intron number 3 from transcript Glyma11g19250.1 (locus Gly ma11g19250) derived from phytozome v7.0 (chr-ID Gm11; pos 15961171 to 15962203)
cgaggacatccaggtaatgaatatccttgtcaaatgttttgctgagaatttgttgatgctgttggttgtttactgttcaaagtggaaattaaaatcttattgtatatgtggataacgtttccttctaatataatgtaatgatgtatgtcaaattaaggccttgtaacttgtttggttttatgtttagggtttagggttgaagccttctaacttttcatgttttctaaaatttctgtctcctgaacccacatttgaatgtttgtttcatgagtagattgttgttttcgaaaaaagttatcccttgagcacctgaagaaaacaggagataagaaaacatctctcaactgtttctgtcttttggtttttaaagcacttgttttggaaatcattttcgaaatgcaattgattttggatgagaaattgtttgccgtgtttttccaaaaatgtgaaaagagttgtttttccccccaaaaaaaaaggttttagaaatcccccaaaaaaaaaggttttagaaatcctttgatgttttacatcttcaaagctcaactttcttgtgtcaacaaggcattccctgtttaacacctcgaaggagattttaaatgtgtcattcgggtgcctgcacagggtgttttctgtcccatttgtatagttgtgtttcctaagtgccaaatcaaatgtatagttgtgtttcctaagtgccaaatcaaatgtatagaaccagacttctatggtagattcatgactgttggatttttttctttcaaagagaattacaaaattttattgttgatgtgtttttttacatcacattagtgataatgagctaagtgtataaacctggatttttaattatttagttttagttctaacttttaacggatcctaatggcttcgtgtgatctatgtaactcatttcacctagtgggacaagactattgttgttatttagagtttagattaaatattttgagtaataagtttctaagcttttccttgctcattgcagcattggtgcagagggtgtaagacgtgc

SEQ ID NO: 18401 - DNA, 528 bp, Glycine max
  Intron number 1 from transcript Glyma13g32830.2 (locus Gly ma13g32830) derived from phytozome v7.0 (chr-ID Gm13; pos 34897367 to 34897894)
tcgtttcgtggatccttactcatcacaagtgtgaggtgactctgaatctcttattaacgaaatattactatttacaaagctgttttgttatatcttcaagttctcgttcgttttggccatctctgtttaggattaggatttcgtattttcataattcatcctataaagttcctgtgttgatagatctttaggcgatctgcttaatttagttaatgaatttatatatgattcttaggctgcttcttatatccgttaaagtcaactcagcctgtgtgagttttggtcttagcacttgcaatcatgaaattaattatttcatcttactagggtcttggggcaacatttttcgtataattactagcatcaaaccaatttttctaacttttttcaatctctatccctgacttctttgatttattagaaattaaatgaggataataagctttaaattcttgctaaactccctttgtgttagtttcatgaaaagtaagctaatagttaatcgcattatggtggagtagaaaaatt

SEQ ID NO: 18402 - DNA, 802 bp, Glycine max
  Intron number 1 from transcript Glyma08g08300.1 (locus Gly ma08g08300) derived from phytozome v7.0 (chr-ID Gm08; pos 5958002 to 5958803)
agtgagttttttttttcctcccttttttctagtactttgctttttgattggttagtttagttgtttatttaatgacttattaggtgaaatgaaaccctagcttctgaaatctgacttggtttgtagttattacttattagggtagttaattagttgtccgtgttgtttggactaagttgcagcttccaataatgacactctgactaccttattttcgttagggttactgactaacatgatttaaataatcttgttcggattgcattcaatttccactgaatgcgtgctagtcagataatattatctaataattgctattatctgcccctgcccccttcatgtatgtttttaaggatgattcttgtgtagacttattctaaggcatgcacttaggacttaggttgactgcttcagctagtgctctatacgaaaatggatttggagagtttctccttagtagagaatttgtgacttacaataaatgatatgtgtctaatacattgatctacaagtgagtcttattgcttatctcttcacataagagaaacaacaaccatcgtggtgctaaaaattgaactgaggagtccatttggtaattatcatacgaggagttgaagacattggaaagttggcttatctggtcgtgaatgtcttatgcatccatagctgttaaagcataagagtccaattattttattatcaagcttctttcaaacacaccattaggaggtccatgttttttagctttatagtttaccttgttcttataggggtaacatatgcattttcttttcttgcagtg

SEQ ID NO: 18403 - DNA, 791 bp, Glycine max
  Intron number 1 from transcript Glyma10g44040.1 (locus Gly ma10g44040) derived from phytozome v7.0 (chr-ID Gm10; pos 50539036 to 50539826 reverse strand)
ttgttgaagtgacttctcgaggagggattgccaaagtaagatgtgatgagaacttgatttattgttgaagaaccattgtattattttatatctgatcccaaccaattgttattagcattttcatcggcttgtgattcgctctgatagaatgatctcccgcaagcagatgaatttgtattaaatcaattaatatttcctggtgttcattgtggttctgctgaactttgtggcttcaaataatagaaggtgttttactacaaagttgtagttatccaatatgttctcaatatatcagggaagcttgtcaatttccctttttcattatgttgatgtttatcaaggggagaccagagacacaactttttccaaagtttgttaattttttcattatcttcattggctgtgcatgtgaaaagggttcaattgtagcatatgatgaattttctctttaaacttgagagagcgtctcaataaatttatgtttcatgatgattgcattgcatgttgtcaaattgtcaataatggttttgatgcttttataacatgtttgattatattctagttcaatttatcttatgtttaagatttttaccttggagtgatttgctcaacatcatgataataaaatgtcagtagtttttgggttttgatgcattttgtataatattctggcagaaaactgtgaattattttcactattctttgagccatatctttttgttttatttggttgtagtgctaaaagttacagtatctggttaatctgtcttgcagataattagagagaggaa

SEQ ID NO: 18404 - DNA, 764 bp, Glycine max
  Intron number 3 from transcript Glyma13g32610.1 (locus Gly ma13g32610) derived from phytozome v7.0 (chr-ID Gm13; pos 34731950 to 34732713)
cgcctcagaaaagctttgaatagaagagaagcaaggtagccatcacgcaactgataagctagtatatacactcactttagattaatgtaaaattttgaactataaaactatataagacttttttaaggtaagatttaagaagtgaaggttttaaattgctgagaatgtgactcagttgacaacacaattgaacttgtgtgagaggatttagtttcaaacgcattattggggaggagaaacaattttaagtttgactaagtccaatccaaacatccagtttactttaagtgtgtgtttgaatggatgtctacaaaattgatctttgctaaaattgactttgaaattatgtaatttatgtttggatgattataatttcacatcaaatgggtgagcaatgcggaacctctttcttcaggcttcaagcaatgcatgtccacttggtaatgactcaaccaaacacccatttaaaataactttttttattcaatagttagctaaagttatttctaaccaaaatcaaatataaattcagaattaattacttaatatggaatcaaacattagaaaatttaccaaaaatcatgttaattgttatttcaacgtggttatggaaaattcaacgtgaaaccaaccatgtagtaagcttatatatttacttgcaagaagtctggttcaattattttcttgtgccattttatttattatgagtgcaatttggttgtttctcagtgcaaacttgaagtgcccccttacagctcctgcca

SEQ ID NO: 18405 - DNA, 829 bp, Glycine max
  Intron number 1 from transcript Glyma07g29650.1 (locus Gly ma07g29650) derived from phytozome v7.0 (chr-ID Gm07; pos 34651009 to 34651837 reverse strand)
accaaccagtggccccaaaactctcctcgctttaggtaatcttaatgagttcaaagtcaatttgagaattgagatttcttatgttatcaattggtttgtgatagtatgaaaaagtaaatttagtctttgtttttgtttggtaataatcaatcaatttatttgctaactctgaaattggtataaattttagattcagttcttcagtgttgtaaaaaagtatatttagtggcattggtcaatgaatttggtcctcaacacatagtaacattagtgtagggtcaaaatgatttatttagccatcagcccttgactccctgatgagaccctgagaaatttctgcatgtttcaatattttaggacggttataagactaattcccagtttggaatttagcaacaaaaaacttcttgcccctcttcaaggaagtgttcagcaaaactcaggtcatccccactaaggatcaatttgatcgaagattactatagtgagaaattaaatgtttttttgttaaatgtaaaggactaaattacttgttctcgtaatgttaaggaccgagttcattgatggcaccaatttcatgacaaaattggtgtttactctagtgttaatcttgcaaatgatcaaaaagaacaaaacaatataatttatttttgacacacaatagagattgttctacaccagcataactcatatatgatcatatatatgccagtctgactttgacaatagttatttaaaatcaagaagaaacttgcatatttcaaaattaaattcggaagagaaatattcatgggttgattatgtttcgttagggaaacattgcaggagt

SEQ ID NO: 18406 - DNA, 937 bp, Glycine max
  Intron number 1 from transcript Glyma06g19590.1 (locus Gly ma06g19590) derived from phytozome v7.0 (chr-ID Gm06; pos 15888143 to 15889079)
aaaagctcttgttggttgttgagatagcgaagaaggtaaaatgactagttgagattatttcattgacttgttctgtttttggtttgaattatcttctccaagataagaacttttgttttccattttaattgcttcctctgggattgtagggaccttaattagtttttttgaatctttcttcttcttctctctctctctatctctttctccctgggtgttaatcctgtgttgtttggataaggtaaatgcatgttcttctctgtgtttcttgattctattgttatttgcatttgaagctgtttgcttggggagaaagtatttttttgctcagagacaaatgaaaaaaaaaatgtaaaacaagattgttacatgcatgtggatgtaaaaaatgctgctacatattgcttgaaattttacaataaggaaacaaaaaaaatttgaaatgcaatatgtaaaaatcaagtcttttatacagtgagtgattattgacgaataaagcctgctaaataatttaatttttgtgtggacgtcctttagcgttccgattaacttgccacatttttattcccattcataggaattgggtgaatttatttggtttcctaattgcgaaaagctaataaagggttttgctgaattcgagtgttatatatttgaattgaagtgaaggagttgttggctgcttagaagtattatacctagccgtccaaaaggttcttgttttcacaagcttcatatgagaggcaaaggtcaatcgcttgaaaggctagtgattgaaaagtgatgttcatgtttgaaagtctaatctagatatagttgtggaggtttcttatatgctttttgattgtgagtatcttcttgtttttaagttagtgattctgtgtttctgattaaatctgaatgtgcttctgtagaattggacgatcaaagatcgtat

SEQ ID NO: 18407 - DNA, 581 bp, Glycine max
  Intron number 1 from transcript Glyma08g18380.1 (locus Gly ma08g18380) derived from phytozome v7.0 (chr-ID Gm08; pos 13799150 to 13799730 reverse strand)
cttcttctttctgcttctgggttggtttgtctttggtaagtacacattctgcacgcttttccatgcacaagatctatgctttacacttaacttctaacaaggcaaagaaaatggggttcattcaaacacaccccacatgaataattattcataaaatgcgtgaaaaatgtaattttgcttgatgggcattaacggaaaaccccgaatctagagcgtatttggattgaataatttggtttggtgggtacctgtatattagatgataattttttttaatgctttccattctatctaattttgattgatacctattttttttccagttcgattactcttgtttgtgttctgattttaagccagtcttcttttttttttaaaaaaaaaaactgctgttaattttgtaaacagattctgttttggttgaaaagaagtaattggttgatgactgttgagcattgattaatgttttatgttagatactcaaattagcttactaattttctagctttgtttattacttactgcacttgtttactgatacattgttgcacttttctcctggcatcagtatccttgatgga

SEQ ID NO: 18408 - DNA, 911 bp, Glycine max
  Intron number 2 from transcript Glyma05g34690.1 (locus Gly ma05g34690) derived from phytozome v7.0 (chr-ID Gm05; pos 38930604 to 38931514 reverse strand)
caattgcttgtaaacttacttgcggtcatgtaagagcttaatattcgtgcttttgtttattcgattaatatttcagatgttgataacagttttggaagaaaacataacttctgctttagtttttaattgatttaccagattatatattttgatcaatctgtcacaaatatctctcttgtgcgtttttcatatttttatttttctttgctagatgttaccatatttgtcatatattgacagttgacagtgatctctagtgaacttgtgtttattaacttacctctctcgcttgattttgaaattggtttagtagatcataaaacaaaaaagggatgggttatcttcaaatgcatacaatcgatcaagtaatttgccttttttaagactcatgaccatgcattagcggttgactggttgttgttattcctgcagttcactgtacaatttttattttcacttttttttttcatttatgcctatggttgagttctttgttttttatcaattgaagatgtcaacatatgagtagaagagaaaaatattgtagttaaactaattaattagacagacagacaagaagagcttaaaaattaaggtagaattagatttagaaaaaaaaaatgtgggcgcatctaactccccatgaggtagaagtgtccatgttccaaggttcaacatctctttctattttccttatttgctaatcaaaggaatgtaccatctactttgtgataatttagactcatctgtagtgttaagtgttgttggggtatctaaaatactaattatggatcttctacggctatgtaatactcttttgcttctaaacataaaaaaaaagtatctatctttcggtaaagaataactgagcaaccttgacctgtaattgcagatagaaggaatccaggttc

SEQ ID NO: 18409 - DNA, 679 bp, Glycine max
  Intron number 1 from transcript Glyma05g34690.1 (locus Gly ma05g34690) derived from phytozome v7.0 (chr-ID Gm05; pos 38931547 to 38932225 reverse strand)
tcactgttgctgtctgcactgtcgttatacttgcagtatgtaatgtacctctctgctctcccactcctttttctttttcttttgcattggatccaagaaaggaactttatttcttctgggtatgatctttgtggcattgtgctatttaaaaaaaaaaatggcattttgcaaatgggtatatattagtgctaccttgctaagtttaaataggtattttcaaagtcaacgaaacaaatttgccaatagttttctttttccctactttcctaaattgcttcagctaagcataagatcggttatgaacatggtctcctaatctgcagattcattgctgttgcaatgccagaatctgaacggttagttttgtgcatttttttatttgaagttcgcttgaatttcatccatctataggatggattttgtaatcgtatcaaaacaagagtatgctgtaatcattcatcatcttttatcatttcaatcaattcaatgagttacttcttatgaaactcctctcctattctttgagctttacagtgaatagccgcatcaactttgtgtgatttgcatctcttctcaactttctgatatctatgatttccttgtaaatatttttgtttaatttgtaattcctgcatttcttgcagctacggagaacagttttactcagaccctttaagct

SEQ ID NO: 18410 - DNA, 890 bp, Glycine max
  Intron number 1 from transcript Glyma13g39430.1 (locus Gly ma13g39430) derived from phytozome v7.0 (chr-ID Gm13; pos 40033637 to 40034526)
ggctcaggttcgctactggtggtggtgaccacaaggtatggattttttttctgtctttgaggctcaaaatttgtgaataattttgaattttggatgtttagttgtatggtattcaaggaagtagcaccccactttgagttaagattttaagtcctgtaattcttgaatatggaatttaattgccttcccacctcctccttttttctatcagcggaatattgctttctatatgtttccaattaattgaaatttttacagtttcttatgaagagtagaaattgttaacatttttcgagtgttcttaggcgaatttttggccaacccccataggcaatttgtgaagggaaacctgccataaggcacaatggtgtgtttatatggtggaattttggccatccaccattaataacactgcattttcttgattcaatgtagactgctcttcatgcagactttcagggcagagagtatctgtatgtgtttcatatttatgagaatagcttcctaatgagcttgccaatcgtattttatatacacacaacttactcaggaaaccaaatttccttggtgccttctggtgaattactttcatattaaaaaagtaagaaatagtaaagatctgacattaatgcattgcctagtgtcaggttcagctaaacatctaagaaatataatttgtgctgaaatttcttgtttctcttcacttattttgttttcataactttcctgtccctctgtgtctgagaaatctagctgtatacgacttctggtcttctgggtaggattagagtgggtcgatgttttcaactttactctcttgatttgtttacagcacttgaattaattctcatgcattcacattctcaactatgtactacacaggttcgcat

SEQ ID NO: 18411 - DNA, 552 bp, Glycine max
  Intron number 1 from transcript Glyma07g12160.1 (locus Gly ma07g12160) derived from phytozome v7.0 (chr-ID Gm07; pos 10435018 to 10435569 reverse strand)
cattttccattcgtagacgccaagaaccctaacaggtactgccccttctcgctctgctcaaacattctcttaccctcgtattttttcttcaaatcatggcatgggttcacatcaaaatctctttttttttcgcccccattttcacactttcattttaatcttagattttgttgatctgtttagtttttggctcaaagatctgatttttttgctctttttttttcatgctatagtggatcttagatcaaaacccagaagctgaaatctttggggcatgaggttttgcatgtgttcatttgtgggatttgggtaatttatccccttttctggtttgactttatttgagctgaagcaaaggtgagtttttggatcagataattgcattttgctgtttcgtttcttctttctattttgcatattaattattgtgttttgaattgtgttggtttgttaggagaatgcaatggacttggataatttgtgaggatatttaaaatattgtacattcactacattgtgttcctgtaattattttcatcagttggtgttgtg

SEQ ID NO: 18412 - DNA, 388 bp, Glycine max
  Intron number 2 from transcript Glyma11g35840.1 (locus Gly ma11g35840) derived from phytozome v7.0 (chr-ID Gm11; pos 37434983 to 37435370 reverse strand)
gcgatctcgtaatttttcatcatataatagcaaaggtatcatcttgttttttctatcggtacttttgaaaccaacttgtcaggctatggaatcattctgttaagaacgagaaagccctcaaattgtaggactaatctattgtgcagaaataaataattaaaaagaagaaatgtgtacttgtgttgtatgttctagacttctagtagtaaatggtaggtacataatgttgattttggggatttttgggattagatcatcaagccaaaattttgcactgtaaaatacaaagaaagtggttttctttttccattcaatttttggtttcattgtttgagctgcaattttgttgcgcgacttcacttgtatttgtaactcttttgatttccag

SEQ ID NO: 18413 - DNA, 750 bp, Glycine max
  Intron number 2 from transcript Glyma13g44030.2 (locus Gly ma13g44030) derived from phytozome v7.0 (chr-ID Gm13; pos 43584314 to 43585063)
ttggtaagttactttaaccccacacacttgttgttaacttgttcatactgtgcaaatgtaaggggtcaagtgtggttttattaagtactttatagcttagcgagggaatttctagcatggccggaacacctttgatgcaatgcagtttttagcctttgagaagaaaaagaaacagtatatttgatgtttgctattctaaattttgctttccgaattgtgctccaacttaaccccaaatgaaggcatttgtgtgtggctgatcatatggatcaaagatgttgctagagaagattgtccggtttccagaaattaggttgaaaagctttctgttaggcttgatattttatatttaagaaagtatattgtcatttatcactatacataagcttttgatatttggttctaaacttctaattgaacctactctccctataagaagacaaaatcattaattttggatctatctccatgcatgtagcacatcgaaaatttctgacactaggcatgctatagagtagggacttgggagttggaggggcacaacaaagatatttttgaatcatcatgtattatttcttttttgtccaatacaatactccctacccagtatttttttactggtacttttgtttcttcttttgcttttatatgttctttcatgttacttcttaatgccattttaaaaaattgcatatttttttattcaaatcagataaacaatatataacaaacatatttactatttggtag

SEQ ID NO: 18414 - DNA, 351 bp, Glycine max
  Intron number 4 from transcript Glyma08g42410.4 (locus Gly ma08g42410) derived from phytozome v7.0 (chr-ID Gm08; pos 42404634 to 42404984 reverse strand)
caagtatgaccctagtccatgttcttgtttttctgtatttatggtttttggggagaggggcttgtctaagttttactggctttttctgctttatttaagatgaaggtctaatcctttgtcttctttatattagtttttccttctggtaaatatgattgttttatttcaaaaaacgaatactaatataactattaattactgatttgatttgattagcctttcattttacactggggagcaatgtagcaattcttggatagttatatacttatatttcttgcaacctgtttagtttcaaatagttaccaagtattggttctctgtaggaaaacagagtaggcaagtaaggac

SEQ ID NO: 18415 - DNA, 979 bp, Glycine max
  Intron number 1 from transcript Glyma08g42410.4 (locus Gly ma08g42410) derived from phytozome v7.0 (chr-ID Gm08; pos 42405850 to 42406828 reverse strand)
ctttcggatccaccttcgttgtttcgatcgaatctgtaagcacatcaaaattttctcgatctgtgttttaaggaattgagtttctgtttcgattatcttaatgatctatattccattttcttttcttttttttgttttttttttaaattgcccttttgatgattttttaattggattgggtttgctaaaagaaaaataggaattaggggatcgtgggaagttttttttttttaataaataaccaaaatatctgcaacagggggaagaaccttataaatcttctgtttttttttttaatgttatgaattaataaaactgaaggttaatatgatcaagttccaattttcagttacctttttgctgaatatgatcgatttgatggtgttttcttcataagcatagctcgggtggttggtgtggcgtacaaccatcaattcatttattttcaacacaacccttttttatctattattttattgattaatcttttaaatcaagataattttgaatcagttttctttaattaatttttaaccaaaggttaaagtgaaaaatagatttattgtctaatggatggagaggaattttagtagtagcagtttaatctatatatcagtgtagtaatttttatactgtcagtcaatgaaaaaattgtcttaggtataacttttacagtaattattaaaagtgaacaaacttgtcataataatctgtgattgaaagtcaacattttctaattaaattttcttcttattgttgttattgattttaactactaattcatgtaccaaaaaagaaagggtggtattttggtaattattgttttcttggttatgtgaggctaagcttactgagaaacaaaaacttggaaaaattatacccatcatctgaatttagttagttttgatgattagtttttattttgttcccttaatgaaattttgattgttgtgttgttttcttcgtgatcagtgttact

SEQ ID NO: 18416 - DNA, 1022 bp, Glycine max
  Intron number 1 from transcript Glyma08g47040.1 (locus Gly ma08g47040) derived from phytozome v7.0 (chr-ID Gm08; pos 45977753 to 45978774)
ccacaccttcaactacctcgtcgataacggattcagtaaactactctctctctttctctctgttctcttgttttcgctgatctgcatccgttatttgattttgctgtatctattgttggaactggattcggtgcgtttacgcggtggtgaacctgcgccgttttgatgaagatcggacggttcaaatttcggatgcatatttaaaatacgatttgtccgatcttcatcaactctggattaggctgttcgttacttcttgatctgcgtgcaggaaatggtgcggaaattgaaaaaaaaaaaagagcgtttgttactaggcgtgcgttgcttgatttgattaggtcaactaccgcgatcgatagttgttgatggaatcttcgattggtttcgttgctagaatgtgaaaaaagtgtaaaggaagatggaaaaggaagcagtgaaagttattttgtgcaactgagaaatggatcgtttacgttgttgtgtttttaggcatatatagtagtttctattgttgcatctgttgtagttgttctgttaactttctaacgtatggcaaaacaacatttagaaagggatattgaggaaaaattttcctttattttaattttggtagctgctgaagaggatgatcaaggttttaatttgcggttgtggtttcatcacgatcgttgacattatggataattgtggctgatgttgccacaattgcagttgcgatgcaaccattgtggagagtccgaaaactgaggatgattgaggaaaacttggtaatgttgctaaggttttgaatagaaatcattttggttgttctggagatgcactatatggaattataaatgactaattctggctttattgctagtagcatgactgtgttttttgaacttgctgctttctgctggtgatacttttgtttttgtttcatcgactgaattaataattactgttagttggaactaattaagtgcctgctgaatattgcagcttactgtgtggttgccgttgagtctgctggacgg

SEQ ID NO: 18417 - DNA, 546 bp, Glycine max
  Intron number 1 from transcript Glyma12g05470.2 (locus Gly ma12g05470) derived from phytozome v7.0 (chr-ID Gm12; pos 3646479 to 3647024)
cgaaggtagtttaatttattttggtcatcgttgcaattttgtttttcccgcagaatccgagatcgtgcagagatgttttgaaaaaacggtttccttcttctttacgcttcacgtcatcgttttgctgcagtgccgtgtgaaaatgaatctccgtgttcgttattttgatttgctgaatttccgcgtgttcagatcttttcagtgtagatctcttacaatttggttggaagcaataattggccttgtaatttggaaaatgtatgactataatattttagtaattttatttatagataattcggtttaatttaatggccttatggcacggggttaagggtttcctgagtgaaattcgtatcatctacgacggcattagtattattcacgctggcattgcgagctttggttcagatgaatgtgctcgtatttgtatgtactttctattttggttccctgtgaacttttattttggattgattatgatatggcaataggtgttgcttattctctatctttaggaaagaagtgggttttgcgtgtggccag

SEQ ID NO: 18418 - DNA, 748 bp, Glycine max
  Intron number 1 from transcript Glyma08g20330.1 (locus Gly ma08g20330) derived from phytozome v7.0 (chr-ID Gm08; pos 15366292 to 15367039 reverse strand)
aacgggtccctcccgttcggtgcgtgcgtttttttcttctctctctctctcgtgattttgaattttctttttctaactgctttggtttgtgagaaaactggaaaatgtttttctattcaatttggtggatttggttgtactgaatcttcaattcgctggcactgttgagaatgttgataattggttacgcctctagctggatcattattgttgttaggaaaatttttgaaaaaaaataataattaaaaaaagtgaaagacgttggtttcactttctttcagcttacttgagcgtttttttttggttcgagacattgtgatgtagcattgcatttcgtgtttagctcctcgatttgaattctcggagttctcatacatgggaaaggaactagtgtgtaacaggatctcgggtttctttgctctctttttttattattaatttattattgtcattgttattattttcgtcttagtttatagatttttattttattttataaaaaagtatgatgtcgaggaatcacagaaattgaattttagcctgaatggttttttttttttcgcattttaatgtttgcatgagtttagatttcttagtattaagttattttcgtttttgatttattatgcttatgcagattcaatagtatgcatccagtcagcagtgtttatttgctcaaggcaataattgtttgtatgtgtatgtgttgttaggtttaaggagaagaaattgaggacaaggggcagtt

SEQ ID NO: 18419 - DNA, 754 bp, Glycine max
  Intron number 2 from transcript Glyma13g23470.1 (locus Gly ma13g23470) derived from phytozome v7.0 (chr-ID Gm13; pos 26868419 to 26869172 reverse strand)
actggtaactaacatcaaactcttggttgtttctctttatggttgagattattcatatgtttatggcatgtttgggacatcaaatttatactgacatgtcaccgtatattgttatatattgaaagattgtcgattcttttaactgctttaaaagtcatattcaaagtaaaaaaaatgttttatagtgtataattaaattgaagaaaagttatttggaataaaatgattacatgaattgaatactacaaatcatcgtgtattatttgtgttgacacaattttcatgccaaaattcatttctgtttgaaatgggctcttgaataaaggttgaaaaaacgctggtatagaaaagcaacaaatttttggttttggttcaaaaattggtgtgggatgacccttatagggtgtttgaataacatacaaaaatcaattttattccacaaaataacggtgatatcataaaaattataaagttagaagtaacaatttcgtacttttccttcatcataaaaaaataattgactatttttcgttatggagctaaccctaacacactttagtaactctgttagtcaacccattaggtgtagcttagtgataagaagtttgaatagtttacatcaggtttaaagtttaaatttcatttccacggttgtacatcagaaaaagattctgttagtcataaaattcttatatggtagtcgttgtttaactcattctgtgaattaatgaaacgcctgcttggttttgtagtt

SEQ ID NO: 18420 - DNA, 504 bp, Glycine max
  Intron number 3 from transcript Glyma05g30160.1 (locus Gly ma05g30160) derived from phytozome v7.0 (chr-ID Gm05; pos 35587259 to 35587762)
agaccctgtaatttcatttccccccttttcgttttcttcttttttcactcaattaggggatggagtttgcttaaaattacaaaaatgccatttttaatcactcaagttgccgaaccttggcaactttagtccttagttttgtaattttagatgctaaaaggattgttggtttggtaattttagtgattaaaatgacattcttcgaattttaggaactaaattgatcaatgcggatgatttcatagactaatttgattaattaatctattttttactactattattgaacttaattgaaaggcattgatattataaatgtcttgttatgtatggtaaatttgtttgacttttctaaaagttatctcaagaatgatttctaattggttgatagtacaagatttttcatactgacagttaaactcggtattgtttctttcctttctcttgtctgtaacttttccttttgcagaccttcacgagtttcttacttctgtttattcggag

SEQ ID NO: 18421 - DNA, 643 bp, Glycine max
  Intron number 1 from transcript Glyma09g36020.1 (locus Gly ma09g36020) derived from phytozome v7.0 (chr-ID Gm09; pos 41896496 to 41897138)
acctacgttggaattacaaacaatttccctcgccggtaattttcattttcaattaaattgtagtctaattgtcatcttgtccaatgggtgctgaattttattttattactttccttttgatgttttgcatcgcatttctgtgatgcgacgtatcgtactttttgtatctgtgtgtctatgttttttccccattaaaattagtcagtgatctgattagttttggggttagatttgtttccgagggaaattacaatacttctgttctgtagtgtaaaatttcctaggattctgctaagaaaattgcagtttgagttgtgacactagttaagttagaggttaatcaatgtaaaagtaaatcactattcagtaaaaaaaaaaagtaaatcactattcagtaaaaaaaaaaaagtaaatcattactttcctttatgacgttaatgtgttgtcatacaccccgttcaaattttgttcttttggtctagcttattttgttatagctttttatttaccctcaatttgatgtgttccatttacaaagctgatgtctgcaatttaccctcaatttaaagaaataggtgtttgatttgtacttatcttagttggtgtagtttgaagcagcataacggtgaacttaaaggtggtg

SEQ ID NO: 18422 - DNA, 718 bp, Glycine max
  Intron number 1 from transcript Glyma07g18140.1 (locus Gly ma07g18140) derived from phytozome v7.0 (chr-ID Gm07; pos 17887444 to 17888161 reverse strand)
caggtgcacaaaatgccgctatatagcactattttttttcttacatataaactaacggtaaccaactgaacttgtacttgcagaaactacttcctagcaaacttgtaactgaacttcgataacttgctaattgtaattacgactcaaacgcaccgtttaaatggattttttttttttaaaaaaatagtcaatgtctcggcatatttttttttagtttaaatagcttgctactggaaattaatgttaaggcgtgtttggattgaatttattttgctatttgaaaagcttatgaccataatgttacagagggatttcacaaatgagtaattaaccaaatgttgaaagcaaggaaattttgttctgactgtctcttttgcaaaatgttgggaatgtaaaacgaaatgaaaataagatgggaatgataacacgatgactaaaagggaagacaaaaaataatccaaacacccttttgtaatcaaaaggaaaatatttaacgtcaacctcattttgaggtagattggagtggaaagaagagagatataaagaaaaaaagtagagagagaaaataaatgatgtgatgagaaaggaagggagtaatagaaagaaaatgaggtggaatagagagcaggtgtatgtgtataataatcctaatcaaaatatgtggcaggcaagtttctaattagtgtaatctgagcactcactatgtatttgcagactc

SEQ ID NO: 18423 - DNA, 666 bp, Glycine max
  Intron number 1 from transcript Glyma11g11320.1 (locus Gly ma11g11320) derived from phytozome v7.0 (chr-ID Gm11; pos 8065725 to 8066390)
acaagaccagcacctacacatgtgccaatgctaactatttgattattttctgccccttcccctataccaggtacacgtacaattactctttcacctttattcacccataatgtttctttagcttcatttctgcataaatagttgtaaataaagtaagggcaattccgtcttttggttggagctcattattggcatggaatagaagtttatttcgggtggatggacttttctttttgtagagtggggttaagcaatgatgcacagacgtatccttagaagtatattatgttctgtcttctttttttgtcgttgagctgtccatcttaattcttatatataagaatgggcgaggccaaggggcttttatgtgactggtgaaatattaattaattaattgattaccatgagctaataattggacttattttgttttttttaatgaataattgtaacagtgatgttgaaataaatcaaataacatgccacaagtataatagttttctataaaagcattgatcatgcaacagtgaacatatttttttggtattgcatgcaaaataatgcattttgattatttttccaatcacccatttgctcctttgggttacggagaatgattggttacttccatacaatgattacccgtcacaggtccagattattttg

SEQ ID NO: 18424 - DNA, 545 bp, Glycine max
  Intron number 1 from transcript Glyma12g31640.1 (locus Gly ma12g31640) derived from phytozome v7.0 (chr-ID Gm12; pos 35208881 to 35209425)
taggcctgccacctttaagatttcagctgctactggtaacccctctcttctttatctttatttttgttattatgagtttttttccccaattttgatttttcttttatgcgtatagcccgtgtggtgattacagggacaaacgaaattatagacacttatcttgtgtagcattttaacatgtcatttacttatttgaaaaactcatgaatttggttcctgatgtattaacctctctccttaatagttcttaaagtgatgaaactatataaatagtttttgaagtattgaatattcattgatttagtagtccctacattgatatatttcactaacatccagggactattttgaactctgaaggattttttttatgcttaggggactatttagtatgttttttaatacttgagggattacctatataacttagggactatttaggggagagtaatactttagggatgaaatttgatggtttattctaataatttttagttgattgtgaatagaattgctgtcaatccttgatgcaggtgaagctattt

SEQ ID NO: 18425 - DNA, 912 bp, Glycine max
  Intron number 1 from transcript Glyma13g22870.2 (locus Gly ma13g22870) derived from phytozome v7.0 (chr-ID Gm13; pos 26364885 to 26365796)
gccaacacttcctttgaactcacgcgttcctggtggtgtgcttactgcctgctttccttttctcagtttttgtaccatgctttctcactatttcttatttctgtttgttaatacttatttccttattaaaaatttcttattgcaaatatgcaattacttgattatgaactagttgatgttgatgactatggtatgtgcttgattcgagccttcgagggttgttgttcgtgaattcaattacttgtttcgatgcttatttctgtcttgttgatggcattttcttaatagcgtcgtacctgcaagaaatcttccaagcaattttttgtttgtttatttccttattgcaaaatggtgactgcgagtagaatttcatgctaaaaggaaatttctgaatcattgattattttttgaaattttttaagatatggtgtgattattttttaataacattttaagtataaaatttaacatattatatgttgtttaatttagaccggtcatgcgagtgaactagagactcataggttcgacccgaaatccagtgactcagtagtcagtacccgaccgagtcaatgatattgagcgagcttcatttgaagcatccgtctaaggagagttgctccattggagttgctcttagaatttaaaaaaataaaggtgtctcatttgattcttagaagctggcctctaaaatgtccattagccactaactggaccttaacacaacttcaagcttagacagtttcgtgagttcatttttcacactttacacttgacccaattcctgaattagcagaatcagtgagtacatgcattttactgtgaaaaattgcgttatcttccttttaatgattctattatgtgaggtttattgcaggagacccaaaagttcgaaactgaacattttcacaa

SEQ ID NO: 18426 - DNA, 716 bp, Glycine max
  Intron number 5 from transcript Glyma13g22870.2 (locus Gly ma13g22870) derived from phytozome v7.0 (chr-ID Gm13; pos 26368102 to 26368817)
atttaatccttcttttaaggtctatctatcccttggtatgacaattttccacttgaaaaaacaactatgtttgattatacaattattggataatttttgtattgtcacacttcaatttagccttttaatcgtatgcctgtatctttctgtttgagcatgtgctttcatagggctcacctcactaattttttattcattacttgcaacacaagtctgctttcatgtgtttaatctactttttatagttagggtggtagaatgtcgtacacatgcttttttctcttgcatctccttctccaaaggaaaacatcctgcatcatactgaacctagccattccaatttagagcattcatgcctcaacaatgttatgctttagtgatgtacacatttcttttaacatgtttacttttgtttggcaaagatgtgtttggcatgtgctgatgcttcctgatgtgggtgtatggtgaaatgaaattatatattggtcaaacgtcttctctttcttaatatgttgtgcagtgtcactattggacttggaccatgcttcgtagtgtcagtagagtggttattactgaaaattactttatttttattttgtcatgtgttatcccagatttgatgcttcatatttgtccaaatgttgattgacatgaaaaacctaaatttatgtgtttgtacaggagaattaaagaaacttagaatccttgttgctgat

SEQ ID NO: 18427 - DNA, 612 bp, Glycine max
  Intron number 2 from transcript Glyma06g15760.1 (locus Gly ma06g15760) derived from phytozome v7.0 (chr-ID Gm06; pos 12404458 to 12405069 reverse strand)
gagtactctaattacggtcaaacaatatcaggtggggattttttgttccttttccgggactataaagattaaataagaaaaagagattctatagaagttaagtgcataagtttattttaacgtatgtgagaagctcagttcgttttaacttcttatttttttctcctataagtgcttatggaaaagtttatccaaacagggcttatatgctatgcttgacaggaaagtagttggctagttgttaggaagatgtttagagggcattagtttgacttttggctttctgatgtgtatatgttgtaggcggatcttatgatagttaatgcggattgtgtgggtgaatgtagaagttaagttgaaagagaacacagaagagtctggtttattttattttttcatttttgtcagttctgagtttgatttttttgcgttacgtgaagttattaatgttgggctgcacatgctagttggttgatgaaattaattcgtgtttgttgccatttttgtgcataatgcattgctgtctgtttgagaaaatctagtctgattgaaatgtggttttgctcaatatttgcttccatgtttctgcagttattctaccatattacaaaa

SEQ ID NO: 18428 - DNA, 362 bp, Glycine max
  Intron number 2 from transcript Glyma10g23520.1 (locus Gly ma10g23520) derived from phytozome v7.0 (chr-ID Gm10; pos 29713119 to 29713480 reverse strand)
tcgtccaatccacagaattacttcacattagtgttcaaaacatcctcggcaggtttgttcattttcgtttgagtaaaaagaaaacaatatagtttattatattaaccatatatatatatatatatatatgatatatcaataatataatttattttcaatactacaatgaaattgtctataatggttacattagtagacgtaaatacaatgtatatgtccaacgatgtaattatgatgatatttccgatttgtcttcaaaggagaagatatgtaaaaaacaaaaggaaaaagaatttcggatcaaataaaaaatatttgcttaccatatcaaatggcttccatatccagcaaatttgccccag

SEQ ID NO: 18429 - DNA, 690 bp, Glycine max
  Intron number 1 from transcript Glyma12g36540.5 (locus Gly ma12g36540) derived from phytozome v7.0 (chr-ID Gm12; pos 39585053 to 39585742 reverse strand)
tgcaatttaggttctgaaaaccaaagcttttcatagtaagtccttcttaagttcattgttttattctcttaaatcacagaatctctagtttttgttcagttcattgttttattctcttaaatcacagaatctctagtttttgttcaaatttgactttaactttctaaagggtgtttctgtgtgtgtttgtttgttttcatcttccttcatgataattgtttgtgagaaatgggaattctgttttcagcatgtgtgtttagttggcaagaaaacatgagaaaagcaattttgatttttgaattttccgttttagtaatgttaaagggtagtcaatagtcatcactttgttttctatacaacatagaatttaatgttagctataaataatcaaattctctgctcaagaacacagaacttgataaagctctagtctttttgggattttgagtgaagggtaaagtctttaaattcatttcattttacttagattcattttcacagcatgcaatttagactgaacttcattacccttttccagctttgcaatggagataactgattgagattgatctgatcctgagcatctttccttttttaaaataatttttggaatttgattgtgtttttgtgtgtctgtgattttgaattttgttgtatctctgtgtggttatagggaaaagttgtgctaag

SEQ ID NO: 18430 - DNA, 527 bp, Glycine max
  Intron number 1 from transcript Glyma13g30820.2 (locus Gly ma13g30820) derived from phytozome v7.0 (chr-ID Gm13; pos 33347019 to 33347545)
aaaaaaaaaacaagcctgttcaactcaaagacctggttcgttttcagcttccattcattctctcttttcttgttgctgaatgtgctccaatttttgtgactcatttggttcttcttctacactaattttttggatgtcaatgttctgtttcgaaaaagagagattttgtgctagaaacacacttcgcactatcattataacggcaacggtgtaacaggttattaataattcataaaaatataaaataaagaaaaattcttaattcattgttgctaacctcgtttattcagggaatcagggtagtgcaagttttcatctttctcttttaccttaatcagttttgtgctcaagttttctgtatgagttttgggactaaatagaatgcagaagtttgtagttaatgttgtcttcaattaattttgatttgaatgcgatgctccctttgaacatcatatatatatgtcattggtttctctcttttttggttatcagataattgttccttttgtctgagctgaaagacttga

SEQ ID NO: 18431 - DNA, 778 bp, Glycine max
  Intron number 1 from transcript Glyma10g02940.1 (locus Gly ma10g02940) derived from phytozome v7.0 (chr-ID Gm10; pos 2129193 to 2129970)
tggtgagcgaattggacatgctgcgtgtttttttttttataatttttatttagttttctttgatttgaattttgtttttgatttacttggcttggttctgattgtaatattttgttgggtattgggtttgtctgagggaaattggagagtggctgatgggaatttacttagatgtgtgttttcgatgtagttggaaaaaagaggggaatggaaggattaaatgcatgatatttttttttaagggaagggggttgggtttttgttgttttggcagtggggagggttcaagttgttcaataagtatgttttcaaagattttatgtcttgctagctaaactgaagcttagttattaattcttcagattacttgtgggtgggggttgctttagaatccttcccttaaacgacatgaagtgaatcatgcctatcaaatcagagcatgaggtgataagagctaatcttgaccacacaaccatacatggatggtaaaaaactcaaacctaatctcgatcatttgtgtaaagattagattggtcaatattagctcatttcactctctcaatacgctctaggagtatatgtgtatgcacattgaaattaactgatgtatttttgaatatacagtgatgctaatgtatgattttggtttggccaaatactccttgataagtacatggagattttgtggtaagaaagctgaacagtttggtcaaaagtctaattgttaaaattgggtgtttcaggggttacaagcggttttttaagagaacagcactag

SEQ ID NO: 18432 - DNA, 813 bp, Glycine max
  Intron number 1 from transcript Glyma07g07750.2 (locus Gly ma07g07750) derived from phytozome v7.0 (chr-ID Gm07; pos 6439570 to 6440382 reverse strand)
tgatcaattctgttgtactacaggttggataatctccttttgctatgaacttagtattatacttcaacttgacttatttagttatcatagtcatgtttaaaaggacaagattgtttgtcaaagttaatcaagatatgcacaaaatcttatttgttatggatctatgtcttcatttaggttctgaaacatggattcttatttgtacataatataaaagggtggatccactagaaaaaaaaaaggtgatttgacaactctaatagtagttgaagcataaatgcttctcttgttgatgtaagaacatcatggtctgcttgaattgctggttttaagtgttaatggattttatattacatctacatttgtgtgtctagcaaatgtcttgtcttgaattggtgtttagaatttgtttcacatttggaagatatatttatgtaactagatcctggacacttgatgaacttgtattaattgttaggatgaatatacactgtcaatttgatatgctgattctgaatgatcaaagcactaataacttgcactactgaaaagtttgagaatcaagactgcaacaatgtgttatgcagaatttgtttgtgacaaaagaaaagaaaattgacatgcattgagaaaatattagaatgtgatactttgagaaatttcaacaataagatgaatgtgtgctcttgggaattaatataagaattattcttacacctgggatatttattctattactattattattattattatttatcaatttattatttttgtgcactaattttctatactttactctgacaaaccagg

SEQ ID NO: 18433 - DNA, 872 bp, Glycine max
  Intron number 2 from transcript Glyma09g02920.1 (locus Gly ma09g02920) derived from phytozome v7.0 (chr-ID Gm09; pos 2034590 to 2035461 reverse strand)
aggtgagggtttttgcattctatcagaacagaaagatgcccttgttatttttacagacctgctttgcttaatcataacccatctgtttgtgacatattcctgttccccccacttgaaaaggtggctgaatatttatttccatggttatcaaaatcttatgattaacgatttggaacttacaattcatttatgatttgaatattacaatttgatacaattcagctacttactgacttttatcataagatgaatcttaattttattttttttgaaagaagatgaatcttactttgtgtctcacgatacatgaatgaatttgtgctattccgtatcattgatacaaatcacacaattcaacgatttgttactttattttatttttttactttcaccaattccattgaaaaaattgaaaattcctttaagtttaaattgttaaatgaaatggctttgaagtaacacttctgaacttatcctatttgattgcataagtgttgcatagtaatgaaaatgcttttacttcactgattttattgatggccatctgccacaaactcttttattgttccttttggaatccatttcttgcttgctctctaattttgacattttcctctttattttgaagtttgtactgggttaagccttatagtatacttaaacatagtttttggcttctatctttatgtttgaattaaatggaaaagatgacaactgttttctttttttctattattcaatgggcttgaatatgattcgcattgcatcatttgttacttttagtttgatgcctctgaaatttattttttgtatgctgcatgggtaattgtttattactgtctgtattgcttttgaatgtataggtgcttgtc

SEQ ID NO: 18434 - DNA, 1027 bp, Glycine max
  Intron number 1 from transcript Glyma08g02670.1 (locus Gly ma08g02670) derived from phytozome v7.0 (chr-ID Gm08; pos 1833621 to 1834647)
tcaagttcggtgtttcgctagggactccaccaaaggtatgttgcgtcttcttttttttttttttcctattgtgcactctaataattaatttgctcttcaattttcgttctgggtggctatggttagttcccaacaacatgcgacgttgatgtttttatctgatggttgaggttgtttgtctaatctgtggtttggtcggtaacgggtggcctttcacgattggggaaacaaataagcatcgcgttttcaacttcaggtttaataccaaacttaagaaaatgaatgaatatggcttggctgtgcttgaacttgaagttgacactgtataggaaataaaagtaataaccgcgttcgtactttagattttagaagaaacattttaattaagaaaaaatatttttggacgagataagagattgataaactagtactaagtagtaattatatgtgataagaaaatagagttagaggaaaaaaatgaaaaatattaatgggtatgtgttatattattggagtgtccaaatatgaatattctttgattaaataaggaaaatgtccagtgagaacgagtggattttcttttttgttgccaaactttgactaaggaaatttttttcatgggagtgagggaaccagtttgatcaaagtgcagtaatatattatgagaaaatgggtatttagtatttactagatcttccgtctcggcggggttatgaccgtgtcaggtttttctttcgttttttttaagaggcgagcggttaggtaatatatatgactttcaatgaaacggaaaatggactagactagaggcatcattttcttaaaataataaaattggggcacttggcacacgcactcagggatagtgattgaataatagaactctagaactagaagcatgattcatgattagttgaacaactagaagaaatattagagatgtgttatattattagtaaattgtctaggttattgtgtttgacatgttacataatccataccacaggtctttcaagaagtgggaaat

SEQ ID NO: 18435 - DNA, 490 bp, Glycine max
  Intron number 2 from transcript Glyma13g37230.1 (locus Gly ma13g37230) derived from phytozome v7.0 (chr-ID Gm13; pos 38373107 to 38373596 reverse strand)
catcaagtcctagcattaagttttctgaaccacaggtagtgatgatatctttttattcttgcggtcttatgttttatatggagtcaagattcttcttgttaaaatgtaataaaagtataaaaccattcatgggtcttcacataacaacttgagctttagggataattggtcattgacatggtatcaaagctttctaaacaaagttgttaggaatttgatatttgctgcccatattcttctaaactgaaaaattgaatttccacacatggtaaaattgggcttgtgcactgtcaataattcaagcatgttagagaggtaataaaaccagtaatgagcctttgcctaatagcttaagctttttggataattgggcatagtatgttgggaagcatttatccttattggagttctttttgaaataactgtccttgctcttgactatgcttagatgtctaaaactctaagtgatgtttcttatacatcaggttaa

SEQ ID NO: 18436 - DNA, 810 bp, Glycine max
  Intron number 3 from transcript Glyma07g16190.1 (locus Gly ma07g16190) derived from phytozome v7.0 (chr-ID Gm07; pos 15925886 to 15926695 reverse strand)
tttgtggaggaagaaaaaggaatcgtatgaagataatacaaatggaggcttcaatcccttatctgtctctctgacgtttgggaactctatcggagcagtcgaaggaaaaaactggaggaatctcaaggaaccgctagagatgctgctactgctggctgaagacacattagcccgcttagaggtaagggatgagttattcacaattgaggattagtaagaacatgtgtagggatccttagagatatcaattggaatgagttttggggtgtttttacaattttcattttatccttataattattacagtgaattatatttgtttgatgaatcagttgatgtcccaatgagaaatggctgtgagattgatgtgttcttgtgttgagtgtgaaccccttagaaaaattaagctctttttattaacgaaaattatattttaaataatattattcaatgacttattttatacaaattattatcttgttctaatttttctacaacgatgatcaacatgttatgtgtatataattattgtaatattagaataataaattaaagaaaattgtaaggttaatgcctagtggtaatttcttttgatgtaatattaaattgttatagaaatcctttgattaaaaacaatggattttattcctttgtcagtatatatgtgaggggtagagggcgtcacatgacgagtcacgatgaattggagaatgccaactatatgcctcacacttcatctgagatccctgtcattaatttagcactgctctgaaatgggaacacagaggagttgttgaaattggaagtagc

SEQ ID NO: 18437 - DNA, 382 bp, Glycine max
  Intron number 1 from transcript Glyma07g16190.1 (locus Gly ma07g16190) derived from phytozome v7.0 (chr-ID Gm07; pos 15926967 to 15927348 reverse strand)
tgacgtgtaacattccatttttcgtaagtcaatttaatttttttttaaataactagagttttagaaaaatgatcaggtttttataaataaataaataatgagaaataatgatttgaagggaaaaaaaagacatttgatttattcatttgataaggaataaaataaagtttctttttttttataaaataataaaaataaatatttagagtaaataataggtcgtgaatatccctaactataaataacaacatgttaggtcagttttcagactgactccttagcttcctttgtttctcaatttcgttttttctctcttcttttttcaaaactctttctttttcctgtagcccatcaaacctgtctcagaaaaatcacgatctca

SEQ ID NO: 18438 - DNA, 947 bp, Glycine max
  Intron number 1 from transcript Glyma12g03290.2 (locus Gly ma12g03290) derived from phytozome v7.0 (chr-ID Gm12; pos 2166834 to 2167780)
gttacgacagctttgaatttcttcacactctcagggtaaatgtttttttttcttttcatttttgcatatatttgtgctatactgcattagtatttttgcattacacttctggtacttccttgtattatagagtcgcaggtttagtgcatgtttggtttttgggtgaaaaagtaattttgtggcaaatgtaattttgccaaagacttctgccaaaggatcagcacccttgctttaactttcattttgctattgggcatgtttcggtaattttctttagacactagaaaataagaagaaaaaatgatacaatatgtttcatgtttttgccaagggaccgttggatttgcattggaacgcgcgtacagcatttctaacttcaatccaaacatgcaattagttactcgtttagttcttatatttgatacaatttgttctagttcctacacttacaaactacacgttctagtccttatactttttaatctattgtagtctctgttgtccaaaattgtaaaaagtgtatgtgtagggactaaaccgtaaaactgtgcagttgtagggatcaaatgagtaattaaaccattctaatataactagtatctctttgcacactgctagacactggattatactcggatttttgtgtcttcctcaagtaaaatgagtgctgtaatgaatcataagtggccgagaatattgacactactaagacaccttgatccttaaactaatgatttcttgatgccaatacgtattgtgacataatccttcagtataaatgtataattcctcaaagtaatttctcaccaagaaacattgtagtgcttctctaatataatagtgcatgtggtggagtatcaatgtttatttttactcctgttaatgtatcttattctttttgttctgcaacagacattgcattgtcgcttagagaaggagaaagaagt

SEQ ID NO: 18439 - DNA, 856 bp, Glycine max
  Intron number 1 from transcript Glyma13g00510.1 (locus Gly ma13g00510) derived from phytozome v7.0 (chr-ID Gm13; pos 257899 to 258754 reverse strand)
tcctcgacggcgccgtcggcacctccgatcgaatcgtatgtcttccctattttatttctagggtttcttcttcgatttttttttcttatttctaggttctaccaggttcacatggaatattcaatattgcctctacagtaggggtttttgttctcactgcctggatgttacaagttggattctttgtgctcgcgttttcgtttttctcagctcaatgcgttacttaccttagttctcaacttacaatttcatcgtaatttcattaatattgtggtgcgttttggcttgaaggaggtttcgtggtttataagatagtatttgtgaggtggtttctgtgtgggatttatagggcttaaatgcttagggaaggctcatgatagtgtcaaggtctctaactttatctgcaatgttaaggtttaaatctctgggaagggctttacctaatcatcactccaattcaagggttaatttcacagctatccaggtgggaacccacagttaaagatcccgcaaaatatgctcctgggtggcatggccttctgtactctaggaatgctgcttaggttccattttttttttcatttgcacagttggtgataaatgtgtcacattgttgtgttttctttattatttatagcttgcacctttcagtgtaggtgggaagttgccaaagtgagtggaagttaactctgtagtttagttggtctatgttcagttcagatgttgcttctttccagatcactgttttttatatgaggacatttatttgatttgtgtgtctcgttctgttttatcctgattggtttgaattttgattttaggtactcatatcagggaaggaagacctggaggcacc

SEQ ID NO: 18440 - DNA, 568 bp, Glycine max
  Intron number 1 from transcript Glyma08g17850.1 (locus Gly ma08g17850) derived from phytozome v7.0 (chr-ID Gm08; pos 13311931 to 13312498)
tgcttcgtctcttcttccacgattgcttcatcgaggtccttcttttttttttgtggggttgctttttttgtttttttttgtttttataaagttttgtgctttgtgttgaaaccgaaatggggcgtcttttgtttttccctttcttgcgtccaagaccatgaatttggagtatttgttgtgtttattcaaatgtgtgtttcttgattacttgctttttttcccttaagattttcttgattccttcttctgactatgctgtttgtgctttgaataatgaataatgaatatcctgaatattgatcatgatcttgtgctattatgtagatcgttgattttcactttttctttatagagtttaatttttatgtgtagaaacccttataccgtcaattaattagaaattacgactgatatgaattttaaagtaattattaagaaggttaataatcttacggttcatgttaatttatgattgaattacattttaattaaattgttttttatgcatgtaaacaatctcttaatatactttttgttgcatttggggtgttgctgaatcaggggtgtg

SEQ ID NO: 18441 - DNA, 820 bp, Glycine max
  Intron number 2 from transcript Glyma08g17850.1 (locus Gly ma08g17850) derived from phytozome v7.0 (chr-ID Gm08; pos 13312655 to 13313474)
tacttgctcttgcagcaagagattccattcttctggtacatatttctttgtttccaattgacttggattgggactatactgtatcttgagtttcagtttacgttgatagtttaggatttgttgttctgattgtagtaaggatggcagatggagagtttgggtgttaaattgaagatctgaattctgatgcattttgacttcaattgcaagtttggaacctgtaaatgctacatggcttggtcctgtttctctgtcctgaaacttattagccatcaaaataatataacaaaaagtaaaacaataatgatgttttgataatatttctggactggtttattgcttcatttgttttttttttaaaactgaaataccatcttttactagccaagtagtgatgcctagttcattttcatgctatcattctcacatgaatatttcacggggaaagccagttagaaacaagtttactaaatcatttgaattcaactttgttctgattctctttccagcaactgcttgttggtttgttgcaagtttgtcttgactcatttgtttcgtctctctttatgttacttttgtccttgttcaatcatgtgtctatatattattcatgcatgtccttgataagataagcaagtgcataatttttccttgaacttgacatattgatattatgatttgaggtagcaaagttttcaagaatatctacttttgctgttatattacacttcttagaagttcagcatcattgtacctatgatatgttttgtggatctccatggcaggctggtggacctttctatccagttttaacaggaag

SEQ ID NO: 18442 - DNA, 683 bp, Glycine max
  Intron number 2 from transcript Glyma08g14210.1 (locus Gly ma08g14210) derived from phytozome v7.0 (chr-ID Gm08; pos 10341031 to 10341713)
ccttgaagcatcccaatatcattagatttaaagaggtacggaattggagacgtttttggtttcaatgagtataaactcaaagtgtaattatttgctttctctgaagaaaatcactccctttctttatctacttcttaccaattttgtgaaaaatgaaaatctatatgcatccagggacatatacacctaaactcttgtcctaaattcaattttgtcccataatggaataaatattcgagacgggttattaaagcatggtttctttctatcttcctcataattcagttttattctctaccatatacagttccacgaaggatctcaatatttagggtcatttttttggtttttcttaataagaatttccagaatcgtgtaaagaaccgaacaagaaatcttttcaatttgatttaaaaaattctttctcaggcaaaaaagatgggtgctttgaaagaagacacacattactcctttactcttgcaacatgagatgttacgtttcctcttcattcaaagttcgatttatcttttgtcgctcctcatttatgtatattattgtaactaaatgactagtctaggtgtgatctataacatgttagctaactgcatcttgacttttatgccgatttgtgacataattcatcgcagttgttgcttactccaactcatcttgcaatagtcat

SEQ ID NO: 18443 - DNA, 572 bp, Glycine max
  Intron number 2 from transcript Glyma12g31190.1 (locus Gly ma12g31190) derived from phytozome v7.0 (chr-ID Gm12; pos 34767448 to 34768019)
aaccgtcgcaatactggttagtgactccgtctgcttcttttttttcttttttcttttgtcgtttaaaaaagtgggaaaattgttctggttgttgaaaactgggcgtaacgtgcaattgatcttcttcgatgatagtatgaattgctgacacttggctaatgtggtatttggatttggttgtgaaaacttgtcattttgtttgtcttgtaaaatatattaaatgttagttattttattcttctatgtttgattgtgtgaggtaatatattaatatggttttagtaagtaggtgtgcttttaaccttaaaattataggattggggcttgggtattggctatcgacattgcacacgcaacatcttgccatcaatattgtgagtactatgaattagtaaatgcataaactgtaaatgtcttttaaaccttgttttaaggattaaatagatactgtattgatactaaacttggtggtggagaactgcctaatgtccatgcatgtaacttgcattttacccttttccatgctggcataagcagaaaatttggtggagaatctcttgggcgatttcgag

SEQ ID NO: 18444 - DNA, 650 bp, Glycine max
  Intron number 1 from transcript Glyma10g10310.1 (locus Gly ma10g10310) derived from phytozome v7.0 (chr-ID Gm10; pos 10008895 to 10009544)
cggattttccaacgccaccgatattcactattgcggttactctcttaaccctttttgatgtttactttttttcttttttttttttatttttttttcctaacatatgatgtcatcaagttcttatttgggggggtttaaagattttaaattttgttcgtggttttagtttcctcgtgatccttgatattgcaggaaattacatacaaaaattaggaatattggttacttgatttagggtttgaagggtggtcttaaagttttaaactttcccacgaaaatggttgattaaacaattgggtttttctgtacggattttttatttttatatatattggatcgtacgtcaatttcgttcttatttgtttttaggtgttaattttattcaattaggaaacttaccgttggggatatttttatgtttatattaataatctgactttgattgaataatcagttctgttcagttgaattaacatattgaataattacttgaagttgtcttttagttgtcagggattcttctcgttgattagttttaaaatttaatggtttacaaattgttttgttgcatcatactattattcttgctgctttgcccgttattgaataaaatattgcttaattatctatgtcagataagaaagctgact

SEQ ID NO: 18445 - DNA, 714 bp, Glycine max
  Intron number 5 from transcript Glyma12g32210.2 (locus Gly ma12g32210) derived from phytozome v7.0 (chr-ID Gm12; pos 35753822 to 35754535 reverse strand)
gaaggtatcaactcaccactttgatttatgccttgtttggcacataaaatcagcttttgccagatctgaggggaataaaaatggtagtgtcatgacttgggaacaagagtaggcaaccatttttattccaatatttggtttcctcaagaatggacttgtactttcattcttgtccagttatcgatgccgttttcatgcttagtacatgaaatgagctttgaatggaatcttaagtataatttatgagtttataactagtatagataaataaggaaggaaaacaaaaatgaattcatccagtttgcaaagaatgacaattttgacatatctaggagggaatggggattccctatgggatcaaggtgtataatgtaatcattattccatttttttttagccaaactacggagccctcattcctgtggaattaatattggaatggaatgatcaatctgtgtgctaattatgctttaaataattttgttttcattaccctataatctttatgtgagtatgggtgcttttgccttctccaattactgttattatattgctaaattgggaattctccatggctttttgtcagttgtcacccatttctctaatatttcatttttctctttttacaccatatctttgttcccttatcaataatcagtcttaaatgattggctgaagtattttttttttctaatgtttattgcagtgtgctac

SEQ ID NO: 18446 - DNA, 426 bp, Glycine max
  Intron number 2 from transcript Glyma12g32210.2 (locus Gly ma12g32210) derived from phytozome v7.0 (chr-ID Gm12; pos 35754994 to 35755419 reverse strand)
ccatcgcccgttttgttgtggagattcaaggttttccattgctttacctcttagaaagaaagtgttaggaactttgttttagttttaaaatgataatgtatttgatgctttcattttaataaatgcaaaatttgttctgacttaatgatggtatggaatgtttctttcattctgctggagctgctttctatttgattctgttgaggaatgtggttaatttaaataatttatttgagtacagatgatgccatttgcttaacttatttctgagtttcataatgagcagcaatatgatcttgacccaattgtgtgcctcttgctgtttttcttctttacttttctttttccttttactttatttttcatgaagctaattgagatggatgtctaggtactattgttcgtcatttggggcttcatctgttg

SEQ ID NO: 18447 - DNA, 603 bp, Glycine max
  Intron number 1 from transcript Glyma13g21730.2 (locus Gly ma13g21730) derived from phytozome v7.0 (chr-ID Gm13; pos 25292330 to 25292932 reverse strand)
cccccctctctctctagggttcgatcagaatcaaggtatgtttttttcttctctctttctgcttcaatttttctgggttcgcttagtgtttgatttgatttccctatttcctttcttccttttgcctgactagaaaatttgtggaacagagtaggaaaagggcataactttgttccgcaagattctgtgttttctatcaacctggcaacaaaaaattgttgaaatttcgatgtgaaccgcttcttttctccttaggttttcatgtctccgatgcaacagagattggaagtttaacactttttccttcaaattgtttgttgaccgaaaagttctaacaaaaaaacaaaattaattttatcgtttaggtttgtaatttatatatttcacattggtttggtcttaacaacacgtgaaaaagggattacttgcttgagtgaattgctggagatgcttgattgttttgatgggatgggactgtggcttgttttatgatgaaaccatgtctgtatagattttcaatttttggaacaaggaggagttttcagttcactgcattgttttatatatatatatatatatatggaaaacagggtttaagccgcc

SEQ ID NO: 18448 - DNA, 594 bp, Glycine max
  Intron number 1 from transcript Glyma12g14400.1 (locus Gly ma12g14400) derived from phytozome v7.0 (chr-ID Gm12; pos 13350019 to 13350612 reverse strand)
aaggtttgttcatcataatgctttttttaggcttcattttttgttgttcccctttttcaaatgactgagaaagtgtttaaataatttgagtaaattgtgaatagtgttgaattgggtcatgcatgaattgtagatcaaacttcaaagggtgtataataatgatttattttacttttatcacttttactggcaattgcattgtgagcatagtttgacaagtcacagtttgatggatttggtacatatcgtgtttgcattcatcttcatcagagctttgacttattggagtattttttgagcaattaaactcattagcactctcttctgcttccattaccatctcaacttgtgtacgaatgaattgttggaaacttgaaattttggtatgtaactatgctagttggtagttgaattgttgcttttgattgtcaaggactcaatttgagttttctttcctaaaagggggcgagaggaacttgaaattgtgcttatagtttgatttatgctcagatgtcagtggaaataaacattttaaagaatgcattcactgtttgaagttttgaacatctcttttctttacttttgaacatatag

SEQ ID NO: 18449 - DNA, 840 bp, Glycine max
  Intron number 1 from transcript Glyma11g08860.1 (locus Gly ma11g08860) derived from phytozome v7.0 (chr-ID Gm11; pos 6264359 to 6265198 reverse strand)
caaaaaaccaggactatattttaaagcatgtttccttcaagcttcataatacattaattggtttgcatatttagtttaatgttgttaatgttattaggattgacttatttacgttatagttctttgcgtgccctatgttttaataggagtctaatttttgggggaaaaatgcatgtatgagtgagtatcaatttaggttatgacacaacacgcacgtaccatcatccaatgcaatcatcttaatatttatggctttggttttttcatatcttgaatttggtgatttaaattattaatttcatcaaggcaggcaaagaggattattaatgtagatagcagttcttaaaatggtgcaacatttgctgcatatatatatgactataatttaatgtatttgatgtgataagatatgtacataattacatggatatgacgaaatgtttaaagaaaataaaatatagtttggtgttaatgttaaaaacgctcaatagcttgtagtcttgtactcatttttgaagtcataattaacgaaatacaatttgcaataactattttgatactttaaactatgaagtgcttgaactttgatactttaattggcttccttatcttttgtgctgaggtaccaagaacacctttagtagtaaactcaaaacaaatgtttgtcaaagaaggtaactttaggttttgtcagcatgtcccaacttaattggatttgatcttattcgatttccaagtgttaatttagcctctcatttttttcttcctgtgcaatgaaattccagttattgatccattctgatttttgccattaaatcactcaggttcgttggctgggtt

SEQ ID NO: 18450 - DNA, 736 bp, Glycine max
  Intron number 1 from transcript Glyma13g23660.1 (locus Gly ma13g23660) derived from phytozome v7.0 (chr-ID Gm13; pos 27005561 to 27006296 reverse strand)
cagcgcttccgattaccctttgatcactcaaggtaccctctttatttttctctcccttgactttgtttctgttttgatcagtcagtgtttttctttttgttggtttctgtgtgttttagggaaattttgttgatttgttatctgttttcagttttgtgttaattgatttaaatgctgcttttttgtttttgaatgcatttctgagatgtgatgtgagaaccagatgtgtatcttgttggtaattttgctccgagtttctgaattttaaattggtgtgatctggttgcaatctgtgtccaagttgttccatttgttggtttgctcatcaatgagttgtttgtttttgtcagcagacaggcttgttcccctctctctcatgttgtagcccggggtggtgggggaggaggaataccaggtttcagttaaaagtaaaattgcttccaactccactagtttttcattgttgcttgttcatttattagttaatcttttgaagagtaaccactaaccactatgccatgtatatttgatgcataataatattcgtattaaataaataaatttctgttatggattttatgatgatttgctagttaattatacttaaatctgtaatttgttgaaacttactagagaatgtgaactgtgaattatgttaccctgttttcacaatcacctgctacatctcttttgctcaacagatctgctgcacacactgtcatcaattccaagacac

SEQ ID NO: 18451 - DNA, 252 bp, Glycine max
  Intron number 1 from transcript Glyma08g37670.1 (locus Gly ma08g37670) derived from phytozome v7.0 (chr-ID Gm08; pos 36463315 to 36463566)
gctgcagaaacaaggttggtgaattacatgtacaattctacatgtctgtactctgtaacaacggtttcagttgccctttatgatattcttttctgttcctctgatttgattccataaggggtcacacttgttttgttagtaaaaaaacaaagaccatgaatttttcaccgatggtgcaatgatggatgatgatgatgtgtaattgtgtttgtgtcagttctgtgtgagagtttcagcaagtggctcagctga

SEQ ID NO: 18452 - DNA, 712 bp, Glycine max
  Intron number 2 from transcript Glyma11g05370.1 (locus Gly ma11g05370) derived from phytozome v7.0 (chr-ID Gm11; pos 3756792 to 3757503)
gctgctcctttccttggcgtgctctcggatttgatgtgagcctttagttctactcgttgacgttactagatcaattatgattaattatgtttaagtaattcaacgttgtgttgagtattaaaagagccaatctatgcaattgtgatgtagaagtgacaccagtttatgatatttgcttcagtaaatatgatttgcttgtttaagtatctattttacagtatagcgtgaaattccttccatgtggaagaattactgacgctctgaatgattattgatgttgtgcaatttactgaagtgttttctgtttattagtggttgtttgagattatattaggatttaggattaatttttttggtgcatgcatcctttgaagacatttgcatttcaaattgttgaggaagaatatgatcaaaatcttagatctcaatctcatcttcttgtgaattgttctcacttttcaatgtttttgtcattttggtgatgacatccttccatgtgtgaactgtgaagcaggatttgctaattgctatattagatacaattatatgaagcatcttggttattctagaagcattactgctaaattatgcatattcaagaaatatgtacatttttatattagtttttgatgatttgtggctaaattaaactaacatactgcttactgttggtttagaggtcacaagaaagttagtttaatcttttgcatcc

SEQ ID NO: 18453 - DNA, 460 bp, Glycine max
  Intron number 1 from transcript Glyma14g00900.1 (locus Gly ma14g00900) derived from phytozome v7.0 (chr-ID Gm14; pos 476410 to 476869 reverse strand)
tacgccttggatcttattcagctcaactcaggtatgtatgtttcctcccttcaccttctctttctgcctccttccatttcttatacttatcattcttccttccttaatccgttaagtcaagcaatttgcctttcaactgtttgatcaaagttgccaatgaaacaaatagctttttttcatctttgcccaataattctaacttaactcatctttcactttttgggttttttaatatacaattagatactcggtcattttgcatttttacatcattttgaatgttgaaatttatatttagttgatattttgaattttgcatttactaaacatgaaatgaacttacattttgtagattcattgaaatgcttcgctgagagttgataatttcttgagttttatgtgatatgccaaaactgacacaaaaaaagtgttctttttttaattatattgtaaaacagat

SEQ ID NO: 18454 - DNA, 815 bp, Glycine max
  Intron number 1 from transcript Glyma08g14300.1 (locus Gly ma08g14300) derived from phytozome v7.0 (chr-ID Gm08; pos 10396413 to 10397227 reverse strand)
attacattaacgtcagtattttaatttgatgcttcaagccttcaattttattttatttcattttctcttatcaaatgtatattggtgtgtgttgatgtcctgctttacacaattcctgattgtattgtatgatggttgattatacttacatgtttaagtttgtgtgtcttcttagattttaccgccatggtgctgactagggtaaaactattgttaacgaataaccagaaaaatgttaaaagaacaataataggaattggactattgggaactggtagggttagtgcttctgatctaaacgcttcccggcgatgtagttattttcagactaaattttgtcgtcaatgtcattattgatgcttggaaagttcaactgttttttttgggcattttctctgtgcattagatggttcaagtgtattttccatttgatttttgacatttgtattggagattatctctttgagcaataatggttggacacctaagagacattttattctctttttgttacgttatatcacgcatcttatctatacactcagatagcattcggaggtccatgcatcattttcctatctccttctcagttgtccttttacttgaaaataaggtatgtctgcttgtttgttgtctgattgctggatttggattctctcttctatagtcctcttattgagaaaaagctgacaaatataataagcatggtatggaacacttctatacatgattactcaaaaattggctatcccttgacgtgaatacacaagcacaggttgccatttcattactgaaactggttttacttgcaggtg

SEQ ID NO: 18455 - DNA, 456 bp, Glycine max
  Intron number 3 from transcript Glyma09g39900.2 (locus Gly ma09g39900) derived from phytozome v7.0 (chr-ID Gm09; pos 44866694 to 44867149 reverse strand)
tctttctctggtgattgatattatcattgaacaaggtactgatgcaggcataccataatgttttcttgccctctattttaatgtgttttgcttaaactaatttcagttacctaatacgtttttgttttttgagacttatatatatatatatatatatatatatatatatatatatgcaaagagttatgaagtgttcttctagcacacggtttatattttatagttgttatagactgacagtctaacacatcaatttttccttataaattgtgagttttatatcattcaaaagtatgaaagaaacggtgttttgaacggctacaaattactggctaaatacgcataacaaagcacagcttgtgcttaaaacctacctacatgatgtttgttacatcttatactttttctttgactagattttctcaattctttgtccaggttgcctgcagtctatat

SEQ ID NO: 18456 - DNA, 627 bp, Glycine max
  Intron number 1 from transcript Glyma09g39900.2 (locus Gly ma09g39900) derived from phytozome v7.0 (chr-ID Gm09; pos 44867621 to 44868247 reverse strand)
ttaaaccatttcaacccattttctggaagcttgaggtaaaggtttcacctttgtcttagatttcatcaatatgttctatttccttcaaattctgaggcaacttctctctctctatagggtctaaaagtaaatgggtatccataattttgtttttctttttggtttgttattttgattcccggtggaatttgtgttcctgagaatgtaatacagtaaataaatggtttatgaagttggtgtttgtttcacttcttttgtcctgttttcaaaagagatcgttgtttcggtcttttatttggagctgaatagtaaagacatgtcacaaactcactatagttgtttgcattttgagagagataaatataaatgcatttgaacattctgctgtgttttgacatttagagtttccggcattgtatgattcagctcaattcacatgaacatttcctgtgcaaaatgtaatttgatctcaatttggtagccttctgaggtttctaatttcactttgaaaggttagattaaggcatgtctgcagtagttgcactggaataaagggttttatagttcttttggagctaatgttattatctgtgtacctttcttcttgactagtttgtggttgaagag

SEQ ID NO: 18457 - DNA, 376 bp, Glycine max
  Intron number 2 from transcript Glyma10g42810.1 (locus Gly ma10g42810) derived from phytozome v7.0 (chr-ID Gm10; pos 49665429 to 49665804 reverse strand)
tgaagctaaaattaggtcacaacaacaggaatcaggttagcttcttcgcttgcaatctttttctattgagaattcagatgacgactgacgagtgatgcgatttttgttgttttctctactaattggatagttatctattgatttgattatgtttacaaataaattcttctgtaatggtcactgctaaataagttgataactctaatctctatcctaccatattacttaagattacagaacttttatttaattttgttgaatttttctaatttcgattgattagggttatatgctgctaagtttatcgatctatatttaagtttgttttctatatctatcagaagttggacaagctagtggtggaagcaactctaag

SEQ ID NO: 18458 - DNA, 552 bp, Glycine max
  Intron number 3 from transcript Glyma07g05170.1 (locus Gly ma07g05170) derived from phytozome v7.0 (chr-ID Gm07; pos 3853386 to 3853937)
ggctcgtccttctccaagtgatattcttgagtggcgtaagtttgtttcatactgttacatttcttatattatttatgctgagctctcatgttcagaaagaagaaaaagattatgttgaacccttgctatatcatatatgtgtttggccctgtttgcataagtttctctataagcccttaaagaaaaagaaaataagaaggaaacatgaaataagtttctcccataagctaaaaaacttatgcacaagttaaattagcttttttgggtaagctatttttagtttatgagagaagcatatttcacttttccttcttctttgagtgtttatagagaagcttatccaaacagggactttatcaatgttgtaaacctgtaatcagcagatcacaattcagcaaccttacctttgcttcgaggctcaccctccttaattagattgtcagcaagaaaggaaaatattgtagcatgatatcagcaattttattttaagttgtttgccatggagtagttgatacttgatactgaccttattctatgttaatgtctcagatt

SEQ ID NO: 18459 - DNA, 579 bp, Glycine max
  Intron number 3 from transcript Glyma12g08490.2 (locus Gly ma12g08490) derived from phytozome v7.0 (chr-ID Gm12; pos 6241948 to 6242526 reverse strand)
agttacagttttctcaggtattatactgtttttaaaacgtgtttggagggtgctttgaggagggtgttcttttctgcaataggtcaattgaactttagttttgttatctttttgcacatccagaaaactgtctccttttagaaaattctaggtacataagcatcacaaagaatgatgatagttcactggtgcaccaaggacattcaatgtgcattacagactttaactttctgttttattagcaagtattccctaaatatttgggagaaagaagaaccagtcagatagagggcaatacaatggcaataagcagtagagatgatgaactgcattggaaacttttgaaatcatgactgaccaatgtaccatgtgcctacaaattattatatgttgactgagatcttttcttattgctcagcttctagacattgacttgactatggtttattgaagattgatactttctgatatttctatgtttgctgttttttctttcttacatatgtttatatcaaatctctgacaattcaatctttgttttctataggatcccaattccaagcacttagggactacagt

SEQ ID NO: 18460 - DNA, 898 bp, Glycine max
  Intron number 2 from transcript Glyma12g08490.2 (locus Gly ma12g08490) derived from phytozome v7.0 (chr-ID Gm12; pos 6242552 to 6243449 reverse strand)
gagcctgacaggtatgtattccttcttaatctgttatgtatttgtcctttctctgtttttctgttggaaagaaaatggatctttccaggcaacattagtatatgtgcattagtagtttttattgttgttgttggtattgcaatgctattttgtgtgcagtaatatatcattggcaattgctaacacgtgctagggtattgattaagaaactaaaagaagaaaattttttattgggatgtacaaaattgcattgtccttaactttttttacactctcttatgattttcacaataaatactttctctttttagttctttaaccaatgtcctaaggatactggttagcaagacccgatatcattaggtatgaagttataacctgtttgcttttcttcaacttgtcattcaagaataaattgcaatgttcatggaaccatggatttcttttcaaatgtaataaggctttaagagatgtgtggtagcatttattgattgaaagattaacttggtagtccttttctgaataaagacttgaagctatcctgctatttggttgttgctcttccacccctttcattgaattgagatgtgctgctttgactttcacttgttatgaattggtggaaattatacccagtgaccacataagattaggtattccctgccttttgtcacgcccccatcatgttattaagtcgataattggatacaacaatctcaacaacacaattaagaacacatttttttctgtttagaaaaaacatattgtacatgcagaacctacaacagttaagacaattgaatgattccatttaagcgtgatttgtttcatactataaatacttgtttcagtatactcatgattgtttaccaggttaaattccccaaccacatttgag

SEQ ID NO: 18461 - DNA, 670 bp, Glycine max
  Intron number 1 from transcript Glyma12g33600.1 (locus Gly ma12g33600) derived from phytozome v7.0 (chr-ID Gm12; pos 36817796 to 36818465)
agcgagagaattactgaccccaagagagtcaaaaggtacgtagtactcatcaaacattcattcatatacataagtccagttttagataattagcttcttcagaaacacttttttagaaaaaaataagtttcttccgtaagctaatttatagaaattctaccgggttagtttcttggaacgatgatttttaacttatacaagactcaattttagcttacatgaaaaattattatattttttcttcttatatgtctacatgaattatttatatatatcaatatgctttttcctggtaaagtttgcaaccattatacaaaatgggataaatgtgtttcttcttgcttaaatgtattttttttttatatatttaataggcttgatgtatgctattctttctttttttttgttgaacaatttctgttgctattctagtataatgattaattagtgtttatgaattactcttataattgagaactggttcttcaaaattaaggtgttttttttttctgtacaatgtttcataatacttttcgtatttattttttctgcaacagaaaatgaacaatactaaattgctgagttaggatttttgttttctttgagttctgtctctaattgtcgttttgcatcagaatcttggctaatagacaatctgcacaaagatcgc

SEQ ID NO: 18462 - DNA, 879 bp, Glycine max
  Intron number 1 from transcript Glyma06g10680.2 (locus Gly ma06g10680) derived from phytozome v7.0 (chr-ID Gm06; pos 8084272 to 8085150 reverse strand)
ctcctccaaccaaccaacacaagatttccctctgggtactctaaatctcatacctttttgttgcatgccactcttttttcattttctgtttctctctcttacccacctacccttttgtttatttactcaagaaactaagaaatcagaatcctccctacactttccaaaaaaaaaaagaaaaagaaatcaatttgtggattttttatttaatcaagatttggcatcttcaaaactaaatttcttctctttttttttcctttttgttttccctctttttccttggagttttctcagcaaggatatctgactctctgttgattgcttggactatgcgtgattcttagcattctcccaagcttgcagtggctttgctttggaaaagcaaaaaaaaaaaaaaaatgtacttcaatttctgttctgttaggcaaaaaattcacatttttattttttgtcgggagggaattttcttgcctttatattttctctgcttcatgttgttggggatgtctgtgagatgaacatgtaaagttgagattttttcaattatcttcaatttagcaagtttaattttgtgccctcaaaattccccttatcttccagttttcgatctctccaaccctttccgaaagatgcttccttttttactggttattcagagaatatttcaatttgaactattcattcacatgcttgtgacagatattttggtgtatgtgggtgtgaatcactgagtctggaatatgctttttcatctttgttttttctgtgaagagttccatttttttttgttaatgcttttaattattatatgcatctctgtatttaatgcttttaattattatatgcatctctgttcaaaattgttattttatagattgg

SEQ ID NO: 18463 - DNA, 427 bp, Glycine max
  Intron number 1 from transcript Glyma07g16840.1 (locus Gly ma07g16840) derived from phytozome v7.0 (chr-ID Gm07; pos 16499300 to 16499726)
acaaggtaactcaacatttcaaaaatcttcttagttttcatgatttgtgctgatttgtcagctaaacatcacgatgacatctatatatgtgaaatctttttggtgaggaatatatatgtgaaatctttcaatatgatagagaactcaaaagtcaacagccaaccatgattttttttaatgtatcaactttttgtaaaacgatattagtgatttgaaactttatggaatcatatactatgattttgggagaaattttattttattttactatttttatttcgggtggggggattctgtcacgtatttgtttctatataactcgatctaaattctgtttgtcctaatcactttaagaaataattactaataaataatgtgatttgcgaaatcagattgtgggtgctgtattgaaatctgttttcacggt

SEQ ID NO: 18464 - DNA, 723 bp, Glycine max
  Intron number 1 from transcript Glyma10g14660.1 (locus Gly ma10g14660) derived from phytozome v7.0 (chr-ID Gm10; pos 16913799 to 16914521 reverse strand)
agttctatttcctatctttgatagtgctgatcgaggtaaagaacacaaattttattttaacaaaaaaaaaatccttattttcgccagagttaattgattttggtctaatatgtaattaagttggtttatgttggataaacttttttcatatcatttttcaataagaaattagtgtttttttaacaagttacatgtaaaagttaaaatatgtaagttgaatttaacttcttatttttataaatatttattgaaaagtttattgagtctttggttgatgattgtattgtatggaaattaaattaaataatagcaagtctagcacccagatgctaaagtgctgcataattatctgcatgactataacataagatagttttttggaagactcacgagaattaagtactaagaccatagtcataggattttggaatataagatttcatttcatgtgatgaaatttttgagttggtatatcacgtgcttttgttttctcaagatgatattttgttggaacatcggatcttctagcaatctatttagagattatttttggttattgcttaatagcagagatagaaaaaaaatatataatagcgtaaaagtgtcggttttggctggtgcagcatacattttagacgttaagataaaagtagtttgcttgtatttaaagttgtttgattttgagggtgaatgcagggctatctaaagctgcaaaggaggaac

SEQ ID NO: 18465 - DNA, 436 bp, Glycine max
  Intron number 2 from transcript Glyma13g00770.1 (locus Gly ma13g00770) derived from phytozome v7.0 (chr-ID Gm13; pos 483149 to 483584)
tgatcttgaaggtaagtaatattttccgaattaatagaatgctaggtttatacagaatggttaagagaatgattgtatgcatttacaaaatatattattttctgtcaaatgcatgtgaacgtgagtttctctaaaaacagattgttggtttctttcccataagatcattttcctctagtcggaaaataagtttgagatctttcttcaaagctcaatatattcctcggtataacttatgtgtttggatttaatttacgttattctttattatttgattttttgtggatagttgttaatccagtagttttgacttttcttaagtttctcttgcttcctgcatcatatatgcattaatgtctttccatgaatatcaatattttctttttccttatcctctccatgtagacaactgcttcaaaaagtggtgctcttcgtc

SEQ ID NO: 18466 - DNA, 826 bp, Glycine max
  Intron number 1 from transcript Glyma05g33150.1 (locus Gly ma05g33150) derived from phytozome v7.0 (chr-ID Gm05; pos 37882696 to 37883521)
tctaaattaaaatcttgaatcatacgcgtcaacaggtaaaagggtgaagcataggcgagtagacaaagggaaggtgaggttatcaaattgcagcttctccttggaaaagaagatttagcttcggaagagtagggacagggacaggtcttatggcggtgctgaagtttgtttgttcaacaattaccttaacaacgacaaacacataccaaacccaaaccttacttagatttcattcttcgtttcttctctgaccattttcaattcttcacacaacacacattcatataatcatatctgacaatttgtcacacactttaactttactacttacttgcccaattaactatttcatcgtcatatgctaaaaagctttcaactttaaagttaaccataaagaaaagctctctgtgaaagaaaaaagcaacaaccaaattgatcttcggttctgggttacaattgaaatgctgaagctctctgaggtttatcactgaatccttggcatcttcctcatgatctttgtccttgtacaagttaaaaatatatattttaattattattgttgtagtttttttttgtttattgagtgtgctcatcttggccctaaatcataagcactgcaagtttggtttttgaggtttcattttttctttttatttcacttacttctttgatgtgttaagtattaagatctgatcgtttgggttgtgggcatgaaggattataatttttgttcatttttctcaataacatttctttgagcttacatcgaaattgagttaaatgctgagttatctcgccttaaattttgtgctgttgcaggtcgttc

SEQ ID NO: 18467 - DNA, 968 bp, Glycine max
  Intron number 2 from transcript Glyma11g03560.1 (locus Gly ma11g03560) derived from phytozome v7.0 (chr-ID Gm11; pos 2379802 to 2380769)
ccacctatttttctgccagaaacatcagcttcaaggtacctatactatatactatatttatttcttcggtcttgcacaatgtctcccttaaaaatactggttaactgactaaaaaaaaaattgtttaaattataaaaaaaactttaaaattttattaataacgattttacagtttttcattattttattttatttttttaattcctcgattaacatttgctttattttttaactataaattatcctaaatattttaggataaatatgtattttgattactgaaagtataaaataataataaattaattcttaaaaaattaaaaatttaaatttaatctctaaatacataaaaaaattacatattaatcctacaaatagtttaataacttaatcacccaatgatatagaactattataacttaataacaaataactagtctttaaaatttataatttaagatgaaattaattctaaaaaatataatttattttttagtattataatttaatgaaaaaattaatactctcacaaaaatgagtattttaagtgggtggtaacatggaagcacgaaagggagagggaccaaaggaactattatggcctgtatgtattccttaaaaaaagtcaaaaacaaattgtcttccttgacccaaagttcaagacacacacaactggagtccatgcatccgagtaaagtgtttcatcttttcagctttgcctagttaatcaatatgaaccgtaaagccaacttttttttataatttaatttctatatattttatcatcacataactcatggcatagtaagaatttctcttgtttttcttaattttgtctttcgacactcatgtacattaaaccttttggaatgaatgtatagcttgacaatgcataaagcaataaatgaatgaatgggtttatgttaaaatagtgagatgcatgcatgcagaacacagcacctgcacca

SEQ ID NO: 18468 - DNA, 971 bp, Glycine max
  Intron number 2 from transcript Glyma13g17150.1 (locus Gly ma13g17150) derived from phytozome v7.0 (chr-ID Gm13; pos 20958694 to 20959664 reverse strand)
gatcttttcccaggaaggaagcagcactggtcgaggtgcattttcttctctttcacatctcaatcattttcactgtcttatctgtcaatagttttttcttgcaagttattgtttggagttggagtagataatagagtagtgatctttaaaccttcatgtgtagtcattgaggctattctataatagtagggctgatcttaggaggaaaaaataaaaagaagataaaatgcatctaacatttgaagaagctaaatgaaaagagcttctataaaagtcaagggcataaattgattttagcttatgcgagagaagtttaatttatttttatctttttattttcttctcctataaatgttcatggacagagccataagtgaggattgctaccgctcgtgttatgctatgtcaggtagaatgtaggatggtactctgtcagttgcttcacaatgttctacattatgatgtaattgctatttgctatcaatttatactgtattgcaatcacattttgagtttccgttatgtggcaagccatcctctctaatgtgatgtttcaccaaaagaaagggtgaatgcaataatgaaaggagaaaaatgttctgtttttttatatgaaataagtgactcagaacacttgctaagtcagatatcttttttcctctctggcattacgtgtgcgtatgcatgtgcacggaatctcactagcatcctatctttctaagatgtgaccattggcgagctacaaattcaggagatgttaataatgtttatcaatatttttgggttgctttattcggttataggtttccaatgcatgaattctcttccacttttatattatctagtataatctagtgcaatcagtttaatgggttgccattatttggaatactgttttcttgtcgtgcttattagtttatatgaattgaccatttttgtctgtcatgtcataaaacttttttcagtatttc

SEQ ID NO: 18469 - DNA, 679 bp, Glycine max
  Intron number 1 from transcript Glyma13g34680.1 (locus Gly ma13g34680) derived from phytozome v7.0 (chr-ID Gm13; pos 36199787 to 36200465)
tcaacggcgaaatcgtcagtgccgactccgtccaggtaatatgcacattcaaacaaacattttattcagcttcttcttgtgcttttgcattgcgtatgaggtggcagtggtactcgtagggttttaggattttaattttaggttcccttgtccggaatttcgactaaaattgctgttgagccaaattgtggatagttaagtttgtttagctgctgataaattattattgtggttgttgttatttcatgaggaaaaatgttcttgctttaaattgttgcaggacagttgtttgcgaagtgataaatcagttatgcgtatgtacatggttgatttttcatgaaaagaaatagaaactatgtatatatcttgtaaatgaacgagttttgttgttttctttatgaatttaattggaatgcgtcaatagtgtaaaagtttgtttacattgtcatcccgtcataaattgtcacgtaattgaaaattgttgattaattgatttatgtaataattactttgaaagtttttttttttaaaaaaaaaaaatactttgaaagttatatctaaaatgatttgtaattgtttgacagtgtaatttttttatgctaatagtgtataaaaaataaactctttatttaagtggctttattggcttgtattgtgccacaggtgtatcgggggcttg

SEQ ID NO: 18470 - DNA, 679 bp, Glycine max
  Intron number 3 from transcript Glyma07g01430.1 (locus Gly ma07g01430) derived from phytozome v7.0 (chr-ID Gm07; pos 906241 to 906919 reverse strand)
tgcaaggtaaattcaactaatttttttttttgatctattaacttatcttttgataaagattttttttccttaaataatgtggagccgtgtttgatttgctaaaatcataacgaaaaatatacttgagttaattctgaattgaaactctcttgttagttttaaaaactcaaaactcgattggtataaacagttggcaacaatacacgtttctagatattgttttcaagttgatcttaactggctctagattctgggaaagtattctttgctatttttatttaattataaagatggctgctaacgtgactcaacatgtccacgagtcatgaattgatcctataacaatatatggagtgctgcctcctgattttttggctctttaaaaaattacgaaaattctgcttaaccaaccaaccactctatcgtggtttttgtctctgatttgagcccactggatttgattgaaatagaaaataaagaataattttgacctaggcccaccaatagttcaaaatatgtaaagaattgtccaccaaaagatgttggatggaagcttcatattccaattaagaagtttctttgtatttttaattgtgaccaattattatgattctaaagtcttattaaatttttaaccaatgcagggtttaatcatagatagaatccaagattcaatttc

SEQ ID NO: 18471 - DNA, 333 bp, Glycine max
  Intron number 1 from transcript Glyma07g01430.1 (locus Gly ma07g01430) derived from phytozome v7.0 (chr-ID Gm07; pos 907352 to 907684 reverse strand)
ccttggaactctctcgtaagcatttggtgtcacgtctttgggtttttcttttttcagtagataaaacttggttgcaatttgtcgcatgttctcagtattgttcttcaatcaaaattagacttttccactttgatattattgacgtgaaacactaattctaatgcgggaacaatactaaaaatatccaagaattgcatctaaattgtcattatttaaaatactctgttttgtccttttttgtttattttttaattttaaatttgcaaaatgtatggttttaatgaaatgaataactgagtcttctgtttttcggttttggatttataggacagg

SEQ ID NO: 18472 - DNA, 743 bp, Glycine max
  Intron number 1 from transcript Glyma09g33220.1 (locus Gly ma09g33220) derived from phytozome v7.0 (chr-ID Gm09; pos 39722746 to 39723488)
attgaagtgcgggctcaaagagaatcccgggattggttagtttgtgttcttcttttttacccttgatttgtttggttttttagtgtatgttttagagaatgcttgttttggatggtttgaaaattttctggttggacttgaatgcgtgtgtctgtggaaaaattcatgtctctagggagtgtgctttttttttatctttataatttttgagttggataatgctgcatgttcagcaatgtgaatgcctgaatggtatgttgctaacctcctttttttggatgttctgaagctcatcaataagttcatttatatcttcgtgaattggtctgcgggtgatgagtactatcttgtttaagaatagagggaggatggtgtgagtgttatttggattggattttggcataaatgccatcaactgctttaatctctctagttgctactgttcttttccatgactgattgcggatcccttccatagaggagactctccaatttacaggatagaatatgaatgtgaaaaaaattaggaaagagagagaaaaagaatgtctacaatttacaggaatttatagaattatttacccaggcatggaaagctaaattccatgcccttccccctcataaacatgatctttatcttagaatattagtcttcagatcacgtcgttgtaaattgccaaaaaattattacctctttttcatttacatctttgcattctcaactgcagtacctcttatctatt

SEQ ID NO: 18473 - DNA, 661 bp, Glycine max
  Intron number 1 from transcript Glyma08g10530.1 (locus Gly ma08g10530) derived from phytozome v7.0 (chr-ID Gm08; pos 7650448 to 7651108)
gagtacgagaggatagagaaagttcaggtttggcatttagccgcactgctgccatctcttttctcctctcctcttccattcaacctcatagttgttgtttttttcatcaaaattaaatctttattttgtttcttaaactgggttggtggaaaaatggtccatatgattcaaaggtttctgttcttggagttccgaatacacttggtcacacccccttctgttttttaatttttgtgggcttggtttcattgattccctccaagtgaatttttaacatggtttcaaaaatcatgcttttgctttttctacttttgtaatgaatggaaggatggggcttgccattattatttggtgggtgggtgggtgaggaagagagggggaaaaaaggctgaaaagggaaagaaaaaaaaaagaagggtagaattgatttgcgcttatttttctcctgagtaaataaagggtgtgggtcgaaacggtggggagggccttttggtggaaaagaagaaagtggtcatgtattgggtataattgtttatgaagtgtgctgcaatatggattcattcagaaatttgctaattgagttcttctagaattttgttgacgaggaaaaagtatgccattttttctgcaggctggaataatttcccccagtaaactgagg

SEQ ID NO: 18474 - DNA, 840 bp, Glycine max
  Intron number 1 from transcript Glyma13g19960.1 (locus Gly ma13g19960) derived from phytozome v7.0 (chr-ID Gm13; pos 23446436 to 23447275)
ttgtgccctttagtccttagatgttcttttgtttgggttgagacctcaaattttttcgaactgttttggcaattcatttgtctttcagttctaaaattaaatctttttgtctgtgattctgaattcaaaatactgagatgagctgagtgcaataattttgcatggatatcatgttgcataatcaaatacataaactaagtaatggaagacagtgatccagctttaatggttttgattcatgtgtttttcagtttacttggatagctcttgctgccactaattatgagtcatataagacccttaaattttcaatcttcgagtgtgttctcccttaatcctttgtttatggtgcaatggtgtatgtggagtttataaatcttgtttctagctgttacattagtagattgcaagatgcacgtagcttttaattaacagtgattaaatgccaactatgatgtcaaactaaaacagtgattaaccatcagttatcatgagcaatttttcataaatgaagattttttggttctaggaacccgtagtggttgtttagatcataagattggtgatatctatttttattaaatgtgtctttatataattgctatcattattttgcaaacttcttttaaagtatcattgtgtaattagatttttcatttatctcaactctcaattgacttgtgtctgatatttacttgatttgacttccatggtaaaatttgcctattagatctaaacttgtctgtgcaattaattcactttatgtatgctgttatttggggacaaaatatgtcgtgatttgcaggttttgtaagtttggattgtggtggtaaagaaaat

SEQ ID NO: 18475 - DNA, 856 bp, Glycine max
  Intron number 1 from transcript Glyma08g12510.1 (locus Gly ma08g12510) derived from phytozome v7.0 (chr-ID Gm08; pos 9183211 to 9184066)
ctcttgctcggttttggggtaccgttgctgataaggtaatttgtcacactctctttctcttgttcattcggttcattttttaggtgtaaatttcttatagagaggagataattgcccactcaccttcagtccctcgtaatgaattaagaataaattcatatcaaagaaaattttccttgtttattttttaattatatttatttaaataatatatattttaatttccttcatatcgtatgcaccttactcctcgttgagtgccgagaaagtaaaattcccttttccctcttaatacgtataagaatttcttctcaatgaatgcaaaataacagaccaccgataaaaagaagaggcaaataattaaaatgtttgggctttaaattgactctttggaaacccacattgaccaacatagaaattgggcccaacaacgaagaatttttccttattgttaggtacacgacaatgattttactgtcaatcaaatttggtcatgtaccaagcaacataaaaggccacaactgagatgagctttcagttttttccatgtgcatattatttagatttacacaactaccattaatcgaaccaaaaaaaaaaaaaacttacaatgacttaaaaacaaaactagcttccattaaccaacaaaatcaggtaatggtttaatatatagtttagatttttaaaattttatattccaacgtgcaacatgaagtaagccaaaaaaaagaaagaaagaaaacccctccctctagcttttacggtaatatatacatacacatggtctatatataaatttgataactcattttccacgcctgttttatgaatatgtaacagcttgtgaagacatcat

SEQ ID NO: 18476 - DNA, 328 bp, Glycine max
  Intron number 1 from transcript Glyma07g05700.2 (locus Gly ma07g05700) derived from phytozome v7.0 (chr-ID Gm07; pos 4358924 to 4359251 reverse strand)
gaacaggcacgtattatatgaatttcgtttttttagatatatatttcataagagacagttttgttcgaggttgataagattattattatcacctggagcttgaaatatttagttaagttaaatcaatctcaaacaagttgatttacatagtgtttgtttatttttgtttttaaatcaatgttaattttcatttctttaaggttgcccattaataatgtagcttttgtagtttgtgcttcttgtgcgtataattaaaattattgaacttttgcgttttttctttctttcttgtctttgatgttggcagctgaagaaagaaatttcagcg

SEQ ID NO: 18477 - DNA, 391 bp, Glycine max
  Intron number 1 from transcript Glyma08g46020.1 (locus Gly ma08g46020) derived from phytozome v7.0 (chr-ID Gm08; pos 45249025 to 45249415 reverse strand)
gaggaggttctacaaccctctttttaattgttatgcattgttgttagtctaatcaattaattagaaatcatccagattatttctcaacaaacttatcatacatgaatattaacttaagttcctagactttagcttatagctacattatatttgtaaatagagtgacacaatgagatgaaatgatcgaatgctgttgggcttagactattttatagtgatggtgtggtgtgtgtaaattaaacattttttcttcttttgatgctgattttggggaaatttcgtgtgacgaggattttgttgttattgttgattatgtcgattttgttaaaaggtttgttgtgtgaaactgcttgtaggttgagggtcaaactgaggaagtgatttttgacca

SEQ ID NO: 18478 - DNA, 744 bp, Glycine max
  Intron number 2 from transcript Glyma10g10160.1 (locus Gly ma10g10160) derived from phytozome v7.0 (chr-ID Gm10; pos 9775237 to 9775980 reverse strand)
gcgtcatcagctgctcaagcagtgacacttgttgggtatgttttttttttgtgtgtgtgtgtggatttttgaaattggtttgaaatgatagaagaatggactgaatggtgtatagatacttgcttggtgttgagagttggattgttttgttgttcctagaatggacacattgtgtaatggaatgtagaagaacactttatatactctttgggagtgtttggaagaggttatgggaagtttatagtatgtttagttgggcgtttaacccattataagtgcgaatgagacatgatgaccttttggagctagttgttcattctttcatgttagacgtgaaaattacatgattttaaagagaacgggacgggcttccggacacccacttatttgtgcttatgaaaagggcttatgaccttataagtttttttataatcatatttcaatatgtttcatgctgaattgctgattggtgaatgttatcaaaataagctttttttagcttatttctgtaagcttcatgattaagcttatgtcataagcccttgtgtgataagcttagaataagtgctaaaataagttgtttacccagattcactcttgttggtgttgctcatgcttaattagtcctaaggattattttgcatttatgattttggttgactgttgaagtttttgtattaatttagttaactgctggtgaccttttcagggcaacttcacctccatcatttgcgatagaggtgt

SEQ ID NO: 18479 - DNA, 918 bp, Glycine max
  Intron number 2 from transcript Glyma07g07380.1 (locus Gly ma07g07380) derived from phytozome v7.0 (chr-ID Gm07; pos 6060433 to 6061350)
attccaacacagagaggtgccattatttttcactacttactttggttataatcttcgctgcatgacttctttgtaagattaataaaaatgttaaatattttggcttttttacctaacactactttttattctgatccctatataaaaaaatctacactttgttttttgtttttcaggataattcaacgctttgtatgatctctactaaaaaaaatgcttacggatgtgtttttaccatttgtcaatgttatattaatattaattttatcaaactaattgggattttataatattaaattttctatatttttgtattattctttaatcggaattgaagttttatctcactaatttacatataaatttttgtattaaatgtcaaaagttccaggtaaaacaaagcataaaaaacacttgcacaactaaatttaaatttcagtaaagatggtaaatatatgaaaaagtaatattatcctcatagttgtgacaaataacatggacaatatttttcttgtgtaaaagattaaggtctgttttgaataactttttacaaatacttacaagaaaagaaaagaaaaaataaaataaaataaattatgctttttatcacatacgttaaaattaacatatataaattaactagcttataaaaactctttcatttagtatatccaaaaaataattttaacttatacataagttaattttagctaatgaaaaaaaaataattcatttttcaccttctttttaatcttataattgcttattcacaagtttatctaaaaaaaataccaaaatgttaaaattttcaactctagaagaatatgatgtcaaggtggggacgaagtctttatttaaactcttctgaaaagaattctagttctaataattggcttatcccatgtattttcagctgca

SEQ ID NO: 18480 - DNA, 740 bp, Glycine max
  Intron number 1 from transcript Glyma05g30940.2 (locus Gly ma05g30940) derived from phytozome v7.0 (chr-ID Gm05; pos 36166772 to 36167511)
agaataaaaagagaccagtgtgcagtgagaaagaggttggtcacttcttgtgtggctttgttttgttctttgtgttggaatttgttgatgggtgaagagggagaagaggtgtcaagagataaggaacagcaacacatgggagtttatggaaatgagtggttgtttagtagtttctgtgcaaattggcgccgtttaagacaccagaattcctgttctatgcctccttttgagtgaaaaaaaaaaaacatcaaaacaaaaacttgttctctctcagcttttcatcttccgatcttaatatacattgactaaaagaaaaataaagggatcaaatttaagttccttgatctaataagatccttgcttttaattgtactactcatgaagagacttggcagttcggatacactgggtgctctcatgacgatttgtccaccaacaggttaattaaaaaaattgaaacttgggcttttaactttgtttccatgatgcgtgtttcatgtttgtgccttgtcttgtctcaacctttttcacgatcaaccatcccatttactcaaacctttccttttttatatactaaagttccttattctgtctttttttttctgtattgcattacaactcatcatcatgtgaattatgctttgtgttcgtttgttcgagagacgacagttacagtcacactaaccatgattatgtcttgatttgaacagacgaacacagtccgaggaacaaccacgtgt

SEQ ID NO: 18481 - DNA, 834 bp, Glycine max
  Intron number 1 from transcript Glyma09g05160.1 (locus Gly ma09g05160) derived from phytozome v7.0 (chr-ID Gm09; pos 3925712 to 3926545)
aagccaacattgaccccgattctttctcgtacattgtaagggcttgcttcaatctattttgaaaatttcccatttgaatttgcttggtttatgcatggtttggatgatcaataaaatttgttaatttgccaatgtatttggttcctgggggaagaaaataggaatgaagagttgtagaatttctaattattaaacttctgtctggagggactaaatcagtatgatacatgctgaacaccactattggctgttgggcttcataatcatacatacattgggcttcataatcatacatacattgtttgttaatgacaaagaaataacataatagaggagtgtcttgagtttcttgtgtgctgacaagcatagtgaatctatctatcctagaattctgccaataaatatcacgaattgattttgtttgcctaatgatgctttagatgtgtattctgctactttgtgactgagaaacacaatttaatatttaccaacatcacacacatcatcaattactaggaaatagatttatttgctaaactgtttgtttttcttgtgcaaaatggccttgatgcaagttaagcttctagatgcttcttagattgttgatgctatgtcaatgtgcatttgtattttttcatctgagaaggttagtacctactaatcaaataacagaattaaagataattgttaaatgcttgttgatctttatggtgccttctattgttatgcttcatatacctactgattattgttgattaatgccatttgcctttaaagtcctttgttaaaattttatcacaaaaatattaggactaataaattgttttctgaagg

SEQ ID NO: 18482 - DNA, 782 bp, Glycine max
  Intron number 1 from transcript Glyma07g14340.1 (locus Gly ma07g14340) derived from phytozome v7.0 (chr-ID Gm07; pos 13708971 to 13709752)
tgtctctctctctctctccctccctcttctcttacaattcaattcaatccattttgaagaaatgatgattagttgagagtgtaaaaatctctactgatagtgcatgaaaattgatctctctctctctcttgctgatttctttacagaacttggaaaataatttctttaaaactgaactttttcaaatttgtatttaattttgatttgattattcatgcgactgattagtttagattaactcctttttgccttttatttcttaattgatgtacatgtgtgcaaatgtctatgcaatgatcataacttgtctagtgaaaatcattaatgggtcatggatgttgcattaaaagacgagggcttgagggaagaaacatggaaattggggtagagaagttttgagatagaattgaaattggttttagagggaaagataggaaaccagcaaaaatctgaaaaaggggttttgtgacatagtagtagtattgtaccacgggacagcaagttttgaacagaaaataggtcgtgcatgttgcattatatgatgagagaagaaaaatagaaatggggtggaaaagtttgaggtagaattgagtttgattttagaggtagatttcatttatgataaagggttagaggcaaagacaacgaaaacaaaagaagaaaagaaagaattcttgaagtggggttgttattagggacataaagaatgtagtttgaagatgttataattataaccatggtgggtgtgttatggaatatggcagctggaacgttgaactcag

SEQ ID NO: 18483 - DNA, 417 bp, Glycine max
  Intron number 1 from transcript Glyma13g38480.1 (locus Gly ma13g38480) derived from phytozome v7.0 (chr-ID Gm13; pos 39255235 to 39255651 reverse strand)
catcgaacgcttccaccgcaggatcgccactagcggtacgtacttccccgccctctcccacaatattggagctctgttccttttgatctgcgttgttcagctcagaatcggtcttttcggatccgatttttcgttttccaatcgaatgtgatgtgtgaaatgactgaattccgttttgcctcttattcttttactggaatcttctgtctgcttgtcaacgaggccaagagaatcatatgttttactgtttagtgcgttgtgttgtgtgtacggaattttcttttatctgactaatatatgtggattagtttctctaataatgtttggtgctgaattttgtgttttgaatttgattggtcatttgacgtaagtgccattgcagctactgataatcctttcaagggaaacctgacgagt

SEQ ID NO: 18484 - DNA, 775 bp, Glycine max
  Intron number 1 from transcript Glyma09g09750.1 (locus Gly ma09g09750) derived from phytozome v7.0 (chr-ID Gm09; pos 9613357 to 9614131)
gggacaaatctgtgaaggatttgggttgtgaacaggtattcattgtaccttctcagttccaaagagttgttgcctctttttcacataatatgtaagaaatttgttgcaatgttgatggtaacaaccaaagaggtgttaacaaaagatggttccttttttgttgttttttcattggctctcttgcaactgggctcaattatttcgggttggctgaaatttgaaattttatgggacttgtttcttcctgtgtactaagaacaaagtcccggtccttctcgcttactttgttttcaagtgctgtataaaaaaacatttttctttgtttttatgctcttttggcttcttccgattttgtattttgcaataagtttgaaatcaagtttgttagacctttctccacatcatatgtgcttcatttattgggatgagaatactataacaaaatgcagtgcttatttctccaaacttttttccccctatttttcttctgggaaatgtactcctgttgcctctcatttttcagctatttctgtatatggtagcaagtataattcagtttgttgctgacattttttacggctaattgtgttattaactttcttaaatcttgtgtaagatttgaggaatccagttaaaaaatctggtgtcataattcatatccatagttagtctaatcaaatgttttaatttttgctgcttgatttgctgaattcatccaagtgccttctgataatttaacacttctgcatatttgtttggctttggcagcagcaaa

SEQ ID NO: 18485 - DNA, 858 bp, Glycine max
  Intron number 1 from transcript Glyma13g22210.1 (locus Gly ma13g22210) derived from phytozome v7.0 (chr-ID Gm13; pos 25802066 to 25802923)
tctgggagaaggaggaggaagttgaaattgtaagctcctcttctgtctgatccaaatgtcaatttcgcatgttcatcacagtttcaccttttgttttattctttttttaatttacaatttttaattaattgtagcaaatgtgtgaaaaaaattggtcttcagcgctggatcagtctgtgtttgtacggaattccagtttttatttggtttctgtgttgattttgagtctgaattctcaatttctatcaaaatttggtttgtggctaaaatggagttagtttatgattgtgaatgcactagggtttatggatcggatcagagtctgatgttttataactttgttgaaaattgggttactccagtgtgaattgttgtaatttgttgaaaattgggttactccagttactggagaattgtatactggctcttttcccttttaatgtgaattggagcattgcactatagttgactttaattttaaaaaaatgattaactcgactatttgatttttaattctttactcttttatttatttaattaattaattctcagcctgacttgttggtatgcttcaatgagcccgtgccatcaaattttaaagtattcttagtgatgtggtatttttatatttatattatgtacctatcatgatataaagatccagttttatgttttacaaaccttgagtggttgaaaaaagtgagattggttataaaagcctgttcaggtcaccgagttctagtctctttgacctttgctgtaggatattaagcacattcaagtgaacgtgttccacttatctttgtttcttttaacttgttaggttgagtgatacaattactgacagcagaagagctg

SEQ ID NO: 18486 - DNA, 794 bp, Glycine max
  Intron number 1 from transcript Glyma09g41920.1 (locus Gly ma09g41920) derived from phytozome v7.0 (chr-ID Gm09; pos 46621556 to 46622349 reverse strand)
tacgaatcaggctcgaaggtgggtcccctgaatctattgtaaatccatatacatgtgtgcttattagtgcatgcatgtgtgtaaaaatgcgcacacacaatattttcttttttggtaaagttcagttccttacattttctattgatctttgtatcgtattttgtttaacccttcacatatagtacatctctgcaatgctttgtacattttgaggcaattttgggtttggactgcattatatgggtcaaaaggaatagcatggaacgtgatggagtttattctatctcaatgcatctaatattcttatgatagatacttttttttgcaagacattgtatagttttaactcaaatcttgtaaagaaatttctatgcaagattctctactattccctaattataagactcttttaattaatcacgtctcttaagaaaaataattaatttagttataatcatattaaatctaacaattatttgcattatcattttcaaattacacttttcttatttttatattcacttaaatacttctcattaatgtttggaaagagaataattaagtatgaatatataggaaaaaataattaatgcatctaaaaattaagaaaagatcatataaaaaaagacaaacaaatttctgaaaagaatcttataattagagacaaaggagagggtactttggatttaatttacttcacttacactatgaggttttgacactgttaaaggtagtcaacactatgatactattaatttacttctctgttgcaggttgtgagcaaatcagctaac

SEQ ID NO: 18487 - DNA, 447 bp, Glycine max
  Intron number 2 from transcript Glyma06g06840.1 (locus Gly ma06g06840) derived from phytozome v7.0 (chr-ID Gm06; pos 4915926 to 4916372)
ggtggaagtgatgtaagtcattccctccaacttcaactccttttgctttgcttcatttttttatattattatttcttttattggtaaatgttagtttggattaaaaatgttagttggggattcgaatccaatacttcttccttcaactccttttgccttgcttcttctttgttagtttttttatattattatgtaacatgaaatgaaattctttgatattgccaaatctctctactgaggtggattggaggaactttttgttttgcctttacattgttttttgttttgacatatcatatgctgaaatgagccgtgtgggtcccacagagaagaaaaattgttgattctgaaagtgaaatttcctcatggtctttagttttactttgcattgtcctattatgtagaaaattgatattgatatttcaaatattgatacgatgattcagg

SEQ ID NO: 18488 - DNA, 356 bp, Glycine max
  Intron number 2 from transcript Glyma06g01850.3 (locus Gly ma06g01850) derived from phytozome v7.0 (chr-ID Gm06; pos 1170209 to 1170564)
tttttgatcttgtagcttcccaactcactcccaaggttagtttcttaatagttatatttgaatccattcccatctaattggatgatcatgagagtttaccttcctgcttgtatgggttatccgttataaatatttactagctcttactttctttttgttcttcattggaaaatctcaatcagctcaatatatatctagaaaatgttagcaacagaaaccatgaaaaatgcaatgttttttaattattccttttaaaactacgtaacaagctatgaagggaatataatacgttaatagatgacatcttaagtaagccttgtttctactttctaattttgcaaatcaaaagcagacca

SEQ ID NO: 18489 - DNA, 896 bp, Glycine max
  Intron number 1 from transcript Glyma12g28940.2 (locus Gly ma12g28940) derived from phytozome v7.0 (chr-ID Gm12; pos 32322041 to 32322936)
tttgaagaaggccggtgctagtggaatcagggccggtatcgttcatccttcactctcgatttcttttgaattagtactcgtttctcgtgcttcgctgatctcccgaggagtttttattcacttgtattgagtttattttccgtgtttggttaagttttcttgggatctggagctttttttctttactctcttgggccgcgagttcatctgtctcaaatctctcaagtttaaactcgatgcgttgctttgcctggcttttttttttatatcttcttgcccagaaattgttgtagaataagcttatttggtctcggcgtgaggaggaagggaacacttttatgttctcgattctcatccttaagattttcatccaacttttttttggcaattttaacaattcttttcttttgctccttggtatggaatgatgatagatctatattattctagccgcgtctttattgccacgaagaaaaatggagtttgtgtgacttgagatcttgctttaaattttagaaatcggtggataaactgtctgctagtttcatgttttcatgttgtagcaactcatcactagggaaatcttttattcttctcctatagagaaattatattatgttttaatgaaatggatgcttaactctaaactatatgggtctcttttctttgatttatttaatttactctacaaaatagttgttgcctaatgtttctgtatctctagcatttgctctttctgttaggatggatataatataagtcagtgcacttgtattatcgtgtgctgttaatagtttttatttttttggttcattgtctccctgatggatcatgtgcaatagtgactgactatccaaaattatatctgacaggaagtggaggttattcttacttgt

SEQ ID NO: 18490 - DNA, 671 bp, Glycine max
  Intron number 2 from transcript Glyma14g00710.1 (locus Gly ma14g00710) derived from phytozome v7.0 (chr-ID Gm14; pos 346295 to 346965 reverse strand)
agccaccacctcctttgctcatacaaccccaggtcagagttagatgatcctttgttaatttcttttattgaaaaaaataaataggataggtggtgtttaatgttatagttttatacagtatatccatgaggggaaagaaagaaatttgatcaaagcaataagaaataagcttcctatcaaggtgggatgcttctcaaccttctctagactgcttttaccgtttaacagtgatttgtggaattggaatggtacaagtaaagtcagattttaggttatggtacaaagatcagagtaatctttcaagttttagaattttaaggtggatttaatattttgaatactaattttgtttatcattcatatgggaaactctgctggtggtcttatagggaactgttatgagatgtattggccgaagaaatttataatgagacttaatacatgcatgctattgcaacattagttcactcccaggtaatatatataaaaatttaagcaattacaataaggatttaatgcttttaatctgatgaagaatttacaagttaagagttagtgtcattgaatgaagctagtttgacaataaatatcttgaggggcacaacacaatgaacgtttacgatgaaacatcaaatttaaaatgcctgtttttcaaggtccctgtggctgcc

SEQ ID NO: 18491 - DNA, 424 bp, Glycine max
  Intron number 1 from transcript Glyma08g09820.1 (locus Gly ma08g09820) derived from phytozome v7.0 (chr-ID Gm08; pos 7023668 to 7024091 reverse strand)
gggtttctttcaggtttgtcataaataaatagaacatggctagatcaaattttgtactactatattggatatagacataatatgtgttactttttagtttatgtaggtcaaaccaaggactttgatcatgaatttggtttttaaattttatgtatgatttagtctattatttttaagaaattttcatgtttctttaataaaagactaaatttatatgtttcttacttttaaagttcatgatcaaatttataaatataaaaatacaatgatcttaaacatgtttaactaaaagtacaggctgaagacatattttttgccaggatgatttacttattactcatgttgtaatgttttagctaatatcatgcccaaattaaccatgattacagctaattaatcacggagtggactcttcattggtgga

SEQ ID NO: 18492 - DNA, 508 bp, Glycine max
  Intron number 3 from transcript Glyma08g07480.1 (locus Gly ma08g07480) derived from phytozome v7.0 (chr-ID Gm08; pos 5339112 to 5339619)
gaaaccttactggaaaaaattacagatagtagaaggtatatcttatgcacatgaaacatttaacagtcaaactaatttctcaatttttcgatatttagatgtcatttggatatacttctctttaagcacttactgcagacagaaaataacaagataaaatgaatcaaccataatctgaaattatataatatcattcaaaaagatgatcaatacaattgggtacataatcaaaactttaaagactaacatgaattttagacgcccttgctaacaaatgaatgagcgacttgccctaatctaaaattaacttatgcactccaactttgaaagaaattagaagagaacttctataagttgattttagcttacgaattcaattcattttactttcttattctataaatgtttattatccaaagttcaaacaaaacaaattacatggtttgttaagtgggggcaaaatgtgcattcagtggaggcagagtttgtggttgaagaggctgaagcg

SEQ ID NO: 18493 - DNA, 607 bp, Glycine max
  Intron number 1 from transcript Glyma06g41530.1 (locus Gly ma06g41530) derived from phytozome v7.0 (chr-ID Gm06; pos 44818677 to 44819283 reverse strand)
ctggtaatacattttgttttcttcttttcttcttttgccttctcagatatctgttagtattttaatcttgtctgttttcatggttagtttctatcttcaagtgaagttctaccacttcttatcctcctacctatgtataataatgcctgtaaccttcactatagcattggctgttcattttcttccatttgttttttgaccctcaaagttggttatacaaacattcttatgaccacaaactttctggccacatctgtatcagatggacatagatttttttgttgaggtgaggaatattataaaatcaacatactttttaagtttgggacaaccaaactgatttcaccttttccattatcttttcaatttagaactatgcccaggattccccaacagctttaccttcaaaaatcaaaatatctagaaggaacagtctctctctctctccaacccacataattcaaaattgattgaagtgtcaatgacctccattttgttaccatttttgtattgttttagtgtcacaaatttcagttttcgagtttaagagcaataagtttttcacttggcagtgactgaacttgtggaaggagattcatcaaggaaa

SEQ ID NO: 18494 - DNA, 871 bp, Glycine max
  Intron number 1 from transcript Glyma07g37930.1 (locus Gly ma07g37930) derived from phytozome v7.0 (chr-ID Gm07; pos 42815462 to 42816332 reverse strand)
acgacaacattgaccttgattctctctcttacattgtaagggtttacttcaaatcataaacaagttcaatgcttatctagtttggtttctctacactgattttgcacgcaaataggacaaacaaatgaaatcatttagtaccataatgaattttcaattcatcaatgtgttttgttcctgggagaatacagggaattgagcagttgttgaatttttttatgattaaacaaacttatctttcggtattggaaaagaaattcagcactataatcgaaagagattttgaaacataataatagtatgtattgggaactgacaaacaaaggtaatcaatcctagaaaactgctaatgcatactatgaatcaattatgtttgccttagggatgctgtagatgcttttgagtgtgtttgtttctccatttatttaaatcccaatttaactccaatcaatggttttgaatctctcacattgaggggcattggaaagtgggataacaaaaaagcacacttttttgcagcactatctactatctgtcacatccaatctcccaccattgataactacatgctgcatcagtttgtacttgtgatgcaagttcatctttttgctgtttctcagattgttgatggtatgctaatttgcatttacagtttggtctgggggaagactattacctgccaattgaatgatataaatagtgataactgttgaattcttgttgctgggcttcatgatgcctgttgtgatgttgcttcgttcctagtgatattttttaactgatgcaatttttgctttagtcattgtcctcttgattaaatttcatcttcaaaacaataggactaataacttgcttcctgttttattcaagg

SEQ ID NO: 18495 - DNA, 597 bp, Glycine max
  Intron number 1 from transcript Glyma05g36390.1 (locus Gly ma05g36390) derived from phytozome v7.0 (chr-ID Gm05; pos 40223275 to 40223871 reverse strand)
caaaggaaacggaaaaagcaacacacacaaaaaaggttcagattcgatctcttgtttttttcttccattcatatctgttttatttattttttctttctttcggcaattgcatctcatcaaactctttttttccttcttaccatcttcatttccgcacttgcttactcctcaattctctttttttcttcgggatctcaggtgggtttccgttatttctcaatttggacgcatatttttgctttattctcttgaatctgcacgctctattgaagattcgttctaactcttaatttcattgcagcaaagctgcattttttttcatgttattagctagatcagaaacatgtcaatgccccaattgttaattttcttgttttccttctggattttgcatgcaagtggttgtttaatttggttgtggtggctattcaacttttttttctctgcatttctgaagcattattttcttatttgagatgtttgtgggaattgagcttgaaaataatgttatatgctaggttgaattttggtgagaataaaatgcatttgattctcttttaacatgatggttggttgcaggtctgtgcctcctcttat

SEQ ID NO: 18496 - DNA, 461 bp, Glycine max
  Intron number 1 from transcript Glyma13g24910.1 (locus Gly ma13g24910) derived from phytozome v7.0 (chr-ID Gm13; pos 28200617 to 28201077)
caccaataaatacgctgccctaaccaaaatcccatgtaatgtaaccaaacctcttcaacatttcttcattctttctttctttcttttttttttataaaaaaatcatgaatgttcaatttgccatattcatgctctggaattgtgttatccttttcattacccatgaggtcatgacgttgtttctggtctattttcaatgtttgggtagattatatcttgaataattcaaattattgtgatatattataatgaatagttaactcaatgaagcaatattccgggctcgttgaagactcttgtagcaatttttatggtttatgatgtcgatgttaggttattttgatgttaattggtgttgggtatgcgctaaaaattcgatctttgcgttcctttatgcactcacatatcctacttgttttattttagggcgagtattctgcaaaaagggttgcgactcagat

SEQ ID NO: 18497 - DNA, 658 bp, Glycine max
  Intron number 2 from transcript Glyma13g24910.1 (locus Gly ma13g24910) derived from phytozome v7.0 (chr-ID Gm13; pos 28201089 to 28201746)
ggaagaatgtgagattactttgcattttctttttaataatttttcttatgaatggaatgtagataagaaaaaattgttcaatcaaaatctaggctttatgaatttcattttcttgtatttctgcatcaatactagcattatagttgctcactttttttcccccctttgtgtccttaataaactatttcagaaatttgcaaaagttgttttttcttgattagttgaaaacaataatttcttgagagaaaaaatttatctttgacaattggggaaagtatttggagtaaggcttcacttttttaattgttaaacggtaagtcacttcagcaataatgaaattgagcgaaatggtttttattttatttttaacaattcaagtcataagattatgttagtttttgctattgaagcaacaaagactggatatatgaggtcaaacattggctttgtagatggcagaagtagttggtttatctcatattttaagaagagaattgctagcaacttggtttatctcagttttgtttctggcgtattctgagaaaaagaatggaaaaagtgtgattgtataaattgggcttgcttagtgacagacttgattttgattaacaaatgataagagtattggttaaccaggtttggaggactgcaatcaaat

SEQ ID NO: 18498 - DNA, 1010 bp, Glycine max
  Intron number 1 from transcript Glyma11g14020.1 (locus Gly ma11g14020) derived from phytozome v7.0 (chr-ID Gm11; pos 10036410 to 10037419 reverse strand)
aggtccagaagttgaactcaggggtcattttgttggttagtttatttttattaatcatcttacctttttttttctttgccatatctaaattgtgtccctagttaatggtatttgtttatactcacctctaagttgctaatgaattcttataaggaggaggatccagattctctatattctcttttctatgcattcaaacattcaacaactcaaaaccattggataaggatctgatgactcatgttttatcttggtaaatcagacttaaaacacaaattcaatatttgagccatctgattttcatccaacagttaagaatgcactgactgtgtgaagtgcgtgaaaaaactgactactgaatcaaattcctaaagaggaagggcctaaaatgcaattaaagagtaataagtaataactttgtaattggttgttttcattcaaacattcaaaagggtataattctagtctctttttcttgtaaagccttttccacttttttgcttgttattttttttatcaccatgacattggtgcagagtatccaccagttttactgacaactaatctctgtcggggaacctgaatagttacctttagtgggtttttgcttgctattttaatactcagagctgagagaagattgaactatttgtttgaataaaaattgcaatagtatgcagacaatatttcatagttaatgttttgctatcttcaaatagcaacacacattttattgtaaaggttgcctttctatatgtaatgtttactctaaaggttgtattttcaaatactgattgtatttactttgtttgaggtttgtttctaactttagaaatacccatcaacactgatatgttgacacacaaatgcaatgtttggtggtcttgtatcttaccaagcacactacccctgcctgcaaatttgagcccttgcaattcacttttcaaagttaatttatgattttttgtttttgacaccgtgaagggcattacttgagtgcatcagctcta

SEQ ID NO: 18499 - DNA, 582 bp, Glycine max
  Intron number 1 from transcript Glyma11g00810.3 (locus Gly ma11g00810) derived from phytozome v7.0 (chr-ID Gm11; pos 412266 to 412847)
ttagtgtgtcagtcattcctgttcctcaagtcaaggtcgatttttttttctatgatcctccacttcactaatcaaactattgtttgctaattacgcatctgaattaggatttatttgccactaatcaatcctaatccatcaatatcagtgattgtttagttctgtttttttttcttttcgcatgacggctttcggagttggaacggcgacgtttgagtcagggtcaatgcaaagccccaatttagattattattaatttattattggtaattaaatattaaatatagtcagaatgtcattttctttatatattcacttaggcactgatatttcacgcaaaaagtagtaaattttctcgattttgtgatcctcctacttggttccgagaaaggtgatgtcaagaaaatgttgaaatatagtatttctttctagccagacaagattgaaattttattacaattgaattttcttcttcttcttactgggtgtgtgggttttggtagctttgtgagggatatggaatttgtaggttctatgctaatagtttgtgtatgtttgtcagctttgtagtgagcagatata

SEQ ID NO: 18500 - DNA, 485 bp, Glycine max
  Intron number 4 from transcript Glyma09g00430.2 (locus Gly ma09g00430) derived from phytozome v7.0 (chr-ID Gm09; pos 151810 to 152294)
ggatcaaatttatttgaagctacgcacgagcacaggtttgttgatgtctgatgatttgttttacttaccttactatcttcaggttatgcaatttgatagagtaattatacatctttgaaaaggtgaattggctgatatcgtaacatgttgttatgtctttttggactatccatgcataaccacacaaagaagtttgcttgtcaaaataagttcttgaaattacagtagcctttggtcctttacaatacttttgagtttcttgttgcttcgtgcaattaatatgttatgttgtcagataattactggaagctgccttgcatttgaaccctaaaagagtgaatgagtttgtttattgacaggctccagttatacgtgccgtaccgtttttattttttgtaaactaagtttcctaaatcctaacattctttctatcatcttatctcttcccagcaccgcctcttaaattggttgatttacctgggttg

SEQ ID NO: 18501 - DNA, 1015 bp, Glycine max
  Intron number 1 from transcript Glyma13g19130.1 (locus Gly ma13g19130) derived from phytozome v7.0 (chr-ID Gm13; pos 22726632 to 22727646 reverse strand)
tcactcggttgatactctgcattaacgattaaactgtaagtcaatatttttgtaaaagattttatcgatgatattttgaagtttggacttgattagcctgctaaacaaaatatccaatattgaaattcgatgccatattataagatgatatcaagtttgacagcttctcttgctatgtcgggaaaagatctttgacttggtcataaggtaccattttatgcatttgtgttgagtcttctatcaaattatgtcatagaattaacagtatgaagttcctctaacaaattttgaaatcaatacaattttgttcaagttcagttcttttctgagaacaaaattacatgtcaaaactcaaaacctgtgtcattctatttttatttgcttcagctccatttttcttcggatcttcttgagaaaagaaaaaaaggaacagaaaataacccctcacaaacagcaaaaaaaatttaaataaaaaaacacaaaactcatgcaatgcttttttcttttgaagtaatttaaatcatttcataaagtgtatttaatgttttaacatcgtgtggttgcttctctgctggcactacaaggtcagaataagctaaagacagaagaagtgggatagacaatggaaatgttactctcattgtttttggtcgttctcattttgtcaacctaaaccttgacaaattttgctgtatattaacatttggaaattggtactctcgtgtacacaagtcattcaaaatttgtgtatgtctcttttctcgtagatgttaaatgaggcttatttatattggtaaagtggttagatcatattggaagtcaatgtcaaaatactttacactgtcaatatttgtaaactcaagtcatttacatcaaatttaatgagatgatccattcctaataagatttacattttacaagtagtagagtaccattttgtgaaacttggaaatactaagttctctaacaatcacttaaacaacgtgcagttgaagaaccgcacctgcaccataca

SEQ ID NO: 18502 - DNA, 698 bp, Glycine max
  Intron number 1 from transcript Glyma10g00660.1 (locus Gly ma10g00660) derived from phytozome v7.0 (chr-ID Gm10; pos 413215 to 413912)
tcagctgtgtttcagctcacaccaactagaaccaggtaataatagcgtctgttaccccattcatcaatgtatttttgatcatcttgttttatttatttatttatttatttatcatttgtgccatttctcaccacaaatagaaaacaagaactaaaattagcgtgttgattttgtgtttttttaagcacttggggtatttgatagtcataataaagtgatttaaaatggagttgactatctttttagaagtaatgatagcttgagttagaggactatgattcatttagtgattcggttcattttacttcgaagtgtgttgaaatgattgaagccaacgtgatttttttttaaactagagtgtgttatcttccagttatttataaatgttgtagctgatgtgggcactttcatcggtggttaatttgttatgtgatcactattgaagttctttggatagtacagttgcgtaatgtgttgcttataagcttcagtactagaagaacttgaatttaagaaatgggctactaacaactgagggagtgtatgttatttttactagtgttttttaggtcactaattgatctatacaaaagctcatccaaaacgatggtcatgggtattttctgcttgacttgttgatttgatttttcaccctcctctctatatctaaatcaggtttgacttgtttataactgtga

SEQ ID NO: 18503 - DNA, 965 bp, Glycine max
  Intron number 1 from transcript Glyma07g09290.1 (locus Gly ma07g09290) derived from phytozome v7.0 (chr-ID Gm07; pos 7755323 to 7756287 reverse strand)
ttcggatcagtgttaaggtacgttgattaagtcacggtcagtgacatgttttgtttattttaaattcaatcaaataaattgttgactttgaaggtgtgtatgataatattataatataagtgtccatttgttttgttttgttaatcagagatcagatcttttaatggttttataatgtagttagaaggaatcgataatttatatgtatttgtggagatagttgtgcctatatatattatcagaggttgggttggaggtgttcacatttattgtgtcaacgtgcctcaaacaggattatctgagtctcttggatttaggatgatgaatgagacaggaaggaatgtggaatcaggcactaatgtggtgtgatttagtggagttgcagtgatttgaaaggagtcctctagctagtgccatgctagtatgcagtttgaccaagaaattgcataccccaaactcttttgaactactgttacccccaatttttcatgtcattgtagatttcttgttctggtgagctaaattataaattgagtctgattgcacggggtatttttatgcactttgcacatctgattaataatcacatatctgaagagaaaaaaaaaggcattggggagaagattgaaggaacttgagatacttggaattatatgtatacacaaggacatcgtttgagttcacaatcatgcaagttgtgtctccttattgattctttctaattattcattctcttttttatttttccacctgaaaatttgtttcacacacaatgataataagtgccttcttgaaaattttattcttcacctatccactgctggttatagccttgaaggttattgatgtgaagagaaacaaattcaaaattttctctaccataaattatcaatgaactttcaaggtaacctaatgattctttccttccagagtttcacagtacacaacttcttattcggagaagg

SEQ ID NO: 18504 - DNA, 837 bp, Glycine max
  Intron number 1 from transcript Glyma08g01780.1 (locus Gly ma08g01780) derived from phytozome v7.0 (chr-ID Gm08; pos 1133478 to 1134314)
ttttcttcagtttacttctccaagatctaactctagtatgcccttttacccaatttatttatttttcttaaaaaattccttctttctgtgcatttctccatgttatggtttggtatcataatcatcgtgtactttgttattgtttttaattaaaacatttgtggagcactcatctgtgtcactttactcacatttgggtgttacggagatcatacagtgttctttccagccttttctcttttccttttgcaatttttttggtaccctacaaatcataaggcatttctttttcggtgcttggaatcaatattgttcttttttaattttacttttttttttcttcttaatctaactataaccaatgatttgtagggcactgttaagacgtggcctttacaacaatggttgtttgcaaggtcacaattgtcattgcaaaataacatgtttttatgagtgcaaacaattgttctacagtgtttagtaccatcatttcttaattgcaataaacagtttgttttatgaaatatcatttcctgcatcaactgttattttcatcccttgattattacagccaaagttttgatatagtttatatggactcctcaatgtgatgctatagccttttgttttagtccaacaaaaacccctcaatggaagatctcccttgtattccgggtaattgtagccatctgattttaatttgttagatgattggtaccatgcagcattatgtcaagtggaattgggtctgtttgagtatgtatgtgttgcattgccacaaactaatatatgttagtatttttttcttaatggtatttcaggtttttggattcatca

SEQ ID NO: 18505 - DNA, 830 bp, Glycine max
  Intron number 3 from transcript Glyma05g32900.1 (locus Gly ma05g32900) derived from phytozome v7.0 (chr-ID Gm05; pos 37680860 to 37681689)
ataaaaaaccacaggtaagttgtcttcaaaatcacgctctcttatggaatttcatttcatcagataacaggtttatatgactgctgatgtctcttggtttgatagggcattaaaactctatgattgcttgtgctcatattgtcagtatctgtaaaaaaaattcgatgcaatggacatataaatgcgtgttaccactgatgcaataggcatttaaacccgtaagatttactctgtttgttcagaatcataatcattttaaacttcagatatgcttctaaatttcatgaaccaatgataacacaagaagatatgttcacttagtctttagctcaccgttattttgacttaataaatatcattttattgtcctatactcggctaaaactacctaccttatgttcagttatataggcttccttaacctaaagctgctaactgctaagttctagtgcttgcttttacatttcttagctcaggataatcctccaattcaattcactcaactgcatggaagttgatataaaagccatgatagaaggaacttaggagcctcttcttggatgaaaggctgtgtcagtacatccaccaatgaaacaaaaaggaaaaagaatcacagcagtatctttaacatttgcgaatgactgtttgatcagaaattattttcttcttctattacaactatgattacaatgtcttatatccattcccggtgacttaactgttaggtttttctatacactttttgtttacttgtgatgttttaataaaataaattctttgttgaatatggagcagattgttcttgtcgaccagtctgaacgttttgtttt

SEQ ID NO: 18506 - DNA, 475 bp, Glycine max
  Intron number 2 from transcript Glyma11g04180.1 (locus Gly ma11g04180) derived from phytozome v7.0 (chr-ID Gm11; pos 2778693 to 2779167)
ttgaatcctctcgtaagcttatggttatgcttttcatacttttcaagtccaaaatgtgttgctgtatcggattcagtgtgttgttcgtgatattttgcaatgcatgctaactatgttgtgattcaaattgtgcacttgcatgtatgctgtgtggattatgtattttgatcattctgtacttcggccctgattggataaacttctcaataagcctttataattacacaaggagaaaataaaaaggtaaaatgaattaagtaaaaattagcttatgcataagtcaatttatagaagctctctcatttagcttctccaaaagcttgttttagtttatgcataagctaattttaactcacaggagaaccttaattcattttaccttattttcttctcctataagttcttattgaaaaatttatccaaacaggaccgaatgttcaagtctaaattggattggtgggattatgtaggtgac

SEQ ID NO: 18507 - DNA, 373 bp, Glycine max
  Intron number 1 from transcript Glyma10g43230.1 (locus Gly ma10g43230) derived from phytozome v7.0 (chr-ID Gm10; pos 49999308 to 49999680)
gttcaaaaaaggtaattttggctttggatttcagttttactctgctgctgggttttgaaatcagtttataattgtacctgatatgtcgtccttcagttggacaaatactttcatttttctcgaagaacatgttcatggaattgatacattttctttctattaatgtctgagtgtggatgtaccgtgctggggagggaatgcattcctcatttctttgataagacgtttagaaaaattaaaaaagaagataatttccattaaagcaaatcagtcctttgtttaacaagtttgtttgagctctctttaatagatagtttaaaatatttgtctctttctcttatatctgaagttcactatttcagaagcttcagtc

SEQ ID NO: 18508 - DNA, 672 bp, Glycine max
  Intron number 2 from transcript Glyma14g00380.1 (locus Gly ma14g00380) derived from phytozome v7.0 (chr-ID Gm14; pos 140253 to 140924)
actctgaaagcttacaaggacttgaagagtggcaggtaatccttcataataatcaaaccgcttttactttatttacttctgcatatccttttgttacttaatgtactccactagctatgagtagcccctgtcaccagaagaagatattttatgcactcaactttttggttgtgtcacccttctccagcccttccaagcaattatttggaacaagaattagaattgtgaaactcaaataataaccgtcgtatccatgcaatttcccttcccttttagttttaggatgaaggcaaagcgtagccgaatgagcatactgctttttacttagatcacattgacttctttactaaacagaattctaagatctcaaatctggaaatatccccatgtcaccgtatgggtagcattatgcacagaaaaaagtagttgaattgctgaattgagggagtatctgaatagtgtagctggaagtttcatcatgtgcaaattgtgtaatatattatggtattgtaataaaatgaaggcattagtttgtgcccccagccccctcctttcattttgttacttgcttcatcaaactgttttatcgtacacttataaattgctattaaactaatggttcattcttttggtgcagtccgaagtaaattttctagggcgtctttctcatcc

SEQ ID NO: 18509 - DNA, 1041 bp, Glycine max
  Intron number 2 from transcript Glyma06g07500.1 (locus Gly ma06g07500) derived from phytozome v7.0 (chr-ID Gm06; pos 5455904 to 5456944)
gtttctgcgtcattcattaacattgaattccagcagtaagttacttcttttgcttttatttcatcattaatttattgcttatgtttccgtgttggttttgtttggtgacctattattgcctacatatcaaggttagttgttgaaaaatcaaacgttgaatgcttatgactactctccttacctacaaaaaaaaaaaaaaaaattcaaaaatctagaatacttcgtagacttctgaattacactgtttcatttttgttcctgttatgtcttaaatcactgtgaaggttatggtaggaaatagaaggagtgaatcaaaagattcacaacagattgaaatagtgtaagtagtaattaaaatgtcaattattactaattaatcattggtctatgtggtattagacttaatttttttaagtaaaaatttaaatttgaatcttgtgctcagatttcttaatatatattaatcatcaataaaattaataaatattttataacaaatcattatatgtacctttaaataatctgatcaacacaaaaagaataaacagtgacctaaatacctttttaatggacaaacaactcacacacaaattgtattctgatcccccacacgcaaatgcaaatgcatcgttttgggaattcttaacaacttgcaaaaagaaaaggtgtatataaaagccaaataagagggtagaaaacgagagtagctagcaaagagtattacaagttttattgcaggagtatagagctcttcctagacacacccgtgtagtcgtgtctcaaactgaacttatgagctggctttgtaaattaaataacacaataccatcaattaataaaaacttccaattaaatatattcattcattccctttaatcgtaacaaaaaatttatatattcattcatttgtgaactttttttattccagtctttgaatgcttattggttttatcaaaatgtgaaagaaaataatttttatcgacactgaaaatactgtaatttgtccatttgcagggtttgaaaacgggaagtagctcttgg

SEQ ID NO: 18510 - DNA, 799 bp, Glycine max
  Intron number 1 from transcript Glyma08g33520.1 (locus Gly ma08g33520) derived from phytozome v7.0 (chr-ID Gm08; pos 30068791 to 30069589 reverse strand)
actcatttgttggaactgaagaatacattgctcccgtatggtgacttacaattctgcttcatactatcactaaatgaaagagatctcccttaatgtttaatgtttaaatctcactcattttgaaggttacatggacatcatcagtttttaattgaaaaaaaggttatgttaaaattgaggatgtgaaatgagaatagcttaggtgatgcttggtttggattttaatttttattttcatttttgagatttagaaaacatatatatatatagaagaaagtattttaaggtggtactgtgtttttacttctttagaaatgactaaaaatgttgatttgttgttttcagttttgaatttgtttttgaaaatattttcatctaaattttaagtaaacatatttttactcttattttcattttttttaaatgaaaacaaaaaacactcaaatcaagcacaaatgatcctctagtgttgtcctctcctttcctccttctcacaaaagataggtgcacttgtgtgtagtgtgtgcttcatgcccaaatggcttacaagaaatagtgtgtattagagttgtaataatgaagagaaaacaaagatctttgtaacattggaaacaagtgggattgcatcatacttgagggcatttaatgtaatctattaaaaaaacataataaccacaaaaaatcatttcattatttatgtgttgttatctgttactattattatcattatcctattttaaggtttttaagggaattgatatcaggaaattataactggagctgggcatactagcggtat

SEQ ID NO: 18511 - DNA, 652 bp, Glycine max
  Intron number 1 from transcript Glyma06g13550.1 (locus Gly ma06g13550) derived from phytozome v7.0 (chr-ID Gm06; pos 10676192 to 10676843)
ggtttgttatcttaactgcttaaagtaagcaacttggtttcttgcaattggtttttgggagctgttaggagaagggttaattgattgtgctttgaaaagtaaccaccttcacttacccttgtttgctggaaattttgcaacttttgatgtttttaaggattgggtcgggtttgcttttgagggtttattttatttagatttaatacaatgtgagtgatggtgaagattcagcaaaaactgaaattttgctttttaagtttaattttttgtcttctgtggatccaaaattgtctcagagaattgtattttatatggatgctgatgtactatttcagacaactatatgctgtgtaggataatcaccttttggtatcttattagttgttagagaagatgttgcctccttctttatctgtcttcttaacttgggttgttgtcattgtgtattttatcaagggcttttagctttcactgtcttggtctaaaaggtggttctgattttgattttgatctgtttctctttttctttggcaatgcctttcctttttaccctcttcactctcgctacttgactttgaatttgcaatcattttttgttttttgaatattttcttttatgcattaggtggtccttcttcctttactttcattc

SEQ ID NO: 18512 - DNA, 652 bp, Glycine max
  Intron number 3 from transcript Glyma13g08060.1 (locus Gly ma13g08060) derived from phytozome v7.0 (chr-ID Gm13; pos 8299910 to 8300561 reverse strand)
gaaatcttactggcgaaaactacagataatacaaggtatatcttatgcacatgaaatatttaacattcaaattaatttctcaatttttcgatatttagaagtttgacctcatttggatatactctcaccaagatgaaataaatcaagtttcttccataatctaagattaacttcttctttttttactgcaacaagattgtataatttcattcaaaaatgatggtattaatacaactgggtacacgatcaaaactttggggactagcgtgaaatctagacattcttgctaacaaatgagtgacttgccatgatctaaaattaacttgcacactcctactaaagaaattagaagataatttctagaaatgtataagttgattttagtttggagatttaatgtgagttgaatgattaagggataagagaaaggaagttgttggtttgatcatctgctaaaaaaactaataattaacaactaacatttaatgataaaaaaaagttgattttagtttctgaaagaaattcaattcattttaccttctttattttataaatgtttattatccaaacaaaacaaattacatggtttgttaagtgggggcaaaatgtgcattcagcggaggcagagtttgtggttgaagaggctgaagca

SEQ ID NO: 18513 - DNA, 546 bp, Glycine max
  Intron number 1 from transcript Glyma09g40880.1 (locus Gly ma09g40880) derived from phytozome v7.0 (chr-ID Gm09; pos 45683802 to 45684347 reverse strand)
catagcagcctcacaacgaacggacccttcagaaggtgaatttgctttattatgctttcaagttctttaatctttctgtttcactttgtttttttttttttttttttctgaattgtgatgcgggacttgacattaatagacaggtcaaactgtgcactcggatgaggtaattcaatttgatttatatcagtgtgcagcttcccctatgacagaattgaacatcagatatatcacacatccataaaaagattaaaaacagtcggttatgagagcagcacttttccttgcgggggcattttagacactatacaagagagctaagattgaaatttcagacgaagttggaaaatagggagggatatgtcatccctttttttcttcttctgttagaaatgaatttgttatttttataatgattaccttagagagaaagtgttctaagtgtatactttttcattttccatcaaatacttccttgaaatttgatttgacatttgacatttttaaccttaataattgacctatatcttttcatatttgtagtta

SEQ ID NO: 18514 - DNA, 803 bp, Glycine max
  Intron number 2 from transcript Glyma12g35880.1 (locus Gly ma12g35880) derived from phytozome v7.0 (chr-ID Gm12; pos 39011418 to 39012220 reverse strand)
ttctctcacttgctctgccgcttcctcttcttctggtaccttccatttcttccttcccttttgctttttcaactctattaaggaactgtgtatctgtgttttttgttaattttgctcaattttgacttgggttcatttggcgtggttgttttgcagtggaaatttagttgctttatctatatgcgatgcactgtgaaattccaataatttagatgttgcttgttagcacggttcatttatgatgctagaaaaagggtaattcggatatcaaatgaagtattatagggattgttgaatacttgattttgattgaaattgaatgaatgaaggggaaaagaaaataatgttttttgaagagtaaacttagctgccatttgtgcccgaggtttaaattgcggttggtcagttacagttgtggtttcattgcaatccttgatattgtagaaaattatggttaaatgcagctgatgcggctgcaattgaagttgcggagaccccccctaaaccttgacattgcgatgcaattagaatcgagtttgcaaaccgttttttttttatatggtctcagaaggtacatttaacttagtttcacaaatttgcgacaaaagggaggagaaacttatgttgttcaatgttcaaacgtttccattgaagagtgttgtgagaatttatctgctgcctttttttgtctcacatgcagacatgtcactacaaatatacagaaattgacttgggtgctgtgttggtttttattttaattttattcagatccactattggttaaggctgctaggggggatcct

SEQ ID NO: 18515 - DNA, 909 bp, Glycine max
  Intron number 1 from transcript Glyma08g46170.2 (locus Gly ma08g46170) derived from phytozome v7.0 (chr-ID Gm08; pos 45347027 to 45347935 reverse strand)
gcgataacagcgtcgttcttcaaagaactcaaacggtaacctttctttctttattttgcttgaattattgaatttattgagattagtgtgcgattgaacagagggattatgcttgtttgttcaaaattcaccattgttagggtttgattcgaaattttgggacttctgttaatgcgtaatttgaatttaggtttttatggtttaatgtgagtagtgggaagttaaaaagtggaaattctgaaatgaaaatcacttcacacttgattcagaacaaaaatacgttaatgtggaaagtgaataagggaggtttatttaacagttgccaaacgagaaatgtaacgcgcgaaatcaactaggatcacagactggtggtttcttcactaactctgttcttatgttttgttcttaatgtacgtgttactctctctctccacaaccaacaccaaagtgaaattccaccttgtcttttttttataagtccaatgttttctttttatgtttatttattcatttaataattttttttatagtcttttgtagtttaataaagattttaagttatgatttgctgtacccactttcttttttttttaggagagctgtacccactttcttgtattgtcaaatttagtactacttaattatgcccttcattatgaattttcatatataagattttgaaatttgatacttaatccttcgatctatggttgcacggttgagtattttagctctcaccctttatgttttgtgcaattctcattcatttcccatcattaataaaaaggtagaacatttaattttggatcaatatttaatggggtccattcttttttttttaaaaaaatgggtttgcttcactttgcatctgcagtgtttgtccactgttttctgcttcctatttggcag

SEQ ID NO: 18516 - DNA, 544 bp, Glycine max
  Intron number 4 from transcript Glyma08g14770.1 (locus Gly ma08g14770) derived from phytozome v7.0 (chr-ID Gm08; pos 10764096 to 10764639 reverse strand)
ttggacagggtaacaagcttttggtcttctctttttaatttttattcaatttaacatatgtttgcctgttggtttttatcttaaatacatgggttggaataatgagtacagaagacattgggagaggttggtctcttatcaaaacaaagaataattcttgtttaagtggtgatggccaatgggtttgttgttcagtgaatatacatttaactcaatcatagttatttactcttgattcagaaaaatagtttggattaaacttgaagctatactattatattctgagtttgactcaataatggtcacacaaaaataatcagaatccaatttgagctccgtctttcagatttatttagtaattgtgaagcttgtccattggtcaagttgaatgatttctttgatatgttgtttgccttcccctggctgtttctgccaagatgactagaatccaaatctataaagttattaactctctatctttcctcctttttcattttaatacttttcaggagctaaaaagagagagagcaaaagcatcccttgc

SEQ ID NO: 18517 - DNA, 1058 bp, Glycine max
  Intron number 1 from transcript Glyma13g06080.1 (locus Gly ma13g06080) derived from phytozome v7.0 (chr-ID Gm13; pos 6372769 to 6373826)
ctttgtctgctgaatctgctgcatcaaggattcaggtatgagttttgataagagaaagagagagagagttcttttgcttgtgagttcctgtttgttgtgaacttgtgattcaagttttgagcgtctaaccttttagtgtgtttgggtcaacattttgcaaatttgatttggaagtgacatgatttatatttaaacactcttattataaaagcaagttaatagtgaaacttaatataatattttttaccaatacaaaaactacttaaagttgcattaacttaaaatcaattagctgatatttcaatgtaattctagaccatctagcatgaatccaaacatgttaccaaggatgacacattattaattcacagaaagcatagtatttcttctctgattatttcggtagtgttactgttttgttcaattgatttgttttagtaataaataaagagcgatacttttatcaaggtcccctttagagtgtctaaaagaatgagtatgttgaatctggtgttgaacataaatggcctttaaattgcaaatacagaaaagcatagcaatatgttagattcaattttgcttgaggtgatcaatgtttttgtcaacagttatgacgatatttgcagtaatatacaagcgtgtatatcttgaagcctggtaaatatcagctttatagtttatgatgtttattaattttctatgattctgataatgatccttctatacttgattttcctacatgggactacaacagaagtttttcagcatgttatcactttcagaagttcaatatattcactgctatttgatggctttgaagcacaactgcaactaaaagttcaaatttttgagcttgtaatcttaaacattaggttccaatgagcttaaagttgaagaaattataacttgtcaattagaactatttcatttcatagatggtgcatgattcactggataaataataaatttctttttcttgattgattaattaattatttcattgttacttgttgtcccttgcagtgccttaacaggaagcaattttctgttctgaaggt

SEQ ID NO: 18518 - DNA, 664 bp, Glycine max
  Intron number 1 from transcript Glyma09g29880.1 (locus Gly ma09g29880) derived from phytozome v7.0 (chr-ID Gm09; pos 36776113 to 36776776 reverse strand)
tgacttcaaaagcttcgggtatattcaatcctaaggtatctttcttcctaaaataaattatcctttttttctcttttaagaagctaatggctactatatgttgaagttgccttagattacactttgtggcaaggttcttaaattttttgtgtgtatcatgctcaagaattttattctacatgtgtatatttctgctatggagttttattataagaatctcttatgatttgatatgatgattctgtaatgatgcctaggtcattatttgaactatactacagctactcaaacagccaatggtttctatatttataaataacttatgttattcttattgtggattactatgatgtttatatagtctttattttgtttaagtattttttcagtatcaagcaattaaatgtaatgagatgtggaatactggtgttggacccaaaatagggttacatgtcatcgtgtgaggtgtgtacatgcataaacaaaaaaatgtcacaattcttgttataatctttttttttggttatgtaggcaatacatttcaattttttaaatgtatttttcaatttgtagacattttatcttatgaatcactttgacaatattagcttctgttactcaacaaatttaaactttgattattttcagtttcgcaataccctct

SEQ ID NO: 18519 - DNA, 550 bp, Glycine max
  Intron number 2 from transcript Glyma06g19690.1 (locus Gly ma06g19690) derived from phytozome v7.0 (chr-ID Gm06; pos 16032163 to 16032712 reverse strand)
gattccacgtcgaacccggggctcgtgaaaaagctgtaagacttaactttttttgttttttagatttgttatgtttttttttcacgatttaagtaatttggtgcatctagatcacttatttcgacttgtaattactttgatttttaaattggccaggggaaatttagggattaagaaaacctcatccgcgaagttagtcattaaatattgaagggttttcttttgattgattcattttgtaaacaaatattgggattcaggattaattctgatccagtctccgcgaatttttcatttggcttcagtattgcaatgaataggtagacaatttattattcaatgaatcgttgaaagaaatacttttcttttgaaatatttgtattttttatattttttttatacttttttcgaattcgttgcagtacttcacttagcatgcgcaatcagtcttggcacatttgtggttcttagcaagcataagtttcgtgatttcttttgtttgcccgtgcataatttaatgcctggattttgtggcagctcttggcagaag

SEQ ID NO: 18520 - DNA, 642 bp, Glycine max
  Intron number 2 from transcript Glyma13g20410.2 (locus Gly ma13g20410) derived from phytozome v7.0 (chr-ID Gm13; pos 23860491 to 23861132 reverse strand)
cctcgagaggtatgtctgcttcagccagcagaaaaagcttctagtttttttttttttatcttctctaataaaattttgcaagttgtctctctcttttttttacttgtttctcttcatcaaagattgagctctgagttttgattttgttgtttctccattttccacattgcttctatattctatttcccactggttataattccttccttgttctgtagcttctttgttttcagttaagccttcactacctcctggttcatatatgctttttgccaatttcaaagtctagtgtatcacagccttgttgttaaaggtttaggtaatctggtttatatgtgtttttcttttggaaatgagatctttataggttcagctcttcgctttgctggttttccttcattggctagaacttttctttttctattttggttttgttttttagtttcaatctcttggattataagttattgatgtccgtatatagctagctaggtgaagcatgggataaacaacccttcaacccttataattgcttagcttctccttttctctttactttttaatcttattttctgttccatctcctgtgcaatggttccttttgcagctaactggtgaaacagtgggagaagtaaaggctgt

SEQ ID NO: 18521 - DNA, 830 bp, Glycine max
  Intron number 1 from transcript Glyma13g20410.2 (locus Gly ma13g20410) derived from phytozome v7.0 (chr-ID Gm13; pos 23861396 to 23862225 reverse strand)
aattggtatacacacacacacaccttccattatgcttttattcttttctttctttccccattttttggtccttttttctgtttttggaataaagggtatgtagcctttctgttttattgggggttttaatattgtttttttggtgccatgcttttcttaatacaatatacatgagctgaattaatggattaggtggaaatgattaaactttatcatgtatgacgtcttgaacggtctggttcctttgtgaatttcagtcggaaaagtttgctttgttcataacgtgtttgaatgttgtaacttgttcacggcttcgaaaaaattgatattcacattgattttcttgaaactatgtttctttttctcttggttgagttcgtgtctagcgtctatttgatgcaaattatgaagtttttttctttctttttcgtcattactcacaaacaaaaaggccaaaatcattctgagaaagtgtcactcaatagcgtgcccaatttttgttctcatgtttatggatacctatggtgcctttcagctttctgaacttaagaacataaaaaagtatccattttttttttttttgtgaagctcagtcgctctgaactgaacacttggcacaaactttgcaagtgcttgctgctgattgagctttggggaataacttccagtgcccttttccttttccaaatggatcatcatttttgtttttgtgtttttggcatcattttatcatgtactctcttatttgcttctgttactctagtctttctaggttgtttaatgttgttattaatggtatctgaaggtctcaaggaacattgatctggtct

SEQ ID NO: 18522 - DNA, 761 bp, Glycine max
  Intron number 2 from transcript Glyma09g41330.2 (locus Gly ma09g41330) derived from phytozome v7.0 (chr-ID Gm09; pos 46039783 to 46040543 reverse strand)
acaaagcacccttctgggattgtgcctacccttcagtgagtatcacttgtcttttaagttaatgcttctttggattgtaattaagagcatgaaatgggtaactgtgttgtttgcaacaatgtgttgtagtttgaagttgtggtctgtgggtttttgttcatgagtaataaagaagtgttatccaaatccaagtgatcccccgtgtatgatattgagtttgagattactacttccaaattaacctcgtggttttatgtcgagtggatcagatgggtttaccagtatttgggctaaagatgttttcttggtcaacgtatcatttacttgtatgccaatagaaactattgcttcaaaacagaaactgttttgcttaagaattacctgtaaatgatcagtccttttttctgtatgtcagcattcaaattcaaattcaaatatgatacatatctcgttatgggaattcttagctcaattcagaatttcagccatcagaactaagtgaatgaggtttgagaggcatgtccataatagatgggggttatactctaatgtggaaatccttgtagagttgtagtgtattccacatctcttctaagatgagctcaaaatatatacagattatgctgattgcattcatgtaaattttatgttaattacttagactggataatgatttcttatatttgcattggaatatctaaaattgtttactatttatactgccagaaatattgtgtcaacggtcaatttggactgtaagt

SEQ ID NO: 18523 - DNA, 862 bp, Glycine max
  Intron number 2 from transcript Glyma10g28960.1 (locus Gly ma10g28960) derived from phytozome v7.0 (chr-ID Gm10; pos 37852647 to 37853508 reverse strand)
cactgtagtgtttcgagggaaaaacctacggtaacacaataatttgattttattattatttgctaagatacttcgaaatcgcagtgactaaaatttcttcgagttcagattgttttccttagttattttggagtgttatgaaatctctgactcacagttcaatagaatgctgaatatgcgagatttggatgtgtacatgcataaataacagtggattaaacaaataaagtggatagggaaggaatattgatgcggaggaaataaaaaaaagtgggaagaggaatgatagtgagctttctaaaactacatcacagagtgatgtgtacatttgatgctgattaactcaaatccttgtgaacaagattaaagctataccattcttttataagtgagaaaaatgcacttaaatggacataaaattattatgggtctgcatatacactctaatgcttaaatgttaggcttcttcgaaagccaaaaccttgaacaccgattattaaatgatcaggaataaaacgaaattaacaaaataggaagtgatgtaactcaaaaaacaatatggcactaataaaaaattgcaaggacagtttcttcgatggttggggccttgagagcttttcacccacccttctttcttaggtaatcaactaaaactattgcatggttctgaaacagttgattattttggagggcaataataataggtaaagatttcctgtgattatttgtagttctattatattttcttttccgtagttacattttctggtatataagaccgagaccatgatgagagactatactgaaataattactatatgttgtaggattacagaagtggcattactcaagggtcagtttc

SEQ ID NO: 18524 - DNA, 451 bp, Glycine max
  Intron number 2 from transcript Glyma12g04110.1 (locus Gly ma12g04110) derived from phytozome v7.0 (chr-ID Gm12; pos 2681701 to 2682151 reverse strand)
gctcctctcgcggcttcctcacttccttgcctgaggtactcttctctaatctcatccactcatccactcatcctatccatatttttcttatccctaacaatcaaacaaatgtataaggagacaccaacaattctcttgttccaagtctcaccgtgctatatgcttccaacatatactttttattagctattttgattcaatttttttttccttcaaattcatcacttttacatcgttaatacacttaaaataatatagttaaaaaaaaacaaatataatattcatttatatattttatttaattaaaatatttgcttttaaatattatccgtgatattcatctcattccaatctaaatggataaattttccatttatttattatgcaaatgtagtaagaacaattttgatattcaggtatttctgaacggagggattttaataggatacat

SEQ ID NO: 18525 - DNA, 489 bp, Glycine max
  Intron number 1 from transcript Glyma08g43750.1 (locus Gly ma08g43750) derived from phytozome v7.0 (chr-ID Gm08; pos 43532513 to 43533001 reverse strand)
ggaatactggccaggtaactttctttttttccaaatgaatttttttcttcaatcacatgttttcttttgattgtcaagatgaaaatcaaccaaaagagaaaaaataatagcaattgtggtctcattggccacatttatttacaatttcccacaacatcattttattttaaaacctgagaaattgttaagtgcttatgattttatggaatttggtttcatttgatacatgttttaaggtataatcagtaaactttaataagtcaagaggtaaatctcttaaatatatctcaatactttgagaaattaatctcggctaggggatacccagaatttaaaaaaaaaaaaaaacttaacatgtcatggtcaaattagcaatagttatgatttacttttttgttgctcttaatttattgcaagatgtcaagagtgatatttttgttttcatgtgtattaggttaagattggtgacttgggcttggcagcaattgt

SEQ ID NO: 18526 - DNA, 700 bp, Glycine max
  Intron number 2 from transcript Glyma06g44350.1 (locus Gly ma06g44350) derived from phytozome v7.0 (chr-ID Gm06; pos 47292068 to 47292767)
aatttcaagccgcacgagcgcttggattcccgaaggtatcgtcaattgtgctaatacttttggaaattcaatgcgtttgcgtgaaattttgaatggctttgctttagttagtggaattgttgactctgtataaattaaaattgacttgcgacggattattcttttggatttgagtcatttttacagtgagaggtgcactttagaagaaattgaaatattaggcgatggatttcaggaatttcgtattttgttttacatgtgtgtattttataataaccacaacttttcgtctaaaatgcacttaacagatgatccaaatcttaggtaatcaatgattaaattacgtgttgaaatattacatgtaaatgcatgacaaatcataaatgtgctaaaatatcaaaccgttgggtttttttttatcaaccctttcctactttagaagaactgaatcccaaataatgttattgcttttcaagctgtttggtatatattcggtgtggattagatattttgttgagaggggattcagaagatattttacatttttttcttttggtcgtaaaaaatattacaattagaactagtgaaaaatttgtgttatgcggtccctcttaggttaactagtttgtgttccctatgatttcctgacaattggatttttcttttgaatttaggtagctagcatctctaggattccttg

SEQ ID NO: 18527 - DNA, 751 bp, Glycine max
  Intron number 1 from transcript Glyma10g36890.1 (locus Gly ma10g36890) derived from phytozome v7.0 (chr-ID Gm10; pos 44926201 to 44926951)
agttaggtgctgcagctgctggtgcttacgccttggtaatcttctttaccattattattattttgctttataatatattttcactaagttaacataaaaatgattgtcatttgtcaattaatgtatgtatgcatgcagttaaactttttacacagacataacacttttagttttatgctcatgcggttctgaaaattcggaaaactagctaaaggtttattacaaggacaaaaatttaaatgcagttttataaagtttgatattatttttcattttgatatgtttttgaaatatcataaaattttcattttaatatgtttttttaaaataattttataacttttgtattcttaaataattttatgagttgaatcagacaaagaatttacggttcctctcatttctaatttaattcaaatttattgaaaatatatattttttaaaattataatatttagaatgatttatgattaattgacattataaaaatatttacatatatatgaaattaaacaactcatttaaatatgtcaagggcatgctagacttctgtgtctatttcccttttgatattcattgaataattaaatttatttaaatatttgtgaatagagagataaattttttttattataattaaaccaattatcatcacacatataagtgggtcattgtcaattttcaccgtacatatgttcgaaaagcaaacttaaataattgaaattttgtttgctgcaattggtttgatagc

SEQ ID NO: 18528 - DNA, 512 bp, Glycine max
  Intron number 3 from transcript Glyma10g42600.1 (locus Gly ma10g42600) derived from phytozome v7.0 (chr-ID Gm10; pos 49515458 to 49515969)
ccgataaatactgccaaggccattgcaagttgggggtgagtgtgagctttctgctatttattatgtatggttgtgtgttttatgttcttaaacctttttggattaatttctatcaaacttgtacgcctcagcttttggaaaaattagacgaaaagtgtttctatagaatttaaagtgtgtaagttgattttaacttgtgggagaaattgaatacatttttcttctataagtgtttttggaaaagtttatcctaacagagtctatctctggtgtatttgcttagtttatagggatccttagatcatttatgcggtaggattgtaccctgtggtgtctctttagagcatagccaatgatttctttagggaattagcgcagatcacatgatgtcatgcaaaagggggtttgaaactttacttggatagttactctttaaattttgttgttctttattttgtttttttcattcaatataaaaatatacgtgcgggtaatcttagatagtgcccaag

SEQ ID NO: 18529 - DNA, 1004 bp, Glycine max
  Intron number 2 from transcript Glyma05g36740.1 (locus Gly ma05g36740) derived from phytozome v7.0 (chr-ID Gm05; pos 40526777 to 40527780 reverse strand)
aggtctcaaggacgtactgtttctgataaattcgggtaattatctaatccatgcccttctttgcttcattgcatacatgctgagatttagacactgattcttagctatgttattgccctttttaaatcagaattggagtttcataccggtaacttacgttgacatttaatacgtgaattagcttcgtaaaactctaattttgattgaaaaataacactaaaaacacctaagttttgtccataacagaattggaagggccgatgtaaattcaagatacatacaactactatcattaattgacatcgcaagtttgtgtttgctacaaagctaggctttgaattgaaacattaccaacaatgaaccttttttttttagggccactaacattgaactcaaaatcacttttgtttaactttaactgttatcaaatgtttttttttttttaatttgctgctaatatggaattgtattaaataaagtatgatgtttttttttttgttgtacgataaatcttggacagtttgcatggtaccatgccttgtctgtctgtccttttgtttggttgtctttattattattggtgtttttatcattattatgtttggattctatacttgctgttgttttcgtaggttttttcttttggcgttacacttaattatttggcttgatcatgcacgtttgtcaagccacgcatatacctaacatgtatctgtatgctgtgcccacaagtgaagaaaagaaggtgaaatttatttgttttggggatttgcgtttccccccttgatgttatgtgtatgtaaaatatgtttcattggcttgtgtgaatatcaggcttgtgttatgtaaactatatttctttggtttgtttgaatataaggcttattttctgttgaacctgtctatttggatcgaatttctatcaacataaaagttggagcatatatttttcattttttgttttgtcagagtattaaagtctgttgaagaaattttgaagatag

SEQ ID NO: 18530 - DNA, 655 bp, Glycine max
  Intron number 1 from transcript Glyma13g35810.1 (locus Gly ma13g35810) derived from phytozome v7.0 (chr-ID Gm13; pos 37184903 to 37185557 reverse strand)
caggtaagtaccactttgtgttagctagctatatatttctggctctaacacgggccacttcttcattattcatcataaaaaggtttagttttgcttttgtttgttcacaagttttttctcttttcatgccactcaaacgcatataaatgtaaataatcatgtactttaccatattgaatccaatctcactttaaaatgtaccttatcatactaaatagatagttagtcagattcagtacaataatattagcaactttagtgcttcacttaattaaaggtaaaggttcattgacataagtggctatgttcttggattcctaaactaattagagtttcaagtttgatttatagcttgaagagggagtgtcaacttaagatatcattttactttaagatgagttaatccggaagaagagggattaattggttggatgttaaatacaaatcttatataatttctgattataccacaaaaaataaaaattcttaactcattttcgacgaatcttatcatgccatattagaaagtcagaagctatgaatcttaagtaagacgtacgattatttacttgcaagaatcaatgaatagttcttatatttgatgcacttgacataaacctttgtttttcataaaacatataacaggactaaaaag

SEQ ID NO: 18531 - DNA, 1003 bp, Glycine max
  Intron number 1 from transcript Glyma08g17620.1 (locus Gly ma08g17620) derived from phytozome v7.0 (chr-ID Gm08; pos 13132756 to 13133758)
accctgatattccccccgttttctccagaactaaggtaatgaataattgaattcagggtgcgtttggattaataattaaatattttagttaagggataaactgtttttcctacaaacacactcttaattagatgccttacactttaagtcttaaggtgagtaatcgagatgaagtattttttttcagtattttttgttattgctattgctcttgttttaaagcgggaatgcagatgattttagttgagacgttgagtaagtggtgattggggtgatgagggtgattgattgatgctttttgtgtaattggattaattcattttagagtgacaatgaaagaaacttaaaatgtgtttgacttatagcctatattgaagaaataatgtgttttctttagttttttttagagcttttggaaagaaacgtgactatttcccataatttaaggtttccctaacaatcacatataatgaaaagattgtgagctatgaagtgaaaaaggttatttttcaaaataattcattttaaaacgtgcacaagtttggtttatttgagaaatttttgaatgaaacggaggaaagttatactggaactggaagtgtgtgaactgtgcagagaatttggaaatgttagattgaagatgatcaaaattatcttttatggtgaagttacttataaaattttatttcatgaaactcttactattggccttctgaaattgtagtgtatggtagtgttatgatattggccttctgaaaaaatgaagcagctttccaaccagagtgatctatattgtctttggataagaactcctcctagaaagagaaaaacaagctactatgtctcaaagatggaactaaactatccattgattagagtctatttgcctatattagtactcaatatttaatgctgtatgcttaatcattgctttttatttgtgttcataattccattctttgaattaatatttgatctttgcttctgtagttccttgtcttgg

SEQ ID NO: 18532 - DNA, 816 bp, Glycine max
  Intron number 2 from transcript Glyma13g04410.1 (locus Gly ma13g04410) derived from phytozome v7.0 (chr-ID Gm13; pos 4742706 to 4743521)
gcagaaacattctccctgtggatcagaaaaaaaaggtccacaataactaattaatatctcagcctatatattttataaatttcttttaatatcagtcctaaaatatagctgattattcaactaactaaaagtgaaataatttaattagaaattattatactattattacatgggaagtaatatatatatatatatatatatatatatatatatatatatatatatatatataaaagtttttaatatataaaagattctttatattctaaatgctaattttgatttttttatgctacaattaattggtttgagactagatatttcagacaagaaaataaatgataagaaagaaaaatattactacactagtatttttcttaggatatgcatttgcttatctgattgtaaatgttaagattcggtacttgtattttctagcttcggacggtatatatctttatgtaaatcttatagacatttgatttgtttaagtctcatgatgtgtggggaagggatacgtgttgcattgtagacaattctgttactagcggtggaggatttcaattaattagtgcatgtgtttggttgcgcacgtatcttgtgcatattcaatgaatatctgttgcttataaaaaagaaaaaaaaaactcatgtttttcttattcataaaatattactactagttgaacttaatttcaattgttttcagttgatgagcctattggtttttttttatttttattttggctatcattctcaaggtggggaatctgaaagtataatcttttttgtgtgcagctattgaagccagatcca

SEQ ID NO: 18533 - DNA, 611 bp, Glycine max
  Intron number 3 from transcript Glyma06g18220.1 (locus Gly ma06g18220) derived from phytozome v7.0 (chr-ID Gm06; pos 14577580 to 14578190)
aaaagcctgcgtgaggaagattttattagcaataggttagtcaaaagaaacttgctgcttgacaatgtgtaataaaaagaaacttactgtttcatggtatgtggcaaaagctcatgggaagaagagactggcagctttgcacatattttaacctttttagtgttactttcttttaggggatattttattctcctctggttgtgttataatcaaagggaaaggaaaagtagttagggatagttagtgccgttaaagcaattagttagagggaatcagttagaaaaataagggggaattattgtggaaggatttcattcagaataagaaagtttgtaaaaatggggaacccttggagtaaatttcctttctccttatttctgttcaatttcattcaaatgtaataaaaatgatcattctcttgcccgatgcctttaggggctcctatcaaattgttcatttcttcttttacctctgataaaaaatgcctttaatcttttaaaattgtgataatagcatgcctgctctgtatcttttagtttcaaaatcttttctagccagttacccgtttttatagattgcttatttgtttattttttaactattacagggaa

SEQ ID NO: 18534 - DNA, 940 bp, Glycine max
  Intron number 2 from transcript Glyma13g38440.1 (locus Gly ma13g38440) derived from phytozome v7.0 (chr-ID Gm13; pos 39219267 to 39220206)
cgttccaaacccgggtcagattctcatcttctcttgtcttatgaattttgtgaattgattcaacattttgcttcaaaggagccattgttgtaacatagtggacatggatatgacacaatgtgggacaaattataagacatgacacagatgtaacacaatgtatgaaattaacataaaatacagattttaagtatgaagacagaatctgttgaaaggagtgaaagaaagagcaaacacataccagttataaatttataatagtagaattgtcgagaactcaggagtgtgcaatatagctctgcatctgcaatatatgaatacttttaccttctcaggaatcatgagatgaagagttgtgaaagaagtttctgagtgctttccgttaatagagtaatgtatgtgtatcttagacgcagctactattttaaagtttatgtttctttggtgataacatacatatatcatatatgtctgtatcttaatataattaacaacaccaggacttcctgaaatctggagatggagaggctttgatagcaagtgccaaagagcagtgattagtgtgcaccccattttagggtgtatattggtggagggaagagagagatcgaaagaaaaaaagaaaagaaagagaaaaagtgattgatgggaaaagtagtatgataggaaatagagagtgatagcaagaaaatgaggttaaatgggatggaagagaaagtgagtatatgagtgtaattattgaatagcgaaaggtctgcccctgcccttgtaaggatcaaataaagtaatcaactactgcatcgctattttatgttttcttgtatttgcataccttgtcttggctttcccagtagaagtttaacagttacttcatacatatgacatttgttttatggctattgcagtgaggaaccaacagccccatttacttatctggatt

SEQ ID NO: 18535 - DNA, 894 bp, Glycine max
  Intron number 1 from transcript Glyma08g10080.1 (locus Gly ma08g10080) derived from phytozome v7.0 (chr-ID Gm08; pos 7252852 to 7253745 reverse strand)
ccaattgaagaaacgaaagccggagccgccagcaggtacacatttctatcgattctctgaaaaaacatttcatttttcgtttcttgtgcaatagttagtataaatcatgtttttcgtacttagattatgggtaaactttaatattcatatgcatatggccttatatatatatatatatatatatattccttgtgtattctcttggatttagactttcattcttgttcctctggattttataaatttaggtttataaaaaataagaacctaggaaatttctaattgcgagtctttaatttagacaagagaagataattttatcttactttaataattttatatcacaattaaaaaaattatttgtaaatttcaaatataatttatattttaaaaaataataggaacaacatgttttagtgtgcactcaaccaaaggctgtggagtgtttataattaaactagaattgacgttttgtgggtgcaatgcatgaattatgagagagagtgcaagttacacagaaataaataagtgtgtgtgctatgtggcctacggtgagagagaaaatgagggtaattagttattttatttttagcgtgtgtgacacggaaaaaagaaatgagaggtacacaactaaatgttaggtgagtggccgcaattagataggatgaaccggaaataaattgttattatgatattgagcgggactaaatagtgattttgataattactaaagttcttataaagtaataaattaaaatccatacagaatgaaaacaattttttatgttattttttgataaaaaaaattctcgtgtttggctatctaaatttgtctagacacttgtatatatagtatatgctaaatcagaatgtgaccaactatgcagaaaataa

SEQ ID NO: 18536 - DNA, 946 bp, Glycine max
  Intron number 2 from transcript Glyma13g17350.1 (locus Gly ma13g17350) derived from phytozome v7.0 (chr-ID Gm13; pos 21128853 to 21129798 reverse strand)
agacccctggctgtaccaaacaggtaaatacaccacaatgtctttcagagtggagatgccaaattttcaagttttgtagctccaaacattttccaaatttataattcaacagtgtatagtggactatttatggagcatattaacaaaaggcaatagatctgtttaattacatgtttcagacttcatatgctaagatttattcgaggtttatttatcatttggtccctgtagttacagaaactgtcttttatttcctatacttaaaaacatctccttttagtccctatgaggagatgcttttaagtatatagaaactaaaaaggaaactttttgtaattgaacctttacatgagtaattgaacctttatatgatataggaaggaattcttgttcttttgaaaaggaaggggagagaagggttttggttttgttgaccaccagtcttcggaagtgaaatattctagcagaatctccacggattctcgctcacaagttgaacttcggtgttgtacttgcaagaactccaacatgacacaaatggagggtaaaagttagagtacctcaaccttattaggtttatttatactattcttgatttggtaaatgccccccttggacaaaacctaccaaaatcactacctctaatggatttctggccatgattttgtactttgtatccctatcgaggttcatctactgctagaaggttcttgatatatgccttttgaggcttagttattgggttttagtcacagcgcattagcttaattagtcagattaggctcaaaacctctatggagttgtttacgaaacatgaatgattatactgtgctggtggtggtagaatatatgcaagaacacaataaatcattgctattgtaccattgatacagtcatggtggctattttactattttattgcaggcttgcgctttcagggattcat

SEQ ID NO: 18537 - DNA, 506 bp, Glycine max
  Intron number 1 from transcript Glyma13g05520.2 (locus Gly ma13g05520) derived from phytozome v7.0 (chr-ID Gm13; pos 5829856 to 5830361)
cctgcagcgttccttccaaattccaaacccaccatgtaagcatcgcatcgcatctacccagatctcatcatcttctttctttttcttttctaattctttttaacaaatttaatctcattccattaaacttttttttttgaattcccaattcgattaccctttgatttgcgaatttactgaaaataataatgggtggttcctgcacttcctgctgaaagttcgaaccctaaacgtcgacgtttttgcctaatttccatatgtagttcatattcatgcgatggatctgaattttctgtttcatatgtgagtatatgtcagcatatcctgcaaaagttgttagtctctttcaatattcaacccccaaaatagattctttgaacatggaattaagtttatgacatttttttaatctcttgaatattatcactgtttagattgttatttaaaattctgggtttgtgatcttttcagaatatctagcttcttgtgaaggctgttagtttgat

SEQ ID NO: 18538 - DNA, 673 bp, Glycine max
  Intron number 1 from transcript Glyma12g09940.2 (locus Gly ma12g09940) derived from phytozome v7.0 (chr-ID Gm12; pos 7675868 to 7676540)
atacaacatcaagccaacgtcacccttattgatccgtgagttctctttttctatttgtagctgctataccatggtctctttgtagttcaattcatgttattttctatgtttaattgaattttcaatgttgcatacaagtatttatgatccatttcaaacaatatttaagtgtttgtgagttgttacttaagaggttaattcaaaagtttgttgaaataagttaaaaagaaaaattattacctctaaaagtttattagaagtcaaaaaacttattctgctttggtaagtttaactaagtttataaccttacctatatggactgaatctagcagaaggaactagtcattcacaacgtgatgaactaagatttaagctcctttgggagaagcgtccatgtttagtgtatgacagttcctcgaacaagattgtcttcaaagaataatacatgtggggaaacaaaaaaaaaaaagtttatagcatttttcaaacacacccaaaatttgagagaggagtaggtattatcatgtttcatgtagagtgaaaatctgtttgagaaataattgatgttctgttactgatatatatgaatatgaatcactgtacacatcgagcttgttatctggttgcatttgctgagagttgttgaacacaggaaagaatattttgagattcc

SEQ ID NO: 18539 - DNA, 598 bp, Glycine max
  Intron number 2 from transcript Glyma12g09940.2 (locus Gly ma12g09940) derived from phytozome v7.0 (chr-ID Gm12; pos 7676742 to 7677339)
aaccaggagagaaagacttgaccaatacaaaggaggtaagactttaagttgaatcaaaacaaagaaagcaatatctaaattcaaactaatgaaatatcaataacttttgttttttcatgattcatgattcatctactgtgaatttaagatgattgcccctttgccaataaaaaaaagaaaaaagaagatgattgccctttgtaggtttgaatatagtagttcaaagctagattgtacggattaggactctgtttggatgaactttttcataaatatttcgaggaaaagaaaataagaagataaaataaattgaattttctcaacttatgcacttcaacttttagagaagttagacgaaagacaatctacaaaagttaagtaaacaaagtgattttaacatatggaagaagctcaattcattttatcttattttattttccaataagtgtttatagacaaatgcatccgcacaacgcctaggttgtgtatttctagtcaaagttccattatataataattttctatggcctgttttggattatgagtttagtgattttcaattcatttgacttatgaggaggattttccatgacagaaa

SEQ ID NO: 18540 - DNA, 595 bp, Glycine max
  Intron number 1 from transcript Glyma08g18000.1 (locus Gly ma08g18000) derived from phytozome v7.0 (chr-ID Gm08; pos 13544514 to 13545108)
gaagaagctcttcaacactggccgaatcagtgcaagtatatgatcttccttctactttactctctctctctctctctctctctctctctttatatatatatatatatatatatatatatatatatatatatatatatatatatatatattactccctcactgtataaaaattaatatttgaatgatttacgagtttataaacatgcactgtcttcagtggtagacttatgttcatgtcaggtgtgcaaatgcactcctaactttgacgaaattataaataattatattaattttatatatttttttctcaacttttcttttatatgtgaaccccctcctctctaatttctcacttcccttcaaagtatttgatttaaaattagaattttatcttttattcaatgacagtaactactagctaacatcctggtagtcactgactctggttgtttattcatgatttattgccatactatatgaagttacgatatcataagaaattgattaaaagtgtcggttataacaccttgagtccatattatttctttttatattttcagggaagttgcacttgagtatttgaagttatcatcta

SEQ ID NO: 18541 - DNA, 727 bp, Glycine max
  Intron number 1 from transcript Glyma09g32110.1 (locus Gly ma09g32110) derived from phytozome v7.0 (chr-ID Gm09; pos 38668419 to 38669145 reverse strand)
caaacttgctgaccttcctcccctcgttggcctttgtaagaatcactatttcacctctttgcacttaattagcgtgtttggcatcatcatcttttgcatttaatcacttttgcctacacattcatataatgtctgtctcaacatatgcaatattaattgctttcttatttctatactctagtacatactccttaaaccattgattttctttgttcagtatccgcattcgacagcaattatgtttgaccagacttagtatccgatcacaattgcctcccaaagaaaatatatgtagaaatgaaaataataataataataattgattttcttcatcctttgtaaatttgtgcacatggttcatggattgaatgtgtgtgaattttatcaacaaaagataatagattaataaatttttatctcttctttgtctatgattgattcaatcccttatctgggtgcttagacatttacgtacttcctttgacagtttttccttgtgatataaagagtggctatatagttattcgatttttaaggttataagtacttgttttcgatgaactgattttttttatataattgttaatattattagtttttgttagtaaaaagaatcaaatgtttttcttaatcatttaatctactttatatctcatatctctgaagtgatatgttttgatttgacttttttttatatcagattccagctttgtcccacctttgatct

SEQ ID NO: 18542 - DNA, 359 bp, Glycine max
  Intron number 1 from transcript Glyma10g03500.1 (locus Gly ma10g03500) derived from phytozome v7.0 (chr-ID Gm10; pos 2546619 to 2546977)
tcacagtccgctagagaggtaggtcttcaccatgtcacattgcttctcatactatgtgcatgtttgaaaatcctttacaaaattatgtttgaggcaaaagtaattttgttaatggatcaaaattcttacttttgcatttattttgcttttctcagatggatttatattagaatgcctgtcacaacatatccaattacaaaccaaacatgcactatgtttctctcatacaaaaaccacattatttttcacatttttgttttttctttgtatctatgactccatattggttttaaaataatgtaatgtgtgatgtgtgttggacaggaagtgtctccattaacgtcaggtagactgtctca

SEQ ID NO: 18543 - DNA, 1024 bp, Glycine max
  Intron number 1 from transcript Glyma11g15580.1 (locus Gly ma11g15580) derived from phytozome v7.0 (chr-ID Gm11; pos 11253815 to 11254838 reverse strand)
gaggtttggttcctgtcagtgaagctctgaaggtttgtttcatagttctatgattctgtttttttcttttttcttttttttttttaattttctaattggctcttgctgtggttttatttaactgaaaaataaaataaaataaacagttgaaaacgcgattttagattgtgttttctgcaattatttttgttcagtttggtttagacaagtagaagattcgttgctatatttgtacgagacatcaaccgttttacgtttgaatttggttccattccctaatttctgaagtctgtgctaatatcttcatgtataattactgtccttcagtgcatctggtgttatataaggtggataaaaattactgaaaaaagaaagaaagacaaagaagatgatattttcaattatagtttcggagtttgtgttttatcttgccttatgatataagcctctaactgttcgaatttctgaggtctgatgatatctccatgtaaaataatcttgtgaagagtttctcatgtatgcatgtctaatcagattccgtccgcagtttttgtaaggatggtaagtgagcttagttattatattcatttctcaggatattggtatgtatggaaagttatacctagtgctgagacagaggctttgagggttctttgatgcaggaacaggttgtcgttccatttctttaaatttgctatgaaatttttgattttgagcttttcatttctgtcggggggctggagtttggaggtatggatctatattttctatcttaactttttcaaattactactatgtaaatattatcaagtctatttttgttttgtttagtctgttaacaattaccataagcaattactgattttactccctatgatatgtgtgtgttatgtaaatttgtttcggccccttgggtggagtaccctcaggtatagggtgtttggtttttctgaatcatgatggaaaaagtgctgacttgacgataggtttgtgtttgcagaaattgatagttcaagtgcttggg

SEQ ID NO: 18544 - DNA, 835 bp, Glycine max
  Intron number 1 from transcript Glyma09g02070.2 (locus Gly ma09g02070) derived from phytozome v7.0 (chr-ID Gm09; pos 1377733 to 1378567)
attcacgaacccagaaaattaaaacattaaaaaaggtcagaatttttttaaccctttaagcccctttttaattgttcctgcaatgaattgcaattgcttcaccctcgtttaatttattaattcaattatcctttttttctcccttaaagttttttttttttaattctgtttgtatatagttgctgctaattcgtctccggttagctacttttaatttattgtttttgctttccaatttttttttcttctgagaccatgttaaaccattgttttgatttctgaatctagtgggtattgaaaaaagatatatatatatatatatatatatatatatatatatatatatatatatttttttttttttttttattctgttatgtaaatacatgttccaattttcttttctattgcatgttccaatttatttcatggggtagttgaaaatttccccaaattaatgttatttttctatcaagctttgcttattttcgctcagcttgtcaatttaggtttaaatgggaaatttaaaaattaaaaaaaatatatatttggttttagggtttgtttaaagtttttggtgctaaatatctctaagtggtgttctttgccctgtaaaattgaaacaatagtatctgtagtttctagtgcataaagaatttggtgtgtttgaaatttgtaaaaagattatataaaatttaaacttagtacctgcagtgtgtaggtcatagaatttgatgttcattttcttgcactcaattattatcttcaactcaatttagcatactccctttatgaactagatatcaagtatcaaaatctaaacggcatcagcaaa

SEQ ID NO: 18545 - DNA, 620 bp, Glycine max
  Intron number 1 from transcript Glyma06g37260.1 (locus Gly ma06g37260) derived from phytozome v7.0 (chr-ID Gm06; pos 39710829 to 39711448 reverse strand)
ggcaactgcgactgcgctgacaagactagctgcacgtaagtgcttcatttcttttctgcatttgtgtgcaagacaatctttacacatatgtagttcatgttacaatcaccatatttgatcgctaaaggattaatctgtataggagtatattatgcatacagtatactgagatctgatgtatagcttgcatgattcatataaaggctgttttacttatatcctttcatactatgccatgcagcaagggaaacagctatggtgttattgtagagactgagaagaggtaaaagttcacttttggtatcgattgtattatgctttgaatactttagagctgtttgatttgagaaacattttttgttttcattttctatttcaaagttgtacaggaaaagtggaaaacaaaatgaattcactgttgtctatacaaacttctaaaaacagaacacattatgaaaataaggtggcatttttttattaaaaatgaaaacaagaaaaattttctcaaaataaggtgaatgatacatgtggtctatatataaaaaaaaaaaatgaaaagcctattataactgtattcttttccttttcgtttcctccacagttacatcgagactgttgtc

SEQ ID NO: 18546 - DNA, 709 bp, Glycine max
  Intron number 2 from transcript Glyma05g35620.1 (locus Gly ma05g35620) derived from phytozome v7.0 (chr-ID Gm05; pos 39623316 to 39624024)
gctccggtgttgcacccgatcaccctgaaaccaaggtctattcttgttttttgcacctcaactcctaaattgattagcactggtataaagttcttagttagatattttggtgttgtagagaacaagaaatagagtaaaaaccccaggtcacactagtccctaaaatgcaacaaattcaacctagtccctgagaagtgagaaccacagatgttgtcaaactggattggttgcatttgtgcgaaccatgcactcacaccatcaataaattggattctgttggttgaataacggacaactcaaatctcgagatgaaatatgagctgtccaatctttttccaatggttccaatacgctgactgcataaatgtaattctcaccactgcaacaatatggatctctgatgtctatgtatttggtcttgtgagggactaatttatctggtgtgtcaggactaatatatctaatatttgtggttcttagggactagagtgggtcttttggatttctaggatctaccgtgtctgctgccaattttttcaaggatggattttgaggtttacttgaagaaatatttcaaaacttcaatttttacttttttgggtgccgggggtttcagtacattctttggtgagagtaacactgttgaacttagtttaccagaaaacttgcaacagattgtcatcaaccagttttcaagagtggcacatca

SEQ ID NO: 18547 - DNA, 803 bp, Glycine max
  Intron number 1 from transcript Glyma10g36600.1 (locus Gly ma10g36600) derived from phytozome v7.0 (chr-ID Gm10; pos 44716972 to 44717774)
tctaactaaaatcgcctctacacacaaggattcaggtacatttttttcctgaattttcttaattaataaattgataattaatcaataaaaaatatatatttttaggttttgttgttgctgtttgtgttaatttccgaactggatttgattgtctctttatatggtgaatctgagttgttagatatttgaggggcttgctttttttttttttttttacttattgtaactatatttattatttatttttttaatttgtattagcttttgaatcttagctgacctctttggccttgagagaaattcaatatttctcctacaaattctcattatcactacaaattttcctttgctctgtttggcaggattctgtttcagatttatctgtgttctgatatttcattatttagaaaacaattttgattattttttagcggttttagagagaaaagaagcttaaagataaccaataaatttgaaaagtacatagattgaagctgcataggagggcaactagttgttgtggtaaatatctacaattttctcgagatgcatttggttgacatcttttgaacttgctttctgtcaaaagcaaagcttcttctgatacatgatttggtggatgattaattgttagtgatggattggttactaaggtaaaaaaaaaaaatatctggccatggtgaacagggaatggtgaattatgatattttaattcttgattggtagcatgttttggctggaagttggataactgcttttgattctcagaggcagaaggaaacaataccttgaaagtaaataga

SEQ ID NO: 18548 - DNA, 364 bp, Glycine max
  Intron number 2 from transcript Glyma12g04170.1 (locus Gly ma12g04170) derived from phytozome v7.0 (chr-ID Gm12; pos 2722458 to 2722821)
cctttttataggtttttttttgttttttttatattgtaggttttgtttttttatgtatacccatgagtttgatttagtctctcatgtctcttcttgtttcctttttattaatatactataggctctgctttgtttgtgagtctattccaaaaaatagattataagtcaagtcaaatttttatataaattaagttaattatttcaaataagccttcaatatgtcaaactcattatgtatttttaatttaagtcacattctggccttgtaatgttaagccttatctattttcaatccattttgcaactgatgatgaacctttttttaacaaataagtttacatattaagtttgatagaacaattaa

SEQ ID NO: 18549 - DNA, 524 bp, Glycine max
  Intron number 2 from transcript Glyma12g14080.1 (locus Gly ma12g14080) derived from phytozome v7.0 (chr-ID Gm12; pos 12785532 to 12786055 reverse strand)
ttgatactcccggacacgctgattttggtggtgaggtgaggtttttcatcaaatttgttccaattagtcaggaactaataagagaagaaaaaaaaaatgtgtttttccataagctgagctaaaattagcttatgcacaagttaaaaatcatcttttagagaaactatatcagagaacttttacaaattagcttctgcataaagctaattttagcttatgaagaagttcatttcatttatttattcttattttcttgtcctacaagtgctttttgaaaagtacatctagagaagtttattaaactggccctataacatgtttgattgcaaattggaaagtttttcttttatttgaaaaaatgttaaaatttgccttttgttttttgtgttttgtcgttgtggattttgaagtaattaagtgattattaattcatggaaactgtatactagttgtagtgattgatttctggctactcttctcatcttttgtgtttggctgaagagtaggttgagcgtgttgttggt

SEQ ID NO: 18550 - DNA, 927 bp, Glycine max
  Intron number 1 from transcript Glyma13g05850.2 (locus Gly ma13g05850) derived from phytozome v7.0 (chr-ID Gm13; pos 6169495 to 6170421 reverse strand)
ttgggtgagcttgagattttgttgatttagcagctttgtttgaaattcatgtattgattggtttttagtggtcttgcgtttctctttgtctgcattggtgagaggagctgaagggagtagtaggacatgtgattggttgctttttgttattgtgaacttggctagagtataccagattagttaagcaaacttggttctagtataattttgatgtgcttgctggttctatcctttggtttcatagaatagaaacaaatggtttatggtcagtattttggaccttcagcaaattattgttagaaaaattatgactgttccaagacttgtaatgttgtatggactgaatgtcgggcagtaaaaagacaacaaaagaataaatgcaatttagtagaaatgtgaatggtgcgttagatgaatgaacttactagacaagagatgattaggaatgaatgcatagggcaaaaagttggggtagcgcttattgtagaaaatatcatgttgtgttgccttaggtggtttgggtttgtggagaagacttatagaagaccaagttaggatagtagattagatggagggtagtctagttgtcagagacaagagggagactaagagaaaacataggtaaaataattaggaagtatgtcaagaaatttatctatagatatgatttatgagtgaacattatggtgtcctttgattcatgtagccaagttcatttaatgggaaaaggttcagttgtttatttgctacccattattcttgttccacttcttgcttattgtcccttttgaagtctatatgtttaccatatgaagcctagctgtgagacttatttggatgggatattttattgtttattatttaatccggctccctttttaacttaatttttttctcatttgaaatccaggcagcagtgtttttctg

SEQ ID NO: 18551 - DNA, 973 bp, Glycine max
  Intron number 1 from transcript Glyma07g09630.1 (locus Gly ma07g09630) derived from phytozome v7.0 (chr-ID Gm07; pos 8032997 to 8033969 reverse strand)
gagaattcctagattctgtttcaggttccaattactttcctcatcatttacctctattctacaacattagttaaatgtttcttcctttatatgtgaagcaaatagtttatgcactgaaagttgtaaaggattttttttatgttgtctagttacaaatcataatatgttataaatattttgttttttttttgtaataatttttataaaagtcatatcaatactgattttttattagttggttatagtagaaattaaactcgtatatataagaaacaatatttttacatagaaccaaaatggattatacatgcacctgatatagaaatatatctttattcaagaagtggaagctttattttgtaatcacatacaatttggaaagtccatttaatagggaggaggggttggtttgataagaatagtaatgaatgatacaacaccatcctcttgacatgcattcaagtgagaattgttaatgcaggttaaattgttagtactttattttatttccaactaatttaaaattattcttttgcaagtaaaaacgaatttaaaactatcagataactgcagtacacatttgttaatctatattattttgtttctttcatagtttcaaaatattaaagagatcaaattatataaaaaatgcatagagatcaaatatcaatcaagactatattaaccacaaattaacttttgttttctaactataatacgagcaaagatttcatacagggaactatctaaacttagcaagaggaaattgaactataaatatgtgagcatgagcttaaagtgatataatttttgcttgtaagcttgcctaatcatagccaagggtcatgattccttctttttttttatttttgaataattaaattgacttattaaaacttatatgcatttggaatttttcttttctggaaaaacaaaaggaaaaacgtttgagaccgttgacccaagaacagag

SEQ ID NO: 18552 - DNA, 815 bp, Glycine max
  Intron number 1 from transcript Glyma11g34650.1 (locus Gly ma11g34650) derived from phytozome v7.0 (chr-ID Gm11; pos 36458726 to 36459540)
tctttggctccattttcccaccccctccttccactgtatgcatgtctccctcctactttcttcttttatttattttttatgtacatgcatgggttaattaattttgctcaatcttatattaatcacttacatagcatccctacatgtttttgttttaatttttatttaatttgagattggcaatatggcatagttattgtttctgacttgagcaacaggttaattttttcgggaatatgatagctttagttagttggtataatagcaaaagaattactaacttcaatggttttaggtccttgattcgtttgagtcagtatgtatcactagcacctttttacatgatagttattgaaagcattttggtcaaactcttctatctaggtaactaactaactataactgcatgtcttaaaaaaaaaaacttttcatttatagctgatctattttttaccatgatatattcttgcacaaaatggagcataataatttgtagatgttatttgagctagctagcaagcaacctgatgagtatggatttctaaaattctttgggtctagctcttctatgtgtcgtctaaagtttaccattaatcacaactttaagcatgaatgaatatgttcttgcatcagtactcttggactaaagttaactatcatcagctttgatctctgagcaatatatatagcatatactgctaatttgtgaaaaataattgacataacacatatatatacttaaccctgttacaactactcttttgtgactgactatataactttaggttggagggagagattcaacaaaacaggac

SEQ ID NO: 18553 - DNA, 362 bp, Glycine max
  Intron number 1 from transcript Glyma14g01140.1 (locus Gly ma14g01140) derived from phytozome v7.0 (chr-ID Gm14; pos 616521 to 616882 reverse strand)
tcgtcaacatcaacactcaaaggtatatatcaaccttctcccctcctcatactcatgcccttttcttcaacaataaaacaaaaaacagagaaaaataataaaacttgggttatgatgttataggtgtgaagtattcaccaacttagccgatgattaatttctatcaaagaacatgactgatcactctgagtgagattttttctcttaattatatttgttcattcacaaaactcgaactttaagatcttgtttaaggaatctcagctcagttccattcggaccaacaacttggtaaactcctatactatttgaaaaaacattaaaaagagagtgattcttttgttttttcatccacgtggtgg

SEQ ID NO: 18554 - DNA, 859 bp, Glycine max
  Intron number 1 from transcript Glyma09g01720.2 (locus Gly ma09g01720) derived from phytozome v7.0 (chr-ID Gm09; pos 1111953 to 1112811)
caaaccacttcacacagaacacatatccattggtggtgagttccaacttctttctttgctttcttttctgtcttttagcttcccaaaggaatatactatcatatatcatagtatatcctctttcttttgtttttgtttttgtttagctgaagttggatcagtatggcaaatgctaaacacacttcacttgcaattctgatcgggaaccttctcttatatccactattctttgttttatttaatgtagatttgctgatcaatacactcttcattttatttctcattcggttctatgatctattggcttttgtagtcggtactattccccttctttgttttccaaatgcttttgtgattattactacagcaaatttggaatattttgtttcttgaaaaagctataaaattcaacttttgttatgggtaagcaagtaaagtaactaagtgttttggtttccactacaagctcccttctccagaagaatcctattctattctcttctcttgttttgtccatttttctttatgcctgcattggatatttttgccgcataaatctatctaacagaaaggaaaaagttccattttttcaaccattccttttttcttttcttttttccaatttggggcgaaagaaaaaaaaatgggacttcaaagttttgtttttccacttggggttgataacttgcaattctttgtaaagggggagtgttttccaccattcatcacacgcacttgccatccttgtttttttttttttgtttgtttcctacatgaacggtggatatttcaactgctttttttgtagtgtggtatgatccatgcttgattaatagtttaacttgttagaaggagtatc

SEQ ID NO: 18555 - DNA, 777 bp, Glycine max
  Intron number 1 from transcript Glyma10g42960.1 (locus Gly ma10g42960) derived from phytozome v7.0 (chr-ID Gm10; pos 49801145 to 49801921)
acaattacctcgccttcatcttctcccgtgccgaggtatttattcattcgccaatttccacttcactcttctgctactgctactactatctacaagagtgaggatcgccttgcggtttttggtttgatttaagtctgtgtgatgcggaactctttgtcgttgtgtatttgtgcttgatttgattgttctgaatgaaatctactcaacttgatgaaggaagcgactatgtttttattattctttgttttttttattctgttattttgtctgttactgttacttcatcaatttgcaccaaccggttaatgataatatgacactagtcaactctattgtttttgtttttgttttagtttcctctaacttgttttgaaataggttatagtatgtttggtttcgcgtcaagtattaggaaaatcgcatcaagtttccacgttaacagcgaagcaacttcttataactttcgcttttcgacatgttttacacgcgttgtgtttttgtaatgggaaaccaaacatacatgagtgtgtctggaataacatctagaaagtttagtgtctctcagatgttttgaattattctagtggtccatggaaataagtttaacctggatggctttgcctggaataacattttgagacttttatttgtttatttattttcaaaattgcatcagttgtggttcaagtgatactgatgtagcattgatactaatgctgctgtggtgatttctattgaacagggaaaatcagtggaggttcggcaggctgcggggtt

SEQ ID NO: 18556 - DNA, 1016 bp, Glycine max
  Intron number 1 from transcript Glyma08g42460.1 (locus Gly ma08g42460) derived from phytozome v7.0 (chr-ID Gm08; pos 42446060 to 42447075)
gtgagatgttcaggcggaatttgcagttgagtgagaagatgaaaaagatgatgtcctttgagaacaggttcaacctgctgacaccaaaggagataattggaattggtaaggttttgtgaaatggagtgcaaaaactccttcgcagtggtaaccgccgaagaacctagcagagagccaccgttccctggcggaggaggaggaggaggagcagaagcggaagccatgaagatcgaaaacagagctctatgataccatatagaaatctgagagagagagagaaaatatcacttacagaattgaggtgaagtgaagtattattcaacccaatgagaaaaaggttacacctcagtttatataggcagttacacagatgtaactgtcaactgactctagtcagttaactatagcagtataatagactgaagttaattctatacatagaagaaggaaaatcagtctatcaagtaaatatgctcctatattaagtgaggatacgattatatattcacgaaaatttatgaagggcaaataattaatccgaaagttatgagttgtgtctgccttctagaactagacatgcatatttttggtgtctgagtcatctcagaatttaaagcaaatgtgtaggagtgaaatctctccttccttcctcaccctctactgttggattacacttagggcctgtgttggaagatgttatgatggctaagaggctatcataagctaactctagttattcccttgtcatgcatttctggtgcaattttttatttgtcaaatttttaccatattggaggtttgatcatccactgggccacttttgcccttccctactcaggtgcttgctccttctttgtaatatcctttttcttattttggtttttccagaataattggctaaatattttttgttaattattttgtgaaattgttgttaaaagttatatagctctgatgcatttccaaattctgttttggcagaaaacaaatttgcagtgggaagtggagccaaaact

SEQ ID NO: 18557 - DNA, 757 bp, Glycine max
  Intron number 1 from transcript Glyma09g34750.1 (locus Gly ma09g34750) derived from phytozome v7.0 (chr-ID Gm09; pos 41051272 to 41052028 reverse strand)
cttctccaccctgacgggatagcaaatctttcgttcgttcattaaccatttctcaaattcatttttaatcgggtctcatatatttaagccttttcacgaatagggtatcgcttgttcttgctaattctcttttgtcatttgagatctgtgttctaagatctgttccacccctcttatgacgcgtgaatgttttttgaactttaaatgtttgaaattcatgtaaacctagaaagatccatctcttcaatcgattattttctcttctcattttactgtgtggtgtaaattgattgttgattctgttaatggatgagggattttttttttcctgctaaaattgacgaattcggcgttttttctgacttttattttgatagcttgagactttaaagttcttgatttgatggtgttatctcgaaactatatttgtgatccatgtataaatttctgagaaaaatgctaacaaaaccctcaatgacactcttttttttttttaacacactattattgtttgaaatttattcaaaatcacataaatttgtgtgcctcacttcttatttaattagtctcactaacaatttttataattttcaataaattttgaccaatagtaacgagtgtgttagaaggattttatgacagagtgcgttgctaacactgctcaacatttaattttgtgattcttgggggtaaagaattgaaaccgtgtttgttgggtgcagaaattgagaattgctgctgctaataaacaagcttc

SEQ ID NO: 18558 - DNA, 513 bp, Glycine max
  Intron number 1 from transcript Glyma05g30420.1 (locus Gly ma05g30420) derived from phytozome v7.0 (chr-ID Gm05; pos 35806810 to 35807322 reverse strand)
acagaggcctgatatctaccaaaaaatcttatccggtaatttaagatactaattgtatataacataggacaaaatttaaatacagcttcttagctacttttagtgcagctctctaatcagaattggaattccaacttaatgacttatagtaactttttacctaaatctttaatatgcaaattgctgacgtgaaattctaattttaatcagaaaacaataccagaaatagctaagaaactgcatctaagttttgtctgtggaaaatactgtagctattttaaggtggtgtgagataaaatatgattttgggtttaagccaggagagtatagtttgtgtttttggcttttctttttggaatcaaaatgcaagattctgaaacaaaataaggttgacaaaccacatagccaaaatgtaagtggcagtgacaaataaggcccaacagaattatgtgtgcttaattttcctttctaaaaaaggctatatatcttgcttacttttatttgaatcagagc

SEQ ID NO: 18559 - DNA, 682 bp, Glycine max
  Intron number 1 from transcript Glyma07g04060.1 (locus Gly ma07g04060) derived from phytozome v7.0 (chr-ID Gm07; pos 2925815 to 2926496 reverse strand)
gggtacgaagttttttacatggtatacaagtcattactttaattggactaaaattacatattagtcgatccttttctttgtattcttaaagctatagtaaaaatagacaaatacaaagtaaagacttctttgaataagactaatgatgcttttgtgatattctaacatatattggaaaaaaaatatgaaattcatatgccatgtttataggggagggaagatattgtgatatgggcaagggaatgatatgtaactgtttttgttttattcgtatgatacttactagtatcttttgttttctgttttgcaaattgtgactatcatcccctgatataatcatgtatcaatgaaaaatgacccatatctcttcaacaatattgtgcatttgtgtaaagtattatttttttaattcatgttaacgtatttaggctgtattatatcttgaattttgaaggtgtcgtattgtacttgtttcatataaagtatctgggtttcatagatcctttgaggttatttcatttgatatgcttcttttcccgtaatatttaataaagtctttggagattattcttttatgagtatatatgtatataccctttctttgccatcttttatagaatgaaatcttgtaaattgactttctatgtgttttaggttagtggggcaagggctgtgggtgagg

SEQ ID NO: 18560 - DNA, 469 bp, Glycine max
  Intron number 1 from transcript Glyma07g15170.4 (locus Gly ma07g15170) derived from phytozome v7.0 (chr-ID Gm07; pos 14995232 to 14995700 reverse strand)
ttccgcatttcaccgattacattcccaatctcccagtacgtcgtcgttttcatccgtcaatctctcttctctgctcaaaagctgtttcttcgttttctgatcagcgatcatgtggtcctttttttttgttgttctgtcccacttttttctcgaaccactccgatgttttgtcgttttagaaaacaaaccacctttttcctttttttcttttccatctgccgacaccgaaaaataataatatagaaactttctattttcatcagttcaacgatttttaattttttgtgtgtgtaaatttttatcttctttttagtgaaaaaatgctatgctgatttaagaggaggaaaaacatagatgaataatgtatctttaatttttcctttgggtacaagattaattaatgtctgattttatgtgttggtgtgttgctgcagacataccctaatcctttgcaagacaaccctgctta

SEQ ID NO: 18561 - DNA, 684 bp, Glycine max
  Intron number 1 from transcript Glyma13g00540.1 (locus Gly ma13g00540) derived from phytozome v7.0 (chr-ID Gm13; pos 282464 to 283147 reverse strand)
ttctgatctttcaccttattccccttcagttgcaggtaggttttgtttctttggcctcaaactcttgtggggtttgacatttggattcaaagtcaaggtcttttgcctcatcgtgtcatggcctttttttgtttcttaacaacttggggtgtttggtgtggttcttcttcttctgatcacaagttcttgtttttttctcgatttgaacgactggttacaacttatttgcgattcgaatgatcagggtcttaagtatcataccctgacttttcttttttgctaaattcatcaagtaaatcacgattcaatgttctttcttctacgagtactattactatccatgtaatgctccactctttgtgaattcgtataatgtttggcactgtttcatcctcccttgatttcaagtattagatcaattctggtgctcattttttttacgggtcagcatttttcttctcttaatattataaaggttattgagtaattatatttgaacaatggataaaagcaacattaatctgcattgctaagtgcaatttctgtccgatcgttgtcctatttatacagaattcgtttttgtgttggaatgtttcaatctagactatcactatacgattaacttgaatgtaacttgatcccattttgtgcttaagtttcaggattggcacataataaatcagt

SEQ ID NO: 18562 - DNA, 853 bp, Glycine max
  Intron number 1 from transcript Glyma11g30120.1 (locus Gly ma11g30120) derived from phytozome v7.0 (chr-ID Gm11; pos 31096940 to 31097792)
agccttaaggtagatttcgagcccatgggctaagtatgagcccgcttatctttgtaaatattagaataggtttttccttcgtttgggccttgtattttggccattctagtagtatagggttttagccttgtatttcagggcattttgagtagtctttgtagtaaggacttttttttgtattttcatgttttttgtcatgggggtgagcttagctattatagggggtgtgtagctaagctctagcttctcatctcaaggaggtgagcttagctattagagtggtatgtgtagctaagctctagcttctttaggaatcttcttaaggaagcttcttaaggaggtgagcttagttataagaggggtgtgtgtagctaagctctagcttctcaaggaagttttctcaaagaagcttctcaaggaagttttctcaagaaagcttctcaaggaagctacctagtctataaatagaagcatgtgtaacacttgttgtaactttgatgaatgagagtcttgtgagacacaactcaaagttccacttctctacctcttttattccttcaatttcgtgctcccccctctctctttctctccctctttcttttcctccattgaagcatcctctccaagcttcttatccaaggctcatcttggtggtgaagctccttcttccatggcttattccctagtggatggcgcctcctctcacctcttctcctttgtcttccgctgcatctccatggtggaaaatcaccattaaaggacctcattgaagctcaaagatccagcctccatagaagccccacaagcaagcttccatcaactttagacaaattcttccggttatcccaagagg

SEQ ID NO: 18563 - DNA, 946 bp, Glycine max
  Intron number 2 from transcript Glyma12g03220.1 (locus Gly ma12g03220) derived from phytozome v7.0 (chr-ID Gm12; pos 2122574 to 2123519 reverse strand)
cttttcatacagtgaaagctgttatccttggccaggttcgtggatttgctggatttttgtgtcattctacttttagggtgtgtttggaataacttctctacaagcatttatctgagaagactgtgagtgagaaaagtaaaaaaattgaactattattcgtaagttaaaatcaactcataacttaactttaaggtaaatgctagtaaaagggggttttattgggatgcgtcaaaacgctctcccatatgatttttaaatgcgttctcttttgattttcagtcaaaacttttaatagaagctccctggtaacatggggcctttttgaacaaatttcgctataaacatttatcagagaagaaaataagtgagaaatgtaaaataaattgaactgtttttcataagttaaaatcaacttataacttaactttaaggtaaatgttaaccagtgtcacaagttaaggacactagttaagaaagtaaaaggtaaagtttttattgggatgcagcaaaaggtgctctcatatgatttttaaatgcgctttcatgtgattttcaatcaaaacatttcttttttatttccttaactggtacctaactttaatagaagctcccttgtaaggttttaaaaaatggtaaaaaaattggcccgtaatcgtgatttagactgcaacatcaagttttttgggtgtatgagagtgcaacgcaaccacaattgtgactgcatttttgttcaagttcttgtaatatcaagatatgtgacagaagtgtgaccacaatttaaaacctgttccctcaaagctgaagcacataatcaagtttagctaataaaagaagctcaattcattttatctttttttatataattatttacggagaagtttattgaccctgatttcactctcttttagtgatttgtgttccttgttttatgtttaggacccttatc

SEQ ID NO: 18564 - DNA, 983 bp, Glycine max
  Intron number 1 from transcript Glyma06g12460.1 (locus Gly ma06g12460) derived from phytozome v7.0 (chr-ID Gm06; pos 9629905 to 9630887 reverse strand)
tcaatttcaccgaacgggtcgttatacaccagcaggtaaaaaaaatctcactcattcattattttattaatatatgtaacggtaaattcaaatgccttatggtgaatcagtttttagcaagttcaccttagcccacaacataagtacattagcaaaatgtaaaaaattactgtatatcccacatcaatagcctaggagaaaaaacgatgtacaagagtaaattttaaatcaaagtaatcaatgccccgaacaaacgttgtggataaacaaactgaaaatattctcgagagaaaccccaattaagtatcttttctttttcaattttagatgcaaagtttttaataattatgttaatgattaatctttgtcgaaaaaattaatctgacaaactttaataaaatctcttatcttaacagcatctttttatccacaaaatttagaaacgaaatatgacttaaagaatcaaacaacataatattgctaacccggcctaaattgattcaaaataaaagtgacattattttattttaattttgcatcaaaatgcactatgggaataaaaggagctataatgaatgaatcctcccatgactcaagcaatatcaaagtaaacatgtccagtgtccgactccccaacatcctcctcctcgggtccccatcatagccgtcaaccacacaccactctgcctcaaaagcgaccaagaagtgttcgataagtgccctgtgtcttcatttactcaccggtgaaagaaaatgtggcaatgaagtgtgcggtgtgcttaggcgagtttgaagagtgtgacatggtaaagaggctgccaaaatgtgaacatgtgttttccaccagaattgtattgatgtgtggttgtcctctcgcataaactgtcccatttgtcaaagatgagacacttatcaatcacttcttggtcatttctgggaagaaggcaggtgcggcagacaataacagctaaggggacccaagg

SEQ ID NO: 18565 - DNA, 399 bp, Glycine max
  Intron number 1 from transcript Glyma07g28520.2 (locus Gly ma07g28520) derived from phytozome v7.0 (chr-ID Gm07; pos 32594394 to 32594792 reverse strand)
caagtaactcttttcatgagaaattttcacctgcatttgttattagttgtacaactcaaataagttaatatattatcattttatagatacatgtagatattttcttcatattaatatgctaattaatctaaccaagtttaatcaagcatattaggttgctagaactaatatgtagagaaattggcccctttctatttatttttatattgccaaagaagaattgtatgcgcatttggttaattaattaaccatatcgaggactagcttttatatcaatttcattgttttgtttgtgatacatatgtaaccaaaatacgattattttactaacattattctaagtaccttattaattatatattgtttattttttgtttagtaggtgttgctgatacaaat

SEQ ID NO: 18566 - DNA, 664 bp, Glycine max
  Intron number 2 from transcript Glyma12g34770.1 (locus Gly ma12g34770) derived from phytozome v7.0 (chr-ID Gm12; pos 37915372 to 37916035)
acccagaagcatttgccaagaacagggctcttgaggtagttttttagcattaaactcaaacaaatggttctttctcattaatttttaaaaaaacaaacaaactaatttagtatagtacagaaggttctaactgattttactttaattttaaggttctaaacttccattactcttttacaacaagagtcttctttatttgattatgggcttctatcatttgttatagtgagaccaattaatgatggagcaaattttcttttgactattactagttactactcttaatttgataaggatgaattattgacttgcttcttatagttgtccttgtcttaagttttagtctttatatgataaaactttaagttttagttctcacacataaaattaatgttttggtccttgtggctaatactatagtagaattttttgaaagtgtaaaaccgcagagtgataaactgctaaaagaaattgtgtgggaacaaaagttacaattttctcgtatagaaactaaaattatgaagacaaatataggaactaagtgaatattttgaccatatgttagacaaggggggatcatacatgtcaagtgtcataattttaatgaaagtgatttttccctaatgataacactaaattgttattatgtggtacaaggtgatcc

SEQ ID NO: 18567 - DNA, 688 bp, Glycine max
  Intron number 1 from transcript Glyma13g18470.1 (locus Gly ma13g18470) derived from phytozome v7.0 (chr-ID Gm13; pos 22141137 to 22141824 reverse strand)
ttctcgtcaaagctcgcaatttcttggtctttcaggttctgcttcgcttcttttcccctttttgtgcaattaacttttgttgaagctctattgttttacttctccaaaagcttgaggtgaatataagtttctatggagaggcagcgttttttatatccctgaaaaatgctagagtgggatagtttctattgttagttattatacagagataaattctcaaaaaatcatgacattcataattcataattaacagtaaaaagtcataatagggaccttaagcaaaacaaacaacttaatatcaacaaaggtcaaatactagtttcttagataggaatcatcaatcatcatctttaaaatctaagccttcttctttatcattttcactcctattatagttgtacatttcgttttggaaattgaaatcccaagaatatccccctaaaaaagccctaattctctattcaaaggaattttctggaaacaactcatagcgccactatcctgtctgctacagacgctatttggtccactacagctgttacactgaaatgctccgctatggtggcccttgtagccgctccactctggcactaaagcaatgctattttagactctgaactgaagtttatccaagcatggcctatatctgttacaggtgtcaattgacaatggtaaattgtgcagggtg

SEQ ID NO: 18568 - DNA, 478 bp, Glycine max
  Intron number 1 from transcript Glyma09g08920.1 (locus Gly ma09g08920) derived from phytozome v7.0 (chr-ID Gm09; pos 8362632 to 8363109 reverse strand)
gctggaccactttcagatctgcaactctaggtgaaacctttgcacccttttcaatctttttgggcaattaattatttgtcatgcattggttaccacttggcacagggctgagaagtaacagaaacaaaacaaaataatgcatctttgtctttctaagtaggccttttatatgagaaattattaagaaatttgggaccacctgatcttggtcaatctcataggtaacaagattgatcgagatcacacagtcctagactatacaataatataccaagagggtctatttgattggttgaacagagtatgagttattgtaaattttctaatacatatctttgatgagaaaagaaaactgtacaataatatcatcttgtttagtgagattgactattgcttgttttatgtcaatttttctctggagtggccaaaatggcaattacatgattatggtctctatctttttcagctgtttctggtg

SEQ ID NO: 18569 - DNA, 624 bp, Glycine max
  Intron number 2 from transcript Glyma13g05750.2 (locus Gly ma13g05750) derived from phytozome v7.0 (chr-ID Gm13; pos 6085919 to 6086542 reverse strand)
agtctcattcaaacgtaatcaaccttcttctctcactcttatcaacacgcatcattcctttacttttgaaaaaaatcatgagaaaataatgcaacccaactagaaagaagtccagaggaaatgtaaacaatccgcatggattgtttttatttttttatttccagtcgatatacaaaatgtcttcttttccttttgttttgtgtttttaagaatttgcaaagtaaacaatgaaaataaaaaaatattgtttttgccatcccctcctttttaatttttttttttggaaaacaggacaaaaattaaaataaatgacatttttgttattgttagtaaaaacatatccatgaaaataaaccaaatgcatctgaaatatttgtcaattccttgaattaaagcatttatgatgtgatcctttctaagaaaaatggattgaatttactaaactgtaaccccattatattaaataatttgaatctgagtaatatttgctcatcatcagcttgcttaagaggataagtgatatcttgtttgactactttaattttctattttttcaaatagtaaattgtatacctgttgctccttgcaggctgtatattaaacaaccttcatcaagtacttcaa

SEQ ID NO: 18570 - DNA, 597 bp, Glycine max
  Intron number 3 from transcript Glyma10g39370.1 (locus Gly ma10g39370) derived from phytozome v7.0 (chr-ID Gm10; pos 47059053 to 47059649 reverse strand)
aagacgttgcccttgctattggaaccgtatgcaaaccattacatgagctgattctttctttactttttggttcaatatgataaaattgtaacttgaaactaaaacgtcttcattatcttgcattgaagattggtgtgcaagttatagctttatctttcaccttttactttatatgtcttagcatagatactgttttaatcatggttaattcagattgatcacattgtaactagagttagcttagttagttacaagttagttactcttgtagccaaatatataaactgtaatagccaactttcttgtaagctaattctcattctatgctaatcaaattttcctccattttcttttctctttggcttcctctctgcaagttttcttttcatccatggcagacatggattctgtgaatatgcactatggcatctaagtaattgctgataattataacaaatataatgccaattctaatcttatagaaacaggggtttgtaattacactagtctttttctttttaaaaaataaatttgcatttatctatcattttgttagaagtaagaggcttctattactacctcttcaggctttgctgc

SEQ ID NO: 18571 - DNA, 402 bp, Glycine max
  Intron number 1 from transcript Glyma07g02800.1 (locus Gly ma07g02800) derived from phytozome v7.0 (chr-ID Gm07; pos 1911958 to 1912359 reverse strand)
cacttttactgcgccgatcgtttcactctcaaactgtaagttcaacttctcatgtgctaagagacgcattgttcgagggtttatctgtttgctagccaaatgtggttgttcttgtgtctgatttaggggtttggtgactattgtttgtgatacttcgagaaattttgttaataactcagtgaacggcggattaactaagaaaattggcaatcaaaactctgaagctgctgatgataactttgcgtccctttgactgtttgctattattgctgcggattaactttctctctttttttctctttttctctctttacctgtttagtctaatatagtttttcttgtcttatctatcaaccctttacttgatttcagtttacttaccatttagagatcaacaaagaa

SEQ ID NO: 18572 - DNA, 926 bp, Glycine max
  Intron number 1 from transcript Glyma06g06370.1 (locus Gly ma06g06370) derived from phytozome v7.0 (chr-ID Gm06; pos 4564186 to 4565111)
cagtttcgctgttacgaagatcgctgcccccacaggtcactcactgcttatcattctagttgagggtcgagttttttattttattatttttttatcggcatacgttaattgttagtttttattagaagaaggatcaaattcgccacctttctctcattctcttctttcttaaccacccaaccaatcttctagttacatctcctcagtttgtttattttcattgtgtcatctttgatcacaccgggaattcatcatgcaatttgtggacagtacttagatacagttacttatgtgtttttggagatcagagttagagttttgcttcgataaataaccattaaatttgacgacattactcggatgtagttacatatgtgtgtttaaagttgttcaatcagaattagaattttacttcaatcgtgcaaatttttattaagcggattattgaagtgaaattccaattccaatggaggactgtaccaaagtacctaaagaaactgatttaagtgttctcttttgactaaatgcaaatagcataattacgtgcttagcttttctcaattagtgaattttgtagcttcactggttgatgtttgtcatgtttgtcacggtaaaacatacacgaagtttctcaagtgcttttattgttgttctctaataagaattagttattttttattatgtaaaatatcaaagtgaaacttaaattgtaattagagaaaaaatatcaaaaacacacttacagtactgtattgtagtctaagttttatgctttcagtgattgcaaatagcataataaagctaggtgcgtagcttttctcaatattgttgcttgactggttgatggttgtcatgtttatcaagtgctggaccttatccttttgtacaattcaggttagcaaaattatccgaggggcagttgattg

SEQ ID NO: 18573 - DNA, 807 bp, Glycine max
  Intron number 2 from transcript Glyma10g02950.1 (locus Gly ma10g02950) derived from phytozome v7.0 (chr-ID Gm10; pos 2134145 to 2134951)
acgatgtatgtatgcacctttatctgggaatttcattttttttattgtgaatttcttactatttcgtattcaattttacttgcatgcccctgattgattagattttgaagggaataaataaataaataaatgctgttgcttcattccctaatagtaacaaccttggcagtggcagcatatgtttagggaaaaatggaaaatataccttcacttttttaatgcctgatgcgattctgattttaatgtttgttttttgttgggtaaaacactattttgctccctgaaaatataaattgttgtcacattaatccttgaaactaaagaaatttaaaataaataagtcctaggaggtaaattaagtccctaaaaactaaagaaatttaaaataaataagtcctgggaggtaaattaagtcccaaaattaaacgccttgttgacactttagtccttaaacatatattaatattatcacttgaatcacacaaccttttaggttttggactaaagtgattggcagattgcacttttagagtctttttttgaattttcttactttcagtgactaatgtgacaaagttatatactttcacggacccaaatgatgcgttaccccttttttgtttgataactataataccgaaatgatgagtgcacagttttcttcttggttgatgaatatggaaccataaaaggtgttgtggtgtggaatgagtgtgtatcttggcttgtatgtatgttatcttgtaaaaccaaaattgttggaaggttttatttgggcattttttattaaccttctctaggatagga

SEQ ID NO: 18574 - DNA, 450 bp, Glycine max
  Intron number 2 from transcript Glyma09g02990.1 (locus Gly ma09g02990) derived from phytozome v7.0 (chr-ID Gm09; pos 2088114 to 2088563)
ctcgtctaaaagcacaggttagttaactactttgattagttatttatttatttatgtgaattgttgtttatttgattggttttattattactcagatatatatttttggttctttgaaattttgtctttttatttttgttcctctttttcttttccttaaaaattacaaaagtcatgcctattgtaggccatcaaaagattaaaatcacattattctattaaagatagaaaacaagaaattaaatgaaaataaaataacaaatattatgttatctttgagactaaaaacattttttatcaaaaaattttaatttattataatgttaattcttattaggagaaaagtaaacttatgatattctttccttattccttaatcattcaatacatcttataaaagctatatataatatgattcatatctatttgtgttttttttttttttgcagc

SEQ ID NO: 18575 - DNA, 595 bp, Glycine max
  Intron number 2 from transcript Glyma10g04680.1 (locus Gly ma10g04680) derived from phytozome v7.0 (chr-ID Gm10; pos 3593970 to 3594564)
gcgaattcgacgaccaaatctggcttaattctaaggtattttaactactattgttgttgttgttgtttgctacattggcacatgacatttacatttttatattcttgcaacgcagcagcaattggtgttatgttaaataagttaagtgaaatagaattataaattgtcaagagctcatgaaggctgtcgtgcatcactgtcaaaaaaattcaagggctaatatcaactattatatattctagataacttgaagcaactgtaatgttagtgctggagttttaatataaatttgtgtgttgaagatacaactgtatatatgtacacagtcaaagaaaacttgctaacatgaaaagtaacccatggttgcttgctctctttaaatgagaaggagaaaacttgctaacatgaaatcagtaacccactaacctttagctaagtgttgtgtagtttcttctgctttttaatgttgtcttctggcattgctttgcttttacttgcatatgttggatctggatttctattatgcttattgatgtcattgtagttttgtgacatttcccttaggaccatcgatcaatagcaaggtttatagcat

SEQ ID NO: 18576 - DNA, 433 bp, Glycine max
  Intron number 5 from transcript Glyma07g13140.1 (locus Gly ma07g13140) derived from phytozome v7.0 (chr-ID Gm07; pos 11643432 to 11643864 reverse strand)
gtgagaagtgagaatattttcgccgatgaccatgtattaaaattaccttacaggtttcctttctttccttctattttaggtgtcacaccaaatatcttatcataatcattttttatcatttttttttaaatatagttgtttattcatcttatcaaagtcactctcaagcctaacgagtcccaagcctggggttaaaggagggagccagggagggtagtgataaaccctgcagctaacataaaacatatggagacactgaacgcgtgcatttgtaacatgaagaacaaagaatgacagggtattgcttctattctattgttccatcctttctcttttctttatgaaacaattgggcaagacattgttaaatattgtgtgtaattgaatttgattttgatactaagacaatgttccaccctttatcttcagctca

SEQ ID NO: 18577 - DNA, 997 bp, Glycine max
  Intron number 1 from transcript Glyma10g05560.3 (locus Gly ma10g05560) derived from phytozome v7.0 (chr-ID Gm10; pos 4346910 to 4347906)
ataagtttctcgaagctctccaactgtgagtccacttccttctttcccttctatgtttgtttgaggttcttaccgccaaattgagtattttatttttaattatctccgtttctctgcctttttctgtatgagaaaattacatcttttggccagcatttcttattcgttttggtctctggggagaacccaattgatgctgtttagcatgagtcctgaagatggaatattccaatgagccgaatttgttccactgatgtatctgcagggactccgatgtttaagtcagtcaatgtatgcaagatacaaatagaggataaaagtttgagagagtagtacccccaaagcttattgggtttattaatagtaataccattcttgatttggttctctgggtatttctgacatgaggtgacatgggaaaagcctatttcgacaaatcttaccggaattgctaccttaacagattcttggccatggtttcatgctttgcatctgtgtcgaggttcatctaccactagatggttcaagatatatttgccttttgaggaatagttattggattttggatattgagccagggcattggcttaatgagatagactgaggggaaattctccaaagagggatccagaatagatgctaagacctgtaggtggaagaactcctattagagtagaggatggtcaggttgttagaaaaactgtacaattacaagtagatggaatgtcacaaggttgaaaacttggaatgaaaactaatttgatacttgtattgtgtggaagcacagaattggattaggagaagatataaataaaatgtagtcattttcaggctaaggtgtaattttgtttgaaactacctttcagtctgcttgtgctctattttcaatcttctcaactttgtaatttaaattaagcgaagaactctgcaatccagttggtgacatcttgtggtttattcagatttgacagggactggaagaaaattgaagattttg

SEQ ID NO: 18578 - DNA, 367 bp, Glycine max
  Intron number 1 from transcript Glyma07g00450.2 (locus Gly ma07g00450) derived from phytozome v7.0 (chr-ID Gm07; pos 199122 to 199488 reverse strand)
gagtttcaccctttgattgaaggtttcggtgctcggtgcttttctgactcccatcatcttctcatgctttctgattcaataatttgaatgcgtgtatcgctattcactctgtttttttaggatttctttttcaatgctggatagtttgctggaacgatctttttaatttgatgtttgtttttctaatacttcactcagatcgacgttcataaactgttttagtccttttgacgcacattcacaagttagggtttttgttagtaccatctgccccaccagtcatttcgtgctttaccagttatcttatctgggaatatctgctatgccattctaggattaagaatataaaaaaaaattgttgacagag

SEQ ID NO: 18579 - DNA, 264 bp, Glycine max
  Intron number 1 from transcript Glyma06g19820.2 (locus Gly ma06g19820) derived from phytozome v7.0 (chr-ID Gm06; pos 16162152 to 16162415)
tccgatcatcaaccccgctactgaagacatcataggttccctctctaactttcttttcattatttttccacatgacttctttgttctattgtcaaaactcgtgtctaaactcatttattatgtttatgattatgatatgatttttgacacgtgcatagtacttgtaagtaataagtaaaaaaaaaaaaaaatacacatgtaattttaagattttgacttgatgtgattggtgttcagggcatattccagccgctactaaggaag

SEQ ID NO: 18580 - DNA, 638 bp, Glycine max
  Intron number 2 from transcript Glyma06g19820.2 (locus Gly ma06g19820) derived from phytozome v7.0 (chr-ID Gm06; pos 16162497 to 16163134)
ttcgtgctcgctatcttcgagccatcgcttcaaaggttctaacgttttttttcacttgaatatgtttttattggcagagggaaaagataaaattatatatgaagttattgagtaagttgcatcaactagtatattgtttaatagctttccatagaataactttatctattggattaaaagttctttatcatgtatactataacaaaattttatattaacaaaaatttgtttaatattctattaatttatatcaaattcattgaatatatatatatatatatatatatatatatatatatatactttttaacatataaaaaataaaattatttaatcatatatttatagatgcttaattttgactaaatttaatacaaataatcaagattgttgtttgagggtgagtcttggcataagagtaaagttgtgccttggtgattagttcgaatcccaaaacaacatctttacatattcaagtgcatggctgcatataatgaccctcttctatacgatcttcataagttgtttttctttttaaaaaaaatcaagatagttgttcaaccctttaaatacattttgatgtgcatgtgtggacaccttactgtgcttttctttatcacagataacagagaaaaagg

SEQ ID NO: 18581 - DNA, 840 bp, Glycine max
  Intron number 2 from transcript Glyma06g16690.1 (locus Gly ma06g16690) derived from phytozome v7.0 (chr-ID Gm06; pos 13098225 to 13099064)
ccgaggactccttgccgaacaagcctaagtcaaaggttaaaccgtttctgttgaaaataaataaaaaatacatatactgaactggaagatgatgatgtatgagtatactttaactgttgttgctagttttgtctgcgattctttctcgcacgtagggctgttgtttagttcacagaggcgaggctagaaattcgtgagctgcaacttttttgaactaaagattacttggaaataaggcttgcaattaggatttaggttttgtttgttttgtgattaggagttttagaattatgctctttatcttgttattgttatggttgtacttatgtacttgaggtttgagattaggttgtttgtggctttgtgctaggaaagaaaattatccaaggggcattatttcagatactccctccgtccctctttataagatccaatttgaaatgatgctcgttcctttttataagactcaatctataatgtttcttgcattaattattttaagactaacggagggagtataagactagtcataggatactaagattctaactaatagtttaagcttttaagggagtaggtccttgacgtggtatcaaagcttccatgatcaagtggttaggtccattctacttgattgagatgaatcgtagcatagggtagacggacttgtaccgtgcattaaggccaaagagcttttgggtgagggggcatgtatgaaaccattcatttgcttctgcataaaaaatagactaatgctggagaaaaatgaaaatatctgctgagctatttttgtttcaggtctcagaggtgagtttacgcttgggcaaagctgttactact

SEQ ID NO: 18582 - DNA, 1030 bp, Glycine max
  Intron number 2 from transcript Glyma06g34960.1 (locus Gly ma06g34960) derived from phytozome v7.0 (chr-ID Gm06; pos 36715187 to 36716216 reverse strand)
ttgagtaaggtactgtcacattagaaattccataacagtagacaaattatgtttattattatgtttgttctaacttatgtttgtttttttatttttttaagtgtttattgtaatgttatgcatgcaacgattaaaaaaggggggaggaagatgaagattaaattatattttgggtaaatagtcattttcatccctgaatgtgtagagcgctaacaaattcgtccttaaatgtgtcacataggctttttcattaacggtaacaaatggacagatttgtcgcatttttttcacttttagagactaaaatttgaatttttatctttcggagacgaatttattagtgctctgcacattcaaggacaaaaatgattatttaccctttaaaataagtttggcattagcctttttaattccacaccatgcaacttttcagtatcattccatcacttaatttttttttctcctctaagacttaaacaccacggaaacccttctcttccaaaatacagcactcccaatgttttcctatccagcaatgcctctctctctccatgtttccatcattattttgtcttggaacaatttagcttttgagttaatattttatttgcatatagcttaactgtttttatacatttttcttggtcttgaatataagaaaatttcaactaattttatctcgtttaatgttactatctttaaaatatctttcatttaattgaggctatagttctaatgattcttttttattcctgatatcaagtttcaataaaagagtaagttggagaaacatttagattttaattgagattgatgcaattaaatgtgattaactaacttttttagttagcgtgaatcagttttttttttctccttatatgagaccagaggaaatatattatatttcaaccgctttgtgacttcttacaactattgatccagtcatattccgccaacacccgacacttgaagatattgattgtcttgtcactttttatgcaggacgttactttactggttgaccatcata

SEQ ID NO: 18583 - DNA, 1015 bp, Glycine max
  Intron number 3 from transcript Glyma09g02110.1 (locus Gly ma09g02110) derived from phytozome v7.0 (chr-ID Gm09; pos 1398225 to 1399239 reverse strand)
atcaagaaatcggtaagcccctttcttcatttttttgattggaaaatgaaatgcaattgcctagaattaatcactttagggtgaattatggtccttttcccttccagtttagagatgcttatgcttaagcttaacttatgctgtttttggtttactaactgtttggttccaaggatcggaggagaggggagagaaaataaaatctcttcaatattaaaggagaggcataagttggaggtagggatgcttgaaaaaactagttttaaaaaaatacccataactataattataactagttttatgtaactataattataactagttatataaaagtaggtataaaattataaccaattttatagttataggtatttcaaataacttatttttatttaaaaactagttatagttataaaactataactagttttatagaaatgggtattacaaataacttatttttggtcatccataactagttatataattgattttagacataacttgttatataattagttctataactagtttattcgtaactagttatatacccatattttaaaaacaataactagttatagatggattagattagatttaagaatggatggattgattggattgtgaataaatgaattactttgcaacccttgtgtgaaaccctgtgcccatagcagccacataaggagtgtccatgcaatttgaggctgctgctctttttcgtggtgacttttgcttatgtttgatatggtgtatatgaaattgagaattgtattgctttttgcaaactcacatgtgggcccttcatttttttcctctctaattcgctgattgttatttaaattttaaagaatctttaaattgcatcgacataataggatgacgaaaacaattgttatgtttattttcactaagacctattgtttcatgttttctaatttatggcctgtcctaataatgcctggtaatgttgttagattgaaggaactgaaaacaaggagaaagctcataa

SEQ ID NO: 18584 - DNA, 320 bp, Glycine max
  Intron number 5 from transcript Glyma14g00490.1 (locus Gly ma14g00490) derived from phytozome v7.0 (chr-ID Gm14; pos 217049 to 217368 reverse strand)
gaatcagaatttcaagggtaaattcttttggtattctttgatttttctggcatgaatgtgtgcaaggcctgcatcgtagttgtgtccatttgttttcaagttgagtaaattgattttgaactgttattacgcaattggaatgtgtatccaaagttatcccatccatacattattcgaaagtgcaaaaattgattttcaaaaggtcaaaacaaacaggtacctagtaggtcttccaccagtggttgattgagatgctcttattgttatttttattcatattctatcagctaatataagtcagttccacccacatgttgcag

SEQ ID NO: 18585 - DNA, 872 bp, Glycine max
  Intron number 1 from transcript Glyma11g13330.1 (locus Gly ma11g13330) derived from phytozome v7.0 (chr-ID Gm11; pos 9467360 to 9468231 reverse strand)
ttcaagggtaaccctcaattcctctcttttttctctttttcagatcgagggttattattgcttcatcgaggttaattttatccattttgtattttctagctgattcaaaaactaattagtttctgacagttttgactttcctcttctttagtagattgattaattgtacaatatttattatttcccccctttaatttttgtattcagtttcgcctacaattggaagtacatagcttactagcttagcttcatgtgtgtttttggataaattacttaattaagcatttaatgcataaggtaagcacttatttataagttgtttctataactgagaagtaaataagattaaactgtttttcatatattccctccagtttcatgtataagaaaaaaaatctgtttcatgctaacctagaaagttagtcaatcaagtttagttgcatcaatctcaattaaaaattaattttttccaacttacccttcattggaacttgttataagaaataaaaatgagtcattggaattaacatctcaattaaatgaaaggtattttagagaaagtaacattaaataaagtgaagttagttgaaattttcttatatttgagaccgaaaaagtgtttttttcttatatttaagtctggagtagtactttgttagctgttttcaaaataaagttatcataaagagcttattgcattaagttgaaataacttatagacatatcataagctatattgataaactctcctaaacacttacactagtgtttatgtcatagtgaatgcacccttgcgatagttagtagcaatataatctatgttctctttctatcaaggttactcaaaggtcgaagcatacccggtaaaatat

SEQ ID NO: 18586 - DNA, 824 bp, Glycine max
  Intron number 1 from transcript Glyma09g04770.1 (locus Gly ma09g04770) derived from phytozome v7.0 (chr-ID Gm09; pos 3601499 to 3602322 reverse strand)
attcttctttgcatttccaagttgagccaggtttacttttttaaacttttgtttactagaattgaatgatgcataggtacttaggtactaggttggtaggtattaagggaattaaaattaactacccttgtaaatcacttgaaggattccgctgttttaagagcaaaagaaaaatatgcttagaattcagatttacgtttaacttaactccaaaactaatttataaagaataggttgattccaattaatttggtcatattgctagtttagtttatgtaagatctttaacacacacgtctcacatctaaaattagacataaatttgcaagaatgaacatctatgaaatgactcctttaagtcctcatgatagaatttaagaaatttaaaaattttgagtcgacaatcaaagttaaaaaaatgcatctttaacaggtggaagcatcaagataatgtgtctaaaaacacataatacttttttctttatttcatagtgagaacaaaattatgcttcttctagacacattttttataggtcttccaacaattggtaggataaactttaataccatctcataattttaatttggacttaattcaattttaaaaattaatttttaggataaacattatcctctatttatatacactattttatccatgtcgttagactagtcaaggttggttctcgaacaaacaccattgttttgcaaaatggtagtgcagatcagtttatccattctagtttatacttaggttattttggtttttaatgtgccacataataatgcttgatagttgatactattgtcctaatgaagggaac

SEQ ID NO: 18587 - DNA, 954 bp, Glycine max
  Intron number 1 from transcript Glyma11g11020.2 (locus Gly ma11g11020) derived from phytozome v7.0 (chr-ID Gm11; pos 7849816 to 7850769 reverse strand)
tgctgcctcactctctcactctctcactctctcaggtactctctctctctccgtttgaaattctattcagatcagaaaatgtggatttacgctctcgatctttcttaatatgtgtctacttgttctgcattctagtttcgttctcaacgcttttttttttctttttctgtaatatgtttactatttttcttgtttactatttttcttgtatgttcgtactcgctgcttgcttaacatgatttggttctagcctgatgcagaaaattaaataatataaattgtgttttcggttttcgtttttcactctgtcattttctggaaaactaaaccgacgagccgtacctttgtttctctagtcaacgtgagttccattttcatgctccactcgcgtttccgtagcgtaggatctcagatctttgttaaccactgctggatttcggtgaatttttcgattatttgccgtttcatgcacatgcagcgaactttgttttgattagggcttctgtggaagcagtttttgcatcatcaatctgttgctgctaaggttttaaattgctggctcagtttttgtagcttttctttgctgactattgttgttgatgcggccacaattgtggtagcagacacttaaaaaccttgacgttgcggccaaaattacggttgctgtccgtgtcttaaaaccttggttgtggcgtttgcattatcataattatttattgataactttatagaccaatgatcctagtttttagtgcggatgactttgtcttaattttgtgtttgtttctctgttttatgacttgatactattttgtgctactgaatcaattgatattgtctttctttctttttgttctactagaattttagttttttttttgtgtgtgtgtgtgtttgtggataactgttgattttaaatctttcatgctgtagcaggagtatataatctgagcg

SEQ ID NO: 18588 - DNA, 416 bp, Glycine max
  Intron number 1 from transcript Glyma10g06190.1 (locus Gly ma10g06190) derived from phytozome v7.0 (chr-ID Gm10; pos 4941474 to 4941889)
tggagggaactggattgctctcccacaaaaagctggtaagtttttctttctacctttttttttctccccttgttctctctcaagttgattgttttatttttgtgagctgtgaagtttgaagaaattagaaggttttaaaacggttaacgaccaagattttggccaaacattaaggtttttggagtgtccacaactgcaattgtaatcatatcggtcacatttatccactaatatcaaaaaatgcaatgaaactgaagttgtgaccgcaatttaaaacctttaattactttcttcaagctaatgagagtaattacaatatgttgacatgcagggttcttaattacctgctaaacttttctcttctatcttgtgttcctgatggcatctgttaatttgtctcaaacaggtttgaaaag

SEQ ID NO: 18589 - DNA, 380 bp, Glycine max
  Intron number 2 from transcript Glyma10g06190.1 (locus Gly ma10g06190) derived from phytozome v7.0 (chr-ID Gm10; pos 4941975 to 4942354)
ataatctgcactctctttgctagcattggaagcaggtattcttcatttcacttatttcccacttttttctaaccaaccttaaatatactttagaaaataaatgaggaaagatcatgtatcaaagaatttgttttcacatcttgggaattacaatatcaaagtagatatgatattgatagtcaaggagaagggattaactcagttggttaagcaatgttcatgagttattgtaaactctctcacaccattttttatttttatagatttaaaaaatatgatattgatacatgtacttttagatctgctacatgtttctaatttgggaactcattatgataactgcaggtggtcaataatagcatctcagttgccaggaagga

SEQ ID NO: 18590 - DNA, 692 bp, Glycine max
  Intron number 1 from transcript Glyma13g40760.1 (locus Gly ma13g40760) derived from phytozome v7.0 (chr-ID Gm13; pos 41242845 to 41243536 reverse strand)
gtctcttgcaggtttcattttttatttcattcatttacttgtttgccatctatctcttcatttgccataacagtactaggatctctttatatttttcttcaatctcgttgttattattgtagaaatgcagattctggggggaactgtggtagttcaaacttaaaaccgagtgaaattagtgacctaagacctttaatggttttttcacatttccttcactgggaccaatctaagttaaccatatcaattgtctaactcttcttaatgagtcaaaaatcttgagcttttatcagtggctgtaattaacttagtaatatactcttggtttggtaatttaaaatgccattgctagtgttaatgtgaatacaaaacatccatggataatccatttttgtacataaaaagagagaaaaaataaatagtattagcaacaaactttcacctagtgggataaggcttttgttgttgtacaaacaacaaacatgatcgggttgctaatactcttggttggagtagtcttagtaatttgatgcttattttgcagtatattttacacacaaggtatgagtgggttcatacaaattagaccaggatttatttcttttgaatggatagtagtatcaaagttatgtcagagtccaacaattatccaggaattttcattagatatttatttcttgcaggaaaagatc

SEQ ID NO: 18591 - DNA, 672 bp, Glycine max
  Intron number 1 from transcript Glyma08g11370.1 (locus Gly ma08g11370) derived from phytozome v7.0 (chr-ID Gm08; pos 8302105 to 8302776 reverse strand)
cctttcttcctctcgcgcacttcccattcactccggtacgttcctttccacaactaggtttcgcgaatcactgttgtttcctcgatccttttcgcatttggttttggatcaaattacaccaatgcttgtgtagctccatgtctctgattttctatctttgaccacacatacaacagctagttgcttgctattgtgttttgcttgaacacttggacgagatgcgactttactgtttttgattcttttttttgctcttaaaagaaaggaataagcagagaagagagagcaagtatctgatatgaaacctgatgtttgattaatatgcttatcagttgaatggagaatttgagagtatattccctcagtttgaatattaagactataattgcaaattaacgaaagttgtaaacatcgtatatttggcagatatgtgctaaataatctcttagatgattggttgttctacaagcagtatattctgtacttttttttttcctttttgtatatttatcctttgcagagattagagtgttttcggaattttggcagtttaaatgatattctccccatgagattaattggatttttgtgttttgctatatactgattcacgacgatacaatggtttctgtctcaggaagggtcttactttaccacggggaagagaggcac

SEQ ID NO: 18592 - DNA, 1039 bp, Glycine max
  Intron number 2 from transcript Glyma11g31690.1 (locus Gly ma11g31690) derived from phytozome v7.0 (chr-ID Gm11; pos 33026443 to 33027481)
aagtgttctactccaccaatctctcttacgccgttaacctgcgtcctcttctccctggtaacaataagtaacactgcccatcatgcctaattcttcaaacaatcatggttcagttcattttgcctttcccttttgctttctaattgatttggtcagaaaatagtaaaggcaacaaaacataattgtgttttttactgtgttgtttaccaagttggtgtctttttttagattaaaaaatacccgttttgataatttgctcgtttttgtccctttgcaggtcatatcctttacatgggtttcatgtttcaataacacagtgatggggtgggatggttgatgttttttttgttagttctagactgaatgaaacttttaattgggtgaatttcatagtcatgttttttttttaaaacaacattccacgaccgcgatttcagctataatgtcaaggattttgggctcacgcgattgctgttgcagccgcatttacctgcaattttccatgcaatttaaaaccttgttcatagtttgtcgctcactgttttggttggaaaatcaattacaagcagaaacatagttgtgttgagttttgttgcatactgatactgcattacattacatacatctacaaaggccatgtagtccagcacaatatgttttggggtttcctgtccttcactgcaatggacttcttagtgagtatatttatagagcttctttgtattatcagtgtcaattttgatttatggtttcatcatggtcactcaaatgcattaaactattgatagattatccatgtggttagttgtttgatataccgtatataggcatagggaaaattcatttgtgtctgcatgtgcttgtttgaaagtattggaagtacagctagacttgggtgtttataagtgtttcatactttcatagttaattactaaagataattttagttttgggcacaagattcttttatcctgtgcaatgtaaagttgtaagcttgattgcgtatggcaatgtaaatgtttggctttacagtttttac

SEQ ID NO: 18593 - DNA, 1031 bp, Glycine max
  Intron number 1 from transcript Glyma06g15060.1 (locus Gly ma06g15060) derived from phytozome v7.0 (chr-ID Gm06; pos 11849753 to 11850783 reverse strand)
ggtttactggtaattattgcagaattgatccctatttatgtcttttaagttttcttgggaatgagattgttgaaattttattgatttgatattaaatttagttgcattgtgttctgttactgcctgaacctaaatggaaagcagggaaggtaaaaattgcgtgcgtgcgtgtgtgcgcatttggttgtgtattttgtgcatgcacatgcagttttgtaatgttagatatagggaaaggcacaaatgtgtgtgtgtgtgtgtgcatttgattgtgtttctgtgcatgcacatgcagtgttgtattgttagagatgggaaaagttcatgccagaaaacccgggactgctttgatcttagaatagtgttctactgccgaaaaggtcttggctgtgagtcgaggggggaagttcttttaatgaaagttcatgaattcggttttgcgtgtgctcgaatggaaaccatgatgtatgcaaaaactaaaatcaacacgtgtttgtgaatagggagagaaaagaataagagggggaatgaatgatgtttaactctgtaatgcatttcttcttatgaaacgttctttatggatgatcttccttacctcccagtcaggcagtattagtttggcttttctctgcatcttatgatgcctggtatttgactcatttgtttatcatatcttctaatgcagtgatgacctatggctgtagaattgtcgtgttataactttaccaatttataatgtttactcttggcttttagtggctgtattctaagcacattatatcatttaaagcttttgttttgcattttacaattgaatttacttgtttcaagtgaatataccaatttggtttcacagttgtcatgcaatttttcttgagtctcttttaattaagttaataaacgatctttcatcatggtttatgaagaatttgagaaaaattagacagtaaactcagtactttgttaattaatttacatttctttgcttatgtacaggctcaatcggtgtaatcaactctacaactttaaat

SEQ ID NO: 18594 - DNA, 576 bp, Glycine max
  Intron number 1 from transcript Glyma08g20930.1 (locus Gly ma08g20930) derived from phytozome v7.0 (chr-ID Gm08; pos 15898000 to 15898575)
ttttcaagtttgccactttcgttcgaattctcgaggtatttcagctcaccgatcaaattcaacttctgggtatttctgcatatttaattatgatttgtgggtcgttggcaataaaacttttttttttctttttgtggagctggtggactctggctttatgtattgtgaggattctgaggtttatgatgtgccttcgggtgtaaatgattgtcaattcaaatggtacttggtaaatgttgggttgagggaagttttgagggggtttcttcaattgaaatgttgtctgagcactagaaaggatattcatgtttgggatttttgtttattgtggttttgaagaactgaagactggcctagacagtgccactttttttgtttctacttgagtggtaggtttgtgttgtgtgtgtctaggccaatcaatttttttgaagctgaattgtccagaaataagtttatctcgcatgagttttgattgtttgtttgttccattaactcttaaaataggtaaattggtgattcgatgtatttgttttgacagaaagcaaagtattttaaatttgtggagaggcttgt

SEQ ID NO: 18595 - DNA, 764 bp, Glycine max
  Intron number 1 from transcript Glyma07g30570.1 (locus Gly ma07g30570) derived from phytozome v7.0 (chr-ID Gm07; pos 35542176 to 35542939)
gacaggttagattttggtctttcttgttcatggttatatagtgatgttatagatttattaaaccacatgcttagtttacttgacatgttgtggtttgtgatactgatattagaattggactcacaaaaatatggaacagtcaagttctagattggcatgaagaaacgagtataggagtacaagattagttcccctgagttgaccaaattcaagattgaagggggggtatttttatttttaattttaatttttagttttcaaaatgcaagattgctcagaaagttggtgaagggtggtgtaaggtacaaagaaaggtttacaattgagggagaggttagacagatgaaaacataagaagaatatgagaaaacatctcccagttgtttttttgttttatttttaaaatagctattttgaaaataaattttaaaacttaataggttttggaggaaaatttgtgttttttaaaatcaaaaagtgagaaagagaatcagtttgtgttttttccccctcttttgttgtgattttaagtccttttcattgtggtggaatttagtggaacactagttgcagaaaatctagtggcgtagaccattgttttcttatagctgctagatgtaatctctgaaaagtttcagtctttcagatgttaattaatttttcttgtttgtttgactcataatatatatatatatatatatgcatttgatgaacgatcttatgaccatgtattgcaattgttgaaattatagagtatcattcca

SEQ ID NO: 18596 - DNA, 753 bp, Glycine max
  Intron number 1 from transcript Glyma08g03240.1 (locus Gly ma08g03240) derived from phytozome v7.0 (chr-ID Gm08; pos 2289517 to 2290269)
ccgaggtgcgtgttttgtgcttaatttatattctgatctgctccttaaattaattcgtcctcatttttgcgtagcttaattttcttttcttgcttcaccgtttggtgacattgcatattcttcgctctgaagctgtttctgtttcttccctgaactctgtttcttgtttttgcatcggttggtttgcaaattgcaattggcatatttagctggaagttcatatttgtgttgaacgcatcatcaaatcaatgaaactgatagttatttaatttttgaaaattcgcgtaatggatatcatttaatgataacgtactagtttgtttctcgaaaatttaatgataacgtactagtttgtttctcgaaaatttaatgataacgtactagtttgtttctcggtaactgcacatcatttaccttgctctagaaggtaagagtgtttggatcggttttggatattatattattctattaataataaaattgattgatcgtgagcaagggatttctggtgaatcctctccattgtggctcaacctaggataatgttcagcatgaccttaatgtggtagcaacttatttaattcataatgttttgagcctttcgaaagttggcgaatggaatgttacaatggaagtggaaaataactgacacatgttaagagaacctgaacagttggagtggaggaagaatttccttttgattccaatactgtttgatactctgtgattgatctacttgtaatctgcagctaa

SEQ ID NO: 18597 - DNA, 941 bp, Glycine max
  Intron number 2 from transcript Glyma11g00690.1 (locus Gly ma11g00690) derived from phytozome v7.0 (chr-ID Gm11; pos 332123 to 333063)
gttctttgccttgctcattggcatttgtacgttcttcaatttgatccagttttgcaagtgttgtttctttgccaacgtgctttttggtttcactctttgcggtgctttagttagtttttctgaatagcgaactatattttcatgcattagctagtgtctttaatatgcaggcaagtattaggggaagtagtataaatttgttattcatttaggttaaaaaataagatgtcaactcaaagctcgagtttgaacttgttttaaagctcaactgagtggtgacattttacagcagtaatatttgggtgaaaatgtctgatgcaagaggtcctagaattcttttacagacaattatttaaattatgacttaaatatgtttaaagtccctgataaataatcgaattttgttctgggtccctaagaattttttttattatttcgagtccttaatatattaaaactttttttttgattacttgttgtcagttaagtgatgacgtgacactgttgcaaccattgataatgttggaaaaatcaatttgtaaggtgacacgtcatcacttaagtgacagcaggactcaaaacaaaagtttcaatatatggggaactcaaaacaatggaaatatttattagggacccataacaaaatttggttatttatcatggaccttaaacatatttaagccttaaattgtttcctttactacaggctactgcaactgtttattttagcacacgtataagactaagtttacatgaccaagaatttggtgatttttggtgttaaattttcctattttaccaaggacaccttcaatctggttcacaccttgcatttatcttttatactatcctcatacaactttcagaaatttgtattttatgcatatttttttttattggttgcaggtacaggacttgctgctgttgtcatcaatattgct

SEQ ID NO: 18598 - DNA, 715 bp, Glycine max
  Intron number 1 from transcript Glyma08g07250.1 (locus Gly ma08g07250) derived from phytozome v7.0 (chr-ID Gm08; pos 5212662 to 5213376 reverse strand)
gcctcaaggttgtttttctatttagttggactttttctctaacacttcttttcttaatgttagattggttttctatttggttgtacatgtatcatttaagaatgtcgtgttttcattcattgattttaagaatctgttttccaattatatattgggaaaaaatgttatacttttattcaagaaagtgaatcaatatataggaaaaaaaagttaatactcttcaaattattagaagatgagataaactagtttatgaaagttctagcggaaaacaaaaacagtagaaatatcacaagctctgattaaaaaaaaatagaagtagaatatgacaaagaaaaaggactttgctgatcaaaatgagaatttagttttggatagagtttgatgagatcattgagctgtagaattaattgcatagtcatatttggccaagtaatttatgtaatatttattaatatcaattatgtattacttatataatattttgacttatttttatttaaaaaatataacatttctattttatcatttcagttcttatactgataaatatactgtgttttaatttataaaaaaaaaacttatgatgtgttttaacttcttccggagagattaaaatcatataatttcaataatttttaaagactatgaatgaataaattttaaatacaagtaatttgactatattactatccacttgaatcaggtgttgcac

SEQ ID NO: 18599 - DNA, 590 bp, Glycine max
  Intron number 2 from transcript Glyma05g31190.1 (locus Gly ma05g31190) derived from phytozome v7.0 (chr-ID Gm05; pos 36363997 to 36364586 reverse strand)
ccaccaagtatgttgtttctcttctgccaaaagataacactagttaccttaagttctcaatagcttcatttggagaaaaggatttaaaatattgtttttttcttttatttgaagggagtgtaacggggaggattaggattttaatctattcgaaaaatctgtatcttatgaggactgagacctgcatgaaaacttgacacaattatgcccaatatctaattgcaaaatggtcattctcagggttcttagtgagtgtttctgtgagtggttgtaaaattgattttggttaagattaattctaagcgaagtgatttatatttggataattttattctaaaagcaagttaacaagagaactcagtttatgatcttttattccatgcaaaagttacctgaggttgattttactcttaatcaaaactgggctgaaaatcaatttctcaatgtgagaccaaacatatgagcatttacctaaaattactttagctgatatttcaaggtgactttagttgatccttccaaacatgcacttaccatatttttccttgacattaggtggttcacttttcttatttgatcggaaggtgctg

SEQ ID NO: 18600 - DNA, 696 bp, Glycine max
  Intron number 2 from transcript Glyma14g03040.1 (locus Gly ma14g03040) derived from phytozome v7.0 (chr-ID Gm14; pos 1920602 to 1921297)
tcaagcttttggagaaacacggtgcaagaccccctgtatgtctcttcttcttagatgttattcatttcctctaaaaataaggatgttattcatttcgagagattaatagatagatatgcacttttagtgtagaattttttacgttgtcaattaatcagatattacttttgaaatgacttttttatgtagttattataaaaagtcaaacatatttaccatgaatgaaaatataattttttttatgctgtccgagcatacatatagttcaagcttttaaaagagaaagtagtatataaactgacactgtacaaactttttatattgacattcaatcacaattcacaatacgatattgtcgtgtacggtaggttgtttgatttacaataaatacgttaagagtcatacttacggtgatttttaaggtccgtttgtttaagtttatttaaaaaagaaaacacttttttgaataaaataaatagttttctgctcttttgatatgtttttctaactgtttttttttcttaaaaaagtagttactagttttctgttttttgtttaaaaaggtattttttacaaatgcttcttaaaaaagttttttttttaaaattgcttttacacagtgcatagatattaaaccccttttagtataggttgtttatgacatcaagttgcaactgaggactttttattttgtag

SEQ ID NO: 18601 - DNA, 378 bp, Glycine max
  Intron number 1 from transcript Glyma08g21850.1 (locus Gly ma08g21850) derived from phytozome v7.0 (chr-ID Gm08; pos 16633975 to 16634352 reverse strand)
gatttcactcctcccttacttcatcaattctttcagtgagtttcttcgtaaaacccatttcaaatttatcgacatccgataaattcttatagtattaaacatttactgtcaaaattacttttcgttttcatctctagaggagaggatttgttttctctgctgaaatctgtgcatccaaactgttcgacaaaatgaatgaacgaactcgtcgcattagtcatggtttagactgttggtgttgtttcacttttataatcattgggtgttaaagttaaagttaaagcgtcgtgattctttttatgcttggttttgcactgtttttgtcatggttttgctatgcagctgttttataatggctagttgtttgcgtaggtttga

SEQ ID NO: 18602 - DNA, 849 bp, Glycine max
  Intron number 1 from transcript Glyma08g04370.1 (locus Gly ma08g04370) derived from phytozome v7.0 (chr-ID Gm08; pos 3063814 to 3064662)
gagacttcgttgactctctgtcaggttcatttttcatacctctgcactttctgttggtctatcttttctgcttcttctagctttctatgctcctttaatttctattccttcttctgtatttttttccccattgatgtacctggatcaaatgaaatacacatgttattgtgggtgtgacataattgaggtctaacttatttttaaaaaatgacatataactttaatcttaagcatatgattagaagtttgattttaaggttgttctgtatgaaaaaatttatcataaaaggtcaactctttaaattgatctcaagaattagtctttcacttcttgtacttgattaagcattcaattcttatgttcgtgtacatgaaaaaatatttatatgagacatcaagttagatgaacaagtatctcgatagattaatatttgactcttagtagaaggatagccttgattcaaatgaaaagaaatgaaatacacttacaagagacaatatattacctctatttcaggtcacatgtaaagtcctgaattatgatttaactctaaataacgcgtatgtttggatttttgtctgaacaaaagtttgtttcttgtaagtttgtgttcaaactataatttagaggttaattatctatacttgttataaatggttgtgtcaacagtactacgtatggtgtctcaactctcaactgagtcttatatatatatatataacgaatttgtgtgtgtgtatatatatatatatatatatatacatacatactaatatgactttgctaaaactcttgttgttgttgaaaaaacaggaaagacatttgagacaatagatccaagaacagga

SEQ ID NO: 18603 - DNA, 722 bp, Glycine max
  Intron number 1 from transcript Glyma09g31950.1 (locus Gly ma09g31950) derived from phytozome v7.0 (chr-ID Gm09; pos 38528446 to 38529167)
ttcttggtgttgctaaagagtaagtccatttgatttatctatgtggggggttgaatattttatcatggttgttggatatctatgttttaaatgaaatggggtgccttttttttttttttttgtgagtggagtttaattatattatgatggttttttaggcaatgattcaatgataaggacgtgtttctcctctctatttttttgacatagtttctgtttggtcctggtttttctttttacttgttgctatggctctcattctgctgatcctcctggacactggatgtttggtattgtttttactgttcaaatgggtatcgtttgtttgatggattgagttaagtcattttgcttctgttatgcttcaatgctattcttatagcaattttcacgcacttttctttttcctttttttttgggggggagggggatgttattttattgctaatctaaaagatttgactaaaacaattctgtttaattttgttgcttttgtacagtcttaactcttaaggtgttaatcaattcaaaagatcttttagtggcaaagaatttttggaatcctaatactttttttgttttgatggaagtgctacaatacaatgcattgatgttttagagccatggggtattctatcctaatgtcttaatcaattgtttacttggcaaaggatgggcatatttatctggtttttagtgcaggtcattgaaggcaattactt

SEQ ID NO: 18604 - DNA, 935 bp, Glycine max
  Intron number 2 from transcript Glyma09g31950.1 (locus Gly ma09g31950) derived from phytozome v7.0 (chr-ID Gm09; pos 38529317 to 38530251)
gagaagtaagttttcattataacattagtaactttctgtgtgatttttttctttattttcttagtgttacgtagttgattttatatacttgtatttgttgctttgttataactcagactattggtatggagtaatagaatcactatttatttgctaaggcctaagagtcactagttcagttattaatattttttttgttaatgttctttagaaaattgcattttctattatgggttgttttttatgtcatttaccaagtatttgcatgcactgatactaatttataaaaggtgtacctatgaatgcattaaggtttcaaccctttactaccccatgatactggtttcatgcctttatatgcatatccttcatctacctgttgtgcaggttgctgtctacagcacatggatactaaaagaattaggaaagaatgcaagttgcaaggaactatattattgaaaaaccaaatttgaaaagaaatgactaaggctttatattttctgaattaaggatttgaagttttaaaaatcagacaagaagaaagaaggggaaaaatgaaaattagagaaagaataaattaggacacatagtggagccagagaattggccgagaatgacgtcaaattaaactagaaaataattgatgccaaggaattagtatatagggataaaaagtgtaattcttttagttttattaaaaacttgtaagtatatttgactatgtattttattttttcttttacttttttttaatgttttgcttttctaattctctgaaacattagagttcagatcatgcattctatctcattttgggatggatgcctttctttacagcttaacaatgtggctagtttgttcatgatattgttgtccttgccttgaactttgctttcttttttcaagtggtgtatcctctttcaaccagttcatcc

SEQ ID NO: 18605 - DNA, 922 bp, Glycine max
  Intron number 4 from transcript Glyma09g31950.1 (locus Gly ma09g31950) derived from phytozome v7.0 (chr-ID Gm09; pos 38531654 to 38532575)
gggtgagtcattttatctctatatttgcttagcttttactttattctgttattagtttacttatgagttaagagagtcatactgtctatttgtgtttgaaaagctcatgttttgaagaacaaaagattttgcctgagtgttgttatgatgtcagaataagcaaaatttgtgaagtagattgagagaaaatcttttgttgcattgtgagctttattttaagtcaataggtgcatgaaccttacattcttactattagtaggatagaaacagtctggtaaatggaattggctttatttactaaaggccagagcatttatagtatttgagttcagaactcactattgagcaacttgttgagagatttgtgcatacccacttaaattttgtgtttgtaaatatttgcttgggatagggatatatgtgtttatgctaggaattgggataaaatgggaacataggtttgtttgttattataatttctgtgacatttgagtgggtgtatgggggagtgacatggcctgtagttcctacagaaagtcagtggcaactggcaaatattgagtttttgtcaaaagtgacgagtgaaaaggtgctgtgtcctttaggccaaagagaattgtgctttcagtttatccttaaaatgtacctcaaatggccatggggagtgagaattcccttataagcctcaaaaccatatgaacttcttgatgctttatggtgtgtccttcatttgtctttttcttggagataatcttgttaccaaaattatgtttactgtgcaataatgcatttacttgagtatcaaaattttctattttaggccagtatctggacttcggattcatttcttttaacttctcaacaatatatcatagtgatattctaatatactttttttctctggggttcagttgggtatcta

SEQ ID NO: 18606 - DNA, 341 bp, Glycine max
  Intron number 2 from transcript Glyma08g22410.1 (locus Gly ma08g22410) derived from phytozome v7.0 (chr-ID Gm08; pos 17046692 to 17047032)
gtcacgagcgcgaggagcttcaggctgagctcgaggtctctctctctttctcgattcaatcaaatgaatagtgtgtctccttactcttttctgtgtcctatttttagagtaaaaactggcggttttgttaataattagcttgtttacacaaaagaaaataaaataacttacgattaaagtattgaagaaagagctattaatcaaactgctgttttctgtatgcaatgtaagtaaaaccaagcatttcaagggagactctcattgttttcttttttgtgttaactactatctgtttcttttggttagggaaggaatattcttgaaatagaccatcccgaagg

SEQ ID NO: 18607 - DNA, 572 bp, Glycine max
  Intron number 2 from transcript Glyma11g13150.1 (locus Gly ma11g13150) derived from phytozome v7.0 (chr-ID Gm11; pos 9366227 to 9366798 reverse strand)
ccaatactcgtgttggaaggggtatgtacagaatcttttgtatactatttgttccttgaccctatttatttaatatactaattccatattagtaaaataacagccagtttttcattcagaactggtttaatcttctcctgtggtgtcccactcccaataaataaacacatgaaagaatatgaacctttcaaaattgatgtttcctataaaataatcacagtttaaattatctataaaattttaatttcaaaagggaccaaggcttcaggtgatatgcagctcagtttgcatttctgatattttaaacatctagaataggttttgaagattgcactttgattcccaaatatattcgtgaactgtaattttttgaaaaaagagaaaaaaaaaaaaaacagaagtggctttcttttccaatgtatgaagctcagaagcataaacatcaaataatctcttacacctacaagtacctcataatatctgtgtccatttgacgtcataatatcttatgaaaataaaggaattgacgtgcccttttttgtttgtctttttgcactttacgctaggtaaaa

SEQ ID NO: 18608 - DNA, 196 bp, Glycine max
  Intron number 3 from transcript Glyma12g05810.1 (locus Gly ma12g05810) derived from phytozome v7.0 (chr-ID Gm12; pos 3914270 to 3914465)
gtgacgtagcgattgactcctaccaccactacaaggtatatttcttatcacagtaatttttttttagtttctttgtgtgtgtgtcttgttaaaatgaattatttcttcttcttcttcttctttttttttaaatatctgtggttcttggtgttcataaacgtgtttttttcttgcctattttggtttgtgtaggaag

SEQ ID NO: 18609 - DNA, 578 bp, Glycine max
  Intron number 1 from transcript Glyma14g02660.3 (locus Gly ma14g02660) derived from phytozome v7.0 (chr-ID Gm14; pos 1655473 to 1656050)
ctcttgctttgtttacaagtcctcctttctcacaggttcgtctctccttcaacattagatcttcctagctcatgtttaattcctacttggtctaaaaaattgtttttgtgaaagtttgagttccaagtttaatgtctctattacacaagaaagacattttattctcttttttccccttactttccatacgaattatatgtacatgcatgatgtgaatgaaagattttgtttttaatccatagagttgacataatggtgtaatgatccagtgcgtttatatatgagaaaacgatttatttaatgaaaaaacttatatttgattttttctatgtgcaaattttttttggattaacggtaatcaggtattgcgagtgagattagtctttaacctaatgagctagagacactcgtaatctctgacacaaaactataaaatgacgaggagagaaatgcttattaggaggctttagatttgttatagtgagatatgttgatattgcatgcatgcataaacatgtggcttatggtgttgtacattttgttgcagctaggtggtggtgattagtgtacatatatat

SEQ ID NO: 18610 - DNA, 849 bp, Glycine max
  Intron number 3 from transcript Glyma08g13240.3 (locus Gly ma08g13240) derived from phytozome v7.0 (chr-ID Gm08; pos 9681968 to 9682816 reverse strand)
aaagaacaggtaaatgccaggaattttttgtctgtttgctgttatctttgctagttcaaaataaactgtacagaaattgcttaaaatctttttgttccattccatctaggatttggcttctccatagtgggtaaggataaattaagtatttttaattgttgatgagaaaatcaatggtgtatatttcaacacatccttgatttgttatgcatgtgcacataataataaccgttaattttcttatcaacaattgaaatcactcactttaaaaagccggattcttccttctattaccaagggaaatagaaattctataactaagcaactgctcaacataatgtccattttttaccaagggtatgtttgggaattaggttttggaggggaagggaggggaggacaattttttttttttttttaaattaagagatttatttaatgtttataaaaaaaacaaaagattaacatattaaattgatgctaatctatcattttttatctatttgtttatcgaattagagaattttttttagaaataaaaaatttgttcttccttcccttctcttctaaaaccaaacttccaaaataccctaataatcagcgtctttggttgcaaattgtatatgagcttgcaccaataaatgttctatgttctctggcagccactgggtaacaaatatcctgatcagaaaccatttttgtgtctctgtatttggagtgtgcatgacttttttattttttcagttagcatgaatgtgtgggatttgattgcccattgtagggtctttgggtgactcagttgctcaatgtgtaggaagcattgaaaaggagactaaaggcaagaataga

SEQ ID NO: 18611 - DNA, 764 bp, Glycine max
  Intron number 1 from transcript Glyma07g10690.1 (locus Gly ma07g10690) derived from phytozome v7.0 (chr-ID Gm07; pos 8942816 to 8943579 reverse strand)
gaagtgcgttgctaatgggtagtttatactctttggattagaaaaaattaacatgataatatacaaattaatagagaaatataataataaaaagttgattacaaaaatattatatgttacactattaaaaagaaaagcattgatccatacaaaagtatgcatggtattgggtatgataatcgatttatgggctagacaaaattgtatgtatagcttgtaccttgtcacgcggaaatgaattaaaaatagtaaaaatagatagtattccgtctaataaagtaaagttgggtgaggtgagatatgatgtatgttgttttaatcgggtgttgttgattaaaaaaacatttagtatgagaaatagtacaagaggactagtagtagaccgggtccgaattttgaatagtattttgttttggtgtggcgaaatcagaagaaggcacagggtcatggagaaagaggaaagtgggtggtagtttcgtaggaggagttttgctttatgtgtgaatcgtggccatcattttcaaagaacatgcattaatgtgtggaaacggcatgatttatgtgtgaagggtgatgcgcgcaagagaaacaatggattgcaaagagcatatccccatgctccgtacggtggtactcaccgtctcttggttgttgttaatcactctgccatactgtgaagccgcatacaattattcggaatgcaaagagcaaacatacaaatgcggaaagctgatcaacatatcgtatcctttctggggaaacca

SEQ ID NO: 18612 - DNA, 708 bp, Glycine max
  Intron number 1 from transcript Glyma11g04430.2 (locus Gly ma11g04430) derived from phytozome v7.0 (chr-ID Gm11; pos 2993694 to 2994401)
cgacacaaacctccactctcccgattactttctcggtaacggtctctctctctcatttgcttctctgtgtgattgtgactaattgctgtatgttctgactatgatcttctcccatgtaatgttgcaactcaacaagccactccactaggtctaggttgttgaattgaactttgatttagcaaatttcactctgccgctgaacaagtctccatgtattctcaggacgattttgtatcattttcccttcttttttttgtttatttgtttttcgttggcggttttgtgcatttgaattttcttgcaataatgtccaattcaatattagaaccagagggaatgagtaccgtgaaaaaggaaaattaggataagatagccttctttcaggactgaattctataaggataaagcagtcgatagctgttagttacagacgaaaatgaacaaattcatctgttttccttttttctttgaaatataccatggctttatgcatggttgttgtttttcttatatattttgatgtttgttttcaaatgttatacattgttttgttcttttatttaatttggtggggatagtgatgactttctaatgcaagcctcgccccactgtttcatattgtagtctcgctgtgtaattatttgtttcttgtgtatagtttctcctgacttggaattgttacagatatttgtcaaccttgtccaagta

SEQ ID NO: 18613 - DNA, 1023 bp, Glycine max
  Intron number 1 from transcript Glyma06g47960.1 (locus Gly ma06g47960) derived from phytozome v7.0 (chr-ID Gm06; pos 50323167 to 50324189)
gtgactttcaattgagggtaatgcgattcatggaatattatttaacttttttaatccaacaactgattgcaagggttgatcatcgtttcattctgtcactcgtataatatatactttatgttgtttaggcggttgtgtatatcctaattgcatctacatttgaaatgttcactttggtttcttcttccttatcactttgcttcttcatccctgtttatgttactgttctgtggtcctactcttaactagtaaaataagcagtgaggatgtgtcaagtaaaaactgatccaaaccaaaccacaaaagattggtttggtttggttcagattaaatattacattcaaactgaaccaaaccgaataacataatttttatgtttggtttggatgactttttagccaaaaactgaatcaaattgcaccgggaacacacctatcagcagcagatttcactatgcagtactagttaccatcattccatcattagcctctagattgaactcattgtactacattagtccatcaattgcctctttacctataaccattttagcccataactttctatctttccctatacttagaacactaaatttaatattgttttacagacaagactcgttattgactaaaatgttctttttaaatattttctggttttcccaattcaaataaaaattagtggcagcttctgaatccccccttccccttctcaaactattgtgacacttactaatgacttttacttccagaagcatgttctcatgttcactgtatatatatatatatatatatatacatacagagagagagagagattttgtcagttagatgattgggatcttttcattttaataattttagcagccagagatggttttttgacagaattgtttccacttattggttttacagtggataaaataaactgtaaacactggtttatgttgtcatattgaattttctgcagttttcttgtgtgtactagtttgtctctaactacttattgtatgcaggaaaggga

SEQ ID NO: 18614 - DNA, 650 bp, Glycine max
  Intron number 1 from transcript Glyma09g40070.2 (locus Gly ma09g40070) derived from phytozome v7.0 (chr-ID Gm09; pos 45034854 to 45035503 reverse strand)
ttctgcaacggacgaccttcttcaactcatcaaaggtgaagttttttttcttcttctttatctcactttgccttcgacacacacaccttttgccctctaccctcaattttcccattttcttcagaattttccccctcttaatttcctttctctttgtctattcaattttatttttcgaaattccccccccccccccccttttgtgttgattgcgagcgattttacccccaaaatgcttgaatttcataacccattattactcaattattttcatgtttttttcttaaaagtattttttgattttatgatgggttgataacggttttcacccctcaccgttgcaatccattcaaccatttttttattgtgtcattttattttattagcctgtggggtggaaaatttttcaatttctgtatccccattattatgctacaagtctaagaaaataaagggggtagaaatttccctattttttagatatggatacatttatttcaatttcgttagcgagaattcatgaaaaggaaagaatttgacccggaaaaagttggtataagactaaactttttgttttgagtatatggatttttcactttaaagtggctattgcagttgactttgtgagccaattcaatcaggcttgagaa

SEQ ID NO: 18615 - DNA, 427 bp, Glycine max
  Intron number 2 from transcript Glyma06g12870.1 (locus Gly ma06g12870) derived from phytozome v7.0 (chr-ID Gm06; pos 10039655 to 10040081 reverse strand)
cctgcttttaccttcattcttgccatcgtcttcaggttttttattactgttctcttttgcaacttttgttttctcttgaaggcactcaaacataagcgaacttcttttcacaaattttattcaagagcatcatggattaagaaaccaagggttccttcggtagagaggaaagaaatggaaagaaagtgaattgagatgaaaattctgaattaaaatagagtgtaaaaatgtggctcccttatcttttactgtggatttctctcaatttctactttctttctacacaaacgaacccacccttatgatctcagcaattaacccttactaattattgcagtgataattgaagcaatttccttatagtagtcttgcataattttcttaactaatactcaagcttatttttttgggtaattgtccttacagg

SEQ ID NO: 18616 - DNA, 413 bp, Glycine max
  Intron number 1 from transcript Glyma10g41820.1 (locus Gly ma10g41820) derived from phytozome v7.0 (chr-ID Gm10; pos 48809322 to 48809734)
tttccttcacgatttgtgttatttgctgaattgtttcttctaatcgctgcagttgtaaagaaagggttgagcttgaagaccaaactgggcataggtaatgtactgtttacataacttgatattccttttcacaaattaatgattttataaataattcttttcttttgatcatatacgagcctaccattcacacacgagtctaattactatgcagatttgtatgttacaatgttttttttagtaaaataaaaagtcaaaattagtccagttaatcaacagagcctataaacatgttttgtgacttttattcatatataaaggtcattagtttcttacttacgccaagcattttcctcctatattaaataaattctccagcttcggtcgtggtaggggctgctggagttgttgtt

SEQ ID NO: 18617 - DNA, 695 bp, Glycine max
  Intron number 1 from transcript Glyma09g17200.1 (locus Gly ma09g17200) derived from phytozome v7.0 (chr-ID Gm09; pos 20992329 to 20993023)
gcttggagaaaaccaaggccactatccaagagaaggttgtttttttttgcctcatttttctttctgggaataataataagtaaataatgaatgttctatgttggcattacttaagattcatttttcatgatatccaaaccatcttttctttgttctatgttggtattgcttgattcattgttattattgttgtggaataatagcacactatgtaattaatattatcgtacacatgtatgtgtcgttcacaaaataaaacattaatcatataaaatattgttttttgagtttattttgtgagtgttgttacattctaaatcaatcaaaaatgtgaaattatgatggttgggaacaaacttatcatgttatacttataattagatgatcatataaatctctaaactttgtgaatgtaagaactattgaatttttttatcaaacggagcaatcatggatgcaatttttttttctaatagacatgattaaacattattttatagatgattagcccaaaaagacaatcatgcatattcttttttattcataccgtcatgcatattcttttcgaactattaagcatttctaatgattgttctagatcaaatttgaatgcctatatatatatatatatgcccaataaattgggccattttgttattgggcttctcctaagtttataattgggcctgaacaga

SEQ ID NO: 18618 - DNA, 502 bp, Glycine max
  Intron number 3 from transcript Glyma09g00500.1 (locus Gly ma09g00500) derived from phytozome v7.0 (chr-ID Gm09; pos 232213 to 232714 reverse strand)
gcacgccttgtgtaggtctttattgtcatctttcccaactccatgcattcaattcttatttcacattttatcattccacttgcaagcacaattgatcaggtatgagcagaatgctggagagcttgcacttaactacttgtggatttcctttttcatgttgtcttgtaaatcaagtttggttttaaatgggtgcttggaatgtagagaagagtaaaaatagcaaacaatattgattcacaaaacaaactaaatgggagttaggaaatccacaaattgtgaactgcaagcactgtattcttataccagatcacttgctttatgagtcatttgttcacaaagttgaaaaatcagatgaagagtttgtcatcccattttgactttgattctgcaatgataatattgttttattgtattttttttgtttaaaatggacaatttttcttttcttgtttgtttcatgtggataggcctaagtgtagaagaacttgaaaggctagctatt

SEQ ID NO: 18619 - DNA, 580 bp, Glycine max
  Intron number 1 from transcript Glyma07g32540.1 (locus Gly ma07g32540) derived from phytozome v7.0 (chr-ID Gm07; pos 37424088 to 37424667)
cactaagcgctcttccaagctctctactcactcgggtcagtacaaaatgagttcaatctttacattcttttgtcttttcataatggtgaaaaatagttttttttagtatgttgtgttagtaggggattcataactttcttatcactccaatccttatgtccctccccccaaccaccaaaccaccttatggtgaaattttgttttttgttttgttttaataattgcagtttaggatatgggaattaagagggaatgaactgagggttgtgttgagagttagtattattaactgagtttcaatcttttgtcttttcatgatgttgaaaagttgctaattttttcaataaattgcaatttaggatatgggaattaagagtgtatgaactgagggttgtgttgagagtttgtattatcaactgagtttctatcatttttcttttcttttcatgaggttgaaaagtttttttttttaaaaaaagaaatagttggaatttaggttgtgggaattaagagggaattgtgtgttatgtatgttattttttcaggtgaagtggcattgcctggtgggaaagcaaaggag

SEQ ID NO: 18620 - DNA, 858 bp, Glycine max
  Intron number 1 from transcript Glyma10g35760.1 (locus Gly ma10g35760) derived from phytozome v7.0 (chr-ID Gm10; pos 44009606 to 44010463 reverse strand)
tctttggagccagcaacatcatcaagttcttgcaggtaccatagcatgcatttaaaccaattattattattattgttgttgttgtttttaattgttgttgcttttaattgttgttgctttgtgtgtgaccagttcacacttcatggcatggcattttttcttgaaaggcaacaaaagaatgggttgaattgactctgatcattttagagaaacaaaataatgggttttggtcaaaagtgggagggaaagctagcaagggggcatacctaattgatgggcctgatgggttgttgttttctaacttcctaacacatcaaagctatgcatgattctctcttctttcaacactagctaccactactttcttttccatctttttgggaaaagaatgcccaagtcaaacatgttgcatactactacttatgtatcttttcttttctatcttccttggaactccccattctgaccaccaaggttaaacaaaacgttctgcaaccacaatttcagccacaatatcaaagttttttttctctctcaataatcgtaattgcgattatatctgttcacactttctcacaatgtcaaagattgtaagtttgtggcaaaactacaatagcaactgcaaccctaatttaaaacttgggttaccactatataagataatgctcaaaatttaggtgcccacatttggaaattatctttattaattttggttaaattggtgctgtactacccattatgaccagcatagcaccaattttctaaatttgtccaatttaaattaccaagggtttaatttatgttaacaacaatgaaattgcattgattttcaggaactgccagaatcccagagagaag

SEQ ID NO: 18621 - DNA, 905 bp, Glycine max
  Intron number 1 from transcript Glyma13g00430.2 (locus Gly ma13g00430) derived from phytozome v7.0 (chr-ID Gm13; pos 182333 to 183237 reverse strand)
ctctgaaaaaatttctctccgaagcgcatatcgaggtcggtaatatagctgagttgaagcttgattatgtaaaaccttaatcctatgcttgataaacttttagttagataaaaatattaataccagtattggacaacaggaatgtagcgttagacaatagttttccctatttctctgctctcaatcttttttatttcccttgcattttgtgattgacgggagaatgttcattgaacaatgcttgttttcagctcatacaacgtgattttgattcgtgagataatttggaatgaataggatgaggaaagtcccctgttttgatttttgaaccatttttagaagaaaagcttctttttcttggataacaagtttgtccttataaagtgtttggtagagtggaacaaaagtgaattgaaatgaaagttttgatttgaagtagagtgtaaaagtgtgatatccacctcgttttactgttcatttgactccttttcagctccatttcactgcaaacaaaacaggggcttaaaaattattaagcacatacataggctctgtctggataagtttttccataagcacttataggagaagaaaataagatgattttatcaaagaacttatatccaagttaaatgcataagttgattttagcttgtgggagaaactaaattcattttattatcttattttcttctataagtgcttatgggaaagggccttaaaagaccaaaaggaatgttatgctgtcgcattttgactagaattccttgatgtcctatgtttacgttttccctatcattgttaagtaatagatatgtgaatggatctttcttctgttgttttatattgttgctcctgcttgtgatgcagaaaaacgatttggagggatcaccagttgatctgga

SEQ ID NO: 18622 - DNA, 969 bp, Glycine max
  Intron number 1 from transcript Glyma06g42920.2 (locus Gly ma06g42920) derived from phytozome v7.0 (chr-ID Gm06; pos 46225761 to 46226729)
ggtctctcaggtaccttctttcttcatcttccaacccataccttctattggaatctcatttgccccatttcagattttgatccaaaatctctttttgatgtgttttctagccttttcagttccccccttctgttgggccactctctatttttcgttctgggaacattctctggtttacttgattaacactgtttgtgtaattttatgagagaaataaatatatataataaataaaatgtgtgctttgttcttggaatgtcacattatgatgaaatgacacttgggttttatctgcgcttgggtttgcttaattttgatctagaagtgaatttctttttttgtgaatgcatataacaatagaagaggaaataatgtatgcactgaatgatccaataacaaaccgccattaaccccccccccccccccccctggaaaaggacaaattcttcctttcttatggattgggattcggaaaaatacttccccaacttcaatttcaaaaaaacccggttaaatgtttggttattgctaggtaaaattgattttgtttcaaagcctcggtttgactagaagtgggaaaaagtagctgtgttgtcttgagtgtagaaaattcacactaagttttatagcaaacttgcttttaggtggtaaaagcatccaaacataaatcacttcacttgaaaatcaattttacgaaagcaatttcattcaaaatcaattttgcaaacactcatccaaacacacactaagtttttatacattgatagcgcacagagcaaaatgcaattgactgttaatgcttttgaatgaattgatgacgattctaatggttttattggtattacttagtgatttaccgttacacttgctgtgatatgtctatatttgtagtagaggtcattgatttttggctctgctattgctcttgtcttcttcaatagatccgttatttgaatagttgcaaaggaa

SEQ ID NO: 18623 - DNA, 849 bp, Glycine max
  Intron number 2 from transcript Glyma12g15840.1 (locus Gly ma12g15840) derived from phytozome v7.0 (chr-ID Gm12; pos 14829397 to 14830245 reverse strand)
aataatacaagctcgtttctgtagtccacaacaggtgatttcacagttagtaattcattcaacatccctgtttattttctttatgattctcttgtagatgaaagtaatgtggattgcttttcacaggttcaattgtggaatattgactctggagcacttcttgatacttgcgaggttgcaattaaggtatttcttatatttatcagaggctcagagttgtataattttctcactatagcattccgtcatatttcttatattaattaagttactgatttatgtaccgtactggatggtttgcttgttgcagtggccattcagaggtaattctctcactatagcattctgtcatatttctcttcgggagaattatgtttttgtttactgacgagttttatttgatactctgtagcttgcaaggaatagtattgttgagttgcagtgtttctgcacaaactctttctgttgccaaggtaatggctgttaaacatgttggaaatgaccattgacttgcatcattatgctggaattgactttttgacttgaccgtgacttttgtgcatccaaggtggaaaatatatttctggtcattagtttgacctcttaagttgattgaattatgttgtccactcctcctctatgctttctgagacataagtgagctcctctgtatgaaattgtggacacatgagcatatgtttcttgtgcttctttacaaattataaatttctgttttttaatatcatgtttgctaattatttgagttttgtttggatctactatttctattaaataagaaatattaattaaaatggtggatttcctttttttctgtgaaagaaaaagaaa

SEQ ID NO: 18624 - DNA, 561 bp, Glycine max
  Intron number 2 from transcript Glyma08g02780.2 (locus Gly ma08g02780) derived from phytozome v7.0 (chr-ID Gm08; pos 1908538 to 1909098)
agatcgagaggagccatactgttattaatcttgttcacgtgtgaataattttgattaggttaaactattcatttggtctctataattgtctccattttaagttttagttcctacataatgcataagttttggtccttgttgctaacgtcacagaagagtttctggcgatataaactgctaccaaatttttttggcagtgataaaccgttactaaaaaaactgtgtggggactaaaacttataattttctcatatagagacaaactttaaaaagaacaactatagggagcaaatgaatagtttaaccttttgattgtattaggtagtgttagtgctaagaggggaaagtcaattagtgttgcttgttttaagttttgttttcatttttctaagtatgctcttatacatagttcgtagtcagggattcagagtttaagtcatttggcaagatgcatgaatgagatagatacttttgtgggtgatcatagtatcattgttcttttaactgtgaaattattttgttgcagtcttgggtggggaaaacaccggagtaccctcatcc

SEQ ID NO: 18625 - DNA, 895 bp, Glycine max
  Intron number 2 from transcript Glyma10g36040.2 (locus Gly ma10g36040) derived from phytozome v7.0 (chr-ID Gm10; pos 44223971 to 44224865 reverse strand)
ttcttcaaaaggtactctgctagtattcctcctttttttctctcaattaaaacaatgctattaattctgtactcttgcttctgtatgtgatcacagtagaagatattcaaaattggtgcttttggtgcttataaagttaatttagattgtcaaaagtgattgggcagactgtgagaatgaatgcaattttttctgcaataagttatattataattttactttatatgatactgttatatgaatatctgagtctagtagcaattgattctttgtccatgaactcatgtactcatgtgatcaattgctgaagttgcttagggatttgtttgttatattcagataatggttttgttatatagtgagttgagtcaagagcttatataatgcacttgtgtgaaactcacctagtttttcaatttacttcaaaatacataaattaacctatttccacggttctccctctttggaatttctctcaattttcatacttcctttcaccatataccaaagtctacaaattcaacagaattgatttctgaaaaaagcttctgatttgtttttttggattgctctgcaatctctcttctatggaataatttctttggtgtttttggcatccaagtaaagcaatctattccttgataagaaaaatataaagcgcgaatggtgattggattgatgataaaatagaatcctgggtcttgaacagtgattcgattgatgataaagaaagagaatagattgggtttgccccaaaggatccccacaaccttgataagaataatataatgatttattttctttttctaatgcatttctgtgtataatggattaactaatttggttggagaatttatgaatagtttctaagtcatttcttggcttttttctcagc

SEQ ID NO: 18626 - DNA, 585 bp, Glycine max
  Intron number 1 from transcript Glyma10g36040.2 (locus Gly ma10g36040) derived from phytozome v7.0 (chr-ID Gm10; pos 44224883 to 44225467 reverse strand)
catcacttgccacgcttggagccccgatcaatccagtaattactttctcctattttttttttctgtttggattccgagaaaattgttactgtttccagagagaatagaataggcctttcgattcttcttttttcttttacgaattttaggaaatttgattcgacggtggtttcaatttttttatttcttccgttccttgatggattgtggaagttgctcgcttttgtagatgcgattttgattggatctaattttttgtttccttctatgcgttttaagtttttcacttgtaatcgagcgaagctgtggcgaagttggcaatctctatgtgttattgctttgaattatgaatcgtttggattcctaaaattcggaaaattgttgatgctggtgtgtttaatcgtctattaaagatttgtaacttgtttgattgttttgataatcagtttgagtaatttcgtttctgttttgaatctgatttgaatttcgtctaggaaatattgtaatatatttatctccttctgtagtggttgctttatgtccaaacaataatgaagtgcacatctataggttggttgaagacaa

SEQ ID NO: 18627 - DNA, 508 bp, Glycine max
  Intron number 3 from transcript Glyma09g26590.1 (locus Gly ma09g26590) derived from phytozome v7.0 (chr-ID Gm09; pos 33093597 to 33094104 reverse strand)
tgaggaagctagagaaagggtttatagagagagaggtagtgattatgaggatgttaggtttccttttgtgatttttgttttgttggaaaatcaatgctctgatactactgttgggtaatcaacgttcccacaaataaaattacctacagccacaaagaacacacacaaagattacactgtaagaaaaataataacaagcacaagaatttaacatgattcaacacctctttcctacatccacggaatcggctcaaaaagtatttcactatcacaaaaatgattacaagattataattcaccctaaatagtgtatcactctacaaacctgagaaccccactcaatggttacaagaaatgataacactctaacacaaagacacttttctctaaacaaagtgactttgtttcacaatctctcttctcacacacattctctcttcatgtgttttgtttctccactaatttttttctctatttatagtgaagattgccaccaactataataaat

SEQ ID NO: 18628 - DNA, 953 bp, Glycine max
  Intron number 2 from transcript Glyma12g05930.1 (locus Gly ma12g05930) derived from phytozome v7.0 (chr-ID Gm12; pos 4012570 to 4013522 reverse strand)
tgctggattgttttcaaacattaacattgatactggtatgtctaatttcttttcttttccttttttggtattttttttttaatttcactttttccctctttccattaaaaaaatgtcacctttttaattttcagggagattttattgtttccatcccgattttcttgtattttcttctttttaaacccctacgcgcacacgcaaaggaaaaaaaaaatcttctcggaaaaataacaacattaattcttgcctgttcaggtagcataaacataaaatatcttcaaatttgttagtattctagagaaattttgctgttagaggagcaactggtggataaaaaaggacaagaaaaaaaatatcaggatttgatttttctaaattgatggattttcgttatagagcacactaaggaattatagctattaaagaatccatcgttaaaaatgtaaaaaaaaaaagtgcatgcaagtgtataataaactgtcattttttttgtatgtaagaacataatgaatctccatatttctctaactcattttatctactggttttctattaataattataacttcttattttattctctagagtgaattacttaaaaggagttaaatcctactacaacaatatggctatggtcttttgtagaatttggtgggaatccttatcatatgaagaggttggttggttgaactaaacatgggaacagtttttttttttttaatcagacaaatgttaattgttagcgaggatcgaattcgcgatagaacccgtaatcttttcccttccattctttctttatcacccaaccaaccttatatctctccactaaacaacacgggaacagtgatcgatatttcctggtttagacttcatatttatgcgaatcttcatttttcttactgcatgaataggttgtcataatgacgctatgcaagcttgattggcaggct

SEQ ID NO: 18629 - DNA, 695 bp, Glycine max
  Intron number 1 from transcript Glyma06g14240.1 (locus Gly ma06g14240) derived from phytozome v7.0 (chr-ID Gm06; pos 11223466 to 11224160)
gtaaaaaaaaaataaggataaaaattattaaaatgaatgactttctggggagtcatggagtaatagagatcttttaaaattaaaaaaaaaactaaaaaatcatacctaaacaattcgaatgaataagggtttccttaaataattaatattatttttaattttaaaataaacgcataaataaaaaaacaatattttcttacaaaagtatatccgtgtatttgaatagtaaaaagatcatgttattttttatttattttaaatgacatgtatcttttttatcagaagtaagaaataatgctactcttcaagctgaataggatcaataggatcactgtgtgctggatgataaagactatgccaatctaaaaaaagtaaaacattttaaaaaaaataaattgattgactaggaaagattgccgcggaccaatagttttaaatttttttaaacagaaaataatgataacggtcatattcttccggaaatcgattattcagaattttgaatttgattggctattccactcccctatatattttgtgttatgttcatcatcgttgtttcttgactctccgtttaaccctaagcggattgttgtgacttgtgaaagagaagaagaaattacgatgaaaacacccaccaccaaagtggtgaatctgaagacgaaaaagtccctttcgaaacgtccacgactaca

SEQ ID NO: 18630 - DNA, 535 bp, Glycine max
  Intron number 2 from transcript Glyma11g01100.1 (locus Gly ma11g01100) derived from phytozome v7.0 (chr-ID Gm11; pos 610068 to 610602)
gtcttgcttcccacagagaacacagagctattcaggtaaaagcttagttactaatgatttaattgtctctgtgggatctatgcataactcaatatgatgcaattctgtagggatttgaaccccccaaaagccaaaactcaaggatttggatgcctgtaatctgactgtgtaacttccctacattgttactttgttaggatccaaccctttttgattgatcctaaaaatatttttctcttgtattggttttatcggttacacgtgtctttcaatgccgaattatcaattccgaagtcaactatggatggccagttaaagttttgcactttgaattttcttccactgaataattgattattgtcctatttaaataaatgtccattggttcatcctattgacatagattgtttattattttaattaacattgtggtaccttattttaactaaataatattgatataatctctgatgggttgttcatctatttttccaactctttattattttttcgaagataagaagatcttcatacc

SEQ ID NO: 18631 - DNA, 753 bp, Glycine max; identical to SEQ ID NO: 17314
  Intron number 1 from transcript Glyma08g02850.2 (locus Gly ma08g02850) derived from phytozome v7.0 (chr-ID Gm08; pos 1952017 to 1952769)

SEQ ID NO: 18632 - DNA, 596 bp, Glycine max
  Intron number 1 from transcript Glyma10g42050.2 (locus Gly ma10g42050) derived from phytozome v7.0 (chr-ID Gm10; pos 49065191 to 49065786)
aatcaagcccaacctcacctcacctcacctcacaggtactactccttctaccacttccttcttcttcttcttcttcttcttttcagatctctgctcggaaccgatttccttttatcctttttcaatatttctattttctaatccattttagaaaacataaaccaaacgcttttctttttctagatctaactcaatttgttgatctctcaaataaaactattttcatttacttagaaattttattatgtgaataattctatggttttagttagatctgtaggtgaggtgtgtagctatgataggagctaggtggttgagatttgagaaactctaggcgtgattataattaattttcgttgttaagttttttgaatttgattagatctcagccttgagctgttcaaatagttaatagttatattcatgtacgtttaccatctcgttgaatataataataaatttgctctgacacgcttgatttgtttactccttttggtttttgaattttcgtttgatggctgcctggttctaatttgtggcttctgctatatattataacaggttttagttgttaattaaatatatagatagaaatc

SEQ ID NO: 18633 - DNA, 412 bp, Glycine max
  Intron number 1 from transcript Glyma06g44080.1 (locus Gly ma06g44080) derived from phytozome v7.0 (chr-ID Gm06; pos 47060974 to 47061385)
tttgaggaggaaaagaaacctcccaggaaacccaggcatgcttgtttctttcatagtagattctctattttctcttcatcaatatcgcttatatataagctttattattatatataggtatcactactagaaaaattaaattaataatgaaacaatttatatatatgtaagttttagaaaaattaatatcactcaattttttgtgaattagtattagtaatgaaaaagaaattttgttgtcacaaatttttgtcataaattctttgattttttttgtagtgtatattcaaagctaaaatgctttctcatcaagagaaaagaaaaaaaaagttatacaaaagatttaatatgtgaatcttttttccctatctgcacagatcctgaagcagaagtcatagccttatcaccaaag

SEQ ID NO: 18634 - DNA, 768 bp, Glycine max
  Intron number 1 from transcript Glyma14g02790.1 (locus Gly ma14g02790) derived from phytozome v7.0 (chr-ID Gm14; pos 1780058 to 1780825)
caatttccaaggcccactcctcttaccctcaacaggtcaaccaacctctttttcattcctcatgttcatattcataaataaatagtactatatcatcaccctctttgggttatttatttcctacttgatcaacttacagtacctgatttctttcgtatttgattggattatgttgttcagttgggaggattccttttttttttatagggttatattttcaaaattattctctatttcaagttatcgagtttaatttccatggaggataaaaaaaaatcatattgttaatcaatcagaaatcatctttgatataatttttaagacagtgactatggtagcatatctccggggttcaagatatagccctgcaaggtttctttggttatgaaattcaaagttgatccaataattttctgtcactcttgtattggtgttcgtgaactgggttctagtcacaaatcttcaaaagacattttttattcgttatggttggtgatttcttatagtatatatctgtacacagacaatgattattatttatcagcttatataatatgtaactcgaacagtttgtttcgctttctatgaattatttgccaattctaggacaaatattctgtgaactgtcaaccgtgcttcctctattaagcaatcatatcagcctctttagtctttatgcatgttcttttatggtgactattaaatttcagtttctttgatgccaaatgtttgttccaggtacacatttctttggcaggagacaagcac

SEQ ID NO: 18635 - DNA, 223 bp, Glycine max
  Intron number 2 from transcript Glyma10g38450.1 (locus Gly ma10g38450) derived from phytozome v7.0 (chr-ID Gm10; pos 46249561 to 46249783 reverse strand)
tgaagaaagagaagtttcttcagaagcaagctcaggtgactagggttcctgattttcctgtacaattgcaacatttgatttgatttgatttgattttgctgtgtttttttattgttcctatgtggtctttgtcaatttgatattgtgaataatgtttagaatctccacttattttttctttcttccttttggtgctggcagcaacaagcacagcaatcatcca

SEQ ID NO: 18636 - DNA, 800 bp, Glycine max
  Intron number 2 from transcript Glyma09g41590.1 (locus Gly ma09g41590) derived from phytozome v7.0 (chr-ID Gm09; pos 46266078 to 46266877)
tgctgcacattgctacaagaaaacttccacatcaggtgctctccaacttcttcccccgatttcctgtactagttttggttttttggtttaattactgatttgatccatgtacctacacaatctttacattttagtccctacatctgcagtttttaatctgttttaatcctgtctgtctaaaattgtaagcacaaaatggaacaaaaagtgtatgtacagggactaaaaagagtcacttttaattatatggactaaaacatagtcaataactttgaaccatttgattaagatcggacagctcatattttctcttggtaaattggacgcaaggctttaaattgcggttgcagttttgtcacgctccttgtggctgatgcagccacagttgcagtcgtgtagactcttgatgttgctgccaaaattacggtggctggccatttcttaaaactttgattggacctaaaacaggcatttgagatttgagttatcctatcttcatctaataattgcgatgtgtgtgcatcccttctaattatttaagattggatgacttgttttatatcggaaaattggacctatagcgcacaatttgagatttgagctgttcggttttcgtccaatggttacaatgtgttgactgcttgaatgcgtagaaaagatggctgcactcaatcaggttccgttggtgttttggcattcccagggaagtggatatgcattctagtagcttagctaacttttgtggcttctgttttgttgttgaaggagctatttcctgcttaaataaagctgtgactatc

SEQ ID NO: 18637 - DNA, 870 bp, Glycine max
  Intron number 2 from transcript Glyma08g22900.2 (locus Gly ma08g22900) derived from phytozome v7.0 (chr-ID Gm08; pos 17399534 to 17400403)
tgtgttctctgcagttcgatcatcgctcgtaactagttactgacttactgtgccgttgtttccttttataaattactataatttaactacgtatgttttagttgtagtgtatttttatttttatattattaatatattagttctagtattttagtgtattttatatctatgccgttgtttcattctttctattattactactatgccgttcttattattattatttgactgcaatttttttagtgttctgattttgtgtatttttataaggatgaatccgtttttcgtttgattttgcatatagatgtcttttcttttttggcgcagagtgagtactgagtgtattatagtttttcctgctgttgtttttattgtttaattgctgtaatttttatttgtcgtgttttgaagttgtgtattttataaggatgaatccgttttgcaaatagatgtccttttcgtttttggcgcacagtgagtactgagtgtattatactttttcctgttatttgtcaagttgatgcatgtatgctatgttaggcttatgcattggttcatatgcatttgaccttttgcatcatgtggtggtagttatatatgttaatagaaatatgttgtgcagtattgcttaagccaaagacggtaagtgctgattatggtgtggttgcttatatattttctaggtgatttggcagttttggtctttagcttttagatgttgatgttgtaaatagaactgttaatgaatttaagagaagccaactcctgaatggtcaagtctactgaaatcacgtattaaaaaaaagtctgctgaaattttattaagctatactcttcggtgtgtttttaacagggtgaagttggttgcat

SEQ ID NO: 18638 - DNA, 879 bp, Glycine max
  Intron number 1 from transcript Glyma13g24620.1 (locus Gly ma13g24620) derived from phytozome v7.0 (chr-ID Gm13; pos 27976546 to 27977424)
tcacccctgctcgtgctcgattcatacttcatagagtaagtgttttatttttctactagtttgaaaacgattaagctgattctctattttgttgattttttttcctgttgagtgaagctgggggttttgcaatttcgaattgtttcatataaatatagcatttgtctctgatagtgatagcaatgcaacttaatgtgattatgcgttgcacaagagaagagagttcatcctaattatatattataacgtacactgaatgaacatgtgattctttataactttggttctctttttgaattgtatatctgctgctacggcaaagatcctattccttatgaatatgttaacttttgggcccggcttctgctaccagatgctttgctcttcaattctgcagaaattcagattggtctattaaattaaaggggtaatgggtttgttggaacataggcttggcttgagttagatttgtgtttaagtgatattgggtcaaaatttgtagtgggctcactgagggaagaataagttcttgttgattttaattctttactttattttttttcattttttttttggttttcattcttacttttatgatattgcgggttttagttaggttctttattttcttctttgtattgtaagccttcagatagatggcataaaatgtatccattaattttttgcccctttatgaatatccaaaatgagagaatctaaaactgaaatgaaaaaatgctggacctagctactgtgctttcaaatcttagccagctggtcttaatcttctttctgcaagtgcttttcttctttgtgtttgttgaatatttcagtactcacaaaggttgtaacatgatatgcagctttcttttcactcca

SEQ ID NO: 18639 - DNA, 708 bp, Glycine max
  Intron number 1 from transcript Glyma12g32190.1 (locus Gly ma12g32190) derived from phytozome v7.0 (chr-ID Gm12; pos 35743263 to 35743970 reverse strand)
tctccaatctgttctctctctctctccacggcctcgtatttctattctctctccatagcttccttgctttaatcgcaattttactccttttttttaatttttttttaatcggcccatcattcggttggatctgatttgatattaaaatcttatctttttgctgattgtcgcttgcccaattcgtaattatctgttgctgtttcctgtttttaatgttttcactctttgtctgaagtttcgatttgagtgctttctttgcccctttatcgttgaatgaatggttgtgatccgggattgtgtaattctcaattctaactctgaaagtttattttttggtgataacattcgactgggtcttttttttttttacctagttaatttgtcgttgggtgtgggtagaaagggttagtttttatgttgttgttaaaatgaaaaaaaaaaacagtttcctaggatgcatcatgataggtttcattaaaattggtagtttgggtgattaaaaatgaagcaaggtactattgggaaggtaaaattagtgattagtgagtagtacctgctaccacgtatctattttagtgaagttgtatggtataaatgatcaaagtattgttttgtcctttgtttttgagcatgtctcttttgacgatcttagaaatggtgtgcttggtattaggatatacgctctatcggggcagttgctggtcttgc

SEQ ID NO: 18640 - DNA, 782 bp, Glycine max
  Intron number 3 from transcript Glyma08g01500.1 (locus Gly ma08g01500) derived from phytozome v7.0 (chr-ID Gm08; pos 955082 to 955863 reverse strand)
ggatctggatataaggtggtagatgcattctcttaatttggatgttattgttttagatcattagcgactgtagttagactgtcatcttttgtttagtttctgttattcctgtagtaagttatataattatttcttaaacaccggatcgcggtttgtcagctagtaactgctgctactaatgtatggtagacattattagtctataacttgcactgttttcaagtttctggccttgaatcatgaataatttgtttggagaattgtctgtagcagaagtttactttgaaaatcttaaatttgattcttaataacattcatgacttaaatgtatgatagatacaacattatattgttttcctcatttttctaaattgatgagctggattttgagttgcatcttttgagaccatgttcaaattattttgcaatggttattatattcattggtaaaaggctaaaatctacactcttcaatttatgtgaacatgtggttctgtactccttgttggtattttattttctcttgttttgttgtcggactattaattttcagacataataattgcaatgttgctctttttttttttacatattttattccgttatccactattaattactgtttaaaagggtaaagtaagcattacttgtaaaacttatggatgcatttattgtcatttatttatcaacaattcaacattagtaatgcaacttatccctcactataaatatgttttcatgttgcagtgttacattgagccattgaaaggatacaaattctt

SEQ ID NO: 18641 - DNA, 577 bp, Glycine max
  Intron number 1 from transcript Glyma08g01500.1 (locus Gly ma08g01500) derived from phytozome v7.0 (chr-ID Gm08; pos 956339 to 956915 reverse strand)
agccaccggatcctgcaattcctctctctattagggtaactactaactaatctaccaacttattttcttattattacctttcttttttcataattttttacttcttctctgtctaaataattgtaatctttaactattattattattattattattattattgtttatgttaacgatttgttgtgggaacggggtgtggaggtggatgagtttttagtcaaaatcaatgcattttttgtgtctagattcatttctattattctttttgtgtcctttccctttgtgtttcccaaccaaggctcaaagattatggcttgcttaactatgtttcttctttcgcttttctgtttataagaaggaatttgatcttcaatttggtcggggaatactttctgaccaggtcacactaattgctcgcggctgattgattgggtggttgaggtgtttgtgttttccagagttgaatctgtttaatcattattgttcagatgtgtctcttgattgtatcatatccaatgaagctgtttcttttttatgatttacgagagttttttgtgtttcaggtggtgcagcagtg

SEQ ID NO: 18642 - DNA, 256 bp, Glycine max
  Intron number 2 from transcript Glyma12g07960.1 (locus Gly ma12g07960) derived from phytozome v7.0 (chr-ID Gm12; pos 5619844 to 5620099 reverse strand)
cacttctgctctttggttctggtggagctctcaaggtattgtattgtgtttaaactttgaaggtgcaatgtttaataatcggttttcatttttattctgttctctgtgttttccacccttttagttttatgattgacatgtagaaattcattgctttgtttttcttttcttgcatgtaccggtactcttcctttgataaaatcataaggcagaaaagagaaaatttgagagaaaaggagaataaattgttataaac

SEQ ID NO: 18643 - DNA, 480 bp, Glycine max
  Intron number 3 from transcript Glyma06g08850.2 (locus Gly ma06g08850) derived from phytozome v7.0 (chr-ID Gm06; pos 6462732 to 6463211)
gctggtggactgtcaacaggcattttctacttgttcagctattggctatttgatcttttatttattttgtggtctagtgtcccacttgttatgttatgtctgaaatgaaacatgataattttgtttgaacttttgatacgaatctattatgtccgtaaactgctaatgtgatttgcaaagtgattgacatttagtcacttaaaaaatgttaaaacgtgaagaagattgtaatgctgaaaggatttagttgtttctagagccacgatgagacaggaaaagaagagagggagagagagtgatattcacatttagaaggttaatgttttgttttaagaccggctttttaggatcctgtttgataatcagtttgtgaagtgcatttgttattaaaaaaataatcactcttgtttgtgatatgatgtttatgtcctcattcattttcctcatataaatattggatctcaggttggatagagtggg

SEQ ID NO: 18644 - DNA, 520 bp, Glycine max
  Intron number 1 from transcript Glyma05g37350.1 (locus Gly ma05g37350) derived from phytozome v7.0 (chr-ID Gm05; pos 40963864 to 40964383)
cgccgctccagggtatgtgtataattagcattcccttcatctttctttctacgttttaatgcataagtttatcgcttttcctatgttaagacttacccgcatttagctaatcaacttattaaacaagtactaatcatataaacacttgtatataagctgcttttataatcaaaagaaaatatgattaaactatttttgtataagtcgtttagagaatttattgtagttaacaagttatagtgtaccatagattattttcaagtgtcatgtcagaagataagttcaaataaattgtaaataagcttttttttaatcgtgttttttaagcccatagctaaggatcaaagaaatgataaaatggcaatatttataaatgcaaaatcagattaaagaaacggggtaggaggagtatataaaatttttggatgatattttgtcggttgagtatataaaatgctatttatggttgttgatgacatgttgattttatttgattgcagaagctagggttagtagatag

SEQ ID NO: 18645 - DNA, 540 bp, Glycine max
  Intron number 3 from transcript Glyma11g12550.1 (locus Gly ma11g12550) derived from phytozome v7.0 (chr-ID Gm11; pos 8946307 to 8946846)
ctttgcaggtaattagtgcttgttcagcaatgtttttggtgtgcttcttatattatcctcttttgctatgtcagttcatcggtcgagttaacttcatgccttttaggcctgtttttgcgatgtctgactttgcttttactgccttaatgcacttgcagttgagtcatttgaaaattgagattgtttaacagacataagcatttgtatctgatggatatcgggacctctcagactagcagatgggacatacataatataactatgatacaagtacaactgaataacctttgatctgtgtccgacgttttactttctgtcctaaaattattttgttcacttgtgtattgttttttatggatagctagctgtcaagaaaaggatacaattaatgtccagttcttcatttaagtttggtcccccccttgagcacttgtaatttgctaatcagcattacataccctttttttcacaaattatagaccatcattcttaatatttacatgccaatcctgcaggccccagattacctttacgacaaac

SEQ ID NO: 18646 - DNA, 427 bp, Glycine max
  Intron number 2 from transcript Glyma09g33530.4 (locus Gly ma09g33530) derived from phytozome v7.0 (chr-ID Gm09; pos 39983018 to 39983444)
aaaaatttatttcattgcggagaaagttgaagaaggtagtactgtatgttttttgatgttcttcacaaccatgcccccttgcaatgttgatttaagaaatagactcttctattgctgaataaaagttggaaaaggtgaagaagcctttaaaatatagaactattgttttatacctttttatggctcaaaatgtataaaacaaaacctaatccatattttattttatagaaatggtgcagatacattatcctgcaagttcttgctaaactaataataagatagtattattattcttattgttaattaattactttttttagatagcacaaaccaagtacatcaaaaattactttaatctttaggaacttgcttggttctagagcttcttcctcagttttgtttgatcaggagtaagcattgcagattg

SEQ ID NO: 18647 - DNA, 705 bp, Glycine max
  Intron number 2 from transcript Glyma11g29830.1 (locus Gly ma11g29830) derived from phytozome v7.0 (chr-ID Gm11; pos 30720696 to 30721400)
tacaactgcttcgttcaatcagatactcaaattcggtgattactctgaagcatctctttcttccctgtttgaatgccattttctactcattcagtttctggaataactttattacatgcagaatccactttataaagggggattaccccatttgatttcttcacagttatcactttcattaattatctttctcttatccaattcatatatttcatctcattgatcaaaaacttcttgggggacttctccactcaatattaacattcatgtactcactttcatcatttattttttacttgtgggtatgtgtatcatagttttaaattgcagatgcggtcgcagttgcggtaaattagaaaacctttacattacggaaaaaatgtgagtggtgcagtcgcaattatgaatgtgatacgattgcgaagtgtcaaaatacctggtggatcgctatttaaaaccatgatgtgtatattcaataacagttggatatataaattctactatctctcatctcttgcttatatatatatatatatatatatatatatatatatatatatatatatatatatatatatatatatatatttgcctctaaatgcatattttgttcaacaattgaagatcactttgagatatgatggaatgtattctgtgtttaattgtgcagcgccttaaagcctcagtgttactcgagctgtcaga

SEQ ID NO: 18648 - DNA, 835 bp, Glycine max
  Intron number 4 from transcript Glyma09g38430.1 (locus Gly ma09g38430) derived from phytozome v7.0 (chr-ID Gm09; pos 43798398 to 43799232)
aatcaaagagaaattgaaagaagctgatcaatgtattgtactgttgttgttactgcatgaactttttcgcttttagatgatttggtgtttctgtgtcattaattgtagagaagaatagattgctagtgggggataatacgttacttggaactgttatggccataaaccggtgaatactttttgtctcagttgtggcctctggcttaggttgaatatgaatatttttaattgcaatttttgtccttggttgtgagtatgcactttacttgtggaattcagcaaatgtttggtaggcgtgttttgttttaggaattgaatggatccttgtgtataataggtatttaggtccctgtccctagataacttctcttttaaagtcaaatgatttaattgtaaattcttttagtatgaaaactgtagaacaaatttcaacttcattagatttaaaactaattgatattttattttattcttaactcaaaattgatatgagacttggtatcaaaacttcttatgcttgatttgattatcttttatcattccaatagtctggtaaatcaagtgaaaaagagtcaaattattgaagtatttgaatatctgatgcgaatgaagtcatggttggtgctaattttttaaatttggagcatctcttaaatggtaaaaaacctgatccttgttattttttcctgcttttgtaaaatagaacattatgggttcatttgatccatgtagctgaactcacggagtgggaaaaggtttggttgttgaggtttttaactttgtctaaattgaatttgcagatcttgaaggcaagtcagatctcaagattcgagct

SEQ ID NO: 18649 - DNA, 293 bp, Glycine max
  Intron number 2 from transcript Glyma07g33560.1 (locus Gly ma07g33560) derived from phytozome v7.0 (chr-ID Gm07; pos 38479379 to 38479671 reverse strand)
aaaaaggtataggtttgatatgatatgatgtgttcgagtttgtgagcctcatttttgctgttgttgtagtgggtctctctactttcggttttttctcttgtcttattggatgtgcttttattgcatggcgttgaattttgttttcatttgttggttcctcattaattttcttctcactgggtcctccattattgtatggtgatgtacgattgattttctcagactcatggccctccccttaacccttcttcttcgcagttctctttcaatattggcatcctctctgtctttgg

SEQ ID NO: 18650 - DNA, 685 bp, Glycine max
  Intron number 1 from transcript Glyma13g03420.1 (locus Gly ma13g03420) derived from phytozome v7.0 (chr-ID Gm13; pos 3409140 to 3409824)
ccagctagttctgcagttggcctttttggtcaaaggtatttgatcttttttttttgttaattgaagactatttttttattaattgtttttttggttttcagtgattttttggaatgtttgaggcatttttagctcaatggctgaaatgggtagctcatgttttgggattttttattttatttttcatttggggaattgggtaacatgaatgattaagcttttttgttttcttttgccagctactgttttattatcatgggtcagtaaatgtgctgcagaatgttgtgtagttgttgggttttaaatttcaatagtgtggaggaagaaaagggtcctaatgaggtacaaagaattgtgtaggatttagcccttgatgatggagctgaaagatcaaagatttcttcttttaattttatgagctttgggtttatgagcaaagctggaggagaatgttaagcaaagtttctcttttttttttccccacttttttattttgatttttatttttgaatcagtgaggttgttaaaggggaagtgtgttttctgggtttgtgctgtctgaatgggcaagtaggttggagcatcttggttcatgcttttcttcatcgtaatgttgatattttgaactggattttagggtgggttttgaatcaggttctgaacattttgggtactttgtctgcag

SEQ ID NO: 18651 - DNA, 979 bp, Glycine max
  Intron number 2 from transcript Glyma13g03420.1 (locus Gly ma13g03420) derived from phytozome v7.0 (chr-ID Gm13; pos 3409980 to 3410958)
aacaggtatgataaacaatcttgaatagtagcaaaatgggatacctaatctatgacttttttagcatttggtttcatcttaaaatatttggattcattttagtatctcacaagtgagaagatttgaattataatttgactccttttttgtgtggtgaaaacataagattccttacttgttagtggataaagttaattgatcacttactggcaagctaagattgttttcactggttgtgcttttccttctcttctgatttctgtgctccggtgtcatagtgtgagatgaatatacatataagaattgtgcttataatcacaaaatacgaacatttgctacatatgcttggttttgaatcttgtgtcatcggtataactttttgaaattcagtgactgaaaagactgaaaaagtcgtgtagaattgacaggttttttgaataaaaccaggttcctcaactaaattattcatcctagggcctagccctagactctttaaggctcgagctacttgtccctccttttggtctgttccccatgtgaaaaaaatagttagatttctgtttctgtttaggcataaattatttgaataaacgactagtagacatagctcatttttatataggcatgcatacataattgaaattaagttcacattttttacagcccgtatttattagcagttctgaaaatgaatccattaaggtcaatgttgagtgtatccaggattgtaatttaacaacttctctgccagttattggtctaagtcaaccatgaatatcatatcttttatgccttctcctggaaataaatttgtgatcctggtaatttaagcatgtaatgtccatgtatctgcatttcacaatctgaatgaagtttaccatcaattttcatccgttcttttctgacaagtctagtatttttgtgtctttgaaacttgaaaataggaggcattgaaggaatctcctagtagaagtaacca

SEQ ID NO: 18652 - DNA, 402 bp, Glycine max
  Intron number 2 from transcript Glyma06g06170.1 (locus Gly ma06g06170) derived from phytozome v7.0 (chr-ID Gm06; pos 4422467 to 4422868 reverse strand)
gcggaacatccaggactatcaagcagcctaaaactgtaagaccctgtttgattactactaaaaaaaattattttttcattcaaaaatttgtaagtagtgatttttttttttcctaatcaagtattttataatccaaaatacagaaacaattgggagatgttttctcatcctcttctgatttcttttaagtgccttagttaggagatgactgattgtagttatattttagaaaatagaaaactgttatttaaaacagtaaacaaacaaggccgaagtttttctctcctttttttatattggtaaaattacatgatacattccctaccaagttgaatctttatatattttagttccctttgtgcccaaataattcgtttttggttttccaggttatttatccgt

SEQ ID NO: 18653 - DNA, 396 bp, Glycine max
  Intron number 2 from transcript Glyma13g00670.1 (locus Gly ma13g00670) derived from phytozome v7.0 (chr-ID Gm13; pos 422165 to 422560)
cttcaacatcatctcaggacacaaatttagtactggtgattattgtgatatcaatttctgaatttgtaaaatcgctcaagttttctgcatataaattattggattagtctcatgaatttttacacatgaacacttgttggaattttactttcttctgcatttatttccttttgtttttgcctctttcctgctgcagtgggttctgtgtactgatcccacgattgtgatgacttttttcttttactattttcagtaagtttgagtccaagatttgactgtagacactcacttaacctttttgtttttttcctcctccagattaattttctgattttgaatgcatgatttttttttctgtattaaacttcaaactttcaggaagattttccccatatc

SEQ ID NO: 18654 - DNA, 977 bp, Glycine max
  Intron number 1 from transcript Glyma10g36640.1 (locus Gly ma10g36640) derived from phytozome v7.0 (chr-ID Gm10; pos 44761266 to 44762242)
gcgaatttcagttttgattctccgccaccgttttggtactataaactcgctccttcttcttcgatctacgatttaccgttttgttccccgaacgagtgagcgaaaaccgacacttcgaaatctcgctttgcgttgttcaatttgagtgtgatttcactgtgttcagggctcggtgtttctgattttcttttctcgtgcatttgcaagtaactcagaagctttgttttattttttttttcttcctatttttgtttttgcaatttaatttgttttctcggagtttaaattgtgtttgagaaattgctccctaacatgtgtattcggagtgattgcattgaaacagagatcttacttactttttttttctctctcggtgttgaataaacagaaattgattatcaatgtgtgtcatatgcatgttcattaggttggtaataaaatatacatgacggtttatataagatggttgggagtattgatacagtgagttatgtttctatctcgagcttctttgttttttctttttttttttctgtacaactagtttgatgattttagcaaaaaaaacgtaattcaattattttctggcaattttagctgcgtgggttttatttttttatttttaatttgaacagcagattcaccacgttttgagcatcttgtgacttgatgaggaaggtttaaagtggttttagttctgtgagtttgtccttgtcctaagtcctaactcttaaggtttttgaaatctgtgtttttgatatgaaatgtgcttttcttatcttatcagcattgagtttgctcaaccgagcatattttatcttttcatagatgaaaggaataagtgcaatggaaagtattgttaaaaatgttaaagaagatatgagatgaaaaatttgaagctacggaatatcattctgatctctgattacttttggtttaaaggctgttgttactttggttcttccgagagaagggag

SEQ ID NO: 18655 - DNA, 822 bp, Glycine max; identical to SEQ ID NO: 17358
  Intron number 2 from transcript Glyma05g37620.1 (locus Gly ma05g37620) derived from phytozome v7.0 (chr-ID Gm05; pos 41179189 to 41180010)

SEQ ID NO: 18656 - DNA, 861 bp, Glycine max
  Intron number 2 from transcript Glyma07g18030.1 (locus Gly ma07g18030) derived from phytozome v7.0 (chr-ID Gm07; pos 17803070 to 17803930 reverse strand)
agtaattttggactttaacttttgattgctgatggggtgtgcgtgatttagctgtacgagtttatagatcttgaaaattctaattaattgaattaaagttttgttgagcatttggttttgtatttaatctgatgttagagaaaattcttctagtccagatggaagcagtcacaatagtgatgtgaaacgccatttacattgcaaaatgattagtgaatctttaatatgattaaattgcatggtcgccatttgaggttacttctgaagctgaaaagtgtttttttcccccttgaatttttgtcaatgacattttcttgtcgcacatgtagctccaacttcctccctttatgttcctgttcttttcttattaatgattcgcgagaaatgattcataattaattcgcttctcaaatgttttctctgataatcacactctccttgcaatcaatggagcttttcagtttcccatttttaatggcgagcttgagtattgtgctgaatgttttctccaaaggaaacaagctattaagttaacatcaagctttacttttcatatatcctcttccaaaattgatgtcatattcgcagaaaagagaatctatgatcaccttaatcttaatgaaaacctttagtgtaggtatcagaaatgaattcaatatttttttccactgatttgaaaacccttcatgctgaaaagaaccaaattgcattgcataacacatacataagcaatagatccatgccgtatgtcttttacctcattcctagtttgcatctatattacattaccatttttgtccaccatagttacatactttattgacatgaagatttctgttatcaggcttcttgcaccaccag

SEQ ID NO: 18657 - DNA, 575 bp, Glycine max
  Intron number 1 from transcript Glyma09g09350.1 (locus Gly ma09g09350) derived from phytozome v7.0 (chr-ID Gm09; pos 9154865 to 9155439)
agaaggttagaattgaagtgttaattgatttcttgtttattataatatgcttaaggaaaaagaaaatttggacttttggaatgtgaggtgcatctttttaattgtttcttccattttactgtccataatttctacttcctcatgtccaaaattcatgatgtttaaggttaaaattaagtagcatttgatatgggtataacatttatatattttgtctaaagacctttatttaatagaagaggtaaatgtggtttgttgtatgttgaaatgtcttttagataggttgcaagtgtagaaattttcttaaagatcaaatgtaattattttaaataaaggcacatgcggaaaaaaaaataattaatgagacttaaaatttgtaaaatatcagtagttttggagcggaggtagtagtatggttagtccatttattagaatcatcaaatgcattttgattggatttttttagtgttattttgtataaagataccacatatctttttgttgataagggttatctatcaactgtggctttcttataaatgagtctgattttttattgtgcatgaaggagccaa

SEQ ID NO: 18658 - DNA, 839 bp, Glycine max
  Intron number 3 from transcript Glyma11g11130.2 (locus Gly ma11g11130) derived from phytozome v7.0 (chr-ID Gm11; pos 7923318 to 7924156)
gagccctatattcaccaggtattaagtgtactcttttgtttcccacaagcaaatatattgaagataaaattatgaacatacttgatacaacagttgaaaaaggatgacaattggcatgcttcattcatttttagtagccaaaactgaccttattaaattgaagctagagtattttatttgctaatttcaaacaacaatatttagcacttgattggcatagatgaagtaccctttacaagtgtgtaaaacttaatgtcaatttctcactaccttcactattgagtgtcataattttcctcgtataatacagtctccttatttgtaattttgttggccttggaagaattgacttagcatagggatgacactactttgtgacaaaatgtaaataagaacaatgggagttatgaacttgtgaactttcaatcacttgtacaaaaaattgtttctcccacattaaaaagttgctctatctcttgaaaaggaaaaaaaggaaactatcgtgtaagacgagttttaaggtcaaaatgtgcttaacctttctcttagatatctcttgcactatctttactaggactgtatagctctaccattttcttgcttgttctatgctgtgggttcttctatgtgatttggggcatgttatgtatgagcatttttatacattgtgacactacaaaatgttttctttgacagttttattttataatgatcaactttgaagtaatctctttaatatttgatgatggtggctatcaatgactcatacctagattgttgcatgaaaattatgacctgattttacttttgtgtattttcctgaaattaggtgctaacat

SEQ ID NO: 18659 - DNA, 838 bp, Glycine max
  Intron number 1 from transcript Glyma08g12340.1 (locus Gly ma08g12340) derived from phytozome v7.0 (chr-ID Gm08; pos 9021490 to 9022327)
ccgtaagattttatattaacctagcatcgttcaaaacttgtttccattaattattatatcacctcttttcttgagattcttcatttcactccatgcatatagcatatttatagttcaagactaaaaatagagcacacatcactcacaacggtgtaaaatttagtataattcagataaaaacatttttagaatattaattaagtcaagatttttatttaaatttatttaattaaaaagatctagctttagatgatccaaaaaactttttagatttaacggactgacctatttaatgaaatattattgttattattattattattattaaatttgttataatttattaaaatcatgcaatttttttttaaatatcaaacatgatattgtagtaagttttgctaaaacttgaaaaaatttaatatcatggttaaaaaaattgtgattgtgaaccccactttaaaattataccgtttgtgatattatatatgattacttctatacacattttttcatatacgcatctcaacaatacgctataaaagtaaagaaacaaccttttgatgtctcaaatttgtgttaaaaaatattccttttatttttaattaagtgataaaatgagttgtgttattcactgtagccatgccggctacatatatgattttctaactcttagacttaaaaatcatttttaaaaaaaaatataattttttcaaaaaaaaaatgcttactttttcaataacatgcgagtagtaaaatagtttcattttacaacattaacgagatatatatttttgttttgttagaaagccattgggctttcagtgtcacgggggccata

SEQ ID NO: 18660 - DNA, 690 bp, Glycine max
  Intron number 1 from transcript Glyma06g41630.1 (locus Gly ma06g41630) derived from phytozome v7.0 (chr-ID Gm06; pos 44923215 to 44923904 reverse strand)
gagcaaacaagtgctcttccataggtacattatcagtgtctctctctttcacacacacacacacacaaagtcacaaacataaaaacacatgcatgcatatcagaaacacataaagaggtaccacagggtgaatgaggcttatattatcaatatatcaaagcacgcatgtattttactatgctttgaacttttcatgatttgcaatagctatttgtctgcattcaatgttttatgattaatcattaatggcgcttctattaaaattgagtcaattgtttttcaatttcggctgctcaaatatagtattcatttagaagaagcactagacttaaatatctatgaagagtttcttttgttggaaatggaatttttgtaatatgtattttgtgcaatataagtgtagtaagaatactgttaggtaaacttgatatcatcgacttgtgttttctttctaaaagtagataggtttgcacttcgctaatatcaaattctaatttctaaactcacaaatataaggtaatgatacattctgtaacccttctttcaattgaaacaggttcatgactctttaacatatagatattagaattccagtaagtttgattatttgtgtatgtatatgaccttttaatttaccaaaaaataatgcttgcaggttgtctgggaaaaaaattgaggccaaagattttg

SEQ ID NO: 18661 - DNA, 848 bp, Glycine max
  Intron number 2 from transcript Glyma11g00440.1 (locus Gly ma11g00440) derived from phytozome v7.0 (chr-ID Gm11; pos 116386 to 117233 reverse strand)
gcaccttgaacaagctctctacggtatgtatccatgcatgcgcctcttctgcctaacaagaggtttgacttgacattcttagattcatgctaattgccaacgtttcttctactggcccctataaaaccctagggactaaaattattatggcttcatgccaaatcctcacaattccttccttctcccatttcaaagacacaatgcttgatattaaaaaaaggttttgttggttgtggagcaagtaacagatttgtggagattagcattttgtcctctccaaatcaacatatttgggctcgactttctcactgctaacatcacacactaaaaccaatatccagaagtagaacttagcacaacccgtcattaactgccactcccttctactatcacccctgaaacacaagaaaaaattatatcaatgcccattagcattttctaccaaacgacaaccgaatcctccaatgaccaaactcatcaatactctgttctccctcagccatcagtcgtgacccgtttatctgtcattgtctgctgaatccatccttgaaaccggtatcaaacacattacccaaaatcaacttctcccattttttgaaaatgttgggtgcattggcaaatatgattagtaagatggatggattatatgtcaagggagtttggtaaatctcggggttggcagctttaggttatgatcgctgaacatttctgatccaatatggctatcttctatgacaatttgacatgatataatttaccagttacatgaagtgaaatgaaatttgctcatctattattatgactttcttatttgttggtcgtcctgttgaagctgagggagtacgttg

SEQ ID NO: 18662 - DNA, 610 bp, Glycine max
  Intron number 1 from transcript Glyma09g09310.1 (locus Gly ma09g09310) derived from phytozome v7.0 (chr-ID Gm09; pos 9012320 to 9012929 reverse strand)
agagcaagatcattgacctcaataacattgatcaggtctggttcaattacttcctcaattattgcttttcattcttttttaatgtggttttggaatgggcttttacaaattgggagttttcaaacttgggttttgtcccaattcatgggaagagttcaatgagaagcatgaaccgaattctcctaaatcgtctggcacaaaagaaaactgaaaattagatggtcacttcagggtcctataatgtaattaggttctatatccattttgatttgcaatttttgtgcaaagtgtgttttcacaaatcgggagttttcaaacttgggctttgtctcaattcacgtgaagagagttcaatgagaagcaagaatcaaattttccaaaatcttcttacacaaaagaaaacttaaaattcggtggtcctacactcctacaatgtaattgggttctatattcattttgatttgcaattttttgcgcaaagtttctgtgtgtttctttacctccttttgcttataaattatgattcaaatcaatacaaccgatcagttttctcatcctccattttttcatagcagataaagagggaaatatcgaccttgaagctcctaaa

SEQ ID NO: 18663 - DNA, 682 bp, Glycine max
  Intron number 2 from transcript Glyma09g25330.1 (locus Gly ma09g25330) derived from phytozome v7.0 (chr-ID Gm09; pos 31470611 to 31471292 reverse strand)
ttatagcaccagcattttctcctcttaatttgaaggttcacctctctctcgctctctctatctatctatctatctatctctctctctctctctctctctctctctctctatatatatatatatatatatatatatatatatatatatatatctatatatatatgtatactactaacctagagaacataattaatcatgctaattaagtcctagtttcaacttgcaatcgttgcatgacttcaattttcaacaatcaatttagaccattgtggcatcctacgaaaattgtcgacacggcatcatggtgaggtttgaaatgtttgtatacaattttaaatatttgtccttgatacgatcttcatgttttacattctaaatatagaaatactacctaattcgttgtttaacttgaagacccctttgccacaaaaaagttaaataataaaagccacttaagtaacagcacattgtaggaacctactacgactagcccacaccaaacaaattccatttgagagttcatcacaaaatttccttctttcattcaattaaaaattcaaaggacaaatttgttttgtgatgttatcatgagtgtcaccaattgacaagaaaaaatattaaaattatgtttttattcttctaacacttacgtatgattttattgtgtaacatgatataggca

SEQ ID NO: 18664 - DNA, 528 bp, Glycine max
  Intron number 2 from transcript Glyma13g28400.2 (locus Gly ma13g28400) derived from phytozome v7.0 (chr-ID Gm13; pos 31431612 to 31432139 reverse strand)
ttttgaagctcaacagatcagagtttcaattggaggttagcgaaccaaagcaaattgagcaacacatgttaatcttgcctttatttccttctcctttttgagttttttcactgtgaatcatagcatttactgattggcttgaatcatttactccttggttgaaatcatttctattttccaagcaaaacttattgttgtttctgttggcttaataaaggaattgtcatattaaaaagtgtgtagtgtgtgttctttctttttgttggataagccataagtgtgtgttttaaaagatatcaatatttctctcagaaaaaaaaaggctatcaatacgtagtagtactttgttcgtctccatgtgttgtaaagcccacacaatttgatcttatgaagctgacattgcatatatggcattacttgggggatggttatgttgtgaaccattttaagcatttctttaccattcagggattggaattttgtgatgttttgagtcttcataccaacatctgtagggagtcacaatca

SEQ ID NO: 18665 - DNA, 680 bp, Glycine max
  Intron number 1 from transcript Glyma13g28400.2 (locus Gly ma13g28400) derived from phytozome v7.0 (chr-ID Gm13; pos 31432266 to 31432945 reverse strand)
tatcatcctttacagcaccaaagctgtgtgtgttggtatcttcctccttcattttttttcttttatctgtttccttgtttatcttcttttttttgctttatcaataagtcaaaatcatccgctttaacatgattaattaaacggtaaaattaaacgcaaagataagaataaaatagtttttattttattttatttccattctcgtcctttctggaagaccaaacagcaacaagtacactagtaacgacgttattcaaccaaaaaaatggaataaaatagcattggtctttaaactcagatcatgaatcaccccaattttactactatactctttcattcagcttatatttattttccataaattaattaattctctgtctcttcatccttctatgcactacgaaaccaatgaacacgtaaattaaattgcttctcatttttactttctaacaagccagtaaggtacttctagttctagttctagttctagttctacctccttataatttttttacgtgcctttcacttcctccacacaatacatgaattctctcctttgcatgcttttcatgactcttactttactattttcatcaaacctctttctgaatctttgtcattctctgttacgtatttgaacataagagaattctggtgggttgcacttggagtggagacaa

SEQ ID NO: 18666 - DNA, 790 bp, Glycine max
  Intron number 1 from transcript Glyma10g11720.2 (locus Gly ma10g11720) derived from phytozome v7.0 (chr-ID Gm10; pos 12054626 to 12055415)
atttctccagttttcagttcaaaatagtttccaaggtctttctcctttttttttactataatgcatgatgtaaaaagaagggtttttttttttttttgatttttttgttgttacgagtcatgtattaaaacttttgtagacttcttatcatcagtttagtcatgaggtcacacaattataaccagagtaatgttgaaaagatcaatttctacatcattattaatggtaagaattcaaaacaaaaattttaatacaataaaaacttaaaacaacaaaagaatttattagaaactcaaaataaaattcggtctatgatgaaccttgaacatatttaaactttgttttatattattagaatagaagtgaccgttctgaaaaggaaatttgtataatcttttcctattccaaattgaaatgatacttgtttcttattaatgacaaagatagttttaaaaaaaattataaatttaagataaatttattactataaactaaattaatcactttctttaagatcaattgggtaattttaggaatgaagtgagtatttctcaatagaacaataaagaaaatcggaaaacagtttgtttcctctaacaggcattttgtattattatagactaaattgcatatcataagttcacaacccattagatcatgtgacagtcactttacatgctaattctgttggaagcatcaatgacgatactgttcaaagtcgttagcatctgcatctgctctcattttttttaggattgaatacaaaaatacgatttttactattttcagg

SEQ ID NO: 18667 - DNA, 966 bp, Glycine max
  Intron number 1 from transcript Glyma06g44420.1 (locus Gly ma06g44420) derived from phytozome v7.0 (chr-ID Gm06; pos 47332585 to 47333550 reverse strand)
ttttcaaccaccttctacttcttctccaacaacaagtatgcataaattccaaaatgcaatattcttaatttatgacttttttttaagagtttaatctgtgaatttaattagaatgaactcccaatctaaagattgtttatacaattgtgtccaattagttgattctttattaattgattgagaaaaaagacttgtatggacaacacatatatggtaaaatagtcgcactaataaattactcaatatttccatattcttatttataagattcagtttaatttttattacaagatttaatatattgtttattgtattaattatttttaaactaaaaataatccgaactaaaaaagagaaggtatgaataaacaatagaagagagaggaggagtattaatgataaatataattttgaaaaaagttataaatttaagaaaatttattagtattaattaaattaatcactttttttctttcttaatcttaatcttaaaagaatggatcttataatacaggtaaaagggagtaaagtgttttaaacatactttatatataaattaaagtctaatttaataagattttgtaaatcttattagaatttgtattttctaaaattcattttagtgaatttcgaagctaaatttatgatacattcctataagttcttaaacggttgcacattaagtattggtcgtccttagtgattgtgatgattaattaatttaaccgaattttatgattctctgagtcagaagcgagatttttgccttcaaaaaaaaacaaaatgagatttttgcgttttgaagataaggatatatccgcagctaaattttgtgtaaatatattcggattttggaggtttattactcttatttgttgctctgtttgtttgatttcatttaatgttattttgaagcgtagtatatatagattgatgcgtttactttggtttgatgtttagaagctg

SEQ ID NO: 18668 - DNA, 687 bp, Glycine max
  Intron number 1 from transcript Glyma07g02920.2 (locus Gly ma07g02920) derived from phytozome v7.0 (chr-ID Gm07; pos 1991451 to 1992137 reverse strand)
ttccactcccaacgccgccgatctcttccgctctggtattctccaattttaccctttcctttcataattcaccgcgcctatgcatgccataacttctctctcccccccccccccccccccttttatcttctactaataattcgaatcaccattatttaaagcttagattttgggtgttgctgttttcttttatcttctgctcttgttaaagtttatgtttttttcctactttgtgcgctgcctatgcatgacataagtttatgtttgttaaagattatagatgtatccttttgggaattcggtgggattcggggattgtggtagttggtaaggactagtgagataggagaggcatagaaattcttacttaagggtttagatcttaagaagaaagaagaacatatcttccctgtaattatcgagtcaatttagctcttcatcaaacaaagactttaagtatggactacgcaggctcaatgaaaacctctttaatttaaagattgggacacccgaatcaaacactcccgtgctggctcgttgatgccatccgtgtgtgtgtttttttaaacataattggactgtatttagcaaacacttttgtagtaggcaattagttgttcaatactctaatcgtacaagcataatttttcagcttcaagtaaggcaagctcgaaggaatcagaacga

SEQ ID NO: 18669 - DNA, 485 bp, Glycine max
  Intron number 1 from transcript Glyma06g07620.1 (locus Gly ma06g07620) derived from phytozome v7.0 (chr-ID Gm06; pos 5573417 to 5573901)
aggtattggactgttgctaacagtgatcggaactttttattctgataaattgaaaggatcggaagcttcgagtatgttttgagctattctgattatttagggtttgtttgtttctgttttgatttttgaaagctgcttttaaaattactataacttttagtaaatagtatatggatagacaaaatttacaatgtcatctaatcacaaaccaccattggatacactgtgtatactaagtctattgccttttacgatagctaatttaaaagttatatgaaagataatttctgattggttgatggtgcatagaaataaactctattttcttcttcacttgtactttctaaaaatcagtttttaaaaatgactttataaaatagtttttaaaaactaaaaaacaaaaatgcctgttgcaacctttctccacatttgccttgtgtttattacttgtttaatgcagtgctgatttttcgtataggttcatc

SEQ ID NO: 18670 - DNA, 297 bp, Glycine max
  Intron number 2 from transcript Glyma06g07620.1 (locus Gly ma06g07620) derived from phytozome v7.0 (chr-ID Gm06; pos 5573971 to 5574267)
aactggttggtgagatggataagatgttagaatatgaagctggctccttttttatgataacatgccttcatacctcattttccccttttgtaatcttctttgattgttactgttgtgcttctcctgcccaatctgttaattattaacagaaattggataattgtttcttttgctttatttctaattgctatcctttgcaacatttacatctatgttctgtgtagatttatttggctttgctattgaattttcttcttatattttttatttattttttgtctaaagaatcagcggaag

SEQ ID NO: 18671 - DNA, 1039 bp, Glycine max
  Intron number 2 from transcript Glyma06g14970.1 (locus Gly ma06g14970) derived from phytozome v7.0 (chr-ID Gm06; pos 11742169 to 11743207 reverse strand)
agttcactgcatttcattttcggtaacttaaacttccccctttggatcgttgcaagtttatactattctttttgctttctaattttgccacccatttgtattttgtgtctttcatttcttcctttgctaacctattagttttttgttctattagtttcttgtgtgatttcattcgtgcttattagaattgaaggtttttaaccctcctctctctctcttgcatcttttgttagaacttcgaagttgctccattgtacctgctggtactccttgtgctgtattgtgcttgtgatctaggctatgtactcacctagggtgttttatttgggtggaggttttggaatgaaaattacgttatacttgcttgttttgacataagcatgagaaggtggaaattaatatgtgtttcatttttgctcttggttaacaatcattttcctccaactgaactgctcgtggctttagtaaaactagaagtgttagttggagattgcatttgttaaatgttacaattttttatttgcctttatgtttggaatttagtttcctagatactgttcgtgggaatgtgatgggatctgttggattgttggtgtcccttctttttctaaataaaatattgcctctttggaagtatcatttgttgtcttattcgctaggcattactaagttaaggattttgttttctttactgctttttctaaatcaatccagctgccaagtaatgtgaatcagatgtaagttgcctcataaaaaaatgtacttattgatttatttttttggaagtgcctaaacattagtcatctcttagcattttgtggtttttaattacctattttcagttctattcatcgagaaggtaaatttatctcctctaaaatgtggtgtctgatgatggtttgggttatttccatgatatatgcaaatttgagctttcatgtttacattttaatgtactgtctgagatttacaagtttttgaaatttgtgctttttgatatgcagctacaactttgaccagctggcatctgcttgtcaca

SEQ ID NO: 18672 - DNA, 897 bp, Glycine max
  Intron number 1 from transcript Glyma13g21820.1 (locus Gly ma13g21820) derived from phytozome v7.0 (chr-ID Gm13; pos 25344336 to 25345232)
tctgcttgtagcatcacagacagatagtcaagattgtaagttcaattatactttttttttttaatgttttgcttactttggtgtttgatctatatttaccatatattctttcacatctcatgaaaataaggaatgttttccaatttttttggggttgctcttgaatatggtgaggttcagctttgtaactttgtattttggagtacttcacttctatgcaacagtacatcataaccaaacattaaaaatagagaaattaaatttgcacaacaaggctgtacaacttttttacaaccgtgagagaaacgtttaataagacggatgatgtaacggagaaacagaaaaaaaaagtgttgaaagaatttattgtaggaatagtacaattcaagaaaatatagatatgcggttgaaattaggttatgctatgccttctatcttcaagatgccaagactgaattttgattgctattaaaaatgacagttaatctgttcatatcattgactaatgtgcaaactgcaaaactgttgttcttatattggaagctcctttgcttgctgctaataatgcttaccttatctattaaaattaaaaacaggttgtacaaaaaataaaagaaaaacatgatgagcatcatatcttaactattgtagcagcttttccttcatagtgaattgactacaaatgttgctttctatagttttcacttttcatagtaatttgtggttttagactatagagacaagtgcaatcactaagacaggagatagattaatgaacactaagaagttatgtagttttgctaattgagaattcaatttctttttgacattatttttatgtaactaaattgtatggctgcagattctggcctaaattctcttacggaatcctggagt

SEQ ID NO: 18673 - DNA, 474 bp, Glycine max
  Intron number 1 from transcript Glyma11g07530.3 (locus Gly ma11g07530) derived from phytozome v7.0 (chr-ID Gm11; pos 5279335 to 5279808)
caacctgaaaaaaaaaaaaaaaagtaatcaccatttttcagatatgctattttttaagttcccgaggtttctttttacttgatgctgtgtttgtcaatttcggtctttattcttcaataactacgtctaattgaatcatttttttcatgtgactatatacctcgtacacatagattcataggtcttttggaatcaatacttttaagaaactgaggttgattcttcttattgtttttttgattgcaatgaatcaaacgtataaggttgacttggtggttggaaagaggtcttaagggtggagggagaaggggaaagatgtcctgggtttggattctccaatagtccaattgacatttctaaccaaattaacaaactaacgtttggtgtcaaaaaaaaaagagtcctaatgattttgattgatagtgtcttattttgtgtgtgtgatattttttatgcttatgtagataagtcaac

SEQ ID NO: 18674 - DNA, 654 bp, Glycine max
  Intron number 1 from transcript Glyma06g36070.1 (locus Gly ma06g36070) derived from phytozome v7.0 (chr-ID Gm06; pos 38080510 to 38081163 reverse strand)
aaaagatctcaggtcaatctttgcttctttcattaatcttttttgtttttttcatattgtttgtttctcttgttatgttactgaggagataaaatctaatgcatgtgtaaattccattaaaaatgaagtatttctttatcgcatcaattccacatttcccctgccacctagtagttcttctcctttatatgcaaaacatagtttgtgatgacaaaagatgcctgtcttcatagtttgtgatgagaaagaatgtctttctttgtttttcactctgaagaaaggtggaaatttgtgttttctcatctgtagtttttctcaaacagttttttgtaatcatggcatgcaagtgaaaaccgtagcagtatcctgtgtgaacatgaaactggttttgcatgtaaagttgtaatctgagatggaaaggaattatcgatataaaagacctattgctgactacttattactaattgtttgatttttctcacaccaacactatactcctgaacaaagaacattcttatggcatgctgtaaaatgggaaatcattcatattgctgaaaattatcaaagctagatttgttatcgaaaataacttgacaaattcatctatctatgcttacaggaatcacttcatccagttcaagttactgaagggct

SEQ ID NO: 18675 - DNA, 485 bp, Glycine max
  Intron number 2 from transcript Glyma07g37710.1 (locus Gly ma07g37710) derived from phytozome v7.0 (chr-ID Gm07; pos 42687066 to 42687550 reverse strand)
aacttggtttcttttgcaacatgtttggagtctaagaagttaaatttgtcatccagaaccaatcaagaatcagaatgggaaaccaattagtacaaatatttctatcttcaagttcttgtttttctctccttatattttatatatattcaacattcttaatttgtatagtcttccaaagggaattttagaaacagaaaaatatgatcacgttccaatattattctcacatatatatagatccatttggtatccaacaaagagtatgatcttataacaagttttccagaaaaaccatatgtctacgggaatggtctttttacaaactatcaatctaattgttccttttgagtttactaagatttctatccgcataaaaacttttccttcatttgtaaattaaattctcttgttctagatttgcgtactttatgttgatttgtgattaatcatgtaggattctttcttggatggaaagtgagatttct

SEQ ID NO: 18676 - DNA, 882 bp, Glycine max
  Intron number 6 from transcript Glyma08g04810.1 (locus Gly ma08g04810) derived from phytozome v7.0 (chr-ID Gm08; pos 3416836 to 3417717 reverse strand)
aggtatgttttgcagtgatattcaatatagctccagttatagtgttgaagtttgctatgtctaatgatttgtcattttcttttggcctaagcactattacttatcatgatagtcatgtaacatgtgaagatccaactttggaggcaagtggtttactatgatagtgtttgttgtgtggatagaatggaatacagtgtccttttctgttctttgttctactctttttagtggaatcaaaatgcactatttttcaaactcatgccctattattatgttatatttttgaaaatggagatgcaccaagcaatatctaacatgtttactaaacactgcctatatgttgataactgaagtgtgtcatgttggcatctgaaatcaagactctatccctttttcttttagactatgaaatagtccatggttcaccattaaactcaacttattgtatgtaagtgctcccacaagcatattcattccagggctagatattatattcattgactatttatgaatgcattttccatgtactttttatcttgtgtagaccctcattttgtcttccagaatacaagcaccatcactttagtccacagaagatttaacaatcaacttggcccctcaataatttaaaattccatcgtttaggcgcctttttaccatcatttaaatttttaaggaataagtccctagaacatgtgaatcatcaaattgaatgcaaaagcatcgtttctatgctgtagtgcaagaacttgctacagatcttgatctaggtaatgctttatgcactgtagctccaaaaactattttgggaatgacatgttgctattttctgatatattcaatctgtgacactgaagagtgatattttggaagacccagcta

SEQ ID NO: 18677 - DNA, 861 bp, Glycine max
  Intron number 1 from transcript Glyma09g38790.1 (locus Gly ma09g38790) derived from phytozome v7.0 (chr-ID Gm09; pos 44061240 to 44062100 reverse strand)
gctttcacaggcttttagccttttacattcctcaggtaactttaatccttacatgttgtgttgttagtatgttaatgttggataacatttttttttcttctctaactggcattttttttactggttgagattttggtccaagtgcactttctctttaaactctcttttcagtggataggtgacatcttttatgatgtattctgacaatttacgattctagaccatacaaaagagatggttattcatggattcaaagactttggttctaataaaaaaaaaaaaaaaagacactcactgtatatttttatgaataaagttgcactttggaactatcttctttctaaatcacctgacatgtgtagacactggaggtgtggttgcagaagattaaagagacctagactttgttttttaatataagctacaatatccttacaatccatcagataccagtcatttcttctagttaatctgaatatcggattagtgaagcaacttgaaccagcgtaactatagtagtagatagagttaactttcagcaacattttaagtccagtgcattatcatattttgaaaccaaaggtgcatgttgtggtcacagtttctgaactcacatttgtaggttaatttccctggtcaaagaaaagggggaactttcagttataatattttctaataattttcaacaagattagtaaattgtcacttcattgctgcattcctattgcatgtcccatttttcaatccaactgtattttatggtaagcatattccatctcttgtcatgaaggttgtagtaatattatactctaatatactcttgcagggtagccagctctattgggttaccaatagttcatt

SEQ ID NO: 18678 - DNA, 789 bp, Glycine max
  Intron number 3 from transcript Glyma06g07770.1 (locus Gly ma06g07770) derived from phytozome v7.0 (chr-ID Gm06; pos 5697215 to 5698003 reverse strand)
ggtcaccatcttcatctcaggcgtttcctaagtaagtttaacatttttagtatttctattatatgttcttttcttggttgtaggattttagtagcaagtgtttgttgttttcttgctaatattttctgtaatgtgggtaaactaactggcgagataatttgaattaatatgttctctcgttacattgtctattgttattatgcttggttggattattaattgcataatttttgttcaaaggaattgatgattctaatttgtaacaaggccggttggtttatttgtaaaagtgtgattaaaaacctttctctttttttgttttcattgaattgttatagaagtgcaactcaaatttgcagaatttgtaacaaccattgtgccaatattaatatcaacttattaactttgttgtgattgcattttgcatcaatgcataagttcacaacatctgctttactgaattaattaacttattcacttaatttaacttgtgaacttctattgcatgtttggttacagttagacctgttaaacagtctggccgtttcataccttgttttgttggcctagcctggtcaggagaatttggtgagtcaaacaggctggtttaaaatgcatgtagaaaggcaggttgccccacccaacccattttcctttgttgggctgtcttggtccaacaaaagggatgggagttgaaatgccaggtctatgctgcaaacagtggctatcatggtccaaattttgttttgaacttttttcatggcttttaaatctataggaagcaagtgg

SEQ ID NO: 18679 - DNA, 683 bp, Glycine max
  Intron number 2 from transcript Glyma06g06730.1 (locus Gly ma06g06730) derived from phytozome v7.0 (chr-ID Gm06; pos 4810764 to 4811446 reverse strand)
gatcttcctgtcataagtaagtctggatcttgtatggatatatgcgaccttcggtagttcatctttaccttttcttcattttgactctcattaatgattaatgatataattatcgattattgactctcaagttaaggaatttagatatcaaataatgagttttcaaatgttcttttcttaaatgttcaagtgtagtatgtttatgtattccttctagactcatataagtaaaaataactactttctcactgatttagaaagttagttgaaatcatttaattttactaatctcaagtaacaaataaggtttttcctaaaatgtccctcattgaaacttgatatcatgcataaaatagagtcctagaaaatagagttgcagttaaatgaagggtgttttaggaatgatatcattaaataggggtgaaattagttagatttgcttgtatttgagtccaagatacaaaacaacttttttgcttatatatgagtccagagggagtataacaatagtccactcctacaattgaatttgtttaagtttcataattggttttgataaatatgaaaatgtgatacgcaaataaacttatttgcgaaggctggtttgagttatttatgtgtttcaatgattgtttggtgaacctttgatgttataaaatgtttgatttcagtgttatctgcaa

SEQ ID NO: 18680 - DNA, 375 bp, Glycine max
  Intron number 3 from transcript Glyma08g11680.2 (locus Gly ma08g11680) derived from phytozome v7.0 (chr-ID Gm08; pos 8520406 to 8520780 reverse strand)
gagctaaaataccgtctgtatcttgtaccagttgcatttttgtgatttttcatttattttgagcaaccttaacataaatgttcattttttttctccgtttttctattcatgcaaaacattcaaacatgttccattatgctttacagtaattaatatactgtaaaccatttttttcaggtgttgtcatacttatagcatgtttggttcagattatttcctggaagtaatctttttttttttttgtcaaaatctctctctagaagttggcaaatataggctattatttcttcaaaataagctgaaccaaacacacattaaacaataaatgaatttcagtttttctcacaaattcttgaatacaatgcctacagtttc

SEQ ID NO: 18681 - DNA, 907 bp, Glycine max
  Intron number 1 from transcript Glyma11g33700.2 (locus Gly ma11g33700) derived from phytozome v7.0 (chr-ID Gm11; pos 35536928 to 35537834 reverse strand)
agcttccgtcaccacacccaacaggctcggcgactgtaacatcttatattctctcacctttttacgcttctttttttgtttgttcgattgatattaaaaattactatcacataaacagataaatgatgtgcatgaatgtattagagaaatgttggcatgtgtgaagatggaggaacacaaattaggatgtatctagacttcaactatgtccacgtgcattctcaattttcactccttctgtcactttctttatcagaaactataatggatgtttggactgtgaaaatgttttctgttgtcatgtttttacataaaataacataaataaaatttctcaataagcacttataggagaagaaaataacaaggtaaaatgaattaatttttcttataagttataattagcttatgcacaagttaaaatcagcttttttttagaatctaaaggagatagtttctataaattagcttgtgcttaagttaattttaacttgtgagagaagcttagtttattttactttcttattttcttctattataatttataagtacttattgagaaatttacccaaacaacctttctcgatctcaactgatgtgtgtgtgtaattgtagtacaagagattcggcgatttcccttgttttgagagtagggattgactttttccatattttgttgtttcaattccatgatgtaggtattaggtaatgccaacagagtctttatcctggcattatagagagctaattatgcatgtactttgtatttaagaaaacaaaatatgattttggttgatttatttgagctttaaactcagggtagtactagtacctatgattagttagtttgactctttgaattgtcttttcaggccctttttgccaaagggtgttgctgacactggag

SEQ ID NO: 18682 - DNA, 756 bp, Glycine max
  Intron number 1 from transcript Glyma12g09250.1 (locus Gly ma12g09250) derived from phytozome v7.0 (chr-ID Gm12; pos 7072573 to 7073328)
tctcagtcgcttctcgaaccctactttcttccgcggtcgctctctctcttttttctcggtttttttttttttttttttgcttattttaactacttcatgcatttcaattctcgttgttctcttcgttcgcaaagttcctttccattgcgcagtgcatcaatttcgcatttcaaatcgtgtgtgttttcttccatttctcaccttcgcataaatccattctcctctctgttgtccgagccaaactccgattgtttctttttttgttaggatgatgtgcatgaatacttggacgttaattttacttagatttatgaacgcgttagttaatagaactaaaaattgcatttgcagtgcttaacctagggccaaccttaactgattaaggttttattcagttcttttggtagatttgtgttatattgtagcttgatggtagattgtgatataggaaaaatcactctttttataggtagctttaataagtgtaaactgagtggatatatattatgagaggagtggtttattgtgaaaggtgaaaggaacaaacaatgaaatcaggccctatatatgtatagggaagtgcctccttagggtgaggggggctctgcctccatttttttatgcgcttttgttaatattattttcaaattggcctgccttcccttagtatagaatgtagatgtagatactttttctttgattgattattgacaggatatgtttctctattcaggtgattgcatttgaattcctgta

SEQ ID NO: 18683 - DNA, 1042 bp, Glycine max
  Intron number 1 from transcript Glyma11g27720.1 (locus Gly ma11g27720) derived from phytozome v7.0 (chr-ID Gm11; pos 27572188 to 27573229 reverse strand)
gccaaaagggttcgcgtccttgagctttctcgcaggcaatgattctctcttatttgtcttcttatatacacacacgtaccaatatcaaagaaaggaagaaaaaagaatcttgaattggtttcttttttttcaaataccctttacttaacttcgatgttttgtattcaaagtttcttgttttaggcatgttttccctgcccaaaatcttccccagcttaagttttctaagctaaattgctaataatgagaagtgagtgattatggagaatgaaaagtggaaaaatcagcatgatggtgatggtaacagtattttagtgactaatatactgaaatactattattaactagttgtaaaaagttattatattatatacactaaaagaagacaggaaaaaccataaaaagggtggggcttataatttgtttccttttttttaactgtcatgggtggtacttctagggaaaaaattggtggacactaatattttagttaacacttagaaggagaaaaagaaaaaaaaaagagtatgtaataagtaatatgatgtgataaaattaataagtcttggacgaaatatatgtaggtcaaagtgtctacatattatcattcatgttcagctgtctagttcattcaatattttaaaagggaacgacttaaacatacgtaagagttaaaattataattattattgctttaatattggggccagtatccatcttttagatgtaactagtactagtatttaaaggataaacatgtttggactttgacaagttaagtggattctagaataaacaagtggcatgtggggtccaccttgctgtgaaattattggtaactttgtggtagaaaattacaacaaaagaacaaacaagtaacaaaaggggttaatttgtcttgaaattgctaaaggaaattttcaagggtcagcagttaagaaagtgcagtttgagtaaggagttataataatttaccatatattgttttgtgtttgttgatgtcacagattgaagcaccgtggtcctgactggagtgggctcc

SEQ ID NO: 18684 - DNA, 1049 bp, Glycine max
  Intron number 1 from transcript Glyma06g48070.1 (locus Gly ma06g48070) derived from phytozome v7.0 (chr-ID Gm06; pos 50389836 to 50390884 reverse strand)
gctcttcgctccactcccctctccgacccggacaagtatatctatatacactcccgatcttctcttttaattgttgcttactacgttttatttctcgaattcttgttcaaagattcttttttaaaatgattttttttttgtacttgttatgattgatccttttgtgtctactgattcactgctttggacttggagcgagggtttttattttttatttttgccttttttttttgggtgggaagggggatagggtttttgtgttttcttggaatagtcaaagggggtctcacttcaatcattgatttttgttgtatggttggattttcgtgcttgattgcttcgatggttggtttttgtggtctgatctgccgcttgactgtacttgaccggagaacagatcttttgatggtagtaccggtttgatgaaaatgggaaatgtggtggagggtttttggtggatcatgatggatttgattaattccatgctcgtgagtttggtttgatttgcgtgatggatcatgcttgtgtaggttgttgtattgtttgggttcatttggtcgttgattgattctatgcagcgtgatctctgccggaaataagttgatcttgttgttgatgacttcatttaacgtttttcttgccgtggatgactttacgataaattgattttttctgttggaaatgagttggcactacttgccattccagaagagtttttctttactttgcttttttaactgagagttttgtggatttatgtagccagcctcacccagtgggataaggctttgttgttgtttgttgctgtcgtcattaattttgtgtggaagcaccgtattgttgtctttgttgtactttcatgatcttttttaattcatcgtttactactaaactgaaaaaattgacatggatccttcatccttgatgattttattatattctatattttctttgtgattagtaatggctatgatgttctactctcattgtgtgtttttttgctttgattttcagatatcttactgaattgttgggagaacgtaacaagc

SEQ ID NO: 18685 - DNA, 740 bp, Glycine max
  Intron number 2 from transcript Glyma13g11330.1 (locus Gly ma13g11330) derived from phytozome v7.0 (chr-ID Gm13; pos 13827052 to 13827791)
ttaaccagaaattttaccattgcttcatcgttagtgtgaatttctgcttgtgtaatgtatctttcagtgccccttttggtcatttaactttgcttgtggaagtatctttcaattctaacccttttcatgatctaggtagtgattgtaaaaccttctgctaagagagttattggtacatctaacttaaatatatgtaattattgggatattttatgtgcatatatgagacatataaataagttctcttacttgagctaaatatttttcaaatctctcattgacttaaactcagggtcagttcaatttttctcttaattttagggaaccgaattatattcaaaatgcattaaaaatatgttactttattttcactttgttaaattttttattttcatcattttctctaaaacgaaatgaaaataagatgacattttttgtaattatttgtgaaaacaggaataaatttaaaaccaaaattgatttttttagatcaaacaggctgttaaattttcacctccatggataattttgagagaacaccaacacattcatatgttgttttaggtttttatattatttaatatttgttttagaagaagcattgaaaattgtcaccctgtcaatatgatatagttaattttcttcagtttcaaacacaattattctatgtggtttcttaagagcttctggacttgagcagaatgcaggaagctttaatgccacttaactctgatatcagg

SEQ ID NO: 18686 - DNA, 630 bp, Glycine max
  Intron number 2 from transcript Glyma12g22350.2 (locus Gly ma12g22350) derived from phytozome v7.0 (chr-ID Gm12; pos 24333428 to 24334057)
tcgcagaattgtaagctgcaatcttcaccagggtgagtctgccaatttctctgcgtccatgccatgtttataataaatggaattttttttctttcttaaaaagaatagtttgatgattttttttttttttacttttaatgtttttgaagacgtgttaggaaaaagtcctatgaatttctttattattattattattattggatgtgtaaaccatgtagcgaggggttcaattcttacttgttcctgcttaatgagtgctcgagtttgggctctgggtatattaaatgctcagagggagagttttgctgtccctagttgtctgacctgtctcgagcaggattgtctccagtagagaatatcaatgattaatatataaataaattattggatgggtatggtttcatatttttggtgaaatgaagatgtggtatggaagggcgcttcatgtttttatcgttgggatttggaacaatgttgttgccaattatttcatcagatgttgctatcctttatttggttcaacgttgatgcttttgaagaaaatgtaaaacatggtatcctctctttgtttttgactttatttctttggttataggcaggcatattgttcccatcaatacgcaccaaaaa

SEQ ID NO: 18687 - DNA, 531 bp, Glycine max
  Intron number 1 from transcript Glyma10g33730.1 (locus Gly ma10g33730) derived from phytozome v7.0 (chr-ID Gm10; pos 42011325 to 42011855 reverse strand)
ttgtgccatcattctttggctcttttcaaatccaggtgaatgatatagaataacatgcattaaagtacgtacaaatttatttcttgaaacgtatatctgagtttcaaaagttggttcttcttgattgatatgattgcatttttgataatgaagtttttaaagtatatacgttttgttgacaaaataatgttaatttgatatgatatgtaaattctactatatatagatcattgttgaggttgataatctttcccaaccttacaagggagtgtgtgtcttcttctaatataaactttttacaaaaataaaataaaaaagatgaattaaaccttccaatgcgtgaaataagatattattagtcataattgaattatttataaaaaaataaaatgtgtctctagattataattttgtatcattgcttatttgattatattttaagaaaatcaaatgtcgtgtactttatctttctctttgaattatttgactgattagtttttttttcctttctgttttttcttgtaataatag

SEQ ID NO: 18688 - DNA, 567 bp, Glycine max
  Intron number 2 from transcript Glyma12g05390.1 (locus Gly ma12g05390) derived from phytozome v7.0 (chr-ID Gm12; pos 3587151 to 3587717 reverse strand)
cactccaggtggatttttcttttgctatttctagcatatgcttcaatttcttcttatgttgagtctgtttggaaaatctgtgttattctattagagacttggctatcttagtacaaaggttatcatggagaagtttctaccttgtctgacaaagtatcttgtattttttatatatttgatgttgacctcttgctgtagttgaggagcagttaggcaagaagattttttcaggatgtgtatggtgtgttcatatttcttgtgatcaaactagtactagtttgcaaaaagtggaaccataaaaatcatcttgtgtaggctcatcctatattcattagtgcagagttactttaaagtgtacgcttggtttaattgattgagaaacctctaggattgtgctaatatgtttcaaaaacgtctcagtcatttcagttatggatgcactatcaacctacttagaaaactgacctttttttgttttggatatttccatattatgttatcatcaaaggtactaatgataaatgtctttatgatgattttaagcagcttgtaaatttaaggacttca

SEQ ID NO: 18689 - DNA, 998 bp, Glycine max
  Intron number 2 from transcript Glyma10g33870.2 (locus Gly ma10g33870) derived from phytozome v7.0 (chr-ID Gm10; pos 42102704 to 42103701 reverse strand)
ctgtagttggtggaatctctggtgtcttggctcaggtgagaactttgtggttgtgttgtgtatttctgcataactcttgttattatagtcatttctctcagtgtacatttgtaattggaattttttgtaccttccaattgaaaatgttgagcctgaagataataattaaaggataaaaggtctaagagtcagactggaggtaaaaataaaaaagttacagccttttgatttttaattctgatgttgaggggttcaagaagagagatttttgctcccaagaataacatctgcaagattttatgaaaatagtaaagcatatatgatatatggcctttaaatcagttctcagttttgcattattgattgatttgccatagcaagggttttgttgttttgactaatgtttatcttactagatgggttaaccaaaaagggaagtagactgtagtattcagttctatacataacatctgcattcaatcctaatcgattgtcgtgatcctggtctaagttattcaaccggtatgggggggcttgtgtgtgtttgtggtttgcctttgttataatatactgacacagtgacactcgcctcaagcttaaagcttgtcactagtaccaaacccacaaacaaaccaaagagcttagacaactaacaaccttttagaaaggtgtaggaattcacatattgaactagtagagatgctttcacaatttccactgtgtcgcatgctggagagatagaagtacaagaataaaagtatccattagatataaaggatagacaaaggtcaaataaaaagaaagagttatatatgcttagcatgatgataaattgcatttttacaatgatatatttttgggaaaaatccttgttttagccataaagtttaatttaccgctcaaatttaatgatatttttctttcaaaattataatattctgctgtttgctcttgttattacaggttatagccagcccagctgatcttgtcaaggtgag

SEQ ID NO: 18690 - DNA, 432 bp, Glycine max
  Intron number 1 from transcript Glyma06g42890.1 (locus Gly ma06g42890) derived from phytozome v7.0 (chr-ID Gm06; pos 46198305 to 46198736 reverse strand)
ccgctctggcgccgaaatcgaaaccctaaaaaagtgttcgttccctaaaccctcattcaaaaaaatagtaatagtaaatcttcgaatagttgttcgtcgcgtgttgattgtcttacaattataagtttcttctaacgaattggtctgtttattgtctattttatttgaaatctctgatcttaacgtgttctgttgtgattattgtagctggctttgatgatttggtgttaagttgttaggaaaaaaaattgatattgatgaatatttagtttggaaaaaggctttgggaaaagttaataaaattgtttcttatagaatggttatggatgtgtcttatgtgtttgtgtttttttaatcgtttttattcttcttttgttgataagcttttttatttggatggtttgaactgtgattgttcaattgttacagata

SEQ ID NO: 18691 - DNA, 753 bp, Glycine max; identical to SEQ ID NO: 18309
  Intron number 1 from transcript Glyma13g41450.2 (locus Gly ma13g41450) derived from phytozome v7.0 (chr-ID Gm13; pos 41733884 to 41734636)

SEQ ID NO: 18692 - DNA, 933 bp, Glycine max
  Intron number 2 from transcript Glyma13g41820.1 (locus Gly ma13g41820) derived from phytozome v7.0 (chr-ID Gm13; pos 42019764 to 42020696 reverse strand)
ccaatccttgtatcctcatttctggttagtatttacatatatattttttgttatttctttctattttctgttcttattttagctgaattttggattgaaatatgcgtttcttttgcccggttttgtttttagtgcttttcgatttatggggttcgaaagtttaaggtgaaaattttgtggatttcgattgttatcatttctttcctattacaagcttattactttcatggtttattatgaatcttctgcagattctttatgttcaagattagaaactaattttgttcattatttctcaattgatttacaatttcattgaactgtcattttctcttgttgtgttcttatataccctaatctttttttcttttttttttaaatagtttttgggaagatgcatcgcttttacctggctttcagcttttttaaagaccaatcagaagttttgttctatactctatagtgctaaaaaaatggagtattttgcatttggaattttggattgtttctctgaaatatcaaaccctgtaaatacagtttactggtttgctctaggtgaatagaagtgtgcaagtgcaagaacaattgggtaggaaaagtctttttctttctagataaaataaaatgggagactgtattatttcggatcagatattcattttttagttaatgctctggaggcttttaagcttgagtttgcgcaagccttttttagtcatgactttacctctttatgcatatgtttgttggataaatgactttacctctatctctcctaatgaagctactccaacctgactaaatttgagctgattaagaatcctattgtacctctattgaacattatagtatgtgccattgtgcccatctttttattttttttgcagatatccttgtttgcatgatcacatattttccaaggattttaaaacc

SEQ ID NO: 18693 - DNA, 780 bp, Glycine max
  Intron number 3 from transcript Glyma08g23310.3 (locus Gly ma08g23310) derived from phytozome v7.0 (chr-ID Gm08; pos 17788343 to 17789122)
tcttccacaccgcttctccagtcaccgacaaccctgtcagtttcaattctcgatcgttaatttccttctatcattatgatttttctgagccggtgcaagttaataagctactacacattaattgttatttttatttaatttacaaaaacatttgttcaagtttgtttattttattaaatatgttaattgttcaatattaaattaataaatctttacagttttgagtttgattataacaaaatatatctttagaaaataactaaaaatttaagtatgatattagactgcttattagtctatcaaaggaggagtcttagtacgtgtgaaaattgtaaatctttcatactgaatttatttcttatcaataaataaagactgattattagttttataatcaactcaaaataaaaatttataaaaatatttaagattccactaaagatccaatattaccgtggttacaataacttagtaaatttaagaaatattttaaaatataattaaattataaattatttgactaagtgtttacgccttttgtataaaacctatagttaatatatatttttttaaatatattttacttgactaggagtattttccaaccaccaacattttttttatttccttaaaaagtggacaccatcacacgctacatatttctcattgtgacacattttcgtactaatcatttcaccaagaaaaaaaaatacaattgattttgcactaaattggtgacatgaagagcaacaattaatcctttgtggtactcaggaagag

SEQ ID NO: 18694 - DNA, 629 bp, Glycine max
  Intron number 1 from transcript Glyma10g25490.2 (locus Gly ma10g25490) derived from phytozome v7.0 (chr-ID Gm10; pos 33401899 to 33402527)
ttcttatttctctagaaccaccgtcctatacccatgtaagctctagccaatgcttatcatgttttcttataccccatttaaaaaaatttcatcttgggttagttgtgctcttaagtcttaagtattaaattcttatcctttagttaaaaattcacatggatcttttttgtgctagttggtttttttgttgacaatggaaatattttgcttagttggacatccaatttaggtgggtcaagtccaaaattttcaccctttgggtggttgataagaaagttttattgttcctagtaattggtgacaaaattaagattttatgcagtattgcttgccgtggttgttattttttctgttgtagtttgaagcaatgttttcttgtcttgtggagttcaatgttagtgaaattggtgagataaatccttaatcttggtagttgtagttgtactagtcatatgtttacctctgattccgatctttgacgtatgaatcaaatcttatgtatggattttttgctatctcacatttatttggcaatagttagctacttcgctttttatgtggatgatattgttggtacttatatttgttggcatagtgagtgacattatgcctgaattatatatagtaag

SEQ ID NO: 18695 - DNA, 1013 bp, Glycine max
  Intron number 2 from transcript Glyma10g25490.2 (locus Gly ma10g25490) derived from phytozome v7.0 (chr-ID Gm10; pos 33402686 to 33403698)
tgtgagtaccacttgactgatttcatttgctgtgctagagatggccattgacagcttcacaccatgagatgaaaagtggctctagtaacttatcttgatagacttttagtcatggcaccttcaatggtgtaatgtttggttttataattgtgttctcccttgaaatccaagattttgcatgttaaattttgttgtaaacttgtcatatcatatatatacatatttatgaaactgaggagtgtggggattatacggttcacttctttatctcctccttttatacacttatactattaatattggtattagagttgcagcttttgctacaaaaggcaaccagccaaaattctaattactgaccttaaaatctgaagttggtcatatgagctttgcatcaataaatttggttccactgcaccacactcgttctcctccccaatcatttgttttctgtctgaccctacttgagtttgggaattttatgttgtttttgttcaaacaatctcagattatcctcttcttgatgttggatctgattaaagcttgagtttgtgctactatttttccatgaggaaattgcattcctttttgcaatataacacttatcatatgccttgtatgggcttagcctgatgaatctattcaagggaaaaatatattcctcttgcagctgagatataaaatatgtgtacgatataaggtaaataatttgaagagaagttggaagtattcatatcaccattgagaataataagagagtagttatttaggtctcatatgtggaatgcattcaaatttcaatgaggaaagctcttcagtttattcagcaggttacattatagattacgtctcttggttagttttgttgagtcgagtgatttaacatgttattgaattcaatttgattttttttagtatactatcatccttcatggttctactacaattcttatgtaaataaattttatggtttgacagtgtaaaacctcctgatcggatcccttatcctctct

SEQ ID NO: 18696 - DNA, 560 bp, Glycine max
  Intron number 1 from transcript Glyma08g13040.2 (locus Gly ma08g13040) derived from phytozome v7.0 (chr-ID Gm08; pos 9506529 to 9507088 reverse strand)
gctggtacacttattgtctttctgtacattgttttgtatgaaattatatctaactgcaaaatcatgatgcttcacatgctacaatttacatacagtcctataagtatgttttatattattctttaattagagttagagtttcacgacttttattaatcttttatgtagacttttattatacatattattaatacgaaactccaattctaacgaaaaaaaaacatttgtttaaagaattgtgtctaaatttgttcatatctattttaatttgagtttaacggggatatattaattggataaattttatattgttatttaatcataaataattattatattatttttaagataattttataaaaattaataaattataaataatgatttatgattggatgatagtgtaattatatatagttatttttctcatttattttactattaacacgtaaattgatggaacaaacctgaaatattagtgttaaagatgtaagattaattaagatttctttgctctaattccagtcgcaagtcgaattttgggggcagctttcacatcc

SEQ ID NO: 18697 - DNA, 627 bp, Glycine max
  Intron number 1 from transcript Glyma10g36580.1 (locus Gly ma10g36580) derived from phytozome v7.0 (chr-ID Gm10; pos 44689545 to 44690171)
gaaaaaaccatttgactttttacgtgttttatgtaagtattgccattccagttgaagattctgtacatgtatggatagaaaaactgcaatcctttggtgtttaaatattggcctagtctgtcttatgatgacattatgcatatgttgcattgtctatgctacattttgagcagataatgagatcagtgacatataatgttgttattagaagttgaaaaatcttgaaattgtaatttctgttttaaagacttgtttttttcccttttgtatataccattttgaattcatgatcatgacaacttctgtgggaagttttgtcttcttagttggatattcgaatgttttgtttcattttttaagagaaaaaaaaattgatgatcatgacaacttctgtggcaagtgttgtcttcttagttggatattcgaatgttttgtttcattttttaagagaaaaatggccaacaatgtttctatttgtatggatagttacctttcatgatgttgggtctggaattggaactcaaaccggctataagttgcatcttatcacatatgtctattgtcttgtactattaatatattgttgtgggacatacttatgagttatgaatattgatctaattgcag

SEQ ID NO: 18698 - DNA, 1030 bp, Glycine max
  Intron number 2 from transcript Glyma10g36580.1 (locus Gly ma10g36580) derived from phytozome v7.0 (chr-ID Gm10; pos 44690220 to 44691249)
tataccccattgataccatcaaaactcgactacaggtgaaaaccttttattctaatccgtctgtttatgtttgtctggtgagggtgggagggaaggaggaactaggaagccaatcagaaataatcaaatttatggtttgttatacaagaggcaacatgtattgttggtctgaaaatgcagtctgtattgtagtgtggcttccaaatgttagttcatgtcaaaggtcggattctgtaaatgtcataattgtcacttaatatgtgtcattcaaattatactcatgcatgagatatagactttgttcaacattcattttatcctgtttggtgtgaactattttgctaatggagaagtgcaatgaactttcttaacttgtaatatttcatcttcctagggataaaattgatagaattgttgaaaattatggtgttttcagtataggaggaggaaaggaaataaaagaatgaaacactaaattaatattaattgagatgtactacagtgtgattatatttgatatgttcataaaaccaagagtattgatccttatttatactgatcataatcctaacttagggaaacaaatcatgatatggaaaaatggtaactgatcttatgagataatgaggaaataaagaaactaatcctagaggataagctaagatatgataagatatttttatatattcttacaaaaatattagtcttgtaatatttttccatttccccttcaccatttcttgttagcatctgtttgttgtataagctaccaaatggcattttactttgatcaatgcatgaaaatcttccttttgcaacaagtaccttggccatgttatttttctccagttgcagtgcttagattgtgaaacagactggcttgtagttattgatgtttggatggaatctattgtcaagttttgatttgcttctctaatatctaccttttcattacattataatttgattgtatatcgtattccatcctatatcaggttgctcgcgacggagggaaaattgttttgaaggg

SEQ ID NO: 18699 - DNA, 833 bp, Glycine max
  Intron number 3 from transcript Glyma06g03790.2 (locus Gly ma06g03790) derived from phytozome v7.0 (chr-ID Gm06; pos 2670270 to 2671102 reverse strand)
aagctcagttgttggagaattccttggctgctgaggttctatttttgctttgtctctagaagtaccttttattatgagctccatttttcttttcttttttttcagggggggttctacaatttaagattggataattttttatttgttgcgccattattgctatatatggatcaattattaatcatgtatgttaatggctatagaaataggtgctcaacattttgttttatattgtcatttgataattatagggaacttagagaggagattccatggaactctttttgtttggggatattgtattggctgaagcccttttttttggatgtgatgacaattacttttgactgatgattacaaacgtgactaatactaatgattcaacctattgatccttgaataggtagattcaaagcaatactgcccagtcccttataggtttcttgcaggagtgtatttaggaatctaatagctaattgtcacaagaagttgtagtctttaattagatgctattaaccttgatggaaattattttcaaataataaattctggtcaaagtcagtattttatgaatggtatctgtaatttctttgctgatttctgccattgtttctggtttggcaattgtgaactttttccagttgtggatttggggacaggaaatagagaatatatatctatcaagcttgatcttttctgtttttctatattttgtttctgttgacataggtgcaatatgtcaatttttattagagcttgatgggctctgaatttttcttctgcttggtgttgctggtttacagattctgatcagaaataaattttactgcaga

SEQ ID NO: 18700 - DNA, 766 bp, Glycine max
  Intron number 2 from transcript Glyma11g09780.1 (locus Gly ma11g09780) derived from phytozome v7.0 (chr-ID Gm11; pos 6985567 to 6986332)
ctcaaaatttgaataccaagttcttcgccttacaggttggtttgttcaactgtttctgttatgcaggactgtttctgaacaggtttttcttcttctaatattttgtggtctgcaacaaaatgccataactttttcctgtgatagtgtatacctatggtatccttagtctgcaactgaaaaatagccgtgggtttcagtcataatgctataataactatgagtctatgtctagacattagaagctttttaatgggattgattctagcatacaaaatttgtggtgtggatgtgtgctaggttgatcgtagtaatcgggcatcatatttgattatttgaaagcatgcttaattaaaaaacactctaattaaggtgctttacttgagtacttgtaggcaaagattctgtctctgagttcttgaatgtataggctatatttgctgaaatcttaacctggatcctttagttgccaggaggcttatggtaaaaataatcttttattgttatgatgttggagggctttttacttatttgcttgttgtgtttttatgttttcatacctgtgttatacgggttgttcaatttcttattagccatcaaacatgtgttataatcactgcttcaacttgctatttgaccaatgacttcggaagcaacacttattagccatcaaacatgttttccctttcttttgagaatgttattttctataccttatatattcttttatcttgtacattcaggttctagaaggtgtaattaagtatag

SEQ ID NO: 18701 - DNA, 384 bp, Glycine max
  Intron number 1 from transcript Glyma08g17400.1 (locus Gly ma08g17400) derived from phytozome v7.0 (chr-ID Gm08; pos 12924428 to 12924811)
ctgttactcagcttggagggcctgatagtacttttctttccccccttcttcgattctcttcatttttttattactaattaatttttatatatgcgcatatcatagtgttcttatttggttcgaccagaattgcctcacaaagacgatacatgtggtttcttaccaaagagaaaagaaaaattttctagactacgtcaataatatataaaactgttgtatattgttatcttatacaatgattttttagttattgtcaagacagacgttcttgtagaccaaaaattattgtattagacatatgtctatgttggatgatattatgatcttttgattaatcatctttttctcttttttggatttgcagaggccactcctaaaaccatc

SEQ ID NO: 18702 - DNA, 969 bp, Glycine max
  Intron number 1 from transcript Glyma10g32670.1 (locus Gly ma10g32670) derived from phytozome v7.0 (chr-ID Gm10; pos 41097327 to 41098295 reverse strand)
caagcaatcccaccaccacgctaaaccagactttggtctgtccattttcgattccttaagcttctttgtcaaaaatattgctcaaaacttttcagcttccgaccatcatgacctcaacatcattcaggtaattaattaaggaaagacaaatatttgtcataatatttttataacttgacttcgatcatgagtttgtgctagcttattgcttcccgcgagtttggttaatattttccggcaaatttcggcttttttgctgtttttctggcaatgaagtactagtatatatctatcagtatctatctggcacgtaccagaaatcctgtgttggcacaaaatgtcacacacacgctgaaaatatattttatactatgtttaatttggatgtgataaaagaaaataaagaagaaagaaaatataaatagaaagaaaaaattattgtttttttctattcaaattcgagagggggtgatgttttagcggcatgactttactgcatgaaaagcgaagaaaactaaatgcgacatcttttttctgacaaggaattgttttcggagaattcaacagctgaaactcttcgctagttaatgcgttcttaaccaatggattacttttttaatccacggtatggttaatatatatatagattaattatgttattatacagaatatttataagttttttatcactaaattttgttagaaaatttaattaatatttttagttaaaaaaattcctctcaactgccgttacatttttttcataaataaaactcgaattcaaaatcttagttaagaaaattaagtttaatactattctaattaatgacttgttggtctaggtataaataatatgaatggccaaaaacaaagcaaagaaaagaaatttaatgtgattcccaaaattgcagtaacatagtgtgtgtaattgtagttgaagtaattaacaattgaaaaccttattcgtca

SEQ ID NO: 18703 - DNA, 728 bp, Glycine max
  Intron number 1 from transcript Glyma08g45940.1 (locus Gly ma08g45940) derived from phytozome v7.0 (chr-ID Gm08; pos 45185075 to 45185802 reverse strand)
aagaaaaatgtgagttttttttttttaatagggtggggtgtccaggtgaaattctaattatgatagggagaataagaatgaatgtgggttttgttttaattatgtgtttgtgttcgaaaaatgggtgtgtgagtgttttttttttctcctggagggaggggaatgggttaattttctcgttttgttgaagaagagtggtgttttttttttattattgttttttgagatttctgaaaaaaaaaaagatttttatttttctgtgattttggaaaatggttttttttttttttttttgtttagttgaaggcgagtgtgagtttttggtttttatggttttttgtgatttcagaaaggaaaaaaatatcgttttggtcctgttttctttgacttgtttgcagtttcaattaaagagtgagtttgtttgtttgctgactctttttttattcttttttaatatttttgggtgctgaagaaatatgttgatctaatttaagttatcagatgaattgagatctttacagggaaaaaaaatagttttatttgtttgaacggaatctgaagaagggttcaattttaagtgaaattggatggttaaatctagaaaggctttgtcttttgttggatggaattcgctgactatcatgttcttcttggaggttttatgtggaggaacattgaattatttaagagaatgttaaatgtgatcgattttcttgaatggcagattc

SEQ ID NO: 18704 - DNA, 733 bp, Glycine max
  Intron number 1 from transcript Glyma09g36980.1 (locus Gly ma09g36980) derived from phytozome v7.0 (chr-ID Gm09; pos 42550376 to 42551108)
gagtcaaattgaagatgaccttctctaagcttgtgtacctcaaagagctggtgcatgtctttctatttatttatttcctcttcattgcttgtatcttatgattgattctctggtttgcctctgtgcacaccttgtgacaaaccaaaatcagcttttatatatatatattctcttcaaaattaaaatgcactcctaacatgcatctacgatatcatcttatgtttttaatatcaattgaatagtttaatataatttttctatcacattcaatctatcattctcaatatcgttagttctaatttaaattttgagtattttatttaaaagtattaataattaaatattacaatatattacaacataaattatttatcataaatataaaatattatttatatgttaaaaatgtttacttattacatattttattttttatttgtaaaaattaaactcaagtataaaaaatttacaataactcccacatattactaagctaattgaattaaatctccttgattaaatatttaattatagtataatattcataaaaaaatatttatttatttaaattataaactgtagttttataaaataaacatttattttatgcaatgtatgagctaaaatattattattgtaataaataaataataaacatttttatatcttgcgtttggtatatatatacatattcctagggttgaacagaagccgcaagagttgtagattgaga

SEQ ID NO: 18705 - DNA, 726 bp, Glycine max
  Intron number 2 from transcript Glyma11g19970.2 (locus Gly ma11g19970) derived from phytozome v7.0 (chr-ID Gm11; pos 16764015 to 16764740)
gagcctgacaggtatgcattccttcttaatcagttatgtatatgttctttcttaaaaaaattgcatctttccacgcaaattataatataacattatgtgaacttttgtatatttgcatcagtagtttttatcgttgttgttggtattgccaatgctattttgtgtgcagtaaattatctttaggtatgaagttataacctgtttgcttttcttcaacttctcattcaagaataaattgcaatgttcatggagccatggatttgttttctaatgtaataaggctttaagagatgtgtggtaacatttattgattgaaagattaacttggtagtctttttttctgaataaaaacttgaagctatctctgctatttggttgttgcttgctattccacccttttcattaaattgagatgtgcaactttgactttcacttgttatgaattggtggaaattatacctagtgaccacataagattaggtattccctgccttttgtcatgcccccatcatgttattaagtcgataattggatacaacaatctcaaaaacacagttaagaacacacttttttctgtttagaaaataacatgttgcgcatgcacaacctataacggttgagacaattgaatgactcttcttaagcatgatttgtttcgtattataaatacttgtttcattatactcatgattgtttaccaggttaaattccccaaccacatttgag

SEQ ID NO: 18706 - DNA, 996 bp, Glycine max
  Intron number 1 from transcript Glyma13g32100.1 (locus Gly ma13g32100) derived from phytozome v7.0 (chr-ID Gm13; pos 34369529 to 34370524)
ttctcttccttctcaggtcctctctctctccattccttctttttttcactcttcacttcgcttcttttattttattttttgttttctgtcaattttgcttcgcctccgcgttttggggaattgatttttttttttcgcagtagattttatggctattgaatagatgcgggtgtgtttatttgattaaaagataaaatctttagcgtgtttccttgtgaggtggttgaattttagacccgtgatctctgatgtgggaaatgcatctggactcagagtatgaatcgttgatccttttcaattctggggtacccaaaaaaatattaaaggtctaattgttgattcttctgcaattttgggactctaatatcatctcatgtacatccacaattagagctgggtgtgtggttctcagagtaatgaaagtttcatccatgtttctattttattgccttcaccactatcttgaagtggtagagatctattctaccaaaagaaatgtatacaaacatcaactcttaccttctaattgaaatgtctaaccttattaggttctctatgtatcccttcttggagtgtaacataatgtattataattgttttaagaattttttccgttttaatatttatagcaggcggtaaataagtggaaatgagaggtaataccggcaaagtaggaatgaattgggactccaaaaaatcaggaacttatagtgggacatattataagctggatcaactgagttttcgtcttgttgatgcctcttggaggaatggacgttgtgtacactcgtgtaaaatttaatgctcatctacatgtatacctattatggtcatgagtgaagagaagtcactgtaggtagcatttccaaagtaatggtttatttctgtacagtatttatggatagaataacgggaaacatagttgaacttgaattatgtgattgaaatattgttgcagttgacatagttattggtttgcacttttgcagatatttg

SEQ ID NO: 18707 - DNA, 753 bp, Glycine max
  Intron number 1 from transcript Glyma08g20050.3 (locus Gly ma08g20050) derived from phytozome v7.0 (chr-ID Gm08; pos 15132236 to 15132988 reverse strand)
gcgcagattagtggcataattgcagccaaggtgtgaaatattttcgtcgtcctaaacctttatatgttgttcatggttgttgcttgtgaaaatttgtgtttgttgatgtgtcactacattaattttatgcgttacttatgttatgactgttgccaatttttcttttccattttatccctaagctacagaagttcattgttgtcctccaatggttgctcattttgtgtaaatgatgacaaccccttctttcatgttcttgctggtcatggctatcctacttagttatattgtccgaacgacattgagtgctggttttggactttttgttgcaactctcttcgctttttttttttttaatcttttaattcctgtaaaggctatttgggtttctgcttaagatttgatttgattggattttgattttttcttcttttaagttgcactaattcagaaagcttagtgagattataattttaatcaattgattgatgattgatgtcagagttcctttatgatttataagacatctggatcatggactgtgaaaattctatttagtttttgacaagtgatgctattgtgtcttttttcacttttaaacttaaatacaaggtcatattctggcctttatagataaggctggattagtccactattgtctcttgggaaaatatccaataaccaatttgtcttcaattttgaagaaatgctcatcatttgctttaatagtatggtgttgttgtctttgcagga

SEQ ID NO: 18708 - DNA, 815 bp, Glycine max
  Intron number 1 from transcript Glyma13g37460.1 (locus Gly ma13g37460) derived from phytozome v7.0 (chr-ID Gm13; pos 38540155 to 38540969 reverse strand)
aagaaactgcatttaaccgggtttgtttgttaatgctacatactcatttgttaaccactgcttgcatgactatattccttcatgtcctgtttttgtttctaatatgagggagttttctactttttctttccattaagtatgagtattgggagatggttttccataaacaaagttgcacggttgtaggtactgttactggtctatagcttaatgtaccaagtcttgtattagtttgatgaattctcccttgtaaatctcaaagcatgtgtactttacgtatgtgtcttgtgtatacatgtgaatttcacttgaagattttgtgcatccttcaaagccagttcagaatctgtgatgcagtagcatctgtacaggatttatgtactgaatcacagttgtaactaaagtattgctcgtgatgattgatgaataatatagaaccacttgagcgtctataatttaaagataagaagtcttaatcatgtagtttgttaccgtatggacaattaagaacacccttcatgttctagttagcaaatagtaatacagtaaagatgacgtactaggtataaaatttcagaagacagagaactaaaatttattactgtttgaactaaatttcggctgaactatgaaattctgtatgctatagacatgaaaatacgaatcattgattggatattctaatttagtaacttaactcatcattattgtatttcttttactcctatcttactaataatgtatctttagtaagcatccctttcttcagtcctaatattaactaattgttctcaaaatttcaggtggaacagctt

SEQ ID NO: 18709 - DNA, 692 bp, Glycine max
  Intron number 2 from transcript Glyma12g08210.1 (locus Gly ma12g08210) derived from phytozome v7.0 (chr-ID Gm12; pos 5941395 to 5942086 reverse strand)
tgattgccactcaggtatactattagttttctattggaatgaagacaagcagcctcctgcagtattttgttaggaacatacaagcaagagtgctgagaaaacaaaattctgcaaaacttcattaaatgtcaacataaaaaaggagttcttcttccaaggcctttccccttttacaacagagctagtactccagttttacaatgatatcaattcagaatgaaacttctgctcccctctaagctaaccacccaaccatttctttaatgtactactcttaacctactctaactaattctagaactaatatgattaccttgctttattttccttcttgtcctatcagtttttccctttcttttcactgttatattcttacactttattatttagcttgacctttgcctttgtgtatctttagtggatgcattttttttgcaaaagttgcctggtaattgaattcatcttgattcataaatgttgcttttatgataaatttcaaaatataatcgaactaaatttttacatttattgagatgctaaagtggctaattgtggttgataaccaatatgcatggtaggaatgcaatatattttctcccttttgagtgaaatggggatacagtgatcaccgcctgagtattatatgatgactgctttgccttccatgtagattctgaagagagtgcatctgt

SEQ ID NO: 18710 - DNA, 781 bp, Glycine max
  Intron number 4 from transcript Glyma11g02410.3 (locus Gly ma11g02410) derived from phytozome v7.0 (chr-ID Gm11; pos 1534997 to 1535777)
gtggagctcctgctgactacaggccttcttttggggtaagctttttgcaatatatcaattaacattatttgctattattctatatcaatcaatattattgtgtttctatttgtttatttattgtttgctattattctatatatgttcagtatcttttcttctacgattgtgtgtgttattactttgcgctctagttttgatttgtttctatttgtatatctagttttgattacaaatttgactctgcccgtatttttcgtgtttctaataacattggtatctctccttgaaaaattactataatgtctatatatcttttgtgggttcaaatgtgcatattctagcattcaaacgatggggtaaggcatttaattgtgttaataaaatcaagcttagagctgcaccttttgttttcaatttgccaactgtagttatgtagttttctgtatcggattatgtttcgttgttagctacatttttatggtcttctttatattgttaggaaggcgggaggggtgttgcactgactttttgtccaaataatgttgactgtagttgcaagtttatttggatgatttaaacccaaattcttcttgtttacgtaatgctattactgttttctcttatatctgtgaagtagcattgtcctgattttgataacgaatttgtagaagttagttcttgtgatggcctactttgacatgtcaagttttcctgatatgtatatgttttcactctgtttgcagggtggtcctggtggaaggcctggttttggtcgtgg

SEQ ID NO: 18711 - DNA, 898 bp, Glycine max
  Intron number 2 from transcript Glyma11g18990.1 (locus Gly ma11g18990) derived from phytozome v7.0 (chr-ID Gm11; pos 15585001 to 15585898 reverse strand)
ggcttaccttgtatcatctgaagagccatctccaggtaaaaatcattagttaattttctctattatgtttatattatttacaatattttctgtcctcttgtgactgctatttctagtacatgaattatttcaacagtccttgcgtgccaaatgaactccagcatcattctccttctcaagtttgagttctactcacaacaactaaacaagtctagtttttatttccattcaaaatatataacattaggttttattagaaaaaaagatttgactcctataacttgtgaaagtaagggtgcatcctccatttttttatatacaatagtcgcactgaggtttgaacttaaatctcgcaccactaaattgaccctagtgattcatccaccattaattttaagttaaattgaaacaaaagaaaatctaccaatagaatatatgaaattttgtctctataaataagatgggaaatacatcttcattctaagactttcataccatatgaatctacgtgcaaaagaaagttacatgcaaaacatgatcttattctccttcaccataatctttttttgtgtgtgtgtgagaaaatcctttaccataatctattacattaccaaaattactttagtataatcataaaataacttgtctccaggtttgcaggcctagtacataacatgtttttgctaaaaaaatatgattcttatagctgctaataatatatttgcgtttctgattcatcatatagagctgctaattgttatgcaaagatattttcatatatacaatatatatagacaaagctaaaaacccagtataactatctgaccttgacttgtatggtgcaattactgatcctttccttttccccaccagaaatacagactgagcaagagtctgc

SEQ ID NO: 18712 - DNA, 763 bp, Glycine max
  Intron number 2 from transcript Glyma08g06900.1 (locus Gly ma08g06900) derived from phytozome v7.0 (chr-ID Gm08; pos 4950871 to 4951633)
tctaaggtatgtcgagagctttatgttcttttctgaattttctcttctaatgggataaagagaaaaagaaagcaaaatgggataaagagaaaaagaaagcaaaatttgataattataatttagcttctctctacacacagttagcctttcatgacatatatgcccttgactataattttatgcccttgactataattttatattgatgagaccactttaatattttggctaataaaataatggtcctaactcatatatatatatatatatatatatatatatatatatatatgtgtgtgtgtatgacccaaaattgccaaccatttgccttaggacattgattgcttagagctttggttaaagaactgaaaagagaaagtatttattgaagaaataagagaagagcgtaaaaaaagttatggataaggcaatttcacgcattctaattttttttttctccttttagttccttaactaatgccctaagaacattggttaacatttgtcaaacttaattacttaatagtttggtccctgaacatatgttaatattatcacttaggtcacatcagttggactaacatgattgacggattgtaatcccaaggactttttttatgagtttttagtttcagggattaggatcatggacgaaataggtgatttacccatgctaagttcttgtttttgtttggaaaggaaaactcatggttgtgttttttgtttaggtgagtgggatttcaatacctgagcttcgggagca

SEQ ID NO: 18713 - DNA, 1026 bp, Glycine max
  Intron number 1 from transcript Glyma13g36450.1 (locus Gly ma13g36450) derived from phytozome v7.0 (chr-ID Gm13; pos 37732254 to 37733279 reverse strand)
tcctcaagcaaaatcaaatccgtcgatttttacaggttagtatctccctctcatcacgcgtttctatgtttttcccccttccaaattcgtgcatttcacgctttttggatcagctttgttctatctatcaatgccaatgcagcgaattgtatgtttgcgtgcgaatcttcagttgcaatgccggtgcttccgtcaatttgatcacaattttttttttaccgattgcttcagataataattaccgtctctgttatttgaacagtcgttcctatatatgaggctttcgtagcctgcgactgtgtgtcttggtctgtaattcatttcgctttgatgctattatgcatttaatcgagattttaaaaaatggtcgcagtcgcggtttcgtcgcattccttgatattgtggaaaattgcaaataactgcggccaatgtggccacaattgcggccgtattacggtcggacactccagagtccagagaccttgaagttgcagctgaaaacactatcgtgggctgtcttttaaaaccttgcgattggattaaatggttttgcatttatttttatgttctgtggagaatgatttgagagaaatgtgcagcataagagagcaatgatgcggtatttactatttaatcagtgtctatatgcaaaaaatgatggcaaaaaacgcacctcttaataataacttttttatgtaaatctttggcaacaagaaataaagtgaaaacaaaatgatatttttgtaactatttatgaaaacttgccttccaaaaaaaactatttatgaaaacttaaaacaagaaatgaaagcaaaatgttttctgaaaccaaacaggcaagaatggcatatgttattctgagggagagtcgaataaggaattaaatcactcaagtttaaggactcaaaatatataggagtggatttgtgaatgcatgtgacgttatccctttgcaaatagatatgtgtttacctgtttcttctgtctacagaaaaatccctagagatttaactgaggcatcattat

SEQ ID NO: 18714 - DNA, 529 bp, Glycine max
  Intron number 2 from transcript Glyma11g10050.1 (locus Gly ma11g10050) derived from phytozome v7.0 (chr-ID Gm11; pos 7190236 to 7190764)
gaaggtggtatatcgaatagtacagctacaggtcttaatttcttttgaaattttatatttataagtttctttttatatatgttgactcacacacacacaaactcaaactaattaataatctagtacaatgtttttaccctatggtttcttgtggtgacatttgtatggctttgtcattgacctatagcatttgtttaaagttatattttcttccatgaaataaaaaaaataaaaagcaagatctgtgattggccaaataccatttattcatatgatttttttttatagtagtattttcttttctcttattattttattgcacaaaaagctagactagttttatttcgcattttcattgtaacattaaatggagatcatcttgcaataagtatcattttagcatgacatgctatgcctatgaccccatgtgcggtgaaataaaaaatgttatgtctctgttgacaaatgtgtcattttattggaaatttaattaggaacgacagagtcagagttggaagccttgcagaga

SEQ ID NO: 18715 - DNA, 1015 bp, Glycine max
  Intron number 2 from transcript Glyma08g12980.2 (locus Gly ma08g12980) derived from phytozome v7.0 (chr-ID Gm08; pos 9485985 to 9486999)
ccacaggtttgtatctgtcaattcaaggtttctaagtctcttggactggcaaattgacctcagggggtttcatttagaaactaattcccaaccagggtcggtgtttcatgttttgtgtaagcgtttcaccaaggagcatggcaaaacacatattttgccaagaagaacagaaatagtcatttatttcgccaagaggaactgccgaatgggctctaggtgcagtgtgcgtcagagtaggggtgaggagggtgcagtgtatttcgccacgccatccgtactgacgaaatagctggttatataataaaaaaatagtttcgccatccgtaccggcgaaatggcacttttcctacgaagaagtggttgaaactgctgaacaacaattgggttggttactgttttgcaccccagtggtgctaattctcatagttcgttggttatcatcaatggaaaattcatattggttcttctctgcttcattaccgggggaaaggcaggggcgaactcaccaaggcctttcagaagggagctctccttggggtgtggctcaaccatctggaagtgaaaaaaaaaagaagaagcaagcagcaccatttaaacaaggtttggcatgagttgaaaaggtaaaatcaaaatgaaagatcaggcttctttatgtacttccacttttttaagacaaaaatcttgatataaagaagctgcaaagattattatatgagacaactgttaaacaaaacaaaagcaaaagctgttttgccggtacggatagcgaaccgttcctgtttcgccagtaccgacggcgaaatccgtagcacgtgtcatcctgctgatatttcgctcctggcaatggcgaaatacttgtagaaaccgaccccccgggaataacttttaaaacaaaccctgttagataataagtttctaaatagaaccccttcaagtcaattagccctcttggactcatggtcttggatattgatattgagtggttaggttgctgagtggaatttggtaaacgaag

SEQ ID NO: 18716 - DNA, 706 bp, Glycine max
  Intron number 1 from transcript Glyma08g18830.1 (locus Gly ma08g18830) derived from phytozome v7.0 (chr-ID Gm08; pos 14230564 to 14231269 reverse strand)
aacttcgttgctttcagcctgtaacttgtcatcaggtagccttttgccaaagactatacatcttccatcacagcatttttatattttgtttccatcaaattaaactcttcaatcttattaatttcttttaaaatgtattattttctccgtaaatctaaactatttatatatttttacttatctatttaaattaattatatatgcacagtttgttaattagaaaaataaagaagaggaaactagagagaacagaagagattttactcaatttggcacacttgacacataagttacatggattatagtagagcaatccctgttcattacatacctttttcattaacacacttactgagcaagtaaaaaaaaacatttaataaacaaaatgataataatctttctaattcttatttgttacgtacgaatattttctcttaatatgcttattaactcatactcactcatcttttaacattaaattacacctcttcattttctaattattattattatcattatttatcacagttatcctataactttgaaatttttctttatgttttatttatttattttactcaaattattatatacttgcttgttcaaataaaagcacgaaactttaatgcagaaatcaaaagttattaagattctaatacgggttatgtgttactgtaatttcatcaggttgtggttaacaacttag

SEQ ID NO: 18717 - DNA, 352 bp, Glycine max
  Intron number 2 from transcript Glyma13g07610.1 (locus Gly ma13g07610) derived from phytozome v7.0 (chr-ID Gm13; pos 7807546 to 7807897)
gattccttgcttggaattcgagttggaggtcaatttcttgcaaccccttttggtttaattatagtttcttagtcttagtttgtttcaacttattttgaagaaataatcgcttctcttgctggcgtgctaaaagtacttttggaaacaaaaaaaaaaaaaaaaaaaagagaagtggttgttttccaaaatttaagtttatctaatggatttttctatctcagacttatcaatattgatcaaatctgtccctattattacaaaacaagcacttggttttgagttttgatggttgatatgtttgttgtgtttgtatatagcacggtttcgtgtaccgtgagcacaacaggtcacc

SEQ ID NO: 18718 - DNA, 1052 bp, Glycine max
  Intron number 1 from transcript Glyma09g25170.1 (locus Gly ma09g25170) derived from phytozome v7.0 (chr-ID Gm09; pos 31225614 to 31226665 reverse strand)
ttcttcttcctaattgccacttctcttacggaaaggtaaattgctgaaatgccctcgctctctcttcatcatttttgtcacaatttgcacgctttgaggtttaatgtgaataagaattcagagatttgggttgacgaaaagaaaaaggcttttcgatgttaaattgatatgttataaaataaagaaaaaagtttgaaaaagctgataaaaggagggacaccaagtgaaatttgattaaatcttatgtgagtgtaatttgtcctgatattaataacagttagtgacagaatggtaggggctaattaactgtacaaattatgcccacggttgctgaaacttgtgcaagagggactactggtttgagcaacattttttgttttgtttttgtgaataattaagaaaatgtggtcttgtttttgtttgtttcctatttttaatcttaatagtttatagtttaatttctatggactgtcaatgttatgtgtcaaacaaccagaattcatccttagtatgactgttcaggtttaaggttcactatacaaatagtttaaatcaaccaaaatgatgatgatgatgatggatggttgaaaaataaccatgccctttagcatgtggtcagagatttgattccaaaagtttgtgtatatggaagaacatcttttgagagaaattagttccttgaattgatctcgctatcttgagtgattagtctctgcccaacttcacccaaaaggtagtttaaataagaaacacagtaaaaattaagtcacattgtaaaaattgaaaatgaaagaaaaattttctcataagatctgacctttatgtttttgttcacattagttctcagttctcacgtattagatctcgaggactaagtttttgaaaactaaagaaccaagggggtggatttaattcccatcattcatgaatcatgactgatgttgtgtatttgattttttactagttactaatcagattgtttatattgttgttctcattgttaatttgcattagcagtaggaaggaattaaggagcaagcaggaaactgcat

SEQ ID NO: 18719 - DNA, 558 bp, Glycine max
  Intron number 1 from transcript Glyma08g34280.2 (locus Gly ma08g34280) derived from phytozome v7.0 (chr-ID Gm08; pos 31219994 to 31220551)
tgtcaggttttgattatgcttcttctgcttcggctttgtcaattactagttctgagctctaatttgtagctaataactctttctttagaatttgaattattcttaatgctagattggtgggttctatgaatttcactttgtgttctttatttcttctgtgtttttgttttaaatttaggtatttgattattgttgccaagttaatttaggttgagacaaatgtggtagtgttatattgttaggatagtgatgaacaggacatgacattactacgctggtttgggggaaatataggaaaaaaatgagaaaaattgaattttggattttttgtagagaaaatggagtaacgcgttagttgatttcttgtcaatatacccaatttgttaagtatgtaatactagaactttgttgaatttttcgacatggaaagaggttcttggagtgttttgtctcactggcataacttttcagttttggaattagttgtcggttttgcaggagagtggtgtgtgtgtccctttggctgccttgtgatgtaagttttgttcttggtgcaga

SEQ ID NO: 18720 - DNA, 841 bp, Glycine max
  Intron number 4 from transcript Glyma08g34280.2 (locus Gly ma08g34280) derived from phytozome v7.0 (chr-ID Gm08; pos 31220953 to 31221793)
tggggcgtccaggtatcttacatacataatgatttgtcaaacttcttatgttgttatcattttcgttgcttctgctattgtcaatatgttaactgttatactttagctattgtcaatattttaactgttatacttcagctgtagcctaatggcaaataatatagatatttgttgcttttccttgacaagatataatcattgtttaactgaatactgaaatggaagtaactagttcatatggctgaatctctgatgagttaatgatggtgccaatcccttgcgtatctcagaagaatgatatatagttagtcacgactatccgaaataggagtggaattgaatctgttctgccatgtaattattttatgttgaatgcttattattttgaattttcccacatgtttccattggttcattgattaaatatttacttgcagcattatatgcctccctatggcactccaccacatccctatgttgcaatgtatccccatggtggcatatatgctcatccatctattcctccggtattctttgtagatagtgctttcttatggatattatattgtaattaatcatcataatttagaattcattaatcaatatttccatatttctaccaatacatttagggatcttatcctttcagtccttttgccatggcttctccaaatggtattgcagatgcttcggtttgttctttagccttctgctttttttttcccctgctctgctctctgtctcttgcttgctcttttttacatcaccctgtattttctccttcctgttctgtattgtctttatccaagtaaaagtaacctacaattttacatgcagggaa

SEQ ID NO: 18721 - DNA, 317 bp, Glycine max
  Intron number 1 from transcript Glyma08g10390.1 (locus Gly ma08g10390) derived from phytozome v7.0 (chr-ID Gm08; pos 7525088 to 7525404 reverse strand)
acaccggtaaatcaaatcaaaaccattcaacttctcttctttttctttttatctctcggaatagactattttctcaccatgcaacaatggcgactaatgtttgaataagaggtgtcaatattttaacgtctcaaacataattaatttctatcacccaaagataatactttttgagaaaacaatttttttttgtttctctgccattttttttcattcctatgtttttgctcttatttgtgtgtgtatgtattttgattgatcggtgggtgtgtatttttgcaggagtgatatctggagctcttttgtatataagggat

SEQ ID NO: 18722 - DNA, 859 bp, Glycine max
  Intron number 1 from transcript Glyma13g29200.1 (locus Gly ma13g29200) derived from phytozome v7.0 (chr-ID Gm13; pos 32153117 to 32153975 reverse strand)
atctcctccaccacatcacccattcgtcagtcatgcttagctcttttcttttatttacttaccttattcctgttccctaaccacgccttgcatgcaaacattatgtttagttaattactgtcaaaatttcgggaaattctgtctttctggggttttacccaataatagagaatgaatgttaaaagagtgttattcttatagcatatcctcgtcaaaactacagatgagggcagagttttttttttttttattgttattaataattcctatatttttgttattataattcaaaaccatatttcttgttgcctgtgaatagtgatgactttattgatttaatggtatatttcaattctcgtcttcgatttcagatatggtatatcatatacaattgatgtttctgtgatctagatattgctgaaactatatgtgttgtgtcataatgggaagggatcctctaatattgtacattacaggccatgtttacattttgtatctatctctctacctattgatattatataggccttgtacttatttaatgtctactacgagagacatagatatagtatttgaacatggccacatcatgttgaaatttgacgtgagagtccagaggatctattcctggttcttgtttgaagtgtaaaatgttcattccttgtaaatttaacaatgaaatttcacatttttagattgtttattaccaaagcctcagcacatcttttggtagtatctctatataggttgtttgcaatttcatgccaaatcttttggtggtgtctttatgtaacacttcttctccctgtattgtctttccatttcccagtacaagtaatctacgaagcctacgtcttgc

SEQ ID NO: 18723 - DNA, 837 bp, Glycine max
  Intron number 4 from transcript Glyma09g41520.1 (locus Gly ma09g41520) derived from phytozome v7.0 (chr-ID Gm09; pos 46197776 to 46198612 reverse strand)
atcaaaatcgtaaggaagaaggtaaggtggtgttagttggaaatttatgtgtttctgatttaatttgtgtattaaatgcttgaaagaaattgttattgcattcttcatggaaacttgttgtttatattaataataaaattataaattcaggcctcgtaagaaataaagaaaatatttagaagatgatgttgttaatcaagaattcaagattcatactgttgactgtcatgtgcacttgcaatcttttgattgtgtggaaatcattgttgtttctctctactgaactggcatgctagggactataatggaaagcggttagtatctaagttcaatgcaaacatcaagatttaatctactttaattatgacatcaaatggtgtaattgttttaacttcactttgcctgattaaatttaaatacatatcaagtctggaggggctactgcagtacggcattactgacctgtgtgttctagtgaccagtggagatttcccttagtctatgatcctaggttagataggttaccggatcatgaactcaaactatctgtattttaaatgtctatgggtggtatttctatgtcgataaaacgttataatgttgagttcaacagttatagaacccatccatatattgataagtaaatacaatttttttttttattggtacaagtcttctggcttttacctattaaaacaatcttaaaattttccaatcaaaatatagatggttctatacctgttaaattactactattttcagcaaactatttatttttttcttatgtgatttgtctcatctaacgtgaaatacatgtgctgaatgatttaggcagat

SEQ ID NO: 18724 - DNA, 605 bp, Glycine max
  Intron number 2 from transcript Glyma09g41520.1 (locus Gly ma09g41520) derived from phytozome v7.0 (chr-ID Gm09; pos 46198899 to 46199503 reverse strand)
attgaaatttgtgattccatcaattctaatcattggtaatcttcaactgcaagaaaatgagaaacatattagatagcatatcaatttcgatactgttttgttctgttctgttttgttttgttttattttatttttaaggggttgactttgatcaaccgccacatggttatggtgtttgtgcttttgaatattgatgcttcatttaatggttgttggttctgttatcggatgaaatttgggcgctaaagttgttgattatagttttttttttaagtttttgtttttgtgataaaacggataaggtgattgtattatctgaaaaatagtggaaactggttgttcttttcagctgattatgttaatttctttccatgttttaaaattctgatgatttttttttttctcatgcataattgttggtctcaaaattgaacaataattcagtctaaattcttctcagaaaaaccagggtccctggatgattgtacaaactagtttgtcaagtttcttctttcttgtttttctggacacttcttttttcgttcttatttttttaatgaatctttgacgaataccacatgcttaatttctcaggcagccaaaag

SEQ ID NO: 18725 - DNA, 767 bp, Glycine max
  Intron number 1 from transcript Glyma08g27590.2 (locus Gly ma08g27590) derived from phytozome v7.0 (chr-ID Gm08; pos 21886677 to 21887443 reverse strand)
actgctttgtgagtacccctttgttgtgttctctttggtttttttttttttttttttttaatttgagtttggtattggctagatcttgacatggtttggtttgcaaggttgatctctttcttagtcgtgtaaagtttggatcttgatatgttggttttctgtgaatttcttcgagtgtaattgatgatagtatgatactgcctctgctgtttctggccattgcatgtcttggatcgtctttttggccttatgatctgtttgaaacagaatgtcggtttgttactgtataattagtgatttgtggaccaacagaggtaggtctaatggatggtgttagctttccacaatgtggcgaattgaggtttcaatctccaccgtgggaggtgtccacattgatttggtattcttttattgtgaagctttgatgttggtccattatgtaaagtttgtttgtcttctgtttcactctccttaattgaaaatttgatactatggttagatttagtgtctacatttggtgaataataacatgatatagattgaatcatttgcaaaggatgggatcctgaggtgtcttccagctatatgtactagtgttgacattggttttatttacttattttgttagccatatatggtaatacgtttttggatttcatcaatgtgtgtttctttctaatctttcatttaaaattgtaggatttatgatttaactcttatttttgttgtgacttaggttgccactgatccatccggacacaagatta

SEQ ID NO: 18726 - DNA, 734 bp, Glycine max
  Intron number 4 from transcript Glyma12g07520.1 (locus Gly ma12g07520) derived from phytozome v7.0 (chr-ID Gm12; pos 5147276 to 5148009)
gtataataaaagccacaaacctgctggcagtggaggttggtttgctcatcactattatagtatttttgcttcatttatagaaactaactaatctcatcttagaagtatttgttgtgacttgtgaccatttatgtaaattctttttgagttttatgaatgtttacttgtttaggccttagggtaaattgtgccccggagggaaacattttgttcataattgtctagagatcctctgctttggtatggtgaagagagattgttttttgttggatctttatttgcttgcttatgtttgtgtatgctgatttttgaatatttatactcatgattgtctcattgtgagtactaagtactagtgtcaaggagccctgcatgaagtaataagagttcatgattacttgctagccttccttctgttattgcacatagtggcaccatgctattatcaagaaaaagaataatatgatgtcattctcaaacataatttggttaccctgatcatgaccctcgcatagttgcattatattcttatttttgtgatttgctacattatttctacagttattatactttacatataagttattatactttagcagttttgatgacttaggtgttggactacatgtatctgtattctatgaaacaaatttgttctgaatctacctccattttgatagaatctctgcttactttcagccgctctttgtgattggtgcggcacctggaaagga

SEQ ID NO: 18727 - DNA, 449 bp, Glycine max
  Intron number 2 from transcript Glyma12g03000.1 (locus Gly ma12g03000) derived from phytozome v7.0 (chr-ID Gm12; pos 1931280 to 1931728 reverse strand)
cttccatacactgctctcagccttagggttagtttaatattcctctcttcttctttatttttgttattcatgtttgaatgaactttaaagtgaatcatatatatatatatatatattgttttagtgctaatttgttttttagttatgtgcctgcaacaggaaaaaaaaattcctgtgattcaccactctgagcgagtagaacaactaacgcagggttattccagcttaatcagtcttgagtttgaatctttgagtttgtagctcatagtattttttcctgcttagcatgattaggattctctcctgtatagagaatacttgtggccttgtaccaaaagatgcccttagatccatctcgagtgagattatgtgtcttaacattgactgtattctcttatgtcttctttttttcaggaaaagaaacggaataatctgagggactttctgaa

SEQ ID NO: 18728 - DNA, 835 bp, Glycine max
  Intron number 1 from transcript Glyma07g00230.1 (locus Gly ma07g00230) derived from phytozome v7.0 (chr-ID Gm07; pos 39095 to 39929)
tttcttagagctcgcacttttattcaagagaagatgtaagcattttttttccatttgtttaactgcactctttcaggggtaacttgacttcgttgattcttaattaggatttttatctgtaggcatataagaagtggatattgatatttttgttaaaactaactgcaaacatgctagcataaactcaacaatgatagccagtacttattattcaatatatatatttatctttgcagaccaaaaaaaacaaacaatgatagccagtgtatagataggttcataaacgaaattgatagttggaattatctgaaaacagaaatgaaaggaaactaatttttttgacacttgatcattattattaattatcttttatgtgccagtgtatctgtgtatgctttgtggctcacttgcatggactagctgaatatttaagctaacctataataatttaatgcaataattttcataattttattgagaatctaagaacctgcagtgagtggaacagtatttgcaacttgcttgactacattgagtcacaccatgcttctttatcttccactttataatttatggcctaactttgtatgtgtggctatatcattctatcaaagttgttgctacgggatacctgcagtgtagatgccatcaagtgaattagattactgcctctatgttttattatgtgctaattttctcacctgcactgtttttttgacttaaaaatagtatatatatatatatatatatataatgtgtgcatatgataaactacaactacaatagttttttcattctcatcagtagatattttgttttaccttccagctttgat

SEQ ID NO: 18729 - DNA, 504 bp, Glycine max
  Intron number 2 from transcript Glyma12g20180.1 (locus Gly ma12g20180) derived from phytozome v7.0 (chr-ID Gm12; pos 21218100 to 21218603 reverse strand)
gccaccggggctttcacccctgaccgtgttgctgtgtgagtttttccctttttgaaaaaaatatgttttttccctcaaattatccagaaagttcgattttggtagtgcctatgagaatttaatacattttttggtttttccattttagtttagcaaaaacagaaaacacgtgttttgtacctgcttttagtctctataaagatttaatacgtttttagtttttacttttcaagaggatcaaatgtttttagcacctggttagggagtgaagggaaacccccgcaattttgcaaatgtagagactaaaaacctattaaatttttatagggagtaaaattgaattgagatattttgagggattaaaaacatattttactatttttttaatattttttgaggttattgattgtggggatggggattttgggttttggaactgatggggcttttctttttttcttttcttgaactttttttgtggtttgtgttttgaaggtattgcaa

SEQ ID NO: 18730 - DNA, 718 bp, Glycine max
  Intron number 1 from transcript Glyma10g29320.1 (locus Gly ma10g29320) derived from phytozome v7.0 (chr-ID Gm10; pos 38193910 to 38194627 reverse strand)
tcttcaataccctcgacggttcactgctccaagaggtgaatgaatgaataaattcaatcgcatttggcttatgtgtttttagtgttttttctgatcggaattagagtttcacttcggttatttatatgacaaaggttggtttgcattaaatatcaacggaggttattgcgatgaaacgtcaactcttagttgaagaaatgtagctaaagctcttaaggaattgcatctatgtttagtgttgttttccaatcaaaattaaagtttcactttgttaattatcgagggaagaaactctaactttgatcgaagaacaacaccaaaagcatctatgttttttcctctgtttaatcattctacaaatcctttgctttcttgctatcgcacacggtaccctctgtctttgatattcacatgatacctttacatggttatatgggtgttactgtgttagtgtaatgtatttcaaataacctttacatggttacatgtggaatttcaagaaaccatagggggctgttagtgtgatttgctcaaattaatatgataggagttggattgttggaacttaatgtgtgcttagtaactttgttgagaaataaattgcttttaatgttttgagatgttagtggtttcaaagttttttggaggtttgaatgggaatgtgtgggggtgatgattttcaggtacggcggggtgcagacagagcagagatatactg

SEQ ID NO: 18731 - DNA, 1007 bp, Glycine max
  Intron number 2 from transcript Glyma08g15420.1 (locus Gly ma08g15420) derived from phytozome v7.0 (chr-ID Gm08; pos 11183969 to 11184975 reverse strand)
gactggggtttcaccacctaccctgtcgttcctgggtatccttctctcttttgtcttttattacaagaatatcgttttaaaggttacgacctgttccttttcattttttgacttttttcttcttccctcaatcatagatttgggggtagtaatataaattattatatgctatcttacatcattgagtttgaatgtggtgggacacatccaacaaacaccacgctcttcttcatccttgatcccacaacagttgtgatttgtaatttctatcttaattgttaattatcatcttttatctttggatttgggtgttttaacggtaacggggaaaaaaattatagggatcgccgaacccttcataaaataaacacctaattctaagcgcacattgtgttttacacatcacctcacatggacggtgtgtgtctatattttatattttatattgatctcacattacattaggcatgtgttactgttacacaacttaggtgtggtcggagtaaaaggtaatttatatacaaattttatttatatttcttgtgtggtaactatgcaaagcaaaacatttgcagaatttattttgaaattatgtaatttatattttgatgttttaattctaaaaacaagttattcatatacaattttttgaactgatacaaaagctatttatatataacctcaactcaaaatcaattctttaacatgaaactaaacctatgattaggtccgttgatatttcaatgtgattttggatgtttcaacacgaatccagtttacgctggtaatgatgcaatattcgtttgttaaactaattcaagtaaattaattgactttattcttttttgagtttgtcatccgtgatttataggtaatagttgaagggcttgcacgtgtttgtgcaattgtgaaccctggagatagtaatacttgtttttgaaggtaaaaatcaggatgtctttgagtttaccatgcatatttacttttgtttttgtgtttttccaggc

SEQ ID NO: 18732 - DNA, 703 bp, Glycine max
  Intron number 1 from transcript Glyma12g09850.1 (locus Gly ma12g09850) derived from phytozome v7.0 (chr-ID Gm12; pos 7596954 to 7597656)
gccttgaagctggtctttggcaggtgcccatttctttttttctcgtctatgtttggcttaactagagaataaggttgttcaaagattccgattttataaatcaaaggtttcttgcttttggggtgtttcatttttgtgtgtaattgttgataagctaccgctacctcgtttttcttggcttgaatgcaaagtgtgtattggttccctgttcccactctgataaatatgttgcgaaaaagaagcacaatttggattgaccttagtgaaagtcaaaagtataatcgaaggatatgccaagatatgattttgttgctgaaattttccaataaagaaagcaaaatgactagttttgcttgtcaaattgaattcgagtcgcttccttgatgcagataatgtcgcgtttactacaatagatgtgccacttgatcgaagttttgttttttaagtcatagcctactaagcttctgcttatgtgtttatacctgaattgtagattttctttccattccttactttggcctcgtttttttttcctacttttggggagcaaaaccaaatgatgggttgtgggtgaaattttgtctttaaggaatgttaagtaatgactaatgaatcaatattcagtacctcttttttgtatctaaaatgaaaattatggtcttttgcagattttcagctcaaaagaggaaggaaaggataattc

SEQ ID NO: 18733 - DNA, 443 bp, Glycine max
  Intron number 3 from transcript Glyma11g00260.1 (locus Gly ma11g00260) derived from phytozome v7.0 (chr-ID Gm11; pos 39944 to 40386 reverse strand)
cgtcgtgtgctcttccgaacattaaatacttacaggtaataatgttcaattttctgttacagactcgattttctctctaattcttcattttttttcctttttctttttaaaaactgtctttatttcttacattattattggtgttgttaagggagtatttttgtcaaatattctaaaaattagatgcgacctcctattgaatccgatctgaattgaattagctatgtttctagcctgacatcatactgtttaaattttgattatggactggttacaaatttaacattttcaaaactagttaattcatggctcgaagatatcactttaatctattaatgtgcaagacaaaggcatatgtaatcttattttgatttaacatacaatagtttgatagaagtgaaatgtggaacactggaactaactaaaaaattattaggcggctt

SEQ ID NO: 18734 - DNA, 777 bp, Glycine max
  Intron number 1 from transcript Glyma13g20980.1 (locus Gly ma13g20980) derived from phytozome v7.0 (chr-ID Gm13; pos 24474513 to 24475289 reverse strand)
cacttgacttcattctttcactttcaactttcaaggtactcttctctctctttctctttctctttctctctccgtgcatcgttgtttctattgaattacggttatggatgcttgatgtatctgtgcgtaatgtggaatcgcttatcgtcattcgtgtgtgtcaagtgggaatttgttgttatcttctacttgttcgttgcttgtggcttttttgcgtgttctgttttggttgcaaaatggatttcaagggaaattaaatatgttcttatttgttgaaaggttttgtcccttacggaattgaagtcaaggaactagtcgttttgttcgaatcacaatttctcaactgttttgctttcttaagagtgtttatatgttttggaattgaaaactgatggtgtacagaatttttcagaaactggttggttgaaaagtttagcagttttggtggtgtgataggggctatcttgtgaaattggaatagaacttattgcttgactgtgcaatgatttttgaagctttgtttgtttcaattctcaaagtgaaggactagcattttttttttttttggtttttgggcattttctctgcatttttttagatttcatcaactgactactatatttttttgttttctttgtattgttttatttgctatatttttatgacatgcggatctcttcaggcttatttgtgtattgacatatatctaatttgtttttttttcctgactcctcatctctagtcaaaaggacaatagtttcaaggatcaaactcttg

SEQ ID NO: 18735 - DNA, 629 bp, Glycine max
  Intron number 1 from transcript Glyma08g13480.1 (locus Gly ma08g13480) derived from phytozome v7.0 (chr-ID Gm08; pos 9869672 to 9870300 reverse strand)
gcatttgaggaaactttccatatccaacagtgcaggtagttaactctacttaagtttttgggattctttgttcatgacatggtatgagagcctttgggattaagtgcgtgtttggtttggtgccactaaaaaatggattcatgttgcttgaagctggaagaagtagcttatgcttgaaattatggacagacgtacatataaaacgcacaagcaaacacactaagtggtgtagacaatagattttgatccttgctttttattgacagttcaagcccaagggctcttccttgagtggtgtattaatgagagaatatttgggaatgttggttcatgacattgtccatctctttttgtgtccttgttttcaagtaatctccagagtttgtctttggacaaaacttagatacatattcatatatgtttttagcattttatttgatttagaattagagttttattttgataacctataccgatctttaatgcaaatttttattacatgtattattgagatgaaacaccagttttgattagagaataatacccaaagcatttatgcttatccctttttttttttttcagtttaacttactttcctttcaatttatttgctttcagggagagtgtat

SEQ ID NO: 18736 - DNA, 903 bp, Glycine max
  Intron number 1 from transcript Glyma06g16750.1 (locus Gly ma06g16750) derived from phytozome v7.0 (chr-ID Gm06; pos 13176011 to 13176913 reverse strand)
cttctcgtaacctcaagtgtcctatgtaagtgttccatttaccgtgattctgataattttgtgctttggtatttttttgttctgaattttgcatttttcatcgacccttttttttaaaaatagattttttatttggaatccaataatatttccattttattccttgaatggtttcttaacatggcttaaaatggagtcaattaatcagaaacactgcaaaggatgtcctgttctaaaattgaagttcttgacactggcatttataaggattttcttcaatgtttctacatattataaaaaatgtcatttcgtaagttattggcactggcaattataaaagggagtgtttgtacttattatgaaaatggcattttttggttggaaatgcaggtcgagaagttatgttccatttcttggttggtaatttttgcaacttgaacttaattttggaatggagtttatctataacaaatgattggattaaaatggaaatatcctgagaatgaactcaatgaagtactctttgttccctttcaagttcgcatatatgttcatgagtcatgaccacaaattttgcattttgaggggtcatgagcatgatttgattttttttttgcatttttgtttctttcctgaagcatggaactgctaggctttcatccaagcaattttatgtgtaaaatttctttgtggctttgaattgtgcatcaaagtgcaacttttctttgtcttctaaacttgaatgtgatcaaaacatttgacacctcgacacctcgtacaaaattgtgccttatttggtcaatttttttattactaaatgtcaagattaatagaatttccccaagtgtataatcttttattttcataggttgttaccacaggcaatttgtacctctcaaaaga

SEQ ID NO: 18737 - DNA, 962 bp, Glycine max
  Intron number 1 from transcript Glyma12g25000.1 (locus Gly ma12g25000) derived from phytozome v7.0 (chr-ID Gm12; pos 27931149 to 27932110)
ctcgccgtgctgattccttcgagaagctggataaagtatgtttctttcttgatctggttgcattgtggaattttgacattgctttggttagatgcagatattctggttttagttttacagttgctgctagaatattgattcaagtgttgaattttcaaattggttttctttatctgtttaagtgttaaatttgttttccttcctctcttgtttctttgattacctatgtttccaaaatatgctttaagccagggatgacaattaggaaaacgagttaccaacttctccactacctttcttggttatgaatataatagttgccatggtggtgagacttacctatatgttcctctctgccaaatagaccaaaattgcttttttatatgaactactttggtagcttacgagcctttgtaacttatttcactactaataataactcttgattgataaactttgcgtaaggtatttagaactctcatcttttggttccttcttaaaccattgtggttagctgtcattgtttgattataaccttcaccaatgcattatgcacatcctatcatttttaaactgatatttgaatattacaatctcactatataacatttcttacaaaattcttgattcttatcaattattgtattaaagatgctcgtaatgttatgcttcattttttactgttttttcttcaacaaggccaggatcaaattactttgaatttggacatactacaattctttttctgtttgcgttttaatattcttgatttcatcctctgatgtagataacaaaacattgaggtacaatacttgtagtttctagatttatagatatcctttttgtttttttttgtcttggattgcaattaaatgatgatattgtcttcagcctgttttagttttccttgaatggtaagattttcctccttatttttcagattggacagggaacttatagta

SEQ ID NO: 18738 - DNA, 736 bp, Glycine max
  Intron number 1 from transcript Glyma08g16130.2 (locus Gly ma08g16130) derived from phytozome v7.0 (chr-ID Gm08; pos 11750275 to 11751010)
gtcaacaagcacaagcccaagcccgcgaaactcaggtgcttggtttgatagtgctaaatgttaatttcattcgttgtttatatgatgctgtgtgtttgtgtttaatgtttttatttgtttgatttgatgtgggtttcttctttttttagtggttttatgattagaaaaagttaatgttaaaaaaagagttttgtttggaaacttgtttttgagctgctgggaggtggactgtggtgcaggtttaaatgtaagtgaatcaagggaatgttagatgttagctgggaaaatgatccttgtgtgttaataatttgagttgttatctatgatggtttttttagtggttctatggttagagaatgttaaaaaattatttttttgtgattatttattttgaagatttggggttggaaggaaggaggtgcagattgggattaaggtagtatgccaattctagatgttagctggtaaaatgaacacttggttgttctaataatttaatttgaatttttttagatgtattgggtactgtttttgttatagcatgggaaatgggatatgaggtgtagatgggtttggaataaacaagatgttgaataataaaatgaatttttctcccataaaacaaatcccattcttatgaattttaatgtgtctcttcatttaagtgtgggatcttatatttggtttgctttgattttcagggctagcattactccagggactgttctgatcctgc

SEQ ID NO: 18739 - DNA, 778 bp, Glycine max
  Intron number 1 from transcript Glyma12g30890.1 (locus Gly ma12g30890) derived from phytozome v7.0 (chr-ID Gm12; pos 34500053 to 34500830 reverse strand)
ggcttaggttcgctaccggaggtggtgaccacaaggtatggaatttttttctgtctttgaggctcaaatttgtggataattttgaattttgggcgtttagttatatggtatttaggaagtggcaccccaatttgatttaagattttaagtcctgtaattcttgaatatgggatttaattgtcttcccacctctctttttttttatcagaggaatattgcattctatatattttcaattaattgaaattttcacagtttcttatgaagagtagaaattgttgccatttttcttgattcaatatagactgcacttcatgctgactttctggttaaacattggtttgccagggcagagagcatctttatgtgtttcatatttttaagaatagcttcctagtgagcttgtcaattgtattttctagggacacaacttagctcaggaaaccaaatttcctcggtgccttctagtgaatcacttttcatattaaaaagtaagaagtagtaaagatctgacgttaatatgttgcctagtgtcaggttcagctaaacatctaagaaatataagttgtgctgaaatttcttgtttctcttcacttattttgttttcataactttcctgttcctgtgtctgagaaatctggctgtatacgacttctggccttcagggtaggattagagtgggtcgttattttcaactttagtttcttgatttgtttaagtcacttgaattaattttcatacatccacattctcaactatgtactatgcaggttcgcat

SEQ ID NO: 18740 - DNA, 789 bp, Glycine max
  Intron number 2 from transcript Glyma07g39890.1 (locus Gly ma07g39890) derived from phytozome v7.0 (chr-ID Gm07; pos 44237324 to 44238112 reverse strand)
tggtagttgaggagcctttgcgaacaacgtttcaggttagcattttacattttcattcgatcttgctctttgactcaactcttactttttctctctccttcatttcgctacgttgatctgtgtcaattcccatctattatgtatggtatgggttgggttctgggctgcccaatcagaaaccttcaatggattttttatacttctcctaaatcttctttcactgattgttttttatagactcccaacttctactgttgcgggatatttgacacgtaatatctcccaaatgagatctgatttcaattctctttatcatattctttcaactatataatctaacttgtgtttcacgctttcacctattttgtaaagtatatattagtacttctcaacacaatactaacaacttcttcctgttttgggagtgctacaaatttaataactgaagatattacccaactagtatatcttatgaggtttgatgaaaactaggaatttttagaaatcaattaacgagtacttaactagaaaactaattagggtcttgttaacggtatccttaagcattgattaaggaactaaaaggagaaaaagtattttattgggatgtgtaaaattatactacccataagatcatgggttagcatttgccaactaataactcttcctgccctaaattttaaatactttattaatgtgtatacaaattactttttggcattttgattctacaaaactaatagcttctccttttccctcctttggaacttcgtaactttaattgccaga

SEQ ID NO: 18741 - DNA, 431 bp, Glycine max
  Intron number 1 from transcript Glyma05g32970.2 (locus Gly ma05g32970) derived from phytozome v7.0 (chr-ID Gm05; pos 37735993 to 37736423)
atgtaagtaagtaaatgtatcctgatttttcatttagtttgccagttgaatttggttcaatttattcatgtctttttcttgtgtcaattttgtgtttctcatcaagctagtgaactccgtttcggattttctgttttgtatttttctgtactgcaactgttcaatcatgctttgctgcccatacttgctatattttttatgttctgtctattaattgttgccagtcagtcagttagataactttttttttcttctttcaaaaaacaataatttttatccattgcaatgtgtgacagtttggcttgcattgttatccaggttttatgtttgtcggaagagttcaatcaaatgagtttaaccatgatagatctggggatttcctttctgaggttggtcacgagccctgatgcatccagtgcatctattttcgg

SEQ ID NO: 18742 - DNA, 698 bp, Glycine max
  Intron number 5 from transcript Glyma11g08320.2 (locus Gly ma11g08320) derived from phytozome v7.0 (chr-ID Gm11; pos 5901490 to 5902187 reverse strand)
ccaaacaaggtaaatcgatcactgtgctaattgtttcgtctccagtttttttctgccattccttcccttgataaaaactattttgcgaccttacttttaatttataataatactcccttatgtaaaatgtcacactaattaggaaaacaatctttggacacttagatgctagagagaaaggagaaaacaaaatgaattatttttaacaaatacaaaatgaagtgttatccaataacatggttacttaaaaagtcaattaacgtgaaaagctctcccatgggttggctctgctgttgttcaatagtgttaccatttgacaagagttgaattttgcaacctgcttatcgtataaatagccatttcattacgttaaacgttgttcaatacttactagctttgactaaaacttttggagtagccaaaagcctatgaacaattttttttttatatgtatataattaaggggagccaaaagacaaaatgactatacactgacacttttaattataacttatatcataaatttattaatttttaaaataaatatttaaaattaattcaaataatgatttatgattagatgataatcaaaaattattttacagcctgaaaacacatggataaatctcttcaaaaaattcatcgatgtatatgaaataatttcaggtgcgtcgcatctaagagatatcttttatcgc

SEQ ID NO: 18743 - DNA, 759 bp, Glycine max
  Intron number 4 from transcript Glyma08g00300.1 (locus Gly ma08g00300) derived from phytozome v7.0 (chr-ID Gm08; pos 69661 to 70419 reverse strand)
gcaagcaatctgattgtgttctgttaggaggagaggtaattgatatgttttgtggtttgttttttcaccgtatcaaattggatgcgcgctggtctttgccatgccatgttgtcatgaattcaggtttgacactgaagtaactgcagcattcgttgctaaaaatatcgtttttttaaaacttattgcaagtctcagatattaagggtacttaggtgaatgattggatatatacaagaaaaggtaagatttgggggacaaatgcttggggagagaaaaagttggagcagcagttactatgaggtgtcttggtattgtgagaagagtaataaaacaaaggcttcattgagaaaatattgaaatgtatagaggaagaccttgttctgaatgattttactacaaatttggcatgcctagtagcaatgattgttaaagtttctttgatttggtgttttattgcatgtctaaatactactatactagtcatcctttgctggtttaaatggtgcatggattcttggatcttgatttattcagattgaatctgtttttgatttttgcgatcttacattattgtcaagatgattaagtacatgaatatattgctaccaatctctctgctgtaataaataaatatgctttcttatacatatgttcagctgcctgcaaatatagatatgataaagagatagtatggtttttttttgtatatttctccttttgcacttatagttaattttatatccttctcagactgcagag

SEQ ID NO: 18744 - DNA, 708 bp, Glycine max
  Intron number 1 from transcript Glyma08g46190.1 (locus Gly ma08g46190) derived from phytozome v7.0 (chr-ID Gm08; pos 45364711 to 45365418)
cttcacaaccaccaccctcgcttcttccgatccaggtagaaccaaaaccctctcgcaccgttcgcttcgttttttccttcacttttttttttttcgttttcgttttttaaatatttcaaatagttttcgcggtgaactttaccgtagatgtttaggtttttctaaaatgttggtcttgaatgtgaaaattctgcgccgaaagttgcttgccgtactggttcatgaatccacagtgaatatagaactttttgtttttcgttttttatttcttataacggatttttttttcgtttttggagaagtttaatcgtttcgttcactggctaaaaacatgatactatcatgctgaagagtttcacattatttattgttatttgcgtggttattgatatatactttgagtgaagttgcacacattttgtaaaagagtaaggaatgcgagggaactaacaaataaatttattatttttcactttgtttgatgaattgcttctattgaaatgttttgtgggagaaaaaaattttatcatctaggttgtgccttagtttttgattgctattggaaaaaaaatggaggcttaggttttcaagttctttttcccctcattcaaaggttgtcttgacatatttaagttcattttgttgattatatcatgataagttggtgattttaattggcagttcgactagcttttggaaacaattata

SEQ ID NO: 18745 - DNA, 698 bp, Glycine max
  Intron number 1 from transcript Glyma06g13060.1 (locus Gly ma06g13060) derived from phytozome v7.0 (chr-ID Gm06; pos 10198523 to 10199220 reverse strand)
agtcactgctccggctcccgcaccaacaagcggtaattcttttcttttttttctctaattctctctctctctcttttttagatatcattattggtatttgatatccttcatgcaattatgctgatcccaccgttccctggtgcatattattttacttgtttgttacattggtttttgtataattgtataatattaagattaagatatgtcaatttttatatgtgatttgaataaaaattgatcctcggctccttatgtatggaagaacattcattagaagtcagtctcttaaatgaacctcaatactttggaagatgagtctctaattttcaactgggatatatagcctagattcacaggaaaaaaagaataaaaattgatcatggcctgcattttggatgaacaagaccatcattgaaactaaacaattaggcgatgtcaattaccaaatatgtgtataccctctttgaatttccttcttcaaaaaacagatctggcttctccggggtgtcaaaatcaaaacattgaaagaatgataaagatatatgttggacgatctgaaattgattttcaatgaattatatataaataattaaatacgctgccttttgaacatttctaaagaggggggcaatgcatattgctaatacattgttgtttatatgtttcaggcaccacaatcgaccaagcggttgcat

SEQ ID NO: 18746 - DNA, 903 bp, Glycine max
  Intron number 1 from transcript Glyma12g07180.1 (locus Gly ma12g07180) derived from phytozome v7.0 (chr-ID Gm12; pos 4900769 to 4901671)
ttctccaaggtgaagttttataaccttttctcttttttatatctgatttgattcctttactcctcttatcatctacaacgaattttaaaattaaaaaagtgatatctttttacttgtgaatgtgactgaagaagtgaagatcctttatttttttttagtaatgatcgtgaacaatttctctatacgaatcacctcattaacatttattattattgactcaactagactagagtttgatagttgtgctttctctgccacaccgttttaataatatttcaagcaatcgtaattattatgttttgctgattgtataaatatatgcatattgtatctgtttcatgctataggtatatgtactattttatagatgcccttttttttcctgtttaacttattgtcaattccaatgttttaaggcaggggtgctgttgtgtcaccatttttgatattgtgaaaattgtcaatatataatactagtgtagccacaattgaacatgtagttgcataaaaagtcttaaattcttagatgttgcgctgcaattataattgttgatgatcgtttttcaaaatcctggtgaatattctgtgttatgtttcctagagcatatgtacttgccaacacgaataataattatttaggggagatgatgatacatttgacgtgaaaattttatgttatgcttgacattaatgaagtagaccacttctggaaaacagtaaaagttcattgagtgaaaattatacccaatttttgcccataacaagattatataaatattaacaagagaggaggaaccgttctgattatttgtagtgattcattattctgattataggcagatttttaaatgtgaacttgccaaaacaggaagtggagttgcaggaattgtgctccctgaatca

SEQ ID NO: 18747 - DNA, 697 bp, Glycine max
  Intron number 1 from transcript Glyma06g17640.1 (locus Gly ma06g17640) derived from phytozome v7.0 (chr-ID Gm06; pos 13997282 to 13997978)
aattttcttcaggttagcttcacaattcaagcatcaacgaataactgaatactatatcatatcattatcatattcacaattaacaatttacaagttttaagccacacacacccaattgcattctactttatttctgccatattgttgaatgctagctgacatttcctctggcattttctttcggatattttctctatgattataatttattgaaaattattaattttggaagattttatttcttatttaatataaatcaagagagagaaatattaatagagaaacaaaacctatcaaaattggtgattatcaataaattttaacttatgaaagaggcagtatccgaatgtcattgcattccttttgttcgttaacataaaatgtgtcatggtttcttagccagattcaaaatcgtggcttaatgattgttctaatctgatggccaatgattacaccataaaattgaacaagaaatatgctgtgatctttcccattaataccttttgctatttatttgtgtaacaatatatttagactttatgataccgatgaattctgatatatagatctcattattaatttattgtacctagttcaacatagatgagtaatattttttaatgcttgatgaatagagtgtatgaatgaaccaaagcaatttattattaaatcatttttcaggaaactgctttaaatc

SEQ ID NO: 18748 - DNA, 448 bp, Glycine max
  Intron number 1 from transcript Glyma13g29350.3 (locus Gly ma13g29350) derived from phytozome v7.0 (chr-ID Gm13; pos 32265560 to 32266007 reverse strand)
ccattgcttcgtagtataccatctgtaatggttgaatctgtcatcaatttatagatatatatagcttaaacatctatgattgtgttcacttaactcagttgttttttttagtttttaccatgtggcttctcagtagtaatcagtttcctgaattagaaccacaaaattctaaacttctacaataattacagtactggttttattgattaaagttttccttgtacccaacttattttttgattgttgacttcaggtaaaacaatgtagtccttgttttcagtaaatatagaggtttcatttcatctgtcccactagtactgctctagctgtgttagtgctaatctcttgggttgatcttcttttcactgggcatatcataaaccattgttatttatctttcttgatttattaactttgtatgaatatttttgctgtgtaatcagatcat

SEQ ID NO: 18749 - DNA, 630 bp, Glycine max
  Intron number 1 from transcript Glyma05g36950.1 (locus Gly ma05g36950) derived from phytozome v7.0 (chr-ID Gm05; pos 40689446 to 40690075)
cttgggctacccattaaaggtttgatgttattttttatgatttcatgccaatctttgcattatgggataaactgattgcgtatgttttttggctccttttaccttggggtagtaggagtactgaagaagatttccaactatttgtctatcttagggtgcactccttgcctcatttttattttctcgataattcaaaatccacttatcccttttgttgacgattatagtttagtcatgaatttctagtcttttaaatatgccccttaagcattttgcttcctatgtcattttggccttccgctagccatcttaatttgcacacttcgttgatgtagttttcctccttggagcatgtagtgtggagctctgaattcagtaatcttcattatgccactcctttgaatatttttcttttcatttcttcctggctggctgtttcatctgcacttgtgatactcagttttctgtttgagcaattgttggcatgtcacatttaaggcattatagttggtgcatcggtgtcctgtggctgttttggtaaaacagagatgtcattacaactaaagtacagattttaaataacataactaagaatcacattaatttagttgccaatattgcagggaatca

SEQ ID NO: 18750 - DNA, 948 bp, Glycine max
  Intron number 3 from transcript Glyma09g00650.1 (locus Gly ma09g00650) derived from phytozome v7.0 (chr-ID Gm09; pos 332098 to 333045)
agtcatcctcaggttagctattagatatatatataattctttttttcacacatgcttaacatatgatgccagcaaaacctcaatgttagtttttagaaaaaatgaagtgcatgtatggctttgattcaaaactttttcttctttctaatttcaagcagcattttcatcaatgttatccttttattaatttctgacattctaacacttcttttctctagaataatcattacattactgctacaactttctagtggcattacttttagaataatctcatgatacaataatctttcttttacttttctagaaaattacatcaacgtttaaaattcacattagtacaagttattggatcatatagtaggtttattgccacagttttaatactatcataagcacctaattaaatatttggggaatccttcttatagttgtcagatccaactcaatcaagtatttcaatgacagaatatatacctcctctctcaatccttactcgtatttacgacaatatgccttatctcttattccctcactatgtgcctatcaatccctcactaacgtgtacctatcttaggtatgtttagaaaaatgttgagttgaacataacccatatctttttcaatccactaatatatttgtttctctattaatttgttgttttcgaaatgcatgaacagacgtttggaatcgtgcaaacgataaaccaaaaatgcgcgtataaccgttgagtattttcaacagaaacgttagggtatctcaacatgtcatctcttgatgctaaataaaaaaataaaaaaatgtcatctcttaattggatttgtgattgcatacattttttatacagctaactgtgtcattatcattaacataactgttgatgacaaatacctagatataacttccaaaattcttaagataatcttccttcatgcaggctcttgttca

SEQ ID NO: 18751 - DNA, 701 bp, Glycine max
  Intron number 1 from transcript Glyma10g19690.1 (locus Gly ma10g19690) derived from phytozome v7.0 (chr-ID Gm10; pos 24539042 to 24539742 reverse strand)
ggaaaggtgattggagatttcacttcaaggagaaggtgagttaagaacaagttcacccctataggaggccatggatacgagcttgaaggtagaagaagatgaatggaggtagaaggagagaggggggcacgaatgttatgcctcaaatgaggtctgaactttgatcatttgatgggaagcaatgtcttggataaacagagtgggagcattcctgcaaattctgagacatcatttcctccaaaactcctactgcaattttctggtattaggttacggtgatggcaaacttggtggatctcccttacatggtgtatttggcaccatggaaataagattgttttcttaaatgaaaactccaatggtaacaaattgatggaggatgctctattcttctgctggacctggctaaaaaacttggaaaaaagatttgacatcccattccactactggtccagtcaaatcagggatgggttttgtaatcatggggggactagcatatagatattgtgtagttggacgccaagcttatagttagatctatggttacttaattcttgctgtatagcttgtattaggacaccatagttctgcataatatggtgctaggttgtatataaaacagtaccccatgtactgaaatatatattataatcttacttttgctgataaaaaaaatagtgtaataagaattattgttactt

SEQ ID NO: 18752 - DNA, 311 bp, Glycine max
  Intron number 2 from transcript Glyma10g41590.1 (locus Gly ma10g41590) derived from phytozome v7.0 (chr-ID Gm10; pos 48639477 to 48639787 reverse strand)
ggctgttcctgtaagtgttttttactgcataactcgaattaaaaattctctaggttgcttcctagtctaagggatcattttgttttctttttggggggtcatttttatacctgctcaacatttttttttaaatatgtacaccctttttgtcatgttattgggaaatttgttcaaagaaatgatagaaaatatttgagaggcgcctactttgtttgcttcccccacgtcttctttatgagctaacggcttgttttttttattcgatgcaagtaattattttttttcttctttttgttctaatgatcagttat

SEQ ID NO: 18753 - DNA, 756 bp, Glycine max
  Intron number 1 from transcript Glyma10g41590.1 (locus Gly ma10g41590) derived from phytozome v7.0 (chr-ID Gm10; pos 48639997 to 48640752 reverse strand)
tcttttcattcggaagattttggccaccgtttcaggttcttaatttaacttctctctgattccgctttctatcgtttccttttatgctatgtagtggtagcactctgtttgtttatttatttttcatccgcaaatttctgataacaaaaaaaggattagtctattagtttaaatggaatgaaacagtgagaccgtgctctgaaaaatcacataaaaaaagtccacagaagaataaaattcagaatttcatcattttttgggtcaattttataaaattcttcatttctcactgtagcattccactttttgtcaaaaatttctggtaaaattttgtgtagcattactcattttcaatccattaatacatatatcaaattattttgttgtttcttaaagccatttgaaaattagtttcttcaattgcaaggtctatgtatacttcaaaaaccttgatagacaaatgtaggcagtataactgaattgcaatttcaaaaaccttatcattgttgttgtaattattattgtgaacccataatttaaaaccatgatttttgccagccagatttgtactctccctgttgcctgttggggtccccatatgataagtttgaaaaaaccaaacatatgatgtggcttttcaattccaaatgttaactatgtactactgtctccagtgccaatttcgtgctcaactttactctcagcaaattggttagacattttattgattgtttattacggcagggacagggaggg

SEQ ID NO: 18754 - DNA, 1022 bp, Glycine max
  Intron number 2 from transcript Glyma07g06160.1 (locus Gly ma07g06160) derived from phytozome v7.0 (chr-ID Gm07; pos 4884486 to 4885507 reverse strand)
aggtaaattgcataccattaattaattaattaattaataattaataaattaacaactcaaattattttaatttaaagtcttcaactatttgaatagagttgcgtggtttctttacacactttgaatatactaaggaagtttgggtaacagtgccgtatgaatgccaagatgtttgatttctctttgacaatcttggacataggtacccaatagaaaccaaaacatccgtcatctcaataaacatgcaaacaaaaatgaaattggtacatttggtatttgctatttggtaatattagctgacaaactcaatccagaaatcaacaaatgaatgtacacctcataaaagtatgaataacaactttttttcctcctaaattatataacaaataaataattatgcatagataattttttcttgaaggaatgcatagatgattttagacaatttccaaaagtttgaatttcaattttattatagatcgattaaaatacaacgcgtagtttttgctttgtaaatactgttgaaattgaatcgatacttgaattatatacttttttttttataacttagtcggtttaattatgtaacggttccacagaattgaatggcaacacaacacaagacaaacaacaattatgtaaaatagcacaaaactgttaaattataatttcataatttaattaatatttgactaatccaagtaatttacctctcaattcaatttttaaaacaaaccatggttaaatataattaaaatataataatatctaattacaaattatcatatagttaaaaattattaattttataataattagttaaaaaattatatttaaaataatttttaaataaaataaaattctaaaattatatgtccaaatcatttatttcaattatatttaaacatttaatgtgatctaacaaaagaacaagaattatgttttaaatttatattttcataaccaaaccctttttctaccatacaggtaagagggccacgtctgaaggatacggtggacgt

SEQ ID NO: 18755 - DNA, 426 bp, Glycine max
  Intron number 1 from transcript Glyma08g00530.1 (locus Gly ma08g00530) derived from phytozome v7.0 (chr-ID Gm08; pos 236295 to 236720)
ggtttgttcaaaagcaagggcgtggtttataggccagtgaaggatgttaacttaggctctgatagcactgaattctatctccaagccaatgtcaaaggttcataattcattgacttttattgccatgtcttgctacttgttctgtttatctttatttttgcgttacatggttgattttcttcattcatggcaagtttatcatggtctactttcatagttaattaatacttaatagtaatatttgcaactctctggcatcagagaaggttatgaataagtggatgttagcacacaatgaaatatttcccagctttaaattgatttatctagtttagaatttaatatttatttatatcagaattattattggttgtcagaaagtcttaatagttggtaatgatcattgtttcaattatagctccccgc

SEQ ID NO: 18756 - DNA, 401 bp, Glycine max
  Intron number 1 from transcript Glyma08g09890.2 (locus Gly ma08g09890) derived from phytozome v7.0 (chr-ID Gm08; pos 7079479 to 7079879)
tgaatcacaccttcactcttgcgatttaattactggtaatctttttttttttaagattttttttttattttgtgcaatttagtattttgggtggttggtgtttaactatatttggctaatcatataaatattgaccttgaagattgcagattctatgaggttgaaattggaaagtgttgatgattcggactttgttctttgagttgctttgcatgttaattgatgtgctttactccgtgtgtttgtttgtcttaaattagaatgaaccaatgctttgtgtttatgaaaatttcatgcccaccagttgcttgatggaatggatattaaggttactacttactagggataacattgaattcatgttttatgtatcctttttccatattatagagtagttgagg

SEQ ID NO: 18757 - DNA, 853 bp, Glycine max
  Intron number 2 from transcript Glyma08g09890.2 (locus Gly ma08g09890) derived from phytozome v7.0 (chr-ID Gm08; pos 7080211 to 7081063)
ttgccgcctttcccactgcctgtgcccttgaagtattcttctttctgtaccctcttattgtgtttttgctaggaaccaagaattgaaatgagtaagaaaataacagaaaataggagagaaaactctcctccaagggtttccccttcacaaaggatttctcctttcacaaagagctaaagctcaatctacaactgataagatccccctctctcgtatccttcttcctctatttatatctaataaacccctctaacaaactaactaaactcattagtagtctaactatattaactaactcttccttctccttatatcctaacagttttgattgtattgtaattttttatttatttattttgattattgatgttaagacctgagacatttgagagagattggtttatcattgtcacaattttctttttatcatagagctactggactgtatcagtcaaataaacctgatcctgattccctcttctttttatttttaaaataacattaaatgtgtgtttagttgtaggagtgttgtgttgttcatgtaagtgttttggtttccatcttcagctacctgtatttgcatcatacggtacctacgttgacctttagaggaactgttaagaatccttagttttaataataccttcatttgcaatttacattgttctttaacaaaatagattctctggatcggtatgttttgaactcctgatgagatacaaaataggcttatgaaataatgatatttacttcactaaaaaataatgacaataaactgaatgtgtttgagtattttaaacatacatggttgtaggcatattattaatgttatatttctgttgaaatcaggttc

SEQ ID NO: 18758 - DNA, 724 bp, Glycine max
  Intron number 2 from transcript Glyma11g01120.4 (locus Gly ma11g01120) derived from phytozome v7.0 (chr-ID Gm11; pos 619830 to 620553)
caaaatccattgaggtaccatataattgtttcccagcagattgcttctttctttaatattaataaatttgtttcctggtttatgatttaaaacttcctgtgactggtgtgtctcgtatatttgccatattaaccagtttgggtatggccacctttgtcccattttattttgactgatcctttatttggattttgggagatgatgtgtcctagattaaattggttttatgcatgaaatttgttgaatacatctgatctcatttccaattgtccttgccttaaacatttcgtaaacgatggggcttacctacagtatttgactatttgtggatgcattatctaagaaattattgataagaagatgaaatacatgcttctttctatattatatttaggtgaaaaaggagagaacagattttatacccgaaccacacttctttttctttttttcttccaataataagaaaactgtttatattttcttccttttcttactcatctaaacaaaaggagggaaagatgatcattcttctcatttgttttctttgtattttctcttcgcatccaaaaactgcattagtagaaaatatggatcataaatagctcattcagatgccattgttgtctagcataaatattaaataataacttttgctgttatgtcacatgtttgatttgatctagcattaaatcagtgcaggaagttagtgaagtcgtcacactcc

SEQ ID NO: 18759 - DNA, 855 bp, Glycine max
  Intron number 1 from transcript Glyma08g34520.1 (locus Gly ma08g34520) derived from phytozome v7.0 (chr-ID Gm08; pos 31442241 to 31443095)
tcccaaacttttccactggcgtttatccggtcgccgtaagcattcattcatttcctttcactttttcccactcgattttgatcttgtgctgctgctaaatcaagtaaccaatagaaacgctgtgcttattttttttctttcatattttagtggaattgcagattaagataggcttggttagggtgaagaggatgagaatgtattttcaccttgttgtgtttgaatgacagaatcctatcgttatagtgttataataaatatatgatgtaacatgatgttatagtatgtcaattggtatcatataatcctttattgtgattggaagtttgttaacttacacagaataatgtttagtacagttctgatcttctctgttttcttgtttcttcttgttaattatgcatgattgagtggaatgaatagaggaattgaagacacacaagtatttagagctcttcaagggttatttttttggtctgtttggataaacttctccaacagctatgataggagaataaaacaagaagaaaaaaatgaaataaactatgcataagctagtttctagaagttctctcacatcagcttctccataagctaatttttaaattatgcgtacctaatttagcttatgaagaaacttatttgattttttcttctcttataagtgcttatggaaaagtttatctaaggtcatgcttattctatgcttcagtttagtttttttgaaggtgtgaccttggtatatagattttgactcaaattgacagtgtgcaatataagctcttatgggtgcttgcttttgtcattatttcttttgcagattacaaaattattctcacaatttgagtccggtaa

SEQ ID NO: 18760 - DNA, 410 bp, Glycine max
  Intron number 1 from transcript Glyma06g19190.1 (locus Gly ma06g19190) derived from phytozome v7.0 (chr-ID Gm06; pos 15390386 to 15390795 reverse strand)
tgctctccgccgctgccgaacttccttctcacgaggtatcttcttcatcttctcagacgcatgaatgcctgcgaggattttgaatgaacttgattgattttgaagtgacatgattcatgtttggattttcgtttttttattcaaaaggtaggttagtaacgaaactcagggtacgtttttttgatctaacacaattaagtattaattctggatctagaatcaagtactcaccgtgaaaccaaacatgtgaacgaacatgtatctaaaatcttagccgggatttcaacgtgattaaacacgaaaccaaatacgcacttaaattattcactttctacttggttgttatcattgtacacctgatttgtcgttttttttttctctcttaggttttgtcagacattttgtttatc

SEQ ID NO: 18761 - DNA, 366 bp, Glycine max
  Intron number 1 from transcript Glyma11g19480.1 (locus Gly ma11g19480) derived from phytozome v7.0 (chr-ID Gm11; pos 16194090 to 16194455)
gagttttggggtaacttcttcttttctcttttctttttcgcttcgtattcatcttttcctttcaattttcttaatgatcgatttctcttcatttcgcgatattttacggtatagtcttactcctccataatactcgttattctattatttcaatctagcaaaattattgtgcaaacaaaggtcgttaatccgtgactatgcgtccgtgtgtttcttctatgtaccgttcttttaatacgtctgattgaaaatttcgtttgcttatattttatttacggttcggtgaattgatttttgatgtggtgatatgttgtcttggtttgaaatttaggtgttgaggttaaggttggtcagaccgtgacagtt

SEQ ID NO: 18762 - DNA, 546 bp, Glycine max
  Intron number 1 from transcript Glyma11g20530.1 (locus Gly ma11g20530) derived from phytozome v7.0 (chr-ID Gm11; pos 17356680 to 17357225 reverse strand)
gtgctccctctcactccctcgccgccaggatcctcgtgagtttctctctctgtctctctatcactacttttttcatgtggaattaccgaagtaccccttgccgtttccttcgtttaatgtgcaatgctgtttgtagtggaagggttttggttttgaatttgggattattatttgtgcaaatttttttaagctaatttgagtaattgttctttcttagaaactgattccgtgctgtgaatgagatcgtgagatttgtttctttaaaaagtgcttcaacttttcgctcctctgttgtgaatattcgtggctgacactgcacttttttgtaaacataaattgtttgattcacctagaacacttactctcttctttcctctgtttgaatatttcatgcacatttagaagcattttatctggaaatatatgcttaaagtctttgttgactctgtatgtgaaggtgtttatctaatagcatttcttggtatgtggtaattgtgtaatttggcgatttgaggtttatgtgcttactgtatacaaatttttagg

SEQ ID NO: 18763 - DNA, 633 bp, Glycine max
  Intron number 1 from transcript Glyma09g01140.1 (locus Gly ma09g01140) derived from phytozome v7.0 (chr-ID Gm09; pos 677050 to 677682)
caggtttgttttctctttccttttctccttttcccgttttatttggtatgatgatttctttaaacaattccggagtatctgccattcaattttttggttgactcacccaattgcaacgtttgtgtccaaagtgaaaaacataaagaacagtagcttgaaacatgttttcaattacaacaagtcctagtctttccttaagtaggaaaaagtaacatagtactacttttttatatttttggtacaacacaatactcttttgtttgcagtaatcaattgccatatatctactcagaaattggcatgcaaatagcaattttaaaattgtacgatctgcagttaaaaaagggaacacgatcatggtcttttggcaattacttttctgacgtgtttgtttccatcctcttcataattatggcaattatttggtcaatattcaataatctgtttgttaaaagttaaaaccacttgttggagaattatagaaaaaatcaagtttcacgttaatagtagccttataaagcttaagcgcccatcactttatatgttggttttgtagagatgagttaagccaaaatcaaagaacaaattcaaactgtttagcaaaataacttagtccctattatgcagggaacc

SEQ ID NO: 18764 - DNA, 905 bp, Glycine max
  Intron number 1 from transcript Glyma10g31010.1 (locus Gly ma10g31010) derived from phytozome v7.0 (chr-ID Gm10; pos 39581244 to 39582148 reverse strand)
caagcgccccaaccctactcaacccgacacccaaggtcaattcttctttcccccccttaatcggttatttccagttatgttttcaagctattttgcaatttcaataaataccaccctagggttactcgaattcaaaccaattaataattaattctattaaactcctagtcgttgagtgtttcctttttgtttagctttctcgcgtgaaccctaaggtagataacataggttttccaattcgctatctcgttccttcgctttttgtgctgcaactctgaaaccaattgaggggggcgcgtttttattctacactgtttatgacatggactcatggaaagaatgtgcacatgcaagacggtgagaagaatggataacaatcattaacatactcattcaccatttaattgggctgcaaaattcagcttcaagacccttttttcttggaattctctgatttttcttttcacactgcgaacttcagtaattccagtctttaatatttagtgggataaaactttgttgttgtttcttttattaatgagaacttaagttgaattatgaaatgtatcctaatttaagagttccttatattgtttttatcaaaactaagaactctatttgagcttgccttggtttttagtatgaaaggtgtcctaatttaagtgttccaaaacaaacagaaatccaataagttgcaaattcaagcctctacctgtctttttggaatgaggtagacgtaagttcctctggtaagtgttttttggagcccagatgccttgggctggggcatcatcccctttccctaaatttagtttatttttctttacatttgcttttttctgaattctgaataatctattgtaatttcagctgcagcacctaagaaaagcttgaagttcaaaacc

SEQ ID NO: 18765 - DNA, 616 bp, Glycine max
  Intron number 1 from transcript Glyma05g34840.1 (locus Gly ma05g34840) derived from phytozome v7.0 (chr-ID Gm05; pos 39065269 to 39065884 reverse strand)
atccagaagttagaattagatataagcttgaaaaggttggatttcattgtgactgtaatttttagtttaaagttttgtttcctgtagctgttgtaccttgcttcttcaatgttgttgataatttacttttatgattttatgatctatgttttttgacatcctccagttttctagcaagtaacaatggtatgagcattgccctggtattcactaaattaatgtgcctccccctttctttgatgtatgggcattgaaataacaagaatgttgctacatatggatttgcatttgaaatacctccatgaaattctattttctatttggggaagtttctgttaagttatatttttctttgagacattactacttcgaatatatttttttccagttacctggcttgttagtataaaatcacaatatacatcagcttggataatagatatttttaacttggccattcacctcataagtacaggcatgatttagtgccttagataggctggaaagaggcattgttcctttcctccttattttttcctcttctaacttgcagtcttttattttaacttataattctacaggccaagcgaaaggaaacttggttgattgagaagct

SEQ ID NO: 18766 - DNA, 383 bp, Glycine max
  Intron number 1 from transcript Glyma12g08090.3 (locus Gly ma12g08090) derived from phytozome v7.0 (chr-ID Gm12; pos 5814829 to 5815211 reverse strand)
atcaaacccaaaaaacactgcacctcttcttctgggtacgccactttctcttctttttaatttttttttgttcttctttttcttcaacccctctattcgcaaaggaagcaacggaatcgattctgttcagttttcctcgttttgagtttaaattcacagtattttgaggaaacaaattaaagggtaatcgctcgcttaatccaccgagctcaattcccacatccccacaaaaaaaaatcaacaaaatcaggtttttttttttttttgctatgcataaaatttctttggaggctttgacttatatcgtaggcaacgaatcgggttattgattgataaggtttgatgggtgcgatcagatttggtgaagaagagagtgtgatttg

SEQ ID NO: 18767 - DNA, 816 bp, Glycine max
  Intron number 1 from transcript Glyma06g46210.1 (locus Gly ma06g46210) derived from phytozome v7.0 (chr-ID Gm06; pos 48868624 to 48869439)
gcagaacccaaggttaaatacgatcgccaactcaggtacactcttgccacttccacatttacctaatttttcaacttcgcgctaacctaactgttttttttcttctaaaaaaaaccctagcgaactaactctatggcggggaaaactggttgtttcattattggttgtggtatatgaattgaattgattcgagtgttgtgtgttgctgttcgttcgcacggaatctttgactgttaattagttgaattgctatggctgaaggtccgtttgtttgttttttttttttaacgatgttagggatttggtgatttgattaagtgtactgaaccgtgaatgaactggagtggagttttttctgtgtatgatgagatgcaaattggagttgagttgctttttatttgcaaagtagaaactagttgatattcacaattgttgcttgttgagtgaaatgtgctgattcttaacttgtgctgcttttgttgtgatttttctgtcttcgcgtacatgtgtgtgttttgaatttgatgtattcaagtattaaatcgaattcttaaggccgtttggtttaagttttgcataggaaataatagaaacagaaaataattaaaaagttgtcttcattgtttcttgtataaacttttaaaatcatgaaataaagttaaaacatggtggcatttttgtaattgaaaatgaaagtagaaaatgttttctcaagccaaacagtctcttttgctcatcctgctgtttttttggggtagtcttggaggcatctctgatctcatccatattgcaaatgtttatttgaaaatgcagaat

SEQ ID NO: 18768 - DNA, 689 bp, Glycine max
  Intron number 2 from transcript Glyma13g01100.1 (locus Gly ma13g01100) derived from phytozome v7.0 (chr-ID Gm13; pos 835978 to 836666 reverse strand)
gcttggatttgtttctcgttggatcaggtaaattactcttttcctagttatgaataaaacgctttcatgtgtgcatactttgatcaagatatcattgtagcctgccactggagaagggaataatgaactaaagcagattcaaaatcttcaaattgttcaggacaaaggtttaagtttactaatttggttccagttaggtagttcatgttctctaccaaaacatataacaaaagttgcagactctcaatcgggtggaaagtggaaacggattcacgtgggtgatgatagtgttaggaagtcccacgctcaatctttgaggtgcagcttatatatttgttggataacttcacttaatgtcaattggttttaagatgaaatctaacatgctatcagagtctagagcctgtcttagttttctccaccatgtcggtggttcgcctatattggcagcgcatctgtggaagggggatgttaggaagtcccacatcgcctgcctcaaaatgaaatagatcgtacaagcaatttattttggtagagggtgtccccactagctagtttaagttgtggcaatatataataccatcagaatctaaccagaagtatatattaaaaaaaagaagattctatgtttgaaatttgaatactaataattggtttatgttaaactttgtgaacagatcgctgtgtac

SEQ ID NO: 18769 - DNA, 297 bp, Glycine max
  Intron number 2 from transcript Glyma12g01750.1 (locus Gly ma12g01750) derived from phytozome v7.0 (chr-ID Gm12; pos 1077928 to 1078224)
atgtgagtacatttcctttcattattttagtttgtttttcatcaaaattaaacttgatggagatgaaaatgggagaagtaaaatgtaatagtttgaaatttggatgaagatagatatatgcatgctcaattattttgaggcctgtggtaatgccaaacaatcaacccagtttataaatattccacatactccttttcataatctctttaccataattgttgtttttcttctcgtaaacttttctgatgttgcttattgagtttgtttcccctaattgactgggaaataggtaaaagt

SEQ ID NO: 18770 - DNA, 746 bp, Glycine max
  Intron number 3 from transcript Glyma09g08150.1 (locus Gly ma09g08150) derived from phytozome v7.0 (chr-ID Gm09; pos 7217383 to 7218128)
gaaaaattctcccagaaggaattggggaagttcaggtatcgcaattctctttgttctgccatattatgttacatgtcctgacaccaaagaaatcagagtttagattgtgtataaggctataatacttctttgatggcaactaaatcaagataaggtggtgagctttagctgtttctaattagaacagtgtgatatattcagggacatacaaatttatgtcattctgatgaaatttatgccctctagctgattatccggtgattttcattgcaaatgttcttagaaatgtgaagggatttgatgctttttcatgggggtcttcctgagcaactgctcatatctaactacatttacattttattttcatcgatcgcatatgtttttcacctaatcaaaaggttctgttctcagaagaaaatggctgttctattcagtttttttagtaaattgcgtatatttcagaattttctatattcactgcatcatcttggcttaggccccatggttctctgaggatggttgcttttcaaagttacttcattctttctattgggagcattccatatatgtttggtgtgtatataggctaactgcactctgaaagcattttagtgttttttctaattatgcacagaactaaattaatcacatacaccatgggaaagagaaaattattaaagattttgcacataacatttttatatgatatagtttgtgatctttatccattacaggaaattattgat

SEQ ID NO: 18771 - DNA, 532 bp, Glycine max
  Intron number 3 from transcript Glyma06g15360.2 (locus Gly ma06g15360) derived from phytozome v7.0 (chr-ID Gm06; pos 12118983 to 12119514)
tgtttggtgagtaatttgttttgccttcaattaacacagctttgataattatattttccctcctcagaagttacaaatagggattttttattgttctactgtagatgtcatatgtctgaaacatgaaaagcaaaataaatgaatatagtgcataaacttgaaagttcaaagataatagactactcatggttttaccaattgagcaggaaggcattattgttatcagaatttagtggctaatctggaagaactcatttcaattatgctctaaatggtttagaggatatcttattgccctcattcctgttcttctctgctttctttgatttattttttttcctatcagcacacaaatagtattggtggtgctaaaccttttatatttcttcttttattttttaatctctccgatggatgatctggatcttggtacctgaccttactctttgttttgaatgtgatgtataaaatgtgaaggctcttcgtttttggtgcaggacttggttttgtgacatcgttagcttttgtattt

SEQ ID NO: 18772 - DNA, 1044 bp, Glycine max
  Intron number 1 from transcript Glyma05g34730.1 (locus Gly ma05g34730) derived from phytozome v7.0 (chr-ID Gm05; pos 38963580 to 38964623 reverse strand)
ctgaagacgaggtgctaatcttccttcacctttacgttttcggacttgttaaatcgtgtaacctaatttcccgttgtgagaaaaatggcgtagagagtggagatttcatagctggttgcattttcaatgacgaaacgaaatgacactcttgtttcttctgtcggtcatttcctcttgttaaattttggtcaaactttgatactccctaactagcttgaatatagattttgcttttacagaataaattgatttgcaggctatgcatgtttcttaatcttctttactcttctgttattgttcgtaccaagagatgataaaatagaaaaggaaaactgtattatatagcatttttgcttgggggcagaagctaagttcagttgcggaggaagaaaaataagtattgaagcggaagatatcatttccttaattgcagcggcgttttctgatctttttgtttattctcattttttaatctacgcgtttgtgcacatgtcgtggttatactgtgtattgtgcataaaaaaaacgaagtaaaaacctccctgtttgtgacattgtcactaaatatccacaataaaactgattgaatgctatgtagcagaaaaagaaaaagaccagattgaatgctaatgctgatgctcattcattactaaaccgagcttttataagcttgtaagttaatgtggttagctaacagcttctggtgcataaagttatttcattttctcctactagatatgaagtgatcttttactgtcagtccttcaatgcatttcttgtaataaattgtttagatgggaaagctttgtttcaaaatttaaattatcagagcttcctataggtttcttgattagtttgatgactgctttttcttttgtaatattaaggctatatgcttttggctgtgcttctttcatactttctcgaaagcaatattttcataatttggctttatcactccttcagctatgttttgatcattctgagggaaatatattctgggatgtaggtgatttttccagctctagatatacgtgtgaagaa

SEQ ID NO: 18773 - DNA, 435 bp, Glycine max
  Intron number 2 from transcript Glyma06g11260.1 (locus Gly ma06g11260) derived from phytozome v7.0 (chr-ID Gm06; pos 8630858 to 8631292)
ttacagacgcttggccaaattctatcatccaggtgtgtatctccatcttagctacttgctttcttgaagtggcatttgaattgtattgcatctgtcaatttgatatttgtttatgatggttgtggtggcctaatgctatatctagcagcaatgtattattatgttcattcaagatgaagctgagcaattgcaactacttatcggttaggattttgagttttttcatcttgttttaaatgctagtctgctggaacgtgggagatgttttgtttttctttacaagaatgttcctatgaagcagttatggctagtgagtgtttcttcaactgtgtgccatacaacttagttgtgatacagctctcctgtggtggcattgtttattaaagatgaatataacctctcaagacatattaactctgtttactcttcaagtct

SEQ ID NO: 18774 - DNA, 587 bp, Glycine max
  Intron number 2 from transcript Glyma13g24130.1 (locus Gly ma13g24130) derived from phytozome v7.0 (chr-ID Gm13; pos 27454041 to 27454627 reverse strand)
ctgggggtataactctttctctctctcttctttcatctttctccgttatgcgtgtccattaatattattaattaactgttcaacacttattatgatcatgcttcaccactttactattaacacaaaaaagggcacttggaaatgacagtgtcatgcttttttttttttttatcattttatcgtatatatatgcctcaaatagatatgacataagtttttagttcatgcataaaaataacaaggaatatatatatatatatatatatatatatatatatatatatacatacacgcttttacttattcactgatcaaagcctaaagaagtgctgaaatttcatatgggtatctaaatataaatataatcttatagaatatttatcgtatcacgttttatatttttttataatatactgtatcatgtatattaattggtagtgccatattaatagaacatacatattttcacacttgtcaaaacattatttttgtccctatatatagtgtgctaaaatggaaagaaagtggaaactgatataggattatattaattcttaactaattttctgttgttttttctgggcaga

SEQ ID NO: 18775 - DNA, 604 bp, Glycine max
  Intron number 1 from transcript Glyma13g24130.1 (locus Gly ma13g24130) derived from phytozome v7.0 (chr-ID Gm13; pos 27454718 to 27455321 reverse strand)
ggaagcttggcactgattttcttggtataacttcttcattttctgtgcatgttactaatcgtaaaatattggaaaaaatatatttttagttcttttattttcactaaaaacataattaaggtatctgtactttcttatggataaatttcatttttaaatttgaaaaatatgtgtatttagtcatttttatctaagaatttagtatgttttgtaaaaataaatatgaacaagttattgttctaagtgttattgaatttaatactcttaaacaatatttttaattcgaatattgtggataaaaaatgtgacccaaaaaatcattaaaattggccagattttcaacaaaaagtatttatcaggaaaaatactggaatgataaaacaaattataattaaaacaaattacatattttttaaaatttaagaattaaattcattaatatgaaaatacagcacctccttgattacgtttaatcaaaagaaaaaaaaagaagtaaatacacgtttttcttaaatttaatcaattgttatgtatttgcaaaattgatctctcgatgcttggtgatgcagcttcatatctgggcctaaaagagttggtgccgcca

SEQ ID NO: 18776 - DNA, 797 bp, Glycine max
  Intron number 3 from transcript Glyma11g07330.1 (locus Gly ma11g07330) derived from phytozome v7.0 (chr-ID Gm11; pos 5132956 to 5133752 reverse strand)
gcaaattcgagctcgataaccttctcaaggaagaggttaaatttgttcaattcaaatgtttattgcttcttaataaacaagttgtttacaataatgtaaccggttttgataactaagggagggttcggagtaagtgtttaagagagtttatgaaataggatatgatacgctctatatacagttttcagtttattttaatgagctcttagaatagcttttgaaaacagcttagaacttacaatttaatgttatttcctcgtcaattataaagaagcatatacataagtgcttacattgtaatcatatgcaagcactaagcacttttttatttggcaaatgcctaattatgttatttacccaaatgcacccttgtatagtcagtcatgcttttggaagacaaaccgatttatcactctcttgtttgatcggcatcaggttctgttgatgctttgtgctaatattatctaaacttaatgctttgcattgagtaaatggtttgagatttttggtcttgatccaatgcttttgcctcttgaaaggtttatttgcagtagtagtagtagtagtgccaaagcaatagcaatgagcacttgctccattgacactttgaataaatatttgttgaagtattaagaaagttaactgtagttgttgctcgttgttactgttttggaatgcttacatggttgtcttttgctttttatccatgtgggtgtttgtttacagttggtgttaacaatgtttttattcttcatctaacagaggctatccggagcatctttactgatacttgcaaa

SEQ ID NO: 18777 - DNA, 523 bp, Glycine max
  Intron number 3 from transcript Glyma07g06950.1 (locus Gly ma07g06950) derived from phytozome v7.0 (chr-ID Gm07; pos 5609273 to 5609795 reverse strand)
tggcttttgggacctacgagtccagctccaatcaggtcatgctcgtgcgtattgtttcactcattgttgaatggtttttaatgcttgtttgaataaacttatctggaagcactcgtagaaaagaaaaaaaatgaaataaaagctattagcttagcatatgtattaattaaaaaaatagtttttttttttcatcaccaaatgagtggatcaagtgatagagttgttctagcttaatctgtcttggaggaagagtttttgtcgcgtaagtgatcctaactggttcgaataggatgattgcctttattgtaagatgtggtatatacaaaaaaaaaaaaaaaatcattttttagagaaaataatatgataaaacttctataaattaacttatgcatgccttaattttagcttatagagaagattttgtttttttcttctcttaaagtgcttattgagaagtttattcaaatagatcattaagtgttgttgttttgattttaagcaggcggtggatactgcggttcgt

SEQ ID NO: 18778 - DNA, 992 bp, Glycine max
  Intron number 1 from transcript Glyma11g33560.2 (locus Gly ma11g33560) derived from phytozome v7.0 (chr-ID Gm11; pos 35364406 to 35365397 reverse strand)
gataccaccgagaaggtgatcgcagagtacatgttagtctcttttctctctctgtttctctctgtctcacaaagtttttttttggttctgtacgaacaccaacataacaacctgggaaaatgtttatgtttgtgtctgttagtgtgtacatggtttttttacgtgtgcaggaacttttttttttctgggatgaaaaaaaatgcttttttttcttctcatgttgggtgtggtttatttttactaatcttttatttgatcactgacactaagttgggtctaacggaagacattagtctgtttctctcgttacatgaacagatcaaagtttccaatttttctgatggaaaaatgctgaagttttagtctttcccacttgagaggaaccaaagaaataaaatttttatttgatccatcactccactctactctattctactacttgcttttgttccaccccttttaaaatgaccctagagaagtttgatctctgagttctgaattcatgatatatctcattaacttgagtattgcaggaattgaaattactttttcttctatgatttcccctgtttttttcttttcttttttgcgggtgttccattttttgtgtgtttatgagatgtattttattctctctcgatttctcagcctcctttttgattttttttggggtcgttccgcttttgaagtgttaaatctataagaatgtttcctctgttttgactttgtcttttggtggttatgctatttgatcacttcaaagatgagtttgcttggaattaatttgagaaaggaagattctttttccatgtttctttcttgttgcttgttacttagtttcttgcttttataaaatacaacctaaattattcttcatgctcactatcaaatgaaagcaacttgttagaccatattttttcggataaaatttttcccttttgatgcattctaacatttttattattcaccatggtaggatcggtggatcagga

SEQ ID NO: 18779 - DNA, 990 bp, Glycine max
  Intron number 2 from transcript Glyma06g03220.1 (locus Gly ma06g03220) derived from phytozome v7.0 (chr-ID Gm06; pos 2263280 to 2264269)
ttggacagaggagtgcaggtgatttactcttcagtcttccctttttattgttatttgggtgacagtggtgtatgctgtatgcatggtttcttggttcagtatctatgatatctgtgttttgagagaggaaatacatgtgatgtgatgccaacatcatgtcatagagctcaaagtagataaggggagtgccataaaaaatcattgtgtaatttgttgaataagattgtagtacaaggcaatataactaaatgggatgagagagatgaatatatcatgtaagctaacatgcaacactaactggtttgggtatgattctgagcttagctactctaacttaatacaagtgatgtagggattcagttataacctgccatcgaagtcatctgaactaactcaagtttctattataagattagtaaacatgtgtatattatacagtcatgtagctccaacataaatcatgaggaagcctgagtgagtgctcgatatgtacaatagtttaatggttgtgaatattcatcaatcgtcacccctctccccattgccatatttcaagtcaaaccttaatggataatattctactatttttcttctcacatttaattcgtggcaatttagaaacttgcattaaggtaaactatagggatcaaacatgtatttaaacagtatataactaattaatctgctactcctattaacctaataacagaatttaatttagacatttaaccactggatatgctattgcaagcttgttgaaatatctttccacgatttcaatttagcattgatttcttaaaaaatttgatagaaagaggatttgttcttcacccttctcttctatttcttgaatcaattgggttggatattagttccaatctgctgtaaatggctagatcagcattttgtatcaatgtgttattggacttcttagtgcatcctttatttacatgtttggctcctgttaggtcctgtctgccaaaggtgaaa

SEQ ID NO: 18780 - DNA, 813 bp, Glycine max
  Intron number 3 from transcript Glyma10g28760.1 (locus Gly ma10g28760) derived from phytozome v7.0 (chr-ID Gm10; pos 37626752 to 37627564)
atctgctactccggctcacccggctggtttacacggtgggatgttttctaacatttttatttgagttatgacaatgttgtcctagttctattattactaagtcttgtattgactttaatttcttagaatttagacttagggtctaactcaattccacaaaaccagcttgtacaatgaggattgcccaagctttataagctctagttcggtcttatctatagttgatgtgtgttgcaacccctaagagctgacatcctgacggctgcacactaagacactttactcagcctttcagcccctttgtaggtagtccttttcgatgcattggcaaccgactatgcaattaaagtgggctaggggtaatggtaattaaggtggctttcctacacttaagagttttcttttattagggtgggtgggagttaaaatgaatatgtaaaagattgaatacaggcctgagtcaaaattcccttgtttactattggaatggaaagcattaaaaactgtcttttgcatggttggtatcaattgatattgatatggcttttcttttatttaatatggcttcatcgatcactttctttaacctcaaaagtgctcttacaagcctggcattgcaatccagtaaatacagtttattatagctgttatcttctttgagttgatcaaaatcaagcttgtctaaaaattgtttgatgcttatcttgtccaattattttattctgtgtcttttgccatctacattattgatgactgtgatgttgaatcatctaagcttctcttaacttgaagattatatattttcagcttttt

SEQ ID NO: 18781 - DNA, 1005 bp, Glycine max
  Intron number 2 from transcript Glyma08g29060.1 (locus Gly ma08g29060) derived from phytozome v7.0 (chr-ID Gm08; pos 23469726 to 23470730 reverse strand)
cttgtttgggaggttagccccttctctctcagcatccattgatgttgtttcgggatatttatgtcttttacattgcatttgtataattgtattcacattatgcggtttgcagtaatagaaatgaaggcgcgtctatttttctcctttttggaagttaaaaagttctatatttgaaagggaatcaaagttaagtaggtgttctgcttttgttataagttttttaaagaatcattgaatgggttagttatgtcattatttagcttatcattatgcttagaccaagtgtacatgatttagtgcttaaaaaaatcattgtttttgtgtatttggaataaatatgaactgatatgtggagccttgacgtaaggagtatgttattaactttgtcttacctttacctctgttcatttcttttccaaatactcttctcaatcttcttaggttgttagtagtgccttttcatgctgccaatgcagtataaaatataaataacatcctccctccattgttagtagtacctttacctctgttcatttcttttccaaatactcttctcaatcttcttaggttgttagtagttccttgtcatgctgccaatgcagtataaaatataaataacatcctccctccattgctttctaatagtctaatagatcattgtgttctccatctcttcccacttcagcatagtttgaatgagatacatcaattttacaaaataatagtttttgttaagatgttctacatcagccaaaatactccttataaaacttgaaaaatcttctctccttgagttaacttttggggttgagttaaacctaacccattgtttatagtttctttattatctttctcttacagtttgagtcttcagatgtctactcacagttttgttgtttcagtttgcactaagactaatgatatagatgttaataatgtgcacaaaactttgtgtattttccttgtgcagaacttttgttcaaaggaagacaccattttttgtgg

SEQ ID NO: 18782 - DNA, 610 bp, Glycine max
  Intron number 1 from transcript Glyma11g35600.1 (locus Gly ma11g35600) derived from phytozome v7.0 (chr-ID Gm11; pos 37241088 to 37241697 reverse strand)
gccacgtcgccgaaaccctcaacatcgatttggaggtactaattgctatagtctattcttgtctttaggaggaggaaaagtggcctgagttcagttttttcgtataagtaccaaattgagaaccaacctgcaacacatataggactaaattatgtgtttaacctaaaatttaaaatatgcctggaattttttgctgcttgattgttattcatttttatttttttctgtcttgtttctttatgatttttatattgctgtatttgctcactttttccctgtgaaacatgtttgccgataaagaattatcgagagaaacccttatttctgtgaatgtcactgactagcatcttagagaggagtgttatttagaatagggatcattagtctaaatatgtgtataatacaattggtacatctatttacagaacattaataatagtaaattaatatgtaaaaaagtttgttggttgtatttctcagcactttgttcaataacttttttttttttgtatgacccgtataattaaatattttccttttcctggtgctactatttcaatttttctattgaactaaattcaaatgtgcaggaactttatattcacattgg

SEQ ID NO: 18783 - DNA, 444 bp, Glycine max
  Intron number 3 from transcript Glyma08g09870.1 (locus Gly ma08g09870) derived from phytozome v7.0 (chr-ID Gm08; pos 7054780 to 7055223 reverse strand)
ggctgcttaggaaacaaggtgacctaacaaaccccactcaattgatcatgttacttttgcacctgatcgaatatacgtatttgttttgttctatactctcatacaaatcattactgtcaacatcagccatgttaaataaaagtttatcacacaagagtttattcataagcttcattcttttttgatatgttcataagcttcattattttgttattgaaataagctgaaaaatccttatggaaaagtcataaaaaaactattatgagtccaaataaattatttataaactcttctctgagtgtcctaattagtgtttaatagtcaatactcaatagtctaaatataatcacataagcattggttatctaaaaatcctaattgggttaattttggtcacaactccaattaatttgcagggttctatatcagtgagatttcagttac

SEQ ID NO: 18784 - DNA, 232 bp, Glycine max
  Intron number 1 from transcript Glyma08g09870.1 (locus Gly ma08g09870) derived from phytozome v7.0 (chr-ID Gm08; pos 7055779 to 7056010 reverse strand)
atcacaaggactcacacaaatacaagtaagaacacaaatatcctcttctttatgtatcattatatatataaaaagttgtagatggctgaagtatgtgcctgatcattgatcaagttcaattctattctgggttggttctgcttctatggttttgttcttctctatatttttttttctttgaatttttctgatattatgtttttcacttcttgttaagggtatttgttagtac

SEQ ID NO: 18785 - DNA, 338 bp, Glycine max
  Intron number 3 from transcript Glyma09g32450.1 (locus Gly ma09g32450) derived from phytozome v7.0 (chr-ID Gm09; pos 38982322 to 38982659 reverse strand)
ccataacaaacctggctggtatattccttttttttttctttctccaatctatgtgtgccaattgactattctattgctcctgcaagcttctaaagggattgaaattgtttcctctttttggaagaggaagtgtgatttcaatcatacggtttgatttctataaaattaatagaatagatagtgcagtcatctcaattcaaattcaagcacatgtatatcacaagtgtgactaactgaaatatgttctctcaagtctcaatgaaatttccattcaataatttgtttgtttctgattcaatgcagcatctgttttcggagaacaatcaaagctggggcca

SEQ ID NO: 18786 - DNA, 446 bp, Glycine max
  Intron number 2 from transcript Glyma08g24050.3 (locus Gly ma08g24050) derived from phytozome v7.0 (chr-ID Gm08; pos 18286395 to 18286840)
ctctccatcttgcatttttgtttggtaggtgggttcataatcacactactttacttttggggggtttcaacttttgcttattttcttttctttttctccgttttctactacttattcattcattcccgtgatctacatgaattgaaaggtaggacatttccacgatgctatatgcttacttcgccatttcatcaccctctcttggaagttgctacggaatctaggggttcaacaacctaaataaaagattattttcttccgtataaattttcctgcgctttgttgctgattgtcaacataacaaactactactagtacttgggtctgttatttagtagtagtattctcattctcttttgatgtgattattatggtttttgaccaaaacatttaaaatatatggctgagtgtataatagtttgtttctgaaagtaaggtgataaagc

SEQ ID NO: 18787 - DNA, 497 bp, Glycine max
  Intron number 1 from transcript Glyma07g38270.1 (locus Gly ma07g38270) derived from phytozome v7.0 (chr-ID Gm07; pos 43067827 to 43068323 reverse strand)
ccaggtcatctcctttctcactttctttaattccttctttccactatcgcattgcattgcattgctcagtatgcatgtaataaaactggtctagatgataaaaggaagtagttggaacaaaaagtcttccaacacttgacacctgttactcatttctttgcgtgttacttgttgttattattattatacctcattaaatgatgcaatcttgaagaaacaggattcttccctattttgtcaataggtgtttttttttggaaaagaacacactcatgtatgataagtggttcgacataatagtgatatttcaatgcatatcctcattgggaacggataaataatttttctgcagtggctgtgtacttgcttgatgttctctttcttctatttcgtggcactctgttacatttattgaatgtgaaggaattaaagaaatcaaactgaaattttcgatttgtattgcaggcctgaggatcttaggatcccatttgagcgct

SEQ ID NO: 18788 - DNA, 510 bp, Glycine max
  Intron number 3 from transcript Glyma11g15970.1 (locus Gly ma11g15970) derived from phytozome v7.0 (chr-ID Gm11; pos 11659965 to 11660474 reverse strand)
aaaggagtgaatactgtcgtagtgaatttatcagagtggattaggcaatctgtgatttgattgattgttgtatccctttataaatttaagtgttatgctatgatttcttcaataatttttgcaagctttattatgtcttctgaacaagaaattaacagaaactatctccagtttttgctaatttaatcctccaatttgttaagcataatgcaggtcatactttataagtttataaagttaaacaatgactagttgtaattaaaggaggtgagaaacgaatatttgcctaatattagcaaataatggttggattgcaatacaaaaataaaccacttttccaaaggagattttattttctcttctgagtaaactccatttaagcccctgttagtccttggcactttctttaaatagctaaataataaaagtcatatctttaacaggctaactagattcacgccaaattatgattggttaagcatgcagttaattgcttctatgacacagaaa

SEQ ID NO: 18789 - DNA, 730 bp, Glycine max; identical to SEQ ID NO: 17434
  Intron number 2 from transcript Glyma10g37870.1 (locus Gly ma10g37870) derived from phytozome v7.0 (chr-ID Gm10; pos 45762309 to 45763038 reverse strand)

SEQ ID NO: 18790 - DNA, 967 bp, Glycine max
  Intron number 1 from transcript Glyma07g34110.1 (locus Gly ma07g34110) derived from phytozome v7.0 (chr-ID Gm07; pos 39035603 to 39036569 reverse strand)
ataatttgactcgccccctcaaagattgttccattgtaagccttaccaatcatctatatatattaattattcaatgccacggtatatattagagcatataaatctataacggtgataataactcataaactatatcacgtacgtacgcaattctattttttttttgtcttggttaattaatttcgctttgaactccatgcatacgaaccttgcgtatctaagtatgtctagaatgtaaaaatatttaggtaacttttatcagagtgatgttacatcatgaaaaattatgccactatctaaaaaaatgaaaaatatatcacgaagttatgtacgaacatgtttgttacttttttatttgttaaaagtaaaataaataaagaaaattagaaagagagatttaacaaattatgggttaccattcatttgccgtttcataaatttcctcacacctgaaatctaacaatagagatggtgttatagaatatatgaagtacgacacctcagtcccttgtcgtgtctggtgttcgacacatattcgtgttagtgtccgacaccgacacgacactcgtactacattctatattttaaatattacagatatttacgtgtctgtgtcatgtttgatgtccatgtcagtgtcgatgcttcacatcatagaattaagaaaagagagagagacagagagagttagaggtgtgttaagttagaattgtgttgctagcaatcttttgagttataatcaattgaactttttttctctcaccccataagccaataataaactgtgctagatagagtgtagaatattaaagtagtgtgtggttaacatatcttatattttaatatacaaacatgtatttttcttggctattagttgccactacaacacccaatagtttcattagttaaattaaatgggggcctgcatgcagagagattcgagtgccaagtacatagttcagcagta

SEQ ID NO: 18791 - DNA, 1044 bp, Glycine max
  Intron number 2 from transcript Glyma10g07820.1 (locus Gly ma10g07820) derived from phytozome v7.0 (chr-ID Gm10; pos 6620027 to 6621070)
agccaggggagttggctatcatttcgaaagaagcggtatagttcatagattattaaattaaatactgttttttttctgcttttgcttttcacaattcgtaattgtccgtttcgctatatgttgatgattctatcgtgcagtatttgattttgattgcatttggacctgttgtctatttgtcttgttaactgttataagcaaggttatcatactgctattcaaatcgtgaattgtcaagcttgtttttaaaatcataaattgtatcaaatccttaaattcataggaggtatacatgtgataattttaaactagaaaaagaccgaagttggtaaattgtaactgagtatgtgaaccctatattttagaagatggaaagtagagcaatggaatagccaaatacaatgtatagaatgagtgagtgaccatgcaaaactccgtcttcacaagaatgaaaatagaacatctgaaaaattggatatggtgcgtttagcagtgcccctttagccccgtttttaatccttcaagcttttcaaacttttcaatttctttgataagaatggtaaaaacaatgtaaaaaaaaaaattgaattgtgcaattcatatcaatgatatgaatagttgggtagtcaaatcacatccgaattgtgttattcgaattgtgaatagtaagattctaataataattatggttcaaaacacaatcttgaattggacatcttataagagcagtaattttaactcatcctctttgttttattaatatatttgaatattcaaatagaaatggttctgttttcagtttaacgtgttaggtttattaagatgtgttattgctgtttcctagaattgttatatttggttgcaagtttccaatggccaagatggtgaagcaaacttcatgcatattctttgtagtatctccactagttctcttctacatttttcttttcacattttgtatcacacttttaactcttgaacttgttgtggctatttttcgcttcataatcccttatgtatctatgtttgcacaggtagcacctt

SEQ ID NO: 18792 - DNA, 706 bp, Glycine max
  Intron number 1 from transcript Glyma10g29150.1 (locus Gly ma10g29150) derived from phytozome v7.0 (chr-ID Gm10; pos 38062089 to 38062794)
gctggaccactttccaatctgccactttcggtgagctatgttgaaagctcacgttagatatagctatcatgttctaaaatgtcacgtattatctgtttatgcatgctcattaattccagtacttgggtcggataaggagttgaaatctaagttatttagatattattcttaacacaaagttctcaaatccatcagtgatatatatgagtggacatttttatgagagtaaaaaaagtaaatctaaaccatatatataatcaacatgaatgatcaatacggtccctaacccaattaattgaatataatatataaattgttataaattatactattaattaagaatttatttttaattaatttctatgatatctgttttcaatttctaccaataaatagaaaacataaatcatcatatttaatattagataactactttaaaaaaaagtgatacgactttttaaaattctcatgatttatgtgttttaattttgaccaaaggataaattatcaatatttatttctttgactctcactagatactttctgtacatattcttatcaaagattattttcctatgagacattcaatttgaccttttgtacttaactttttcttatgccaattcagaaaattgtcacatattagacttatctgcttgtgtgttgttcagctgtagttggaaaagggtttgttgcagtgaacata

SEQ ID NO: 18793 - DNA, 498 bp, Glycine max
  Intron number 4 from transcript Glyma13g21770.1 (locus Gly ma13g21770) derived from phytozome v7.0 (chr-ID Gm13; pos 25321556 to 25322053)
ttatcagaggcttttggctgaggaaacccgcaaaagtgagtctctccatcgtttttctggtgcacacgggtattagtaataatagtgagtgtaattgttcaaaaacaatactttttacattattttaacttgtttgttgtgctcatcgcgtgatgttttcctgtatttttccctaaagagtttgacctgtatttttccctaaagagtttgaggttcaacctagtttctagttattgctttgagtttgaaactgttttagttacttttcatattttttttataaattccttattgaaatagaaagcaggggtttatggcttaccattatgatagctgtctagttaatctttttctttgcaatttttgtgggaatctatatacaatgttgtagtttgattatgcttcgttgcatctatttctatgctggtgtctccaaatgtatctcagattcatttattcttcttgtctattgatgatttgggtgtgaactttcggtag

SEQ ID NO: 18794 - DNA, 938 bp, Glycine max
  Intron number 1 from transcript Glyma13g39910.1 (locus Gly ma13g39910) derived from phytozome v7.0 (chr-ID Gm13; pos 40456561 to 40457498 reverse strand)
gagggaggtaagatactttaataattattctaatatatgtatatagatcagttttaatggttatacgtaaaacagatttatatagttatagttattcaatcactgaccactatatatgatcacttgtaattagatatttagtgtaaaattattttattacatgagaagagtttttttttctttttctctctatatgtatatacttgatgggacaactaacattgatatgaattgcacttatttttatttgtcattcaataattataatgaatttaagtaaaaagcatttatagtgtaaaaagtttgttacaatatcataagacaatatcttataacatatatacgattactcatgtcaagttggaatgtgtttattttctatacaacaataagaataatacataccacatttgatcgataccatcttgtataggcttgtgtaaattaacttatccttatatataaaaaaaatttaggtggttttgaattactatgtgatttataatctaattaatttttatatgatatgtaatcaagtgttattaatttttttatcttaaattaaaaaatttaaatatacgtcacattaagattgatcaaaattatgaacatgttatagtccaagaactaataagaataaaatatataataatttatgatcgaatgatatgataaaagttgttatactttgagtacattttaaataaattcaagctttattcaattttatcccttacatataattccttgatccctcggatggatattccattccattacttataaatatactagctatgctatgagcttcttcatcgatctctgatgacctttttgattttctggctaataaactaaatccagttcgtatataaagaagagtcagaggaattgaagaaggtacatgaaggtggtatcgatcacaagcaagtgccaga

SEQ ID NO: 18795 - DNA, 725 bp, Glycine max
  Intron number 1 from transcript Glyma13g35470.1 (locus Gly ma13g35470) derived from phytozome v7.0 (chr-ID Gm13; pos 36873705 to 36874429 reverse strand)
caatctctcgttgtgcatcttcaaccttcttctaggtgaccccatgttcttccttttaaaagtcatataattttctttttatgaaactgaggtttaaaataatgaatgattatgatatttgatcatgtgggtatttttactgttttcccccccaatcaaaaatagagtttcatcttcgtgatcagcgctgattttaaatatgttttttttattgtgtgagccatcaaggtgaaattttaaattttaatttagaagcacggagattacttaattgagtagtattatatttgagaaatatgtaaggttaattcataaggcgtgttggattaagtcaaagtcagagtgaatgggttttggatcatgtggtcttaatttgatgctgacacttatgtgtgtatacaaatatctagatttagattctgaacatatctcgagagattagttgaagtgagaagaaaagaaaccttggaaaaaccaaaacagagaaaaaaaaaaaggcaaggtggagtgattcttttttgctttaattaatttattaattataataatctgtcttgaatttgttgaatccgatttttttagggggtggagttaaattttgtttctttctggtgttttagtatgtagtgcagatgaagagttaggtgaattaaccctacttcctctttgttattttgatgtttttttcagcttgtttgaagctattgatcttatcctccaaggtg

SEQ ID NO: 18796 - DNA, 441 bp, Glycine max
  Intron number 4 from transcript Glyma11g15400.1 (locus Gly ma11g15400) derived from phytozome v7.0 (chr-ID Gm11; pos 11009650 to 11010090 reverse strand)
gaaggtgagtctgcttaatcaatacatagtcttggagtctcaaaatgagagtctggatataattagataaacattggcagtaataatactaattctcatgttcttgagcattttttttaatctttttctaaacttcaaagtttaacgtaatttaattaatcatttctatcaaccaatcttgtattaaaacatcagtgctttgttggtcatgtagtttctccatgagcaaaaatctcattattttaaaccccttttcaacacttttaattttctttatatttctcttcctatcatatcatgtattctatcatacttatatttttctgctttcatgtaacatttgtctttctccatgtactgattatgtttgagaataataatatatgatatggtggctaatctaatcctatatatgtaggagtgacatcattcagcatagac

SEQ ID NO: 18797 - DNA, 977 bp, Glycine max
  Intron number 1 from transcript Glyma13g22010.1 (locus Gly ma13g22010) derived from phytozome v7.0 (chr-ID Gm13; pos 25577276 to 25578252 reverse strand)
ttctttcactcttcatttccgctctcatcctccccgtatgcactctctctctctctctctctgtctccctccctccatttattattattattattattattattattaagggtcatagtggtgggatattagatagtataaacgaggtaataagctcgaatatcagttcgaccattgtccaccaaaaaaattaggcaagttaaggaatatacgatggaaagttttcattaggaaatgtcattaatgcatttcgactatgatttctaacatgaattctaatgggaacttttctattttgaattccggcattggtcagcaagaccattattattattaaaaaacttagatgtatttagcaacgggaattgagtttagtgaaatgggccagtttctcacaatatagctaagttaactatggtttgaatctctgttggaagaggtgtcctacatgtagtgttcgatagtgtctcgaacaagattgctatgaagaaaaataacgatttgcagtaaaaaacaattagcaaaaaaaaaataaaaaacttacatgcatttgtttagataaattatggtgttttcctctagaaatacattttcacttttataattttaatattttcaatgtaattttctattatacagattcacgtgatgaaatttcagttttaatttatgaagagtgccaaatacatctaagttttgtcctattattattattatgaaattggtgaggaatttgtagtcatttttttggtgaaagttaactctttcttttatccgtaagaatcgagcacatgtacagtactagaggatttaaaacaactcatgcacactgctcaaccaactgagttagactcccttggttttaaaaaattaacttaaataattataatgtctaagtttactcttgtgatcatttatggtgttattttactatgtgtacaggtgcaaactaaggaactgcgccacattcttgttgt

SEQ ID NO: 18798 - DNA, 874 bp, Glycine max
  Intron number 1 from transcript Glyma08g43590.2 (locus Gly ma08g43590) derived from phytozome v7.0 (chr-ID Gm08; pos 43387375 to 43388248)
gttgttgttgaaggcaaccaggttcccaaggaaaggttaggttttgctacgattaagacggttaatttgtttcttgtttggtagagtgaggaaaagtagggttagtggaaaaggaattggagtatttagtgctacttcttttttttaggacaatttttggtacattttttttgaagaaacaacttttgctacttaaactgaggttttggtgactagtaagtcgttggtgtatggtacccggactcggttcccttaagcatgcgtttgagtatagaaatacttatttattatgaattttaattataatataattgatttattcaaaaatatttatttattttgagttttagtcatataataaacatttatcatgcaaaatccttagactaaaatagtattatcaattgtggaaaacagagaatttatgatgtgaggaaatatttttgtttatttgttttattttcactaataattagtgacagtgccatttgtacgtgaaaataggatttttgttgttctgcttttggtttgaaagcagtgaaaataaagggggcattttttgtgattatttgtaaaaataaaaatgaaaacagagaatgatttttggaaccaaacatcctttggcagaagattaggctttaacaacagatgcatatgtcagcagcatgttactcaagatcgctgcatggtataataagggacaatgagtctgcatgtgtttgaattcaaacttggttgtttagtaatttataaacagaatattatgtctgtgtctgttaaatttgctttttttgttgcaattgggattggagtaatgctgtttttcttgtgtcttgtagtactcaaactaaggtgaagagaagaggtggcccag

SEQ ID NO: 18799 - DNA, 388 bp, Glycine max
  Intron number 1 from transcript Glyma10g27570.2 (locus Gly ma10g27570) derived from phytozome v7.0 (chr-ID Gm10; pos 36246433 to 36246820)
aaggtctacaccttcgacaccgttgaagagttctggtggtatagaatttctcttcctcctcctttttcttctcccaaatattcatttttttagatgaagggaatctaagcatgcaatctcaaatcttatattttatgaattcttatcatgggtttcaatgattgatgcactgatttatttatttaaaaaaatataattgatttttatggatcttaggatagaaaatcttaatgtgtcttaatctttcttattttttattttgccttacatggggatttatggttttttgtttttttaattgttattattattattatttggagattgggagtgttggtaaattattggaagaaatgaatttgatgtgggaaatgctggtttagtttgt

SEQ ID NO: 18800 - DNA, 725 bp, Glycine max
  Intron number 2 from transcript Glyma08g45800.1 (locus Gly ma08g45800) derived from phytozome v7.0 (chr-ID Gm08; pos 45074887 to 45075611)
caggtgaagaggtcgattttgaattgtttctcaaggtgagctttataatctggtcctttcaagcaatcacttttttagaattctggatccttttacttgttagatatcacctttttatttttctagtgatttcttttcttgatctattctaatctccatatctattcaatttcaatatctatgaaatgggaagaagagaaatagaattagtgttaactggtgtttttcttctctttagaaccaaaagtccaacatagtataatttgagctgcttgatggaattacacacatacacacactcacacacacatattaaagtacaagaggaatcaaagaaaggaaagtaaggggatgactatatagattttccatttttcctatcgtttgaacccttgatccgtatatataatttttttggacagaaggaaaaagaggactaattagaaaagaacatttaatctgaattttgcagaaacatggagaatttattttctttcattttgctgctgcacattttgaactgtaaccatttttcgggagcatttcagttgctttagttactaaacaccataaggggaatttaatttggaactgattcaccgtttacaagagtgaaacaatttcagtagttgaggcaaagtcaaagtttaatttgagtgataacaaatagtggtgctataatcatgacaggtttacttgaaacttcaaacttttgcaagttctag

SEQ ID NO: 18801 - DNA, 759 bp, Glycine max
  Intron number 1 from transcript Glyma07g35750.2 (locus Gly ma07g35750) derived from phytozome v7.0 (chr-ID Gm07; pos 41080259 to 41081017)
tggagaccccctgctcctgcagtggtagtcttaaggtacattcccattataaattaaaaatgaaaaattaaaaaataattaataattgtcaaggttttaaatatcggtgacggttgcgtttcggttttgtcgcttttgttgatatcatggacagaccgatgcggttccaattgtggtggacagataaaaaagccatgatgttgcggcccaaatcacggtcatggatcgtttttttaaaaccttgctaattgttatatgaagctgtgaatttatcaaaatttatatatatataatgctatgttggtcatgttatgtttatgatatgaaacgacgttgttagttgttaagtatgaagctatgttgatcaaatcggatagttttaaggttatgtttggattaaagtttgagaaagtatttttgcgaatttcaatgtacaattgcacaattacgaattccgattcacaaatgaagaaggaaaaaaattaaaaaattgttgctttgggagtaaaagtatttctgacctctcttaactacaatccacacatgcagttaattgttgagaaatgagagagatcttcttggtgataatatgaattatgaatctgtttggtgtgttatgggtgatgagaatgagaaagaataaggaggggacattgtttttatgtggcatctttgttttttttttttttttcttttaatatgcttgcatttccattttgtgttaacgattggtgattttttggaaatttcatgaacagt

SEQ ID NO: 18802 - DNA, 904 bp, Glycine max
  Intron number 1 from transcript Glyma06g08630.1 (locus Gly ma06g08630) derived from phytozome v7.0 (chr-ID Gm06; pos 6305572 to 6306475)
aatctggagaatcagggtaccaacacgtgtggccggtaagatctccctttcgtgttgaattcatatggttttgtttttctttaagccaaaggtaaacaaaaaaactaagcaagtttctttgcttttttttatttttatgtttagcgattggtgagtttgaatttggatgtggatgcggataagctcatttgacttctttgatgttctctttttctttactccattttgttgattgatatgtttttttgtgaattaatgtttcgattggatcgaatgaatgacaaagccaacagaggaagttaataatgcgttgattggatcggatgaataaggctattagaattctctgtgtaatttatgaataattaaaatattaccattttactatagtttttaattttttttattactactgtattataagtgcaaaatacttagtgagtgactaatcttcaaagaaaaaaacctgactgagcataacttaaaatttagggtctagtttaaaatgtttgttcaatatttagaggctattaaacatgatttcccatatttttaagattacttagctactagtttttcactttatgagctactcaagagagaataaatatttcaaggataaatttcatgatttatcctagaacattttggattgaaatgaaagagaaaatggaagaaaaataaattgttatttatgtatttttccctctcgtgtaaagtgaacatgggaaaaagtatttggctgaaaaggtggtgatcatggatttgttcgctttctgtggtggactttcactttattgttgccatattgtcactattgtgaattggatagatatcatgccatgccatgccaaggaaaaggaaaaattatgttatggtggatgttatgttacttttgcaggat

SEQ ID NO: 18803 - DNA, 459 bp, Glycine max
  Intron number 1 from transcript Glyma09g41950.1 (locus Gly ma09g41950) derived from phytozome v7.0 (chr-ID Gm09; pos 46647660 to 46648118)
atctcgctgcggcgtcactctacccttccaaggttcgattttcactttcactcttttatgtgtcattccctactcttatgattatcaacagtgttatttttcttataatgcatacacgagctttgaatttagtgacagaattgaaaattttgtgttttcattgtcaaaatttgtgttctgtatttttttcttatgttggaaatggtttgcataatgattgcttagtttcctgtttcaaagtttttgattcataatgattgcttcctctctctctcatgaattgttatcctatttgtagttatgaatggataagttttctcaatctcttccttggttataactatgtgatttgtgtagcttattcaatttacttctggtattacaatttcagtacttgtgttgagccatttcttttctttggcagaacatttccagcctaaaaacactccattttgcatc

SEQ ID NO: 18804 - DNA, 984 bp, Glycine max
  Intron number 3 from transcript Glyma08g25940.1 (locus Gly ma08g25940) derived from phytozome v7.0 (chr-ID Gm08; pos 20328401 to 20329384 reverse strand)
tccagagcctttaaaggtttctatgaacattctagattaaatgcattctttttctattcattagatttttaaccttgttgtaagctgttactgtaggctagttttctggttaagctgaatcatgagctcacaaatctttgaacatattatatttttaggtcaaaactctggttaattcattttgtctttgtggaaattttttatatgcaaattgttagtgttgcacatgtgtacatccaatgtatttttttttacagatacatacaatttatttacgctctcaataaatggatgacctaaaactttagcatgcattgttgaactaattttccaagtgtcacaaatcgttacacgtttttggataagctttttttttaataaaaaaatgtacttttattacatagcttgttttatagttttttttccccacaagctacttttttaacttctgagtaaagtaataaaactggttttattttgggcttttgtgttttttcttcctctaaaaccaatctaattataaatgttaaatatattttttaattaaaacttattttttcttaagaaaatctcaaacaaacaggcctaaacccccatctgatgctatgtggagatttaaacttttatatgcagaaagattggtgcaatctttttagttaatgggcttgtctttgtcatctagctcttgtattactctgggcgtccttcttgtatttgttatgaatttcttattggtatttcttatacaaaaagtgaaggatatccgagttgcagaattctttagaatgcttaacttgccttgtttgcattttggaataactctttagaataactctgtcctgcctgaatatatctcagattataggaaagtccatctgccgaatcccaaatgggaaattcctagttttgttgatcttcaactaaaatattgaatctaactatactgtaggaaattcttgttctgtgtgagaatcgttgtgtact

SEQ ID NO: 18805 - DNA, 649 bp, Glycine max
  Intron number 1 from transcript Glyma08g25940.1 (locus Gly ma08g25940) derived from phytozome v7.0 (chr-ID Gm08; pos 20329974 to 20330622 reverse strand)
tttcttgcttggaagaggctctccctacactacaggttagaaagtctaattctaccttgtgttctggatatccatggcgattactgtatttaattatatttatttttccttggcagagcatggtttctactttctgtagttcaattttgttttaatctacgatatttcatcatttacatttacatggtatccctgcttggcggaataaatttcaactgttgcctcttagatgatctctatctttttgttttaaaatattaacacagcgagggaaagaaactcctgccagggtctgtcgtgtttgttctttgtaaccataacccatgttttcctcatgtgtttgattgaagggaagaagggaggattttttatttttcctctttggttaaagaatttagaattgagaagaggaaaaattatttatgggactgaaattcttctcctacaatttttgtcccccttttaatatgggaggatttttaattttttggtctgtactgattaaattactctaatatctttagtctcatccctttcattaatatttataagggtaggaagaggtccttctctttcccaacactccttttctgtaagccaaacaatctgttcaggatatctagttttgtttcagtgacctggatttgtg

SEQ ID NO: 18806 - DNA, 966 bp, Glycine max
  Intron number 1 from transcript Glyma08g44290.1 (locus Gly ma08g44290) derived from phytozome v7.0 (chr-ID Gm08; pos 43986996 to 43987961)
gcaaacctgcagtagagcctggcaaaactcagactgtaagatgttcttgattaattctctctctaatctgcaaacacaccactgtttttatttgtaatctgaacagtaaacgcagaatatttttacccatctgaacagaaattttaaccttgccaaaatgctgattgtgttgtgacatgtgtgcacccgggtgtcacatcatgtatgcctgtgtttttttgcatgaattgagaaactattggatgatattttaagtttgtaaaatttataatctctgtttgatttttttttcccccccccccccccccaactctttttggtatcaatgtcagtcataactagtattcactcttgcttttgaaatatacacattagaatgtccaaaacaaaagaggaaaagatgggtctatcttctatttgatttgattttctctaataattttggtctatggtgggtgaacctatccctgataatttgtgaacctttgaaatgaagtgttttttttagccagattgatcagagaaacagtggtttgcattggattttgtttgggtttagattgtcaaattgagatgtaattattttaaatagataaggagcattcaaattcattcacagtatatgtatgccattttctccttatgaacgaattttacttggtttcagaaaaaatggttttgctgcatgcaaaacccttctgccgaatcatagcatagcaatggttgctcctgtgaaaagcctgaacagaagaacaatgtttatgtgtaactagcgtcacagtattttctcaaagataagagctgtagagccataagcgaattctacggaatttatattttgtgatgtaaaagtgagctgcaatgggggaaagaaaagaagacagactattatttatgtgtgtgtatcaatgttgtggtttattattaggagccagggttgcttcctgttttgccttgtcttgcgct

SEQ ID NO: 18807 - DNA, 441 bp, Glycine max
  Intron number 3 from transcript Glyma11g26970.1 (locus Gly ma11g26970) derived from phytozome v7.0 (chr-ID Gm11; pos 26550158 to 26550598)
cccggtgaagacagattcttctttttggaccttaggtaaaggttttagctatccctagttgttttttcttttttctttttttttggctcaaattgattcttctatacttcttttgaactaaccatatttgccctaatggtgtaaaagtttttagtgttttatgttgtgatcccatcagaaactgctatgtatgataagtttgttggttttcatattatttaccttgaaagtcaaagcataatgatttctgattgggtggcagtgtaaaaactttgacacatgtcaattaaacttgtatttttagtgttattattttggctttggaatcaattgaggaagatttttgttttcagaatcaaagatgaaataaatgtgatttatttggtgttgatttggttaagtttgatggtgatggtgattttggaatttggcctgcagagg

SEQ ID NO: 18808 - DNA, 450 bp, Glycine max
  Intron number 2 from transcript Glyma11g31270.1 (locus Gly ma11g31270) derived from phytozome v7.0 (chr-ID Gm11; pos 32310421 to 32310870 reverse strand)
tgctggtgatactggtatgaatcaagttagggaaaaaaccttgcacatacctattgcattgcaattttgaacttgaatttttatttatatcaaattttatatgaaatgtgtgtttttgtagtaatatatcattttatattttctattatcccaaaaaaaacatcttgtagctttttttttttctttttaatttgtaatcgtagttacatataacccttagatggggctagttgtgtgttacaaatattattccaatgatcttttcaagacaaatagaagaattcatgccttttagaattgatatcttgacataatttattggttactatgtagggtcaaacttcagatattctttgaggctaatatgtcttgcaaatctgaagctactattcttttatatgatgcttttatgcagtaacatttagtcggatagatcctggaggcaaacta

SEQ ID NO: 18809 - DNA, 507 bp, Glycine max
  Intron number 1 from transcript Glyma10g31190.1 (locus Gly ma10g31190) derived from phytozome v7.0 (chr-ID Gm10; pos 39748375 to 39748881)
attctagtgaaggtttttttttttcttccctttaatctattcactgtaaatccagttcattattgattttgtgttgcaactttttttgtttttccttcttgctctatgtttatggtttgtgttttcggtgcgtcattttattgattgctcttgatggagttaagtcagctggtggcggatttttcaggaggttttacacttctttcgcgccaaatacatttgaaattagttttaattttactctggcttcatctatttcataattaggttttattaggaaatttttaattgggaatatttgtttattgatttttctgttattcgatctcgtggcttgttttggtgagcaaggatagcctattcgtagttgcttgccctttgttttttttttttagttggtaaagtgtgtgagcatttgaagtaaagtcacaattttttgattgaagcatttgtatgtatccttagcatttcgtgaaatgatttttgtactactccgtgatgcagttg

SEQ ID NO: 18810 - DNA, 453 bp, Glycine max
  Intron number 1 from transcript Glyma13g42530.1 (locus Gly ma13g42530) derived from phytozome v7.0 (chr-ID Gm13; pos 42485612 to 42486064 reverse strand)
ttaccatttccaacctcgcaaaaattggataagtatatatattcctacaaaatagtcttaaatcttctttcctttaattttctttgggaaatattttatatcactaactgtttttcattttgttttttttgttgtcatttgatgatatgctgtggacatcgtgcagaccctaatggttagttctattatttctgtcacactccttcatttttgctctgtacttctcaaaatgaataaaatattgatatccaagatccaagggacaaaaggagtatttgattaagaaattccttttctcttaagttaaatttaataattgaaaagtccctgctccttggtcaccgcttatatatattaaacatgcataattatatatagacaatagattaaggtatatgtacttgttttggctgaagatatgcatgcttgtgtgtggctttttgtgcaggacca

SEQ ID NO: 18811 - DNA, 662 bp, Glycine max
  Intron number 2 from transcript Glyma13g04530.1 (locus Gly ma13g04530) derived from phytozome v7.0 (chr-ID Gm13; pos 4862400 to 4863061)
aagatctcaagacagtggtatgttgactatgttcactcgtataaaaattttcctttcaattttgttttgtatcactttgatatacaagcatccttatttatgattgctctttttaatttgtcattatccgcgtgatttgtttattttctgaagagaggtccaactagccagcttgtttaatgtggtaaactttattgatgctcctaaaaaaaaggaaacaatagctgacaacaccaatgtgtatggcattccagtactatatatgtaccatcgaaaatgctttatattaaaatgccatacacagaagaaaaattaagtagaaaacaatttgtaaataccaatgtgaaaaatgtagagatatagttaaaatgtagcacaccattttttcatttttcattactttcactccttaatttcttaactaggacaatctctccttgacataaatatggaaggtatcttaaaccaatcaaagatatacattcattatttagtaatagattgcatcttaattttgtgacatatatacacaaatacattaatgtaagaggtgtgaatacatgcatgtagacattagcatacataaattttgtagttaaaaggctagaaatatgtcatttggtacaggttcctgcacctgctccaccagtgaaggcaccaac

SEQ ID NO: 18812 - DNA, 761 bp, Glycine max
  Intron number 1 from transcript Glyma11g35740.1 (locus Gly ma11g35740) derived from phytozome v7.0 (chr-ID Gm11; pos 37351639 to 37352399)
gaatcctccgctgccattcgatcttttcactgtatctctctctcttaatctgtatctgcatttttgttatcaacgtgctttgccgagtgtgatctctgctcttgtgtttgcgatttctgatctcgccgtctcgcttttctattttatttgctttaatttatgtgacatatatgaggggaaatcaaaatgattgagtatatacactgtcttgttttctgttttatttgctttaatttacgtgattttttactttcgagctagagagactgaagtaatggcgaagaagctcgctagatttttgattttgttacaaatatttaatgtttgttgcgtttaagctctttccgcattgtgtgatttcttgaaatttcattagttatatgaaatgttataatcattttgaattgaatgctcaacaacttaggatggagtttctgcttctgctgatttatttgtacttttttacgaggaaattgaaacgtgtctactgcaaaggattgtagaattttttatatatatatagatttgcacagaacaataacattgaaacgtttcatcccgaagcaactagttgtataagcttgcttgacttgttccttatttctgaaatgtacgaagcttaatttagtctactctgtatgcaaaaagagttgaaggataacaccaaagaaattaacagaaaaatgaggtagctgtgccaagttattttatgctaatgctaagtgttgcttatttatcagaatcacgagcataacattttc

SEQ ID NO: 18813 - DNA, 571 bp, Glycine max
  Intron number 1 from transcript Glyma10g01450.1 (locus Gly ma10g01450) derived from phytozome v7.0 (chr-ID Gm10; pos 1071993 to 1072563 reverse strand)
aaggacaacacaagactaagaaacagtgggtttttctaattatctcatcacttttttcttttctggagaaaaccatttttttttcataatgaaaggataagaatatatatggtggtttttttaatttttttaatttgtgcaagtatttagtattttttgttaagaccataagtatcctgaaacaatcctattagtgtttaagcctgtgcttttgttttccttttctattttcaaagttaattttagcattgaatgattgatgggttgtgaagaacacacaatttaggattggtatctctagtataaagtacgtgtttttatatctgatttcgcttttaatatgtagcaagggagaacatatttcaccatccaattagataaacaaatgagatgatcatgggcatgccttttgttaactttttttttttcctttagagataaaataacaatgaatatatacatacatgtggtgtggttgatgtgaggaaggttctaagatttgatggtttctgggatctggttcttattgggtttaggttgaagcccaagaagacaaatcagaagagacaga

SEQ ID NO: 18814 - DNA, 1034 bp, Glycine max
  Intron number 1 from transcript Glyma11g11850.1 (locus Gly ma11g11850) derived from phytozome v7.0 (chr-ID Gm11; pos 8465569 to 8466602)
aggccgctctctgctccgcttgtgaccacaaggttgctgctttcttcactctttcaattttacttcttttttcatctataattcaatgctttgaagaattatttacacttttccctgctttattgaattttattttactttttataaagtgtgttcaaaggagcaacaaatgatgccaaattctgcttgaatattattgtttcacttcaattttggtgttggatctcataagtaagcagtgtgctcactcattcacaatttttttctcagattttcatgttgtttttaatttgcatttacttccagtttagatattgcttgctgttgatgtaattttcttaccttctttgagtacgaccaaaatgaacgagtttctttttaagcggattaacaaatttgctactattatgtttcattaattatattatatggccttgtttgagtaaacatcaatttgtacacctaacttttatagaagctctttcatttaacttctccaaaagcttaagtgcataagttgattttagcttatattgtgagaaattcaactcattttaccttcttattgtcttttcctgtaagtgtttacggacaagtttatctaaacagggcctatatcttttaagatgttcttttacaccattggattttaaatgcctttgaattattattgcatggaatcttcatatggagattgattcacttaatcaaaagagttggaattgggactcacttgaaaatggcacaagaatataagtagccaagccggcgaatgaaatgatattttgcaccagccatctgtacatactttccttgcaaatctttttatgttaagtgatgcatcctacatgtgaattttatattttggattggatggggtaataattactaatactcacttatttatgccttttgacatgtgtttctggtaacgacattcatgtataatttaatggaagtaccatacatttgcatgtaattttttttctctgacagcatcgtgtttgtggtttgcattggagctacagatccat

SEQ ID NO: 18815 - DNA, 999 bp, Glycine max
  Intron number 1 from transcript Glyma12g05070.1 (locus Gly ma12g05070) derived from phytozome v7.0 (chr-ID Gm12; pos 3385725 to 3386723)
ttgaagccttggagacccagctctcttccttgcaggtacactcatttcaaaattagggtttttttattcggggctttttagtgattgggaattttagggtgtcgtaggttgtctttactttagataaggttttatggttgattacttgatttgctgctgcttctgcttcagtgagtaacattgagatttgggttgttgttttggtgtctcaaagacagttataattatttttttgtcgcttactttcttccaagtgtgaatatttctgttattatgatgcttgcttcggttcattcttgtcacttaatactaatacacttcatgtggtaatgaaactagctacactagctgggatatgttcatgctcgataattaggctgtgattagctgccaccatagtttttgcagtcaagaatattttaaaagttgtaaggtgtgagaaaatgttttttttttttcttctgttttcacttttaattacagaaatactatgttacttacatttcatgtttttttttttgtaagtttttacactagtgaaaataactttttattgttttaatagttttccatacaaattgcataagatgcttgattagattattgtgaaaacttggtgtatacactttgctttcttacaagtacatggttccgttgtacatttacattctaaatgaatggtttcctcattcttgacctagcaaatccacaatgtgaagtgaaattcgactcataggaactagtgatcaatatgccaatgccttcagtctttcacaccctttgctactttgtaccactacaagaatatgattttgtttattagtactatgaggttagtagcattgaacttgtgttagtgctgttaagatgatttttaaagtttttctgatttattgttatgctttgccaggagaaaataataaaaatgtgaataagataatagtttgggaatcatatatattatgtgcaattttcaggttctgcaacaacaacagcagt

SEQ ID NO: 18816 - DNA, 997 bp, Glycine max
  Intron number 1 from transcript Glyma13g30780.1 (locus Gly ma13g30780) derived from phytozome v7.0 (chr-ID Gm13; pos 33309688 to 33310684)
gtgctcgccagggcaagagtttcattctgaatcaggttaattttttaattgaagtcaatgaatgattcttcctttggactttagggtttaacaacttataatttatttataggcattgtagtattgtatgttaggattgtggaagagcgtttcgtgctgttagaggcactgaatacgtttttatctacctaatgaaacgcagtatgtagtggatgtgtctgtgctttgtaaattgttaatttgatattacctattattatagcctattatggtgtggaagcgaaaaaagttgagaacagttttctcatgtgagttaaactctttgacattgaggttgaagtgaatccgagtgatggtttgtaattttatgcattgggtttggagtttatgctgctattctgtctgttactgtcatgaactataagatcaaagaaagcaacctcttgttaaaccattttagtggtgcctttaagtaaatattttgcctcttcagaaaatgttattagctctgatgcttttttttttatcggtatgaaatatgacttttcttctggcattgctttctcctcctcccttcttggatatgtttgttagagtgaaatgcgacaaaagaatctagctagtaacagagagaaagtgtgaggaagtagaagaaaatattggagagaaattgagaatgaaaagtgtttgatgttattaatctgaaaagttgtccatatatcatacaatgttcctatttatacatctaagctaagagattaacttcctctattacacaatctgacatgtcagttacagttggcacactagccaactttctaattaactgaccatgtactaattcccagctgtcatgaaacccagtctcattttgagtaactactttgtgcacagattacttaaacagtctggtgataaaaagagttgagactgtgttctcattaccctaatccttattgcagcttttggggaggactagtggatttcaggtagcatc

SEQ ID NO: 18817 - DNA, 814 bp, Glycine max
  Intron number 1 from transcript Glyma10g34810.3 (locus Gly ma10g34810) derived from phytozome v7.0 (chr-ID Gm10; pos 42987636 to 42988449 reverse strand)
cgaagccattcagaaccctcgcgaacggctttcaagtaggtttaccttcgaatcggtggaagagatttatttataagctgttcagagagaaattgctactttgttataatagactccgaaggtcttggattactttttctgggggtgttgtgtgtgtgtagactcgatcagtgccctaaattgtcattaaggagttgatttaggtaatgattactgataaagttatcggggattcaattaagtacactgctagtggaattttccacttgtgtggtctgattagagaaacaattccagcatgctgtctctactttcgagtctagctacaatttgaaaggatttgggtccctaaagtgatggattcttatttgaattgaaatgcatctccctcgctctctcccttatcataaatagatataattccttattcctcacctctacggtgaatgcctcacttcacaggagccaactcccgagaacttaaccaagctgcttcccgacagtgattttgagtttgaagcatgtgttttgtatgtctggatttatggcgtaggcctctccctgttccttctagattttgagttttttgggggagattaataacccccttcccaaaaatataggatgcaaaaacacttaaatgttcgttcttatgtgatgcacttgcttacaacttttctaatgggcttattatgcacttatgcatgcattatttgtatgttatttgtttagatctaataagctgtatgttcttagaatgatatatcttgcccaactgattaaggcttctaatttgatgaattcagtcttgagg

SEQ ID NO: 18818 - DNA, 1053 bp, Glycine max
  Intron number 1 from transcript Glyma08g05070.1 (locus Gly ma08g05070) derived from phytozome v7.0 (chr-ID Gm08; pos 3623926 to 3624978 reverse strand)
acgctagccacccttattccactcacccccgagaggtagcatatcacccccaaaatcaaagggtttcgacttgttcttattattcttcttgttgtgttcaactatccacgctccgtaattgtagttttagggcttgcttgattacacttttcaccaacatttcttagttttttttaaaaaaaaataaatccgtttgattaatacaaatgaggcagaggcctttacatttagcacccgagaataattaaaactcgtttctctcgtttgtgtgctaaattttagttattcagcatcgggatccctatggtgtgcgtgcccggaatgaatgtttgggatggggaaaaccaaattcaacatttattattagtgtagaattgtgctaaattttattttcgcttcacatgaaaagtcatatttgtttgggaaggttcaaacacgtgggagaggcgcttacatttagtgcccaatgcctcctacaaaggacacctgtgggaaattggggaaaagaaggaaatggctaattgttgattttagaatggaatggctgattgatatttggagatattatggaggaggggaatatcaaaacgacaatagggattctagataaagggtgtgtccaaggttttaaatagcagtcatggttttgttgcgtgtcttgatattgtaggaaattgcgggcaaatgtggccacaattacggttgtgggctcttgaaaaaccttgactttgcagtcaaaatcacagttgcgcagtgtcatcaatggcagaaagccaaaattccaccatataaacatgtcattgcggcctatggcgctaccatagctggcctccattcacaaattgcctatggcggttggcaaaaaatctgtcatgccattccaccatggtgctgccatttaacaacactgcggctgcagactttttttaaaaccatgggtgtgtctgttagcatattaatgaggttgtggttcagttttactctctccgactaattgcattatttaatgtcatttcagtggccccctttagttgaggtggtgaatacctggga

SEQ ID NO: 18819 - DNA, 702 bp, Glycine max
  Intron number 3 from transcript Glyma06g15580.1 (locus Gly ma06g15580) derived from phytozome v7.0 (chr-ID Gm06; pos 12271002 to 12271703 reverse strand)
gggtaatttgtgtgcttataatcaatggcttcagtgctcatcatggtttcttgttttttaacgaccactttaggttaagttttgttgatttctttactctatacgtgacatgattagtagctgccgttcttggttgattacattcttagttgaaatgtgattcatataactatgctcagttgcttgtgatctaattctgcctgtcatgttttttgtttctttcgccttgatcttcatgctgaaattgttgtgatctgaaactactttcaaatgtgtttttcaaacatacaacactcaccttgtaatctatgattgagtctttttccctttatgattgaaacatgaaggaaggctgcttcattttaccaaaaaagagctcccaagaaattgtttgctatcttctatagtccatcagtgtggcattctataattgaccaatgatctttgcttgaacattcctttggatgttagtgaccttttcaaaccactgctagatttccttattgagattgttgttatttattagttgggaatgataattgttttgaagtcctttcaaccttaaactttatgctttcttatttatgcttgccattatagaaaaccaattccccaaattcacctttttaggtgctgtaagatcaaataatcccttgatgaatggcaggttgaattgccatcctctaattcctcctctggtgg

SEQ ID NO: 18820 - DNA, 838 bp, Glycine max
  Intron number 3 from transcript Glyma11g04150.1 (locus Gly ma11g04150) derived from phytozome v7.0 (chr-ID Gm11; pos 2761504 to 2762341 reverse strand)
ctttaaggcatccaaatattatcaggttcaaagaggtgaagagtttgtttctatacttaaactgttctttgagtgtgattttttctagatatggaattggtcaatgaattttcttagtagttatctgtattttttggttcttacagctctcaaaaagcaaaactgtgcagttcattggatgttattgttgattcataaagaaatccaggtgtaactcaatggcttctgcaatgagttattaccgttggcattaatatgtcaaaactcaaaagctatagggtgtgtagtgtagctgtagcctactatcttgtgagattattactacaagaaatatggtcaccataaattgcattttctgttttcatattatgtgttgaggataaactgtccaacatgaatctgttaggtgaacacttagcttttgctcagttggccacaaaggctctaatgccatgtcaagaatcagccattccaaaaacttaagttgtctcgtgaaaactcaccaatggttttgtatctaacactacgcaaacagggttgcaaactatcatgcttattttcttcaggaattattgccagtaatgtactttagttcgaacatgtctgcagaaatcaaatagttctgttccttcgaaaagatagggaaaataaaaaaaatactccatttaggtttcatgcattttaatgttgtgatgagcatgtcctttcttttgtgtgggctaaagattgaacaaataagacgtgttctattgagagctttctgaagttatatacacattctggaagtcagatcttttctgcaggtatttctgacccctactcatttagctattgtcct

SEQ ID NO: 18821 - DNA, 1024 bp, Glycine max
  Intron number 1 from transcript Glyma12g30320.2 (locus Gly ma12g30320) derived from phytozome v7.0 (chr-ID Gm12; pos 33944822 to 33945845 reverse strand)
ccctagagcttttcacataggtgaaatgtttgtttgctttttgttgtataaatattgttctgtattaacacatgttaactttatagcctttcttcaaattgtggcatataacttgctagtgttaagttgcatgaagtgaacatgacaagcaaacttgatacaaaaacagaaccagcaactggatggcaagtcagtaatgagttggcatcttcccagcctaaaatattaaataaaaacaagtgaacaaacatctttcaagattgtagatctctataaaatttcttatagctgaggccatagagtaattcaaagcatgtttattgacataccatatatatataatatgttttttagtgatgtcgagtctccaacattgattatttgttttccttacaaattccattggtttctttgttatactttgtttcttgtttctagtttgattattttttcatgctattcttaatagcttgaagtgtagaaaagttagcagctacattaaaataataactaaataacttccaagtaatgctaagcattatgttgggtgaacagagcatatagaaaagaaataggcaaatggttgagaactgctttatgggctaacttgcactattaaactatggagataaataataaatttgggtttggttttttatggttatccttcattgataagtcatctgtcagatcttctttaaaccctgctagtgcttgtggcagggcacttccttggctatggaattggacaatcccctctccctcctaaaacttaccaaaaaaagtttatcttgtaaagctttctaaatatgagattcttaacttcaagtctgctaaccgtctgggatttatggtgattgtgtttgaatctttcatgaaattgtttgtggaatttaattcttggttatcttgtgcttcatgtaaaagtaattcttttcctctgcaatttgaacttgatgctggtgtttttagtcaaggttcccactgtttcatattttacaatttcagattgtgtccctttacc

SEQ ID NO: 18822 - DNA, 611 bp, Glycine max
  Intron number 2 from transcript Glyma10g34520.1 (locus Gly ma10g34520) derived from phytozome v7.0 (chr-ID Gm10; pos 42695320 to 42695930 reverse strand)
gctagacaaactaagaacaggtctttgtttttgataaaatcacctgtttgttatgttagttgttgattatgcttgtcattttgtgtttgtaaatgttgtgtaaggattcatgttgtggattacataacctttgggagaaaatgctactctctaacacactattgttgattgaaatttgtttaaaatcacaaaattttgtaggtttcccttcttattcaatgagtctcacttataaccaataatagatagtgttagacagagtgtgttattagcactcttctgatgttttgattttgctccaagtaattgttcagtttttgttttacaggaaattcggctttgggtggcaatgacggttggccactttgaatgttttcatttttgctaataattattctataggtcgtttgtttgttagttggtgttgttgtttggtatatgtagctaacttcgcctactgagacaaggtttgattgttgttgtaaacttggtatagttctgtctcttgttcaagatggcatgacaggacatgcttttgttgttcataacttcttgttgcttgtctgaatagttgattgttcatggcatcttatgttgtaagacatattggg

SEQ ID NO: 18823 - DNA, 491 bp, Glycine max
  Intron number 2 from transcript Glyma07g03830.1 (locus Gly ma07g03830) derived from phytozome v7.0 (chr-ID Gm07; pos 2661219 to 2661709)
cgtggaatactggttgattggcttgtagaggtttgcttcaattaattttctaatatgaccatgaagaccatgaaagttttttttttgagatttcacatcgactaataatatgaccaacttagagtatataagtggacaacaaccaaacctaaattctgagaatattagagtttattctagtgattgttgttgtgccaaattaaaatatgtaagtggaggataactctcaccttacaagtcgattttgtgagattgaattaagcccaaacccaatttctaagaggtttaaaatagttcctgccaataagcaatttaatttagcaaattccaaagctacaatattaagagtttttatggtcgattgcaaaaatgcgtcagttgaaagatacccagggagacttcttttgtgtttttcagaaacaaagttttattcttatctatttttttttccttcaggtttctgaggaatacaaattggttacagacactct

SEQ ID NO: 18824 - DNA, 659 bp, Glycine max
  Intron number 1 from transcript Glyma09g08780.1 (locus Gly ma09g08780) derived from phytozome v7.0 (chr-ID Gm09; pos 8194737 to 8195395 reverse strand)
tgtaagataatctacagctatattcttgatatatatatatgttttggataattatattaagtgtgcaaaacatctatctatcgtatttaagttttgttaaaaaaatttactgaccatttttagtggattgaagtctcttttctttatttatatttttttttcttaaatacaatgctcaaatatgaaacctttcttagggattagagtcaatttttacttagaccaacgacttgttggtcatttcattgtatatacatgttcatgtgctattttttttatatatgtatattatttagacttaaatatgtttttaatccttttaatttgagaccctttgagtttagttctcgggttaaaaaaaatattcttcatagactcccaaatttgcataaggcttattttactccttcaacattgttttggacactaaaaatttactctttttaatctctcaaattcacttttggaggattaaaaataacattttaaaaatttgagagactataaatagcaattgtttttttgaaagaccaatacataaaaataagtcaaatctgggagactaaaagcatgtctaaaccgtacctattgttttttttaatacctttggttggcttcatattaatgaaaattagtttatcatttcaggtgataagtca

SEQ ID NO: 18825 - DNA, 974 bp, Glycine max; identical to SEQ ID NO: 18177
  Intron number 1 from transcript Glyma09g41360.3 (locus Gly ma09g41360) derived from phytozome v7.0 (chr-ID Gm09; pos 46066225 to 46067198 reverse strand)

SEQ ID NO: 18826 - DNA, 803 bp, Glycine max
  Intron number 3 from transcript Glyma10g37720.1 (locus Gly ma10g37720) derived from phytozome v7.0 (chr-ID Gm10; pos 45647095 to 45647897 reverse strand)
actgataagcttttggagaaactgtaagttcatttttattcactcccttatcatgtgaacttttaaacattttattgagcccatttagacatatagttctattgcggtgcaaagtttaaatatatgccttgagaaattatgttaattcataattagtaatgaatatcctcttttgtaattatactagctcttatattttcatatttacattttctattatgcctttgaaacaatttatacttcaatgttgttctgagactcctcaaatctatttgtgtttcagccatttcatttgaactggattggtgtagttgatgtggaattgtttacctgaactcaaatataaacaaagtagcaattttatatataagttgttggatggattttgttaaccatttatgttataagtagaaaatacacatgatcaaacaaaatatgatagaacatcaattgataaattagtcaaatagaatactgaacacagtatatcagtttccatctaaatataataaaaattggtgcactaattgtaatgaccctctggtgcttttggttttcgcttgatgatcataggtttgctatgtaaatttcaagttggtataaaatacttgaatggatgtaactccattttgagaagtataagttagccttacagcctcaaatagaaagattgtattgattcagggatcactttttatttcttcttggtattagcctgaaacagagaggagaaaaataaatgatatgaattgctagtattattttaacacatctttttcttgtttttgggtgacagctacaac

SEQ ID NO: 18827 - DNA, 269 bp, Glycine max
  Intron number 1 from transcript Glyma09g04210.1 (locus Gly ma09g04210) derived from phytozome v7.0 (chr-ID Gm09; pos 3072562 to 3072830)
gaagggtggtaattatcattgtttttctcgggacagtggaatcatgggaacaagcaggcaaaagaaagtgttacttttttgttttatcttgtattctttcttgataaatgaattcaaaattagagtcttggccattttctgtttgtaatcatctatttaatgatttccttagttattgtcttctaattttattatttctatttttcttaactatagggacaatttttaagattagtgctatatttgttcctttgatgctttacaggagt

SEQ ID NO: 18828 - DNA, 790 bp, Glycine max
  Intron number 3 from transcript Glyma09g04210.1 (locus Gly ma09g04210) derived from phytozome v7.0 (chr-ID Gm09; pos 3073431 to 3074220)
tcttctaggaagtggttcattttcacttctgagctgtatgtgttctttatttgtactttaattataatcgatttttatcactttggattgcagtgataattctcatactgaattatgaatttactgattgttaattatggaacaaattaaaattgctttctgttgagtaatttgtttggtgttttttgtgaaaattgggtttgtgccaaggatctccagaagatactgcctgctaattttagagattttggcgccaaaagatgctaaaaggctttagggttgttcttgatttgcagttgtttggtgtatatggttggaaataaatgttagaagttttattggttaagtattgcctcttgagtgtatttgtgattgtttgagtagttcacttagcttctttgtggtgttctgctatcggtctttttatggaggggtgtctttggtagatctctagagtgattggctttggctgctagcctgctgcattacatgtggtgttatttttctttttagcttcttgtgttctgctattgatctttatatggggatgtctttggtagaaatctctagagagattggctttggcttctgcattacatgtgccatgttctttttcccctcccctttcattcttggtttagtttctgaggatttctcatctttttcatttgtgtctctcctttcttgataaattctttataaaaaacagttgcccgtattaactatgccttcaattgaattagctttgcctttctctatctgtaattattatattgcttctctactacag

SEQ ID NO: 18829 - DNA, 581 bp, Glycine max
  Intron number 1 from transcript Glyma09g40430.1 (locus Gly ma09g40430) derived from phytozome v7.0 (chr-ID Gm09; pos 45347315 to 45347895)
gttcccatttcaaatccgacattcatcgattcaacgtaatattcaatcactccagaacagtcctcttctcagtgaattttcgtaaaatttagaatacccatttttgcatttagaaagataatttaattagagtacactaatattgtaactaattagtatgtatgataagtttgttgaggtttataataactacttatagaatgatttctgattagttgacaatggaaaaatctttatagagataatgcatgaaaactagactcataaaaaagaaaaattttgaaatttcaattttgttttatccttcttttcaaaaataaaaaataaaaaataaaaatcctgagtgcttctgttttcagtgaaattaggtaaaatttagaataccagctaaaacttattccgattgttttgttttttggaaacttaatatgcttatgtgtaaattcaaaatgttaacacaatgacaatgtgcattgtggtttaaggatatgagtagattctagtggttatcctttagcttctataatcgggttgtattgattataggtgaagctgacaattgctggaaagaatattgtgaa

SEQ ID NO: 18830 - DNA, 694 bp, Glycine max
  Intron number 2 from transcript Glyma06g20020.1 (locus Gly ma06g20020) derived from phytozome v7.0 (chr-ID Gm06; pos 16381477 to 16382170 reverse strand)
cagccataggtagcaggtgattattgtggcctaattcttcaacttggtcttgtacttttggattattttgtgtctaaatcatgaattcaagctttaatgcttgcaaaaggttaaaattcaagaattgaaggagttttagaaagatgacaaaatgaagttatcccaagaaggaattgatatttttttcctcctcacattatagttgtcaggatttttttgggttcctttcgggtcatgggccctgggcaatcacaccgcaaaacaaccccaggatctgtcctgcatatgcaaataaatagatcatatgatgttccattaagtttcattgtcattgttccaactctagccatataatgtcttgtagttattgctctctcatttctctcttggttgctatttgaatgttgtacatattctagagttttatacccatactacagagataattcttggcaatagaaagaggcacaaatgttaaaacactatttattaccaagggtgtatttgttctatgagcaccccttagtttacacacttctaagcaaaatataccatctattatctattattttatatcccatgttcatgacaaatataattgctgacgttttcatgtttagggaattagaatggtggtagtcttaatatctatgtcgcaggtggtctataatagcccaacaacttcctgggagaa

SEQ ID NO: 18831 - DNA, 385 bp, Glycine max
  Intron number 1 from transcript Glyma08g41090.1 (locus Gly ma08g41090) derived from phytozome v7.0 (chr-ID Gm08; pos 41133395 to 41133779 reverse strand)
aagcagtcctccattgcaaaagatcaataggtatgcttatgcttttccctattttttttggataaaatatcttttcagtccctttactttcagtaaaacttggtttttgtccctaaaattcaactttgatcaattggtccttgaattttttaaaaaagtagtgatttttgtccctcctcgtggtgaatagcgtctctgataagggacaaaaccactgctcttctaaagttcaggggccaaattaatcaaagttaaaatacgaggactaatagtaatttataccaaaagtacaatgattaaaaacatattttatccttttctttttttcaatttgtgtatgatttattaaccttgcaaattaacttctttcctgtttttcagaaag

SEQ ID NO: 18832 - DNA, 799 bp, Glycine max
  Intron number 1 from transcript Glyma13g43170.1 (locus Gly ma13g43170) derived from phytozome v7.0 (chr-ID Gm13; pos 42966981 to 42967779)
aatcgatcacatttaataccacccttcaggattaggtactctctctgtctgtttctctttttctcgtgcacagtctataccgtttgaatttcagctccccaaggaggaattccgaaccctttggtgtagtttatatatgtttggtgtagtttcaagtattattgctgtatcgatgcttctagatgcccaaatcgcggctccacctagctcataggcatgttcttcgacctcgattttttttggctgggattggggcaaattctattcaattctctgtgaatttcgctctgtttctagatcttaatttgcgaaatgactgtttatatgcgtatttcataatttttttgaatgttttttttttacgaattaacagtgcaatttgctgattgcctgtttattttcgtggattaggctcctctgaggtaaattaagtaatctcaattgttgatgagaaaataaatggttgatattatgtgcacatgcacaataaatcacgaatacgttggaatgtcaatcattgttttgttactctttttttgtttggtttatgttgctggggaaaataaaaaattgaattagtagataaattttttaggttctgaaatgtgccaatattttacctagtaagtactttgtaatcatttcgtgagtttagctgtgttaaatctcctcattgctcaatagtcaatactgaggaaccaactcgtcttagctcagctctttcagtcaatttggttttcatgcatctgttctgcctgcttgtttgcaggtagtaattccgttcccttgaataaataac

SEQ ID NO: 18833 - DNA, 693 bp, Glycine max
  Intron number 1 from transcript Glyma09g04620.1 (locus Gly ma09g04620) derived from phytozome v7.0 (chr-ID Gm09; pos 3433087 to 3433779 reverse strand)
aactctcttacacaattcaggttcagtacaaacaggtaacgtgcaatctctctcttcgtaaatttggaattctcaacaaaaaaaaaagagaaatttctctgatcgcaagcactgaagccgattctgttaaccaaaagcgagggaaattggatcctaatgatcctatatttgaatccgattgcttcttcatacactgcgtttttatatgtgcatatatttatacgtacttacgtatgtatttggcgaattcatcgtagaaggtttactttgaaccagagctgcatgatgcaacaacggttctgcagtttgtttgtattctccaaaagacttcaacttagttagcttttgtcttttccttttaattttcagtttccccgaacaaaagtttctgcttttgcgaatttgcttttggccttcaccagctttttagttgttagagttgaaagtgtgtgtaagaattcttctatagaagacaaaaaataaacggaggtgaacaatccatagtatatttataatacctgtattggccttgtctgtttcgctgttggcctgtggctgtgaatggttggatggaagaacaacattggttgttgagtatttatttcttttagccttccttcctacaggagggtacttatatgtctcctttgcattccagttcaagtgggagctaacaaagaaagcccatcaagt

SEQ ID NO: 18834 - DNA, 930 bp, Glycine max
  Intron number 2 from transcript Glyma07g03210.2 (locus Gly ma07g03210) derived from phytozome v7.0 (chr-ID Gm07; pos 2260379 to 2261308 reverse strand)
ttgctggtggcacaggtctgttacattttcactatgttttatactgtctttctgtgtataggttttagaagattgcaatgcgagttaaattgatgcagtctggaaaaatatgttaaggcactgtttggataagcttcttcataagcgttcatagaagaaggaaaaatgaaataagcttctcctataagctaattttaatttacatgtaagttaaaattagcttatgcataagttaaaaaattgattttaacttgtgcataagcttttttttttagtttataggagaaacttattaaattcttccttcttgttttctttttctataagtgcttatggaaaagcttatccaaacatgtttgtgccttgaagaaattaagcaattgaggattgcttagagggagatattttagttcacaagctacttgacgaagcatattgtctgcctgctccaattttactgattcatctagctatatttttcataaaaacttttaatttggtgcaaattgttccacttttgaatgcgtaatggtcagtgtctaatgttcttgttgttgcatgtctgggtactaatatcaaaagaagtagttttttctttaagatttaatttttgggttatgttattgttgaacaatttgtttctgggctatagaagtcataaagtaaatacagtttgaacaatatttaggcatcatcacgttcataggctacagaagtcataacttgttcaaaagtaagttgtatgtgcttcatatacgtttaagtttattttaaggaatatagttgtaagatgtatttgtgttatttaatataaagtttgcttctcctcaataatgttcctggaattaaagtgatgttgctgctgcatgggatgttgcttaaagtttaagggttttagtatcaagcttaaggttttttattttacagggg

SEQ ID NO: 18835 - DNA, 939 bp, Glycine max
  Intron number 2 from transcript Glyma11g25900.1 (locus Gly ma11g25900) derived from phytozome v7.0 (chr-ID Gm11; pos 24631826 to 24632764)
atcagtgtcaaaatctgcttcttcttctgctccaggtacttttcttttgtgttttatttaggggttttgttagattgctttttttaccccaaagggtaataacaagttttttttttttttttttttttcatttttaccatcaccatatctgtggcctcaaatggggtggattaaattaatgtctttgttattctaatctcaaagggtggctatatttctctataaatgtttttttttctttttttctggcttgaccttctgtcattaacccccctctgatttctgcatagttttagcattttgcccctctcctttcgaatataagttgttcattattccctgcagttgtataaggaaataattgattctgtgtggctcttgttctaagactctctttgctatagtgcgtataggctatatgcacttcaacttattaaagccagattgcttgattgttgtacttagtgccattatttctctattgactggctcaaagaagttattcagttctttacctgttaattttctcccttttgctattgttttgacccaagtgataagacagaaggatgtgaattcccaattccgttaatctctcataatcatacaacctctatatgactgatatgcaactatgtattttatttaatataccaatgcacaaaactatgtttgcgtttggtgtttagagttgattggtaatgcattagcgagaatttgtttttcaagttttgtttgtctattcaaatttgaatggccagagctatgctaaaaagtcttccaatatggaatatccatattgacgtgtcagatattgccatgctctacctttgatgatgttttctatgttttagaatgtaagagtaactgtttctggtatattgtgttctttgctgtgaaacaggcagcaagcaagccttgatatcattgtcagacaag

SEQ ID NO: 18836 - DNA, 681 bp, Glycine max
  Intron number 1 from transcript Glyma12g07870.1 (locus Gly ma12g07870) derived from phytozome v7.0 (chr-ID Gm12; pos 5523435 to 5524115)
cctcaaccagaaacccatcaatttcactgccacaggtcaaattttcattctttttttacttttataatgcatttcactatcacgcacagacacactcgtattgttttgtgacctattttgtgtgatcgtgctgattgttgtgttttctcagtgattttcgttttaatgtaaagattccttggtgggtgtgtcgtaaattgatcaaagttcgtgttttttcgggggtgggatcgtcgaatgcttctgtttccgttttgaaatagtgttttccaggaattttcgttacggcatatgcaaaaggaaagaaaaaaaatgttttgttttgttttgtattgaattttgtaattaaaattttggtattaaaataatttttgtatggaacgtgtcttctggcaattcttgaagttgtaagcctttcaatatcgatgctctgattttggtagcataaaactaacattaaccatactcgatttcgtgtttgttttggttggttgcgaggttggaatgattagatccataatccaaagttgtgtttgtcactttggacacttgttttggttctatagactccacggattaaaataattttcttctgtgttattttgtttgatgtctttcccttttggtttatgtgtgtttttgtatttgttatagatagtgtcaaagttgatttcagagtga

SEQ ID NO: 18837 - DNA, 639 bp, Glycine max
  Intron number 3 from transcript Glyma13g18260.2 (locus Gly ma13g18260) derived from phytozome v7.0 (chr-ID Gm13; pos 21932535 to 21933173)
aggattgtaagtaacccatgttttcctttgctttcagatgctgtaattttcattgccatgttgggatatcgcttgttgtttggtttgtttgttttcttactaaaatacaataagtagttttattaggaaaagaatgcccaatagttggcttgaaaagaatcttcaataatggagtatggctgccacttttttcatagaagatagaatgagaaaattgactaagaaaagaaggaacaactgtagagagttagaagaattcttgttgcaaattgtaatggaaacaggaagatgccaatctgttcctccttccctagtccctacccaggtcacctgctatgtaaccaaaacaccagaaaaggaaaggaacaagaacctgcaaaattaatgaacagtctatggagcactgagttaataggattctgtgattactggagctcatcatggctagtcattcaatgaatgttaataaattttcatatcagaagttcactcttattgtttcgtgttgattgctttagaagatttgttgatgtagtaattgttaattcgtgagttattcaaagtactgctggagaagggagttaaacttctatccttattgccttagcttttgcagattcaactttatcagaggagaca

SEQ ID NO: 18838 - DNA, 483 bp, Glycine max
  Intron number 1 from transcript Glyma08g28000.1 (locus Gly ma08g28000) derived from phytozome v7.0 (chr-ID Gm08; pos 22249120 to 22249602)
tttggctccagccaaggcagtgctcccacccaaaagtaagtccttggcttgtcttatgaattttttttttatgggcaaatgttagtttgttagaaatgtcagttggagaattcaaaccacagacctcttctccctcccttcacacccttctgcaaccacagagccaaccttctatctccagcttgtcttatgaatagttatttgtaatcctattttgtctactatgatttttttaaatataaaaaaaaacaaattggcatatgaataatgatttgtagagctgtctgatttgatgctggtagtattttctccagaaatctttctgatttcagttttctgctctttttcttttttccccctcattgaagattgaaccttccctttcccacatttaattttcttcttttgtgctaacattttatgatttctcatgcatatctcttttgaatttgataattctgtcatcagggatttataggaata

SEQ ID NO: 18839 - DNA, 759 bp, Glycine max
  Intron number 3 from transcript Glyma11g33340.1 (locus Gly ma11g33340) derived from phytozome v7.0 (chr-ID Gm11; pos 35130050 to 35130808 reverse strand)
ataccaataatacagtcaccacaaggtgttgtttttttcttattagatgttatatttttacgagggcgagccctggtgcagcggtaaagttgtgccttggtgacttgttggtcatgggttcgaattcggaaacagcctctttgcatatgcaagggtaaggctgcgtacaatatccctcccccataccttcgcatagcgaagagcctctgggcaatggggtacgaagaaaaaaaaaaaaaaaaaaagatgttatatttttaccatcaatcataggattaattttttcttcaggttgattgttgtatggttattagaaatagctgttgatttccctagaaattttgaaagaaaaaaattcattatttccctgttcctcacatggtggttcaatttctttgagctgctttgtttccttcatttatactgtgcattcatataagatagtacttagacaaaaaaaactaagcaaatgaaggaaaacttaaaaatatatttgttcagctttatgctgtaccagaagattactccataaaacttgcctattctgaaccatcaacagtagtacctttaccttacttttgatatgtcaaaggaaaattaattaatgatttaataagagataagcttacaactttacgagaaattattcaataaacctccattccggtgtggtgttttggaagctagcttttctgcagttgtaactattattgggttgatgagtttttttcttttacagggaaattgtggtccagttca

SEQ ID NO: 18840 - DNA, 885 bp, Glycine max
  Intron number 2 from transcript Glyma13g28380.1 (locus Gly ma13g28380) derived from phytozome v7.0 (chr-ID Gm13; pos 31412635 to 31413519)
ttcattcccaagaacaaggttggttcccccttctcttcatttattaccttttataattgaatttttatgtgctagtggtagatccgatatcaatcttgtaagtacttagtgcatgtggggatgtaacgtaactacaaaggaacatttgtttttttttttttttatccataggaattgaattcggtaccagggggcttataacactcatacaacatctcaaccaactaactgagttaatccttgtgaggaacatttgtttaatgtctttaacttggttttttttttttgacaaaaaatggtagaacgggtagacactctcaatactacaaggcagggccccaatagcttgttgggactattattagtagagccccatttaaaagattgctgcacaggtctagatcacaaacagttttacccagtcatagataactcaactagtctttgagtgtcaggggatctccctaaggaggttaaaacaattgcattgatcattctagtgatttggaaagtgaattccatctatgagagagagaacattctctagtgatttgggaaagtcaattccacccatggttttattttttgttattttgcatggcgagttagggagtatagagactgtttatagaagaataacacggtgagttacttagggacaatattctgattggggtttgtgagttttcctagttgacaggttttgtagagactatggtggatatttaggcttgctctgttgtttgaacattagtgggttcaacttgtaattcatattataaaaaagaaaaaaactgtggtgggtactttgtatgaaatgttttttttactctgttctgttattttataggatctgattgttgctggtattgaagacaagatttc

SEQ ID NO: 18841 - DNA, 928 bp, Glycine max
  Intron number 1 from transcript Glyma06g40790.1 (locus Gly ma06g40790) derived from phytozome v7.0 (chr-ID Gm06; pos 43979473 to 43980400 reverse strand)
aactccttctgggaaaggttcattcccactctttttcattctttggccactgttctttcatgtcatcatcattcttggccatgcatatatatgatatgatactatgaaacgacacatactttagtttgctttatgaattcttatccaatactattttatactgatactttggatactttatcgacacatatctaaacatttgaaagaagttatgaagatccaatataggctagcacagctagttacaattgaaaatcttgattatgaacgaattaataatgattttgtcaacaagaaaaaagtataaaatttaaataattataagagtataatctttttgagttcacccaggacataaaaattcctgaggaccaatcttgtaagtcttgtaagtgttggagtacaagtctaacataaaatctcatccaataaaaatgaaaagattgagtatcatataatataataacatgaaagtatgtcattcaattcaacgtaccaaaaatgaaaattgccttatgatttcagaaaagaaacaagatcgataatattcctattcttagatcaaaggaagtagacaattagtttatgatttataattttcattgttttcggtaatcgtgtgttcttaatatgaattttataattgcaattgcaactacatatttattctgttttatagaattttatacatatcagtatatattcctcaaggtttagcttttaactctgttgggtcaaattcatgtaattagatttcacctagtaggatacgattttgttgttgtatctagatatgtcctaatggtatcgatgaatctaccgtatatgtgaacatatacgagtatcattgatatgatttgatgtgatgatgtgtgaatatttgtatggggcaggctttgaagggaggggttagaaagaaggttgaatt

SEQ ID NO: 18842 - DNA, 754 bp, Glycine max
  Intron number 1 from transcript Glyma11g05470.1 (locus Gly ma11g05470) derived from phytozome v7.0 (chr-ID Gm11; pos 3822473 to 3823226)
cgtcgtctcctggtccagctgtatctgaggacgaggtacgccttgtgttctgttaaagatctcacattaactactcatatcatcataacaacaagtaggagacacttcttattttatcaactaatctttttgagtttagttagaccaaaatttaaactttaagatagtattagagtttattatactaaattttaagatgtgtagtttcctctttatacattttgtgcaatttggaccagatctccaatttactaaattttaagatgtgtagtctcagatctgaagagtgacataaggcattgatatgcttaattgactttaacttcagtcgaggttttttagttgacttcaacatcatggaattcatatcttgagtggccacgcgtcactattgaggtggatttgctcatttggttagttttaatttgtcccttcttttatcgaagggaaaagaaaagaacaaattataaatccttcttttagaatccgtgtggagtatggactaagtaatccaacaagatattagcaaaagtcatgaaatgttaataaaatcaaagggttcggttgcggttggaatgtatcatgctttggtcgtgatgtttattgattatgtctgtgtcacagcaagttaattactagtatatgtaaaatgttaatggtgtgaatacaatatattaagaatactgggatctgaaatttctacggtttctatattgcagagtggagctgaaaccatcaggtgcctgaagaaggt

SEQ ID NO: 18843 - DNA, 491 bp, Glycine max
  Intron number 1 from transcript Glyma10g24630.1 (locus Gly ma10g24630) derived from phytozome v7.0 (chr-ID Gm10; pos 32264467 to 32264957)
gctactaccccacagatctctgacctcaggtctcaacacacacacaaactctgtttcagtgtctgaaccatttgtttctttgagaagcattgtgtggtggtttttctcaaaccaaactaatgtgtgttttctgctttcgctttgactgaagcttgcaactcatttatattcaatgttttggtcatattactgggcaatgtgggatctccaaaatgaaaagtagtttttagagtgaaaaatagaaacaaactaagcgcaatttttttttctggattagaaaccacattgtgaattgtttggtttctcaaagggaaaaatgaaaaaaaaatctcaatttcacatttcaaattgaaaacccatttttcaattcttattcattcggatcaaacattcacttcattgacacattccatgcatattcgtacactgaagcaaagagaaaacgaagatattgttctgacccattttttttttctattttggttatagga

SEQ ID NO: 18844 - DNA, 990 bp, Glycine max
  Intron number 2 from transcript Glyma10g24630.1 (locus Gly ma10g24630) derived from phytozome v7.0 (chr-ID Gm10; pos 32265008 to 32265997)
gtggagaggttagtgtcctttttccaacgttaaaaattcttatcctcttctttctcgaaactcgtgtaaatctggaccgtccgttccgagttctatctttaactctcggccgttggatttcgattaaccgcaactaacgatcacaaccgttgaaaaatcgttgatgctctcgatctggatcgtttttattcggttattttcgttcttcggattcctttgccgcttctttctgttttctctttgtcgagggttctgcaaaagcaaaaatctaactccccacaccattaaagagttagttaaccgtcaacaaacttttttccatttccaaaactaccctccaaagtgtggcttatataatgttagctgaagggttattttggtcattctaattcagatgataagatatatcattaaatattatatttcgctgtcttggaaaagttatttaagtttaacggtttttacgttttttttactcttttacttcttacggtgcaaatatggctacggaactcactcaaatcaaatctcaccgacgattgcatttgtttaatttttatatttttcctttttttaattgttgttacaatctcctgtcattttctttttttctaaaataagcgttattttctctttttgtatttactaattatttcaatatagtacaaaaaggactgttgctatagttaatatgtcacaattgccgagtctaatagtgtaaatatatttttgtatttttcttccaatattcaggaaaaaggggtagtttatttattgttgctatctttagcattagtgaatttttggttattataatataaattgatttattatataaagtttaatgttgtcttatggcacctatgactaaaagcctatctagtgaaataatatatgtattgaaatagtatagtttgttatttatttattcgttatgattgtgattgtgttgtaacttttttttcagggcaaaagaggctgacaaattaa

SEQ ID NO: 18845 - DNA, 623 bp, Glycine max
  Intron number 4 from transcript Glyma10g41550.2 (locus Gly ma10g41550) derived from phytozome v7.0 (chr-ID Gm10; pos 48594857 to 48595479 reverse strand)
acgattgacgaggattcaactttgaaaaaattgaggttgtgcacatttcactctttataggaattttcaaatgtcaaattcgaatcctagctgcttgctttttttcacctcctttgaatcctcaactggaaaccactgctcccacagtgatattgcatacgtcgatatacttcttaaaagtgttagccttatttttgtttttgaaaaaataatttagccttaacaacaaaatgcaatggaaaaatggaattgctcacactatttttttcctttctctttacctctcctttttgtgtgttaacgtggagagggccaagaacgaaagaaacaaaagaaaacattttagagatcatgaaattacaaaaggtaatcatctctggtttcatctggagctagacttcttcttttgcattgcttcatatttcaacattgcataggatgttagtgtatttctatacgtgttcagtgctccgatagaaagattatgcattgggtgaagaaaatgattttaggttaccatataattaccaccccgcccttacctccagttttttacaatttctaatagtgtgttattcatgcatgtagattaaagaagcaggaacttgcatcgtttgccgaat

SEQ ID NO: 18846 - DNA, 349 bp, Glycine max
  Intron number 3 from transcript Glyma13g24070.1 (locus Gly ma13g24070) derived from phytozome v7.0 (chr-ID Gm13; pos 27401573 to 27401921 reverse strand)
caacaaggatccaaacagcattccgagcttataaggtatgtcaatttgaaagtttcacagagaagaaacagaccaagtccagttaacttcattgattttagcacatccttaacaagcacgtttcattttttatatttcattattcaactatggatgtctatgctctcttgtcttacattcataccatttatgatattatttaagctgaaagcgacatgacctgcaggcatgtgttacttatttatcatagaacaaaccttctgtagttttttctgctgactttgttttatgatgctgacttttgaatccgaaaggctagaaaatatttacaccgcttgagaggattcac

SEQ ID NO: 18847 - DNA, 943 bp, Glycine max
  Intron number 3 from transcript Glyma08g00660.1 (locus Gly ma08g00660) derived from phytozome v7.0 (chr-ID Gm08; pos 315020 to 315962 reverse strand)
ttttctgtcacctgcatcattgtccaactaaattaccttaatatgatcagtgctattttatttgttttgttttgtgcaatcataatttttgcattacacattaactagctgttaaaactatgcgtgcttacttcagatactttgttgcactctgttgctttgttctctgtgttttatatatacaacacatcctattgaagacgagttaggctgtttgtgtttggtgaaacttgtgattgatgaaaactatgtgaagtttgtattcttgtttaatatcctcttaattgtttttgtcttggaggatacacttattcatgtttgcagaccatttaacaaagtactgttgttaggactgtatatgcccaaaatactactcgttttttaacttgtctgttgattatatgaataaaattttgatgtccagaatcatttgattttgaaataagatatattgtttatccttcctttagaagaaaagatctagctcgtgttgggttcctgttatatgtctcatctgattatatgtagtatgaggaattattttagtttggaggctttgatcatacttttcttggcttcttgttaactttttctttgatcactaactattatcatgctgtattgtcttttccttgcaattcttttgactccattgtccattgattgtttttttctaaattaaattgcatattcaattcttgagaaactgtttgaaggttgtgaagtaatttagaagtcagagatgtaaatcccttgtccaaataatacctatttgatgcttgagctgaagcccaccacctgcaatattatttactggaatgtttctgttccttttaattgtcataattttcttgttatttaattttcaatcctggcttctacggtgaccaactcttccatggttgcaggcattggataattttaacacagcagttgtttctcc

SEQ ID NO: 18848 - DNA, 999 bp, Glycine max
  Intron number 3 from transcript Glyma06g12860.1 (locus Gly ma06g12860) derived from phytozome v7.0 (chr-ID Gm06; pos 10034026 to 10035024 reverse strand)
cctggttttactttcatacttgctgttctttttaggttcatcccatttccttcttcttgcttatgcactgtagtttcctcatctactaagcagttaataattatagcttccacgtcccaaatgagacttttttacttgccaatggatttccaaacacgttgcttggcatattagtacaatgtgaagattatatttcatatgagatatgactgttgagcgtaggtgaactgcatagaaccatatagtttggatcaaaatattaattctgtagatattatgtttgattaaaaaggattatttgcatgaaagtgttgggaatctattaggattcaattgcaaggtatgggacttgagtctcacattgaaagtatgggattctaactataatgactagcttttgtggttcaaggttcttattataatctttgaattttatttctggtttgtattttgagaaattctgttccttttggatggatttgttccggataacctggaattatcccaacaagcactctggctagtgaccatcatcgtagtagtaacgatgaataaagaggaaaattgggcttatggagccttctaattatggtctaacacttgggtattctaggcgctatagattgacagttacgttttgtcttgataatgaaaaaatatttcattttggaatttggacatccaataccaacgtgataacactgtgattctgtacttatataaacatatatttggatcacaggatgaatttagttgggttgatgaattggaaagtcttttgtagttctgtcaaaataaaagtaacccctctggattttcaaagcttttatgttgtttgcatgtgtgtgtgtgtgtgtgtgtttcataaaaaatgactcaccaaatatgcactttatttcattatagagcagaagtcaaaagataatatatagttgttctctccattagttgttcactgctttagatctttctaaacttatcccactttatggtttcaga

SEQ ID NO: 18849 - DNA, 585 bp, Glycine max
  Intron number 3 from transcript Glyma08g01670.1 (locus Gly ma08g01670) derived from phytozome v7.0 (chr-ID Gm08; pos 1053566 to 1054150 reverse strand)
gacgcaaattaaggtacaatgtcgaatgttgattattgtttgatttgtttctggctaaaatgcccttcaactctttttggtgatagtcttcgggtagactcatcgttttcatgacaatttaccaaatagatcatgtagtgtgtaagatagcatttggccatgttttttccagttcttaaaagtagaagctcctccaattggcatctctatggaagctttgtttttttggcttttctttcaaatttagaatctcttcaattatgtttagcctagtttattcttttaaggaaaaagctcataaaagcgggaccaattgctccccaaatgctgctttaagctttatttatttatttttacatgcattgttataatcatcgacactctttagtctttctttctaagttttgaattgattgctgagctataaagatctgacattgtgtcactgttttattcaacataaaaaacttgacatattgtataggctttgctataggaattgctgacttgcacaccatcgtgctttaaacatgttgcattgttcttgcagtggccagggtaccatatccttagagattctggaac

SEQ ID NO: 18850 - DNA, 408 bp, Glycine max
  Intron number 1 from transcript Glyma06g23870.1 (locus Gly ma06g23870) derived from phytozome v7.0 (chr-ID Gm06; pos 21166542 to 21166949 reverse strand)
attcggtaaaactatcctcatatgtattgtgtagtttatgtttaaagaaagaagtagttcgaaattgaattgatcgtattttcttcagcataaacactactacaaattggtcattcaacatcgttaaatctacatcggttattggagaccgatgtagtaaagcatgcagtggcattttcgttatttaaaccaactttttaaagaaattaactgcggttttataaaaccgcctttgttttgaatgtttcaaaagcgattttataaaaaccgtctttgtttgtaacatgattactgcggttttagttagcacccgtctttaaattcatcatattttgatttttttattttttcattttcactccttaggtttcaggagggtttctttcgttcctttctctctgctacaac

SEQ ID NO: 18851 - DNA, 1002 bp, Glycine max
  Intron number 2 from transcript Glyma14g02100.1 (locus Gly ma14g02100) derived from phytozome v7.0 (chr-ID Gm14; pos 1253243 to 1254244 reverse strand)
atgtaagtacacctttggtttgcaagttcttttaattttcatggagttagaatacggaattgctgcactgtacaagttttgttcctgagcttgttgccccagcaagctgttgatcaattaattagaaaaggaatacactaaaatcaaagttttcattttatttcctaaatgaataacttttctggctgaatgtgtccataatcagttctgttgaagctgtttgtgtacctgtccttttactctccatgaccatgatactgccgcatgaatttggagtaccttttagttgaattattatgtgtcctgtgtaacagtaccatacaaaagtaattgaagaggaatagatgaacttttcaaaatcaggatatgtttaagcaatcatgcctgggcatacccatgcctttggtgctttactttggtcctaagataggactgtttaccgccatatttcacaaggagaccaaaggatatatgatgggaagctttggcttgtgcttgatgcgtaaattgactgtaatataattgtagtgatgttaagtggaaatgcatcaaaacttgtgagtagtttctgaatcaagatgtcaaatgcttgcaaagttatcatttctctgatataactacttatttgctgtctgacagtatgtccagcataattaagggaggagggaaaatggccttttaatggaatgaacacatgctttgctgaattacattattttattttttggaaaagggggagtaccaaaatcttctatagtctttatcaattaagttcattttatttcgcctggtgatgtaattttcatagttctaaacacgcctgtcttgagttgactaactttggttcattaatttatgattacattttcctttggttcaatagtaattctaactggtaaatagccatgtcctgttttattttccattaagctttctttctttttttgcttactttggttcttcatttgctatatcaggtgggcgattgtatatctagcacag

SEQ ID NO: 18852 - DNA, 668 bp, Glycine max
  Intron number 2 from transcript Glyma09g03720.1 (locus Gly ma09g03720) derived from phytozome v7.0 (chr-ID Gm09; pos 2705177 to 2705844 reverse strand)
gaaaataacggggtaatcatacatcgtcttggaaaataactcgatttagtccctaaatatacactctttgatcggttttaatcgttgtcattttggacggcagagactaaaacaaattaaaaagaatacgtctgaagattaaattgattaatttttaggtgtaaagactgaaatgtaaagattgtaaattgaaaagcatacgtgtaaagactaaaatgagcgatttttaggtgtagagactaaatatgtaaagattgtgtagattatagggatcaaatgagcacttaaatcctttttgatatttccttacttaggttattaactatcaagtatgtgttgcttcatgtgagaatatttttattgttattgtgtcactactgctgttatgttgagaggcattgagaccattaggtagagaagtggggggtagtttatttctatgaggccaatttttcattgaaacccttttctttaaatgactctcgggtttttttccaactgtgaaccttggctgggcatgtttaagggatgtgagtagaggaattagagttgcttggatgctcttgatatatattttcttgttttggattttggatttgaattgttcttcagttactaagtattagtaacataattaggatttccagagcaaatctcttcagaaagct

SEQ ID NO: 18853 - DNA, 763 bp, Glycine max
  Intron number 2 from transcript Glyma09g30220.2 (locus Gly ma09g30220) derived from phytozome v7.0 (chr-ID Gm09; pos 37085651 to 37086413 reverse strand)
tcgccttccgttccaatcttcgcttctccactaaggtattcaatcatttatttatttattggattctggttgatttgtgatcgccagaattgcatttcaattcaactatatatatatatatatatatataaagagagagagagagagggagagagagagagttgaatttcgcttcaaacttcaaagtgtgcttttttccttatgtttgtgtcatttggggcctatttggataagtttctagataaccacttataagctatataaatcaactcgtgcacttcaacttttatagaaactctctcatttaacttgtccaaaagcttattttaacttgcacataagttcaattcatttttccttcttattttcttctcttgtaagtgcttgttgaaaagtatatctaaacggggccaaataattggttgtttttttaacatgttttgttgtattgtgtttttatggttcacttttgaaaggggataaagaacatgcttgtgcctaatttgaatcttgcacagatgatttgttggagatattcttgtttggttgggaatttgtgacgttgatgtctcttctcttgctttgttgtttgtctgatgttgttggcttccccgagttatactgttcaatgtgctttcgtggaattattactattattactttttgttgcgtataggaggttttagggattagttattttctttctgagtgtccttggtggttggcagttgagcacttcagtgtcgttctccaagcaaggtca

SEQ ID NO: 18854 - DNA, 837 bp, Glycine max
  Intron number 4 from transcript Glyma13g18610.2 (locus Gly ma13g18610) derived from phytozome v7.0 (chr-ID Gm13; pos 22237206 to 22238042)
actacctaaaccaggttggttgcatacccctccctctagtttacacttgtgtatgacttgacacttttatgtcattcaatagctttatatttagaatatggattttatctatccgatagttgaagtataactatttcttgattaaatattgtaggtccttagcttattgttaaaatttttatttatttgaaaactataaatggcattaatctttgttttgttatcatgttattggtacggagtatccaccggctttgccgatgactaatctccatcagcgaacctagctgaccacctttagtgggatttttctttccaaccacgttttttccatctacaagactcgaattcaagactttgcttaaggggaccgagtccattgccacttggaccaatgacttgttggtatatatgtcattaatcttaaataaagtattgaacaattttagattaatataaggttttataggtatgatgtatatgatcgacctttgaatctaacaacaataggttttgggataaactatcctataaaaagttatttaataatgtaagtgtggttttaacttacattggtgtaaactaatccctctttgttaagtttgtatgtgtgtgcatgtatgtgtgtacttcagtttcagggatgttttgtttggccataatggcaaacgctcagtttagtatgagactttccctcatgttgaacttttatttcttttcctttaaaaagagttaaatgtctttggtgctcttttttatttatcaccataccaagttgtttgattgttgatgaactgacctgtttatcttatctaactattgaatcatagatagatc

SEQ ID NO: 18855 - DNA, 938 bp, Glycine max
  Intron number 1 from transcript Glyma07g39950.2 (locus Gly ma07g39950) derived from phytozome v7.0 (chr-ID Gm07; pos 44296122 to 44297059 reverse strand)
tctgcttacctcggtaaaggcggtgctgatatcaggttcctttcttctcttctatattccatctttcattaacaatgtctaacattaattttgtggccattataatagtgcggaggggtttgttttgttttgttataccaaacatggaggaaagtttgctgtgtgataaagctatcttttacaaccaaatattaagaatcgacttcttactttattatgttacaccttattttattttatttcttttaatttattgaagaaaagtaaataaacacacacacacaggttgagtgtttttttgctcctatcccgagttgtgctttgcatattgcattggaatttctttcggcaaactgttaccctaacaaatctttaggaccattggcatgggttgctgaattcagttgtttatgatctgcacaagcaatgaattcagtattcttctatggtagatacgaaaagattatgtgaatttttttatgatctgaggatgaatatttaatcacaatttttttgtttaactatagttattgtgagcaatttgaaatgtctgtcaatgatattatattgaatacaaattattgtaagctttaacattttgttgaatgttattacctctggaatttgctccctgccttgatgctaagtagaagactatagtttgaactatttgtaaagatactattgactattgagttagcctgaagaaaatcgtttgcaagtttaagtaaaatatcacatattcgttgaatgaacttttccttttaaacagtggtgttggtttactggatgaccccaaacctttctccttcctccccgagccataagtatttgttgttatagctagacttttttttagaaagtatattgaacgttttgattttttgcaggccttttaaacctttggtatttttgttacaggtacattgctgttggaa

SEQ ID NO: 18856 - DNA, 778 bp, Glycine max
  Intron number 2 from transcript Glyma13g03750.1 (locus Gly ma13g03750) derived from phytozome v7.0 (chr-ID Gm13; pos 3827328 to 3828105 reverse strand)
aatacaggtaacatgtctgtgtctccatgctatatgaactcaacgtcttacctaggaagactttggtacttgttattttgccatggataattatttgttaaatatttaataaatactagtaacatttctattttatcatttgatatttttgatgtgagtgtaatatcaataataaaataatatataaaattccaattatatggtagacaatgttaaacaagccataaagttattaattacagggataaaatagaaaatgatagacaaactataaagttattggcatcctaaaatgaaataaggtagaatagtcttatgacgattattgtaaagaacacttagagtcaacctagtaatgcagagttaaagtaatttgcatagccataggttctaacttgattgctattattgtatgcaaaaaaataaataataaaaaaaaaacactctgagtagaaaatattagacaagtctaaggttacttcgaaggtaaaacaactcaaacataaagtcttaggctcaccaataaaaattatttatcattgggttatttttttaagtgaaaaaggacacatagggtagacaaaaaaaaaaaaaattcggcatataactctcttattcaaagtaaaaaaatctttctaaaatttactttaggttggccgaccttggacaaggcataaagatattgatatcatacagtctacatgaaatagggtagcaagactaacctgcataggatcttgaaataccaatatattggttttgttggttcttgtaggag

SEQ ID NO: 18857 - DNA, 556 bp, Glycine max
  Intron number 2 from transcript Glyma06g20860.3 (locus Gly ma06g20860) derived from phytozome v7.0 (chr-ID Gm06; pos 17257814 to 17258369 reverse strand)
tggacataccctgtgcttgcagtggaactttgaaggtattcttatactaaactttccaatttgagcaatgaggagactaagcaatgaaattgaggtttttttggattgttgctttctgtatacattcttagtaagcaataaggacaatggattgttgctttcaatgggagaatgagttatgctagctagcagtgaaattctttgggataaaagtactagcatgatgtttgtaataagagggtttcctttttcttcaatcaatggttcagatttcagaggcttgacttttgtagcagttattgtgtgtataagaaattgtgggactgcagattgatgtatttccacgtgagatagtttgaattgctatagtagtacagttatatacttttctcatatctaataataggtttttctataaaatattttggattttttattgttggtcacttgactattattacttgatctcccggttcactctcgtcattgtaaactctgcccaatttgacaattgcaataataggggtttctttttataccagtttgctcatacgaa

SEQ ID NO: 18858 - DNA, 543 bp, Glycine max
  Intron number 3 from transcript Glyma07g18370.1 (locus Gly ma07g18370) derived from phytozome v7.0 (chr-ID Gm07; pos 18300596 to 18301138)
aaaataaacaatataaagaatatccttatccaaaagtacattcaacacctaaaagtacttccagaatggaatggtttttaaaacatgtcctatatctgtcagtctaaacatacttttggaagaggtgcaacagttatcctaatatgtgcttagtttagtactgctctttaatcagactttgagttttttttcttgataatatgtattctaaagctttgcattggatcatcatagattattgtggtaaaacttcaatttagattggaaaataacatagaaaccaaattatatatttactcatatattcattgttggagcacttcaacatagattactgtggtaaagctttgcatgggatcaacatagattactgtggcgaaacttcaatttagattggaaaataacaaatttgatgtttgctacggttttttagggtgagtagtggaggggttaccttttattttattttattatttttaattctcccgacactcaatctcataatattttatcagtactgggagaaggctgaattcccatttc

SEQ ID NO: 18859 - DNA, 625 bp, Glycine max
  Intron number 2 from transcript Glyma10g12290.1 (locus Gly ma10g12290) derived from phytozome v7.0 (chr-ID Gm10; pos 13243513 to 13244137)
cagcttcactcaaacaattttcagtactatgttatttggttgccatctgttaccatgctcgtgaacatttaatttgttaagtgcattctgttctgtatatacattgtaaattcagttgatggaaaacaattctccaattaggcaatatatatcttatttttttggacagtggaacttttaaacatgcatatgtactaatgaaggtcagggcaacatatattgctttaaaatgtgtgtagtgtaaaaaacggggattactattatatgtaatttaatgcagtctttcttactgcttaataatgtaagggattgagtgtatgcatggattggcttattttataatcaaaatctcttgtaacctatggcttacagagatggtttatcgaaaaatgaaaaaagaagaagctatttgttaacataaaaaataaatgttattacatatttgataaaacatgctatgagagcttgattcttttgtctggaaattttgttaactggtttatggagttttattctatctgatagatccactccccttatgaaagtttctttttttccttttgtctgcaaatgtctgagtctgaccctacttcccaaatttctttttctaccttggcaggcatta

SEQ ID NO: 18860 - DNA, 491 bp, Glycine max
  Intron number 1 from transcript Glyma10g00360.2 (locus Gly ma10g00360) derived from phytozome v7.0 (chr-ID Gm10; pos 141987 to 142477)
tctcttgtgacttgtgagcaattcaaattgcggaggtataagattatgtttgaactcataatacaactaaattgggtggatttttttacgtttgaaatgaaatatgtttgagctcataatactatgtataagtttctttgagctgcaacaaaaattaagaatcttcccctttactagttggaagaccatactggaataaacgaaacagttggcataatttttgttgggttatgtgtttatttttcaactgtggttcttgggtagaagatgacaactgctgtgtgggggtaggctgggtgtgggtttttgtcccaaaccaaagggtaggttgggacaagttggaagttcatttgaggggtgtgcggttgctaaggcctgtgtttctgattcttgccttactccttagttgaaacatatcatcatttcagttttcattctctggcattctgtgtgcagaacagaacctacgcactgcattggaagatacaaga

SEQ ID NO: 18861 - DNA, 712 bp, Glycine max
  Intron number 1 from transcript Glyma13g40530.1 (locus Gly ma13g40530) derived from phytozome v7.0 (chr-ID Gm13; pos 41041497 to 41042208)
caacattaatcacgccgagaagcacactcctgctggtaaattttgccaatggatcttcattagttaatgttctcatgcgtttggctaaggcagagatgaaacaggttcacccgttgtttgtgatcgcgttcaaccttcatcgttattaataaaaaattaaaatttgggacgtgggtttgtcctgaattgatcaagggtctttcttttcatcgatgcaaattgatgatttttttccccattttggaatagttttttcaaggaaatatttttacgttctgatctgtggaagaaaaatataaattcggtttttcttttatttctgtttaatgttgcgatttacttggttggtcaacaataacgttctcgcatcacagtttctggaaattttagaatgagtttttgaacgtggattgaataattttgaaggctcaaattgttcgtgttccataaaccaaaatatgggactttttttttcaaaaagaaaaatgaattgttgttgtagttgttgattgaatggtccactgatctataatccaaagtggcgcttgtcattttgtatttttttatttttatttttgatggctgtagggtttttattatttgtggtatcttcggatgaatttatgtgacgttttgtttgatatctctccctcacgtgatattaattttgtatgtattttcgcagataaggtcaaagttaattcgaatttga

SEQ ID NO: 18862 - DNA, 916 bp, Glycine max
  Intron number 3 from transcript Glyma13g08170.1 (locus Gly ma13g08170) derived from phytozome v7.0 (chr-ID Gm13; pos 8533201 to 8534116 reverse strand)
ttttacacttggtaagtgattgcatgtgtgccttggctatatatgctgaaattgtcatcatgtgtggatgctggttgtttagtttcgtgattaggttgttctttgtcaggctatggaaaaattgttgacatgtatgtaaatgaatcagcaggccaatgtcaaggcaatatctgcgatggcagcttactagcttagtgctttgggagaaagagtgcatgtgtgtttgtctcctttctccttcccttaacgctgcctctttcttccctattctcccccttgactcctaccatggttgtagtttaggatgttgcaattattttttcatttgtccatctatctttcatatccatgtcggcattttgcttgtacagtgtctggatttagattttgactctgctttttaaagttttttatttagtgtttggttgtgttgtataccatttgggggtcttatttgaagtaggttaatccccttctgaacatggcaatcagatgctgagttttcacctaacctgtaggctgtagttgaggagctaattttcttcagagctttgtttgaatacaagtaggaaagaaaataaaaccgttaccttcaaaatcataaatattaatgttattttaattatatatttgaagcagttattcagttaagaaatttgtctaaattgagttcactcagttaaactatattgttttaccccccccccccccccccccctccggcctgcttccaattttttgtatggtgaattatcttacttatttgttgatgctcccagttctctacattataccttagattacaccagacattgttcatttcatgttcagttagtaagattgttaaacatcattctaaaagttgttgttcccttatgtaggtcttttcagcctttgggtttgtgcataagattac

SEQ ID NO: 18863 - DNA, 597 bp, Glycine max
  Intron number 1 from transcript Glyma08g12540.1 (locus Gly ma08g12540) derived from phytozome v7.0 (chr-ID Gm08; pos 9191971 to 9192567)
ctggctcgggtaaggatacctacaaacacgtactttattttcttttatttcattttcatctattttcttctttattttttttttacatcatttattatatatatttattatttttcttttcttttcatttctctttccacaacctcaattcttcttatagaataaatgtttataattttcctaataaactctgggatttgaaagaataccccattccattcatatctagtaaacaataaaatttataaataattacttaaaaataaaatatatataaataaattaataataatatatttttttttatctattttcttatgcttacaaaatcaaagacaactattttctccgtatagatccatctttggtcgcggagaaaggcgcccttgagattcgaatgacaataaaagacagttattttcttttatttcattttcttctattttttatttattttttatcacattaattattgtttcttttttcttttcatttctcattccacgacctcaattattggtatagaataaataatgtttacaattttcctaataaacttgaggagtgaaaaaaatatcctgtcctaggaacggaata

SEQ ID NO: 18864 - DNA, 377 bp, Glycine max
  Intron number 3 from transcript Glyma07g13150.1 (locus Gly ma07g13150) derived from phytozome v7.0 (chr-ID Gm07; pos 11648027 to 11648403)
tggaattccctggggtggttcctcgcactttccttgttaagttttttgtattttgtagccattttctctcaaaatgtgtatttttatttattcatcaagtttttttttggtttatgctttcgtatttagcactaatcaggtctctgtgatttattatggaaaataataatttactttgtgaagaattaagcaaataaggattatggactcgtttatacagttgcgttgcttgtgtgcctgatgtgaatgaatgaatccatttaataatctttgagattgtgatttgtgactagcatgtgttacgactgttattcaagtttgtttagtttttagtgctggaaatttaaccgtgatgatgttcagttggattgtttaga

SEQ ID NO: 18865 - DNA, 636 bp, Glycine max
  Intron number 5 from transcript Glyma07g13150.1 (locus Gly ma07g13150) derived from phytozome v7.0 (chr-ID Gm07; pos 11648598 to 11649233)
ctcttctcataggtatccttctttcatacttgacaatcattgcatattggtttttggttattttagttttcctcatttcagagaatgctgtttttgtcttctttttttttccctctggatttctcctttcctttggtttaaattgaaagaaagattggcgctaatgatcaaatgtgtgttttttttttgttgggaggagcctgacgtacatatgccaagaagtatctagttattactcttttgtttggatgcctgagaatttgtacagataagaaaccaatcacactagaagtttaaagtctataacactgtctttagctggaaaacaaaagctcaaaaaataattctgataatgtacttgtttcactgagtcattggtctatgttgttttgcatcattatgttagtttcacaagcatttattgcaggcaaatgtctgtgttatatgtaaataattgaattgactgatcaaatctagtaatttacaattcatagcagagtttttaatcatataccatgtcaaaatgcttaaaattaccaagatgatggtgtcaatttatgttctcctgtgctctctgttaattgagaatgtggtggaaagtacattaatatgtcttattgttgatgtctagtttgg

SEQ ID NO: 18866 - DNA, 566 bp, Glycine max
  Intron number 1 from transcript Glyma06g13130.1 (locus Gly ma06g13130) derived from phytozome v7.0 (chr-ID Gm06; pos 10273582 to 10274147)
aaccacagctcttctctttctctcaattctctcaggtaattgctttgttttttatacaactcttttttcgtgtttcttctgctttgtcgctgcggatcccgataactgtcaccaagccatctccgtaaaacaactagcaacaaaattcactgtaacagattacatccgttagctatcgatttcgattagttgggtttaggtcaatttgtggaatctgtatctcctgaattgtaatttcacctgcactttgcttttagccccaaaacgttgttatagattctctgtcccccactaatttttattgcataattatgtttaaattgcattcggccaatctcatggccattgtgggataaggtttttggttgttgaatctttatgaagcatgctggctgaattataattaaatgaatgtcctctgttggattattttttttagaaacgtagttatgcagtattttagttaaggattcatgatgggatacctaattgtgaaatgggtgttgtattccaaggggctgcaaactttctggttctttttgacagattttgggttatcgtttgaa

SEQ ID NO: 18867 - DNA, 717 bp, Glycine max
  Intron number 1 from transcript Glyma09g09050.1 (locus Gly ma09g09050) derived from phytozome v7.0 (chr-ID Gm09; pos 8509964 to 8510680 reverse strand)
cgattggtctgtctccgctacccagagtcccaaaggtaccaacattaattttcctgttaaaaattaaaatttgtgtagttaaaatgccatgcttatttagtttcatcatattaattaatctttcttaactgctttacatattttgatttgttggatccaaattagagaataaaataaaatattaatccaatttttttcagctcataatttggtcaagtactttcttcaaaataaaataaaattggtcaagtactatggcgtgatttctattaagatttacagttccattatttcatttgacatcaacaaaaattgatactcaatatagtataacatcatttatatttttcaagttttcttttcttatgcatgcattttgaaaggtaaaattattaatttggtattttaacatattttacttctcagtttatttttctactttgattttctattttctgatcggttttaattcggtcaattattacagattttgaaattttgactgctaaatgcgtatattttttcaattgtgacgattttttattgctataaattatataaaacataaaaaaagataaatgatccaaataaaagaaaattaaagagacaatgtttcactttcagaaccttttactcaagaaacacttaagaccttactctaatgtaagattattgtttgcagggaagcacaacagcacagggaacacaagttccgat

SEQ ID NO: 18868 - DNA, 635 bp, Glycine max
  Intron number 1 from transcript Glyma07g31680.1 (locus Gly ma07g31680) derived from phytozome v7.0 (chr-ID Gm07; pos 36640358 to 36640992 reverse strand)
ttggaaaaggttcctcactttcttccttttcctttctttcttcttcgatttgtttatatatatatatatatatagttactgtgctaaattgtaattatgtgattgcattaagtatcaaattgtaattatgtgattgcattaagtatcatattgtaatttgagcaccaacccgagttgggtctagcggaagggactagtttccgtaatgtggcgaatcaaggtttgaataatgctggttagaagaggtgtctagtgtttgatagtgtctcaaacaggattgcgtctgaagggaggataactaggagggattacaataatgtgtggttaaccacggttcaaatacatgtatgaagaggtgtctagtgtctgatagtgtattgaacagaattgcctccaaagggaggatacccggtagggtggatttgggattacaatttgagctttcatatttttagttttgatatgccgttgttatcttgttcttttgattggctcaactgggtatactacaatgtgctgtgagttgtgatttgcatatgctgtttgatttctaccttaattagaacatagcacggtgcttgtggtgtggcttgctttcaggtgaagattctcaggacggaaacactgtgacaaac

SEQ ID NO: 18869 - DNA, 561 bp, Glycine max
  Intron number 1 from transcript Glyma09g31050.1 (locus Gly ma09g31050) derived from phytozome v7.0 (chr-ID Gm09; pos 37801501 to 37802061 reverse strand)
cttgacgcaagtttagattaccctggaaatttgaggttctttttttgtttataatgatttagtttttattattgctaaagtttcttattttttgaaaaaaaagcaaaaaattgatgtgagctgccatgtgtttatcaaatttattgtatcatactgtcaacgactttttgcaatgttcatgtttttaggattaggatttgacattgtcacttcaaaagttagtggcttatttaaaattgaaaaagatactaagttatgtcaattgagtaaccgagtgaattttagcaatttcaggatttgcaatatatcttagtagtgtgcaattcatgagtgaaagacacgtgaatgtgcaagcatgtatgcacaaacaataaaaaaaaaaaactctagatgcattaaaattataattgaagaagacagcaaagcccttgctgaagttatttctaacgttttagcttttcatgtcctcatgcaagaatcgctcttcatttagtggaggtgtgtggttctggacttatgatgtacttattctcttggtaactctggctgcttggttttcag

SEQ ID NO: 18870 - DNA, 825 bp, Glycine max
  Intron number 1 from transcript Glyma08g19690.1 (locus Gly ma08g19690) derived from phytozome v7.0 (chr-ID Gm08; pos 14873994 to 14874818)
tacacgctagactctggaccatcatctgctatcgggtatggctgctgctactgcattctctctccaattccatggatttttgtttttttaaattcttattgcttctttcacatgcaaaactcttaatagtacaattgccttatgaatgcgttattgctatgctgttataaaccaatgctttgttctgttgctccttctgctgttttcttttgttggcaggggtaagtagattcttttcatgaattctcaatgcatgtacccgatatttgctctttctcagataactctgttcctcgattgctcctttgttggggctgaaaaaagaggaacacaacgattgtttgtgtagttaatcaaccaaatgagaaaaaagaggaacacaacgattgagaattaagggataggtaatcaatcaaacttgttcttgactctgtgctatttccatcacagttgctggaaaggttttcactttatcattgaattgatccaatgctctggctctcggtttatgaattaattaaactgttttcattgacatgaattggaacttttggactgtttcttatgacaattttcaaactttatatataaattagcttgggtaaggattgttgtttatgaaaccaattcctttggaacttctgatgctagatgtatttttttaattaagccatccatttgcttgtttattgtttccctgattcccagaggcttcaatattttgaccactggaagctgttttgttgcctttgtatgaggtgtcattgataattatgcttcgaagtgacagtatcaactccctgagataggtggtgaaaattgaat

SEQ ID NO: 18871 - DNA, 910 bp, Glycine max
  Intron number 2 from transcript Glyma07g03740.1 (locus Gly ma07g03740) derived from phytozome v7.0 (chr-ID Gm07; pos 2585031 to 2585940)
gcttgtacagagccattgatacttatctaaaagtatctcttctttattattgttattaatttcaaattggttgattactagtttggaattcctggtttttagtactctaattcaattgaaggaaaaaaaaagaaaaaagaacaagatcacgagagaaacaaacaagagtatataaattagtcaaaaaaaacaggactagaaaattgaactgggagctaattaagtgaacaaaatgatttttggacatcccaaatgctattcaacatctggagatttttgaacacccaaccatcatatcacctagcgtttgtagcgtacctatatttttcttttttcgttttctcacaggtgtctaataatcatttttgttaagtgaaaattggtgtaacttttttttttattgaaaaaaatgttaaggatttgttttctgttttcataatatctttcgattgagaagaaacgattagttatttgagacactaaaatttacttaagaagctaatctcccctaacaaatgctcttttaatttgtatatatggacttgggaactaatacttgaccacatgcaagggggagggttattttctaactgtgttacactatgttagtgaaacttaattattactcaagtataggaaacctctccaatgtacatgttaaagctggtatttcaatgctatagtaatattgaatactactataaatggtaaattataaactgccaaagtttgattagcattttatcttttaaagtgaaacattctcactttagtagtagagctaaatccttgtgtattatagaaaaaaattgttaggcagaggcatgttgaatgaattctaactctggctggcatgcacaatgcaattgttataggcacatccaggagtgtcaaagcaagaaaggaaggg

SEQ ID NO: 18872 - DNA, 673 bp, Glycine max
  Intron number 2 from transcript Glyma07g12080.1 (locus Gly ma07g12080) derived from phytozome v7.0 (chr-ID Gm07; pos 10363167 to 10363839)
aacgccacttggactccgagatcgttgattttcaggtgctagctttatttctaatgaaatcaaaagttaggtttataatctccacttgttgttgagcgagcctcattttgtttatatttacattagttcatgtttctgtgtttgtaagcggtctcttactgaggaggaactgcatagcttcaattgaaataaaaataaaaagttaggtttatattccaattccaatagttgttctgttgttctttatttttattttatttttatgtttacatttgataatatcctctcttgtgtttgtaaataagtaaattgtaagcggtctgttacggagggattgattggtagaggtaactgcatagcttcaattgaaataaaaagaagttatgtttatattccgattccaatagttgttgtcttcaatttatttatgtttacattcgttaatatttgctgtttttgtaaactgtaagtggtcttttatggagggattggttggtttaggtaactgcaaagcttcaattgaaatagaaagttaggttttatgttccaataattgttgtgcttcattttgtttatgtcaatgttttctttgtgtttgtaaactgtgagcaatctattacagagggattggttggttgaggtaacatgtttttgctaatgtaggttctgacag

SEQ ID NO: 18873 - DNA, 810 bp, Glycine max
  Intron number 4 from transcript Glyma07g38330.1 (locus Gly ma07g38330) derived from phytozome v7.0 (chr-ID Gm07; pos 43100319 to 43101128 reverse strand)
gacctttcttccaaaaggtactactccgtatatagaaaatcatcatgaaaaattgaaaattttgcatgctatgcttgtaaagttggtatggactaatgttttctttcctcggttcctcctaatccagatttttttttcaatgctaaatgcgtggtttattttattacttgcacttatagatgggtagacattcattatacttggtgtttattagctttctctagttctataatgtttgatttctcatgatcatgtgtcacaatatatgaaaataaatttcacgattttctgtgatcatcgcttgctgttcctgtaattgccttccttggctttaaaaggaagtttgttaataaaaaggaagtaatagataaaaagtagattgctctatagtaatcaagtaatcatgactacgctcagtaactcagttgttcatctgaatgattaagttggcaatattcaatgaactggtaaaaaaagaaaaaaaaatctgttatgatttaattaagaaaattaaaataggtgacccatattgaaagtgatgcattatttcaggatcagaagagaaatatacccttgatttctgaatcaatagtatctccctccaaattatacacacacatatatatatagtcactgtctcctgcaaagcttggaaattggaactctagaaaaaagtgaacgtgaatctgtatgactagttaaatgatgaaaatggtctacattcttgttataaacacgcagaggtgctatatatgtatgaactagcactaatcagtgtcctcgttatattttgtgattcaatttcagaaa

SEQ ID NO: 18874 - DNA, 643 bp, Glycine max
  Intron number 1 from transcript Glyma08g24920.1 (locus Gly ma08g24920) derived from phytozome v7.0 (chr-ID Gm08; pos 19108212 to 19108854)
gagtacgagaggatagagaaagttcaggtttggcatttagccgcactgctgccatctcttccattcaacctcatagttgttgtttttttcatcaaaattaaatctttattttgtttcttaaactgggttggtggaaaaatggtccatatgattcaaaggtttctgttcttggagttccgattacacttggtcactcccccttctgttttttattttttgtgggcttggtttcattgattccctccaagtgaatttttaacatggtttcaaaaagcatgcttttgctttttctacttttgtaatgaatggaaggatggggcttgccattattattttttgggtgggtgggtgaggaagagagggggaaaaaggctgaaaattgaaagaaaaaaaaagaagggtagaattgatttgcgcttgtttttctcctgagtaaataaagggtgtgggttgaaacggtggggtgggccttttggtggaaaagaagaaagtggtcatttattgggtataattgtttatgaagtgtgctgcgatatggattcagttagaaatttgctaattgagttcttctagaattttgttgatgaggaaaagtatgccattttttctgcaggctggaataatttcccccagtaaactgagg

SEQ ID NO: 18875 - DNA, 784 bp, Glycine max
  Intron number 1 from transcript Glyma12g13260.1 (locus Gly ma12g13260) derived from phytozome v7.0 (chr-ID Gm12; pos 11582879 to 11583662 reverse strand)
acgacgtcagattcctcaagatctggctcctatatgtaactctccctctttctctctgatttcattgatgctgaattcaacacgccctagggtagaaagattaacaattcaacatgtcacagtgattggtgtagctaattacagtgtctcaggctttatttgagtaaacgtcttcataagcaattacagaagaagaaaataaaaaacaaaatgaattctaccttgtttggatagaacttctcaataagcgcctattggagaagaaaataagaaggtaaaatgaattaattttctttcataagttaaagttagcttattgagaagtaaaaaatcaactttaaaaaaatttaaatgagagctcctataaattagcttacgcataagctaattttaacttaggagagatacttggttcattttacttttcatgttttttctcccataagtgtttattgagaaatttattcaaacattaccttaaacttcttccataagttaaaatcagcttattcttatcagcttttagagatgttggatgcaagagtttctgcaaaagttgaagtgtttatgaagaagtttatccagggaagaccttaatgcattaatcttagcgatattgcaacttacatagtaacttgctgttgcatgtatgtgcataagcaacagaatcagttatcttattcaagtttggaatggtttacaagctaggatgtgatgtggaatgttgttgttttgaggaactttaggaaggggttaactttgttctgttggtttctttgtgcag

SEQ ID NO: 18876 - DNA, 916 bp, Glycine max
  Intron number 3 from transcript Glyma09g04490.1 (locus Gly ma09g04490) derived from phytozome v7.0 (chr-ID Gm09; pos 3313670 to 3314585)
ggaacttcttgaggatatcctttttgcaagttggtctgtttctcatgtttttgttcttggtgtttctattcctgtctacttcagttatttgataaattttaaattggcatttcagttgtttaatgctcatgaagtttgaaaacttgtgcacatgatagaagaaataggaagtgaaataaatgattttttttctttctttctgaaaaattgaaattgacttgtgtattttagtttttgaaaaagttcgatgtgacaacttttgaaaaatttgaaacacagaaatcaattttaacctgcagaagaagtttgccttcatactttcttttaccatacttgttaagaagctcatctctgccaggccaagatttgttggtagataaaatttcaatttgcacatttattgccttcaaccaaaaaaagaaaaaaaaaagtacctctggaaagcaaaatgtttatgccaagagtttgtattgtacgtgcccacccatcattatgaatggttagctgtttaaagagtgaatgtgtgatagatttcaatgagccaacttgagtatgtttagcaagcatttgtctagtttatttgaaatgaggaacagtggttactagcctcataagtatgctttatctgacaaatttgaattttttcaatgcggctaattgtttagtgtagttattctagtgattttagcatttttaagtgataatattgtcggttgtctctgtcctatgtctatgtatgtagaagaagtatctctaagagatgaatccggctcttatttcatatttgcatggcctcatataactacttcatttcaagtactattcttatggtcaaatgttatggattaagactttaaagtttttccgtaaccagaatatacgtgcagcgtaaaaggagggtcaggaaagtaggctc

SEQ ID NO: 18877 - DNA, 401 bp, Glycine max
  Intron number 1 from transcript Glyma11g12520.1 (locus Gly ma11g12520) derived from phytozome v7.0 (chr-ID Gm11; pos 8929012 to 8929412)
actctaaagttgtgccacttattaggtatggactgaggttattatgattgttgctttttcaagttgttggtatgctgtttgttatgttgtttgtgtgaaatcaaatggggatgttgtggaaaattgttgataacttgcagttgcagaccgttttttaaaaccttggggatgatcatcctcattttttttattggcaaatattaattgttaatttttagttttttttgttagcgggagaatcaaactcacgacctttccctccctccttttcttctccttttaccaccaaaccaaccctataactccatcctcattggttgttacttgtttcttaatgtgttgtctatgtatgatttcattttcgaatgcttgtgtttgattgtctgtcttcgattctctag

SEQ ID NO: 18878 - DNA, 551 bp, Glycine max
  Intron number 3 from transcript Glyma09g34690.1 (locus Gly ma09g34690) derived from phytozome v7.0 (chr-ID Gm09; pos 41014987 to 41015537 reverse strand)
gatctataacatcagctgtttcaggtagccatttatttcaagattaaatggagttattgtgctctaaatcatacattagatttttcgattccctttattgctttatccattctgaagcttccgaccttaaatttataaagataaggtttgtttccatagcaatttgtgtgtgtttatatacataaaacatcagaactcagaagattattagtcagcactcagcagatataataattaataatagttttgctaatagctcttttgttttgatgaacacttctgctaatagctttatcctgtaaaatcttgcaaaatggacatttttttcttatcagtccaaagatttaatacgattgcaaattttaccttctggtcaacaccacacagcatttgagtaattatcttggccacttgacaaactgtagagaaaatgttgaataaatacttgagtagaacttttggtcattcttttcataatttaactatctatgtccctcaaatcaaatgattgtgcagaggagaaaggagacaccacaaaaaaacgaagagtg

SEQ ID NO: 18879 - DNA, 843 bp, Glycine max
  Intron number 1 from transcript Glyma13g35300.1 (locus Gly ma13g35300) derived from phytozome v7.0 (chr-ID Gm13; pos 36758757 to 36759599 reverse strand)
catccaacactctcattgctagagctctcaaaaaggtgtagtgaatttaaactttaaaaaaaaaaaaaggttaaattatccctaaaattttatgattcttacttttttagtcatatagtttaaaagtgatttttttagtctttataatttacattttaattctcttttagtctctatagtttaaaagtgtttttttattcctataatttacattttaattttcttttagttcctataatttaaaaactataaggactaaaaaagtaaaaattatgaaattatagggattaaaaagacaactatcaaaattatatggactaaaaaaaaattaaaatgtaaactatagagaataaaaaaacacttttagactatagggactaaaaaagtaaaaatcatgaaattataggagattaaaagagtaatttgacaaaaaaaaaattcttattttgcaattttttttctttggctccttaacatgtatcttccttcaaaagacaattctgattgaggcattatcggaatgtgaatacctcttccagacagaattcaaaccttagttggaaccttattttttgttttgattactatgttactagtatcaactgtttcttttttatgagtgatcttcataggaacttgttgaccatcttgggttgaatctcttcttcctatttcatttttttcatttaaaagttgaaccttattttacacttatatataacctttttgatcaaaattttgtacacataagaataaacattcataaaagtttattgaataaacctttacataattaaggtgtgtgctattatgttatcaattttcaggagtttgactcgaagt

SEQ ID NO: 18880 - DNA, 736 bp, Glycine max
  Intron number 1 from transcript Glyma06g12010.1 (locus Gly ma06g12010) derived from phytozome v7.0 (chr-ID Gm06; pos 9260899 to 9261634 reverse strand)
tagccaagcctccactcgaaaccatcgtctacgaggtactactacttctacttgtcgtgattttgtctttttttctttctcggtgtcttctaatcactagattagaaactaatcttcttgtggttcatgattgtaaacaactttgtagataatgagaatcaaacacaaatcttcactaaataaattgatttcacttgtatgaacagatcttacattacttttcctgtttggcaccgatctttaattttcttatctactcatgttttaactacaacttgctttgcttgcgttttcgtgatttttttggtagtgacgatgacctgttagaggatcaacctcatgtgtgttgattaagaatcgtgtctagtcaaatcatgtttgtgattctatacgctacactgttagaatattgaccttcgaaatatttttttttcttttttaaaaattcgtactcgcttattatatgcatgtgcattatgttacgtactctttcaatataactttttaacaccatatgaatttaataaagagcctttagattatatgatattatctgaatgattatttatactaaatttaaattaattaaacattcagaaactgataaaatattcgatgtgttgaaatgaatttgataattgaagtatttaaattgtatattaagtaatttatttaatacaaaactaattattataattctaattttcataattaaatatttgtgttgcaggttggt

SEQ ID NO: 18881 - DNA, 879 bp, Glycine max
  Intron number 3 from transcript Glyma12g02150.1 (locus Gly ma12g02150) derived from phytozome v7.0 (chr-ID Gm12; pos 1331228 to 1332106 reverse strand)
actatattttcaggttaagtttctgccattcttatactatccttatcttagcagtatggtctatttgccattccttgagaaaaaaattgcataaaaaaccagcacacacacacacacacatattctgccagtatcttttatttagtgattttacttctcttacatttaattatgttccttagcttcttgcacttaacatagttgttagttattcttgtggcatgattgtatgtatattgaaatgaataatgtgcaagtcattgtctcagcctctgatgtagtactgtagttgttcttcctctctgcattcctgtatcatccataccttacttggtctagtaatttgcaactccaactagtgatggtatcctggcaaatggcttagaattagctgagtctagatggcaaacctcatttccctaaagatctccgttcctgctttctcttttcatctcttttaatgaaatcgacaaaagatttttctggctaattatatttatgaccaagataaaaaattatgatcctattcctacattagattggccaatctactatactttttactgcatgtgtaagaactcaatacattagaaaaaatgtactatatgaacaatccaatttgctaaggtctagggactgaagtttaagaggagggataaagaaggaattggcacatcatgcatattttagttttgactggttttatgtgatgtaatttgggagtcacttccaatttgtgtgtggggcatctaaggattcttagcctcattcttgataagcactaaggtttcagtttgtgttttgactttgttttagctttctttcacatcatccttcatggctttactcaggatgttcctataactgcagaaactggtc

SEQ ID NO: 18882 - DNA, 412 bp, Glycine max
  Intron number 1 from transcript Glyma07g05310.1 (locus Gly ma07g05310) derived from phytozome v7.0 (chr-ID Gm07; pos 3958622 to 3959033)
caaagcggagaaacccaatcttattgtcttcactggtattccctacttgtcttgtttttagttttcagttatcatttcatttgattttttattgtagcagcttttgcctttttagctttcctttttcttgttttaggatataggaccctttcccttcattctttcaactggaatgtttctgatttttgctaataatattttataccatagagcatgttgtttcatttgcttgtaactggatggaaatgaaataaacttgagttagtattttgcttttggagcttgtacttaattttatgttggttaatcttcatttgcacatctaagttgttgatatgtgatataacctatgttgcatgtttattgtggtgtggcaggagataatatctttgcgtttgattcctcggattca

SEQ ID NO: 18883 - DNA, 824 bp, Glycine max
  Intron number 3 from transcript Glyma10g39010.1 (locus Gly ma10g39010) derived from phytozome v7.0 (chr-ID Gm10; pos 46751710 to 46752533 reverse strand)
tactacgtttgctttggtgactgtttttggttgcatgtggttgaaaaagtatggtatttggtgaaattatttgctacgttactatctggaagtgtctaaatcacacagttttgaagcaattggcttgcaataaaggaagatggcaagatagcttggtacaaacttataaaatgcatttctcttaaagggtgtagattttcttcgcatgcatggatcctgacagagtttgttccttggatttaagatgttaaagtaatatgaaagcaaagaattaagtcatggtatgacagtcaagcattgcttacaaaaagttaaagttaataaatctgaagttagtaacacagtgtagttccattataaagttgtaaactggagtgctactactattaggtgatgatatgttcaatattttaattataatttgcattaaaagggaatcaacggagaccattaagtcaaaatgcagaatagccgcacactacttaatctgtttaatagaaactaagaaattgaataatgatagcaactttgtgatcagtataaattactcaaacctgcaatgtgatgcttgtggcagattgttttgaagtgtagtcttctaaacctttagcaagggtcaaatgaagcaattttgacttaccaataaatgaaaagcacattgttgatagtgcaactttatcaaatttgttgataaaaacttccacacggattaagatttgaattgtgattgtttagaacagttctcaagtcttcttgatgactattgaaaatatttttattttaacagatgctaaacgatttgcataatccctaatgtaggtact

SEQ ID NO: 18884 - DNA, 396 bp, Glycine max
  Intron number 2 from transcript Glyma09g34950.1 (locus Gly ma09g34950) derived from phytozome v7.0 (chr-ID Gm09; pos 41221308 to 41221703)
gtaaattgagggagcaagttgccaggcaacagcaggtcatcattcatattcttcttcttagatgaaaaatgggaaacttttttgtggggtgcttctcaatttagtgctgctactatttactgtttaggttataactgattctgtagcatgtgatcataatatcaatttagcttcatttttttttaaatggggttttatagaaaaaggctaatttttattggtttgatttgaactaatgggatgggatccttatgcataaagtgttgattctgtgtgtttctagtggttttatatgttttgtcagtctagtgttttgtttgtttgactttggtcttctgtcataaatggtgtttttttttttgcaggttatacttagacagttgggccaaattagca

SEQ ID NO: 18885 - DNA, 563 bp, Glycine max
  Intron number 2 from transcript Glyma11g17160.1 (locus Gly ma11g17160) derived from phytozome v7.0 (chr-ID Gm11; pos 13101716 to 13102278 reverse strand)
aggtgtgaacaatgagtacatatataattaaacatctttcacgacagaaaggctataaatcacacttctaatacattctctgtttttattatttggaacatataaaaagatgtaattttttatactgatatggaatcacaaataactaaccaatatgtgattctagtagtattgaactcaaatatcttaaacaaaatcttagatttgagtcttgttaatagaaaaatattattaaggaagagtcacaaaaggtgattgattagtcactctaatcaagattaatcattagaaaagttaacaaatacttcaccctaaaacataattattaccccccaaaagattgcaaattaccgtatataacaaatttgttttctctaataaataccttcaaagttatattaaagatgatttcaaattgattaaaagtttacaaattatacgttgacccggcattcttattaaactagctcctccaatattctgttacatggaatttaaaatgaagatattaaatactgctggttttggttcaaatttcaggtgaagtgcacagggaattctgc

SEQ ID NO: 18886 - DNA, 468 bp, Glycine max
  Intron number 1 from transcript Glyma08g04910.1 (locus Gly ma08g04910) derived from phytozome v7.0 (chr-ID Gm08; pos 3504510 to 3504977 reverse strand)
tcaaggtatatatgtttgacaaattactacaagactatcactgtgttttattatttgactgattatgttctgttttaataacagggggagggggaagcagaaccggtttgtcaaggttaattataggtataatttatgtcttgaattatatttcttggttaacgtgattgttagtagagtttaacgtctatgtatgtccatgcatgtgtagctttttctatgcctggttttgtgcatttgcaatattctaagttgtactcaaaatggaacttgtggttgcaataaaacaaaataaagtaccaagacaacctacgttttaaattactgataagatgactcatctgtagttactagttctggtttatattgaagagcgaattatttatgtggtttgttatcatttatctcaaggaatctataagttaaaataaatcatagcatataaacatcatcaatttcagaaccttc

SEQ ID NO: 18887 - DNA, 722 bp, Glycine max
  Intron number 3 from transcript Glyma07g37570.1 (locus Gly ma07g37570) derived from phytozome v7.0 (chr-ID Gm07; pos 42575423 to 42576144)
tcaaggcaattgttgttacaggtattgtcattttcttttgaatttaacagtttctaagcttggagattatacaaatgattgggaagggatagcacttaagttttttcaatttaacaagatagacttagtaattagttaggatttgatattgaaaagcagtatgatggtttgacagtggaaagtggagaattaataaatttctgataagtcgtttgtcccaagggataaatgtaaatataaaacttttgaaataagaaaaagagaatccgatagataaccaccacttgaatcttatacccaaatcctcaccctccatgattagcaatgaccaagtggcaacttaggatcttatctaatgaaatagttatccttgatcaaattcaaaagtctcccagagtcaaaattcataattgttatgaccaatcctattgtacaactggtaaggtcattgatatcttccaaaccatctagagtagtcatcctaactccttaactagactaactcctatgatatgattcgctgaagtttcaaactgtaaagaaataagacgctctattggtattacaaagaactagaggaaaagaaaatgaggcagcagcaaagttttgggcttcaccaaagatatttcttggacaactagcttataggtacagtatcataactgaatcttattttacttttattaggtgcaaagggaaaattttctggaggttttgatatt

SEQ ID NO: 18888 - DNA, 652 bp, Glycine max
  Intron number 1 from transcript Glyma13g31790.1 (locus Gly ma13g31790) derived from phytozome v7.0 (chr-ID Gm13; pos 34147059 to 34147710)
gcaaagcgtggatacaaaatacgtatcctttcttttcttaagaataaataaataaatgtattttgctggagaaaatgcttatctggaagaccgaaactgtttttttttttaaagaaaaaaattaaaattatttacttgtagctgagtttctattgaagtctaggttaggtatttctttgttgcttcaaaagcttttttttttggggggtgggggtggtggggggttcttctaattctaccttttggttttggttttcatgttatagggagacggcaaggtgggatttggtgtgtttgttttcaggggaaaaagaagtgatgcaaattttggaagttatggtgaaaagttgtttttttttttgttcgaattggtttcccggaaatttttgcagaagttaaagggaattttcaaggtttttttccccctcccttatctgcacacatttttttctctctctgatcttctggaaatcggatattgaaagatataaaattttgatggtttagcttaaagggtgatttttaatttgtggggttttgatttagttatttacctcttcaatctgttgttgagtgtatttgataataatgtgtattccttagccaataaactgtagaggaatttgtggctcattcagcaagcgtcaattgt

SEQ ID NO: 18889 - DNA, 376 bp, Glycine max
  Intron number 1 from transcript Glyma11g15670.1 (locus Gly ma11g15670) derived from phytozome v7.0 (chr-ID Gm11; pos 11338420 to 11338795 reverse strand)
aggtttgattctatgtatatgttgttttttaacattttaattaattttcttggaagttctgtcactactttatctttggtctgtataaaatttcccttttcttgatcctttgaatgtttattcagctggtaactctgccaagtagcatttgtcttttggattgagcagaactattatgttcctattatgtcccctttacccctaataaaaccttagttcttcatctgttgggaattgacttgttcatgtgatttaggtactgttgtctgtgttttgtttgtggatgatatgtctttatcacaaagacatcattatgatagatgtcagtttcatctctccttgattgcagatctgtgtctggtgctggcaccacata

SEQ ID NO: 18890 - DNA, 902 bp, Glycine max
  Intron number 1 from transcript Glyma11g12950.1 (locus Gly ma11g12950) derived from phytozome v7.0 (chr-ID Gm11; pos 9265595 to 9266496)
ttgaagccttggagacccagctctcttccttgcaggtaccctcatttcaaaattagggtttttttttttatttggggatttttagttattgggaattgtggggtgtcatggtctgtcttttttttggattgggttttgatgcttacttgtcgcttacttgattccaagtgtgaatatttctgttattatgatgcttgctttagttcattcttgtcactaacttaatctagtaatgaaaaactagctacactagctgggatatgttcatgttcgagaaggctgtggttggctgccaccatagtgtttgcagccaagaatattttaaaggttgtatggtctgagaaaatgtttttttttattttatttatttcctgttttcacttttaattacaacaatactatcttatttacattttgtttcatgtttttaaattcttttatactaactagtgaaaataactcttttattgttttaatggttttctatacgaattgcataagatacttgattcgattattgtgaaaagtgaaaactcggtgtatacatttgtgctttcttacaagcacacaattccgttgtacatttacattctaaatgaatggtttcctcattcttgatctagcaaatccacaatgtgaactgaaatttgattcattggtttcacactcttggctactttgtaccactacaagaatatgattttgtttcttagaactatgaggatagtagcattgagcttgtattagtgcttgtaagatgattttgaaagtttttctgatttatttttatgctttgccaggaggaaataataaaaatgtgaataagataataatttgggaatcatatgtattatgtgcaaattacaggttctgcaacaacaacaacggtacgaaagagaaat

SEQ ID NO: 18891 - DNA, 702 bp, Glycine max
  Intron number 1 from transcript Glyma12g13290.1 (locus Gly ma12g13290) derived from phytozome v7.0 (chr-ID Gm12; pos 11630313 to 11631014)
aaggtaagtagaaaaagaaaacaaaaacctgaattcttttatgcaaattaatctagcatgccaaattaatttacatgtttgtgaactaatctagtttagtttattcatcggtaagttttgcatatgcaacttcttgcaatattatggagttatcttgaggtttcttgatttggatgcaagaaaatacaacttgtttgttctttcaactagttttctgaacagtgcttgatatgctatgattttttttcaatgtcttttttcttgcttagaaagtatatatacaatttacaaagattttatgcgataaggtagattggaaaatttacaacgcattgcacaaatatgtggaaattcatttggagtgcgcttagtagcatctaaaactgataattgcagaccattttcctgtgctcgtattaagatattggtgtgctgagttttcaattgggaaacaaaccattaactttgtttctgattcgtattctagctcaaatgcttgacatgacagtgtacaatatggcagttcaattactttccattttaattaaaattagaactctacatttttatttttatttattttcaagaaaaaatcgttttcaaacatgttattagttagtttcaaggtcaagcttccgaagatttactttgatcatcatgtgtctaggtgaaagcagggtttggaacaccagacacagggaa

SEQ ID NO: 18892 - DNA, 432 bp, Glycine max
  Intron number 1 from transcript Glyma13g16170.1 (locus Gly ma13g16170) derived from phytozome v7.0 (chr-ID Gm13; pos 20039109 to 20039540 reverse strand)
cccgctcccattgatgtacgtcttccttccctaacccttcacacactctctctgtatctgtacgcaccgtttcgctcatatttatttattcattcattcctcacaatcagaataacaataataattactcgcgcaacgtgtttctcttcgcgcgatttttcgccaaacgacgagtcgtgttattcaatttgattttcttccgtcgagtggtggtgccactgacggggtttattttctcttcttttcttttttcttttgttgtcgttttgatctgagcgagtgagcgtttcgcgctattttgcgatttctagtgcagtttggggttttgattttagggctttgcggtgtggatccgaactagggtgacgcgtttggttttggtttttgttttgtgcagcagcaagaggacgaggacgtgctcgtgccggacgc

SEQ ID NO: 18893 - DNA, 940 bp, Glycine max
  Intron number 1 from transcript Glyma11g14810.1 (locus Gly ma11g14810) derived from phytozome v7.0 (chr-ID Gm11; pos 10572345 to 10573284)
gattttcaggtacagtgtttgtcatggattgtttctttctttgcctttgtcgtgtgtgtattagtcaggttatttaggttttgtctatgtggtcatttatgtgatttgatttcaaaagaaaacatgtgggtctttttttgtggttaaaacatttgcatgcttgattttggttaaatgtcaattggatgggtatctttatggaagagagtttttgtcataaatagaaggtgagccctcatacaacggtgaagttgcgacttggtaactagttgagtctgaaaacagtctctttacatatgcagaagaaaggttgcgtacaattatcctccctcgcaccttcgcgaaccaaggagcctctgcggtacattattattgttgaagtgaatacaagttgtttcatgtgtagaattaagtttgagagatggtttagatgcggaattaaacgagaacgtagcaagagcaaaggtacaattattaggtggggaaatttgcatctgggtgtaccaaatgtgcaaccaaactgggcagcaaatcattgatcaggattcaggatattcaattaatgagttttaatttgaagtgctgtttgtgaactttttgttggtaaagcaaatgttaaggattgatttttttctttgtttggctttaggttgaattagaaatataagggtggtcaagattcaagaaatttgtgacttggacattcctatttggcttttttaggtttaataatggttgatagaataggttccatatggttttggcatgacttaattcgtttttatggttgtggttgtggatggtttgtactgtgaatatcttttacagcatttcacatctgctaaaattcattgagaatttttgtggaaacacattattaatgattgccattcttactggtgtagctaatatttcgggattttaagacatccaacatctt

SEQ ID NO: 18894 - DNA, 987 bp, Glycine max
  Intron number 1 from transcript Glyma09g38990.2 (locus Gly ma09g38990) derived from phytozome v7.0 (chr-ID Gm09; pos 44176508 to 44177494 reverse strand)
gcggaggtaagttttctcagcaaaatattttcccctcgctgccccctagcttctttcggttcctccttattccatgttcaataattaatcattccttttccaaatttttgtatctgcaatttgcatgttgttaatctttaacctatctcttttagaaaaccgatgcatgtacttggatcgatctatatatagcggattcaatcatcgattcctgcataaaagcattatgcaccaaccaattttacatcactgccaattttccaaacaaaaagataataataagggagggtacttgattgtgtttttatttctagcttttaaaaattagttttattgaatagaataatttttaagaaataacttttataaagtaagagcgaataagaaagatatgaaaggagaagaaagaatataaataataaaaaaaaacaactgcagtagtaaatcaagataatctagagatgttctgtttttttactttaagaattaaaagaaaggcattaactttgcaaataattttttgaattattctggtcaaacaattttttaattgcaaaaaataaaaatatgaaaaattgtaattattttattttttttatgaaaaataacaatacattaatttttttataattaagaagaaaaataaaagtattattttcataaggtaaagtttggtctaaatgggttggtgtgcggtaattacaagacgtgtaacacgtgtacacacttcacttacacggatacacgacatgaaacggaataaaacgacgccgacatcttgggatctaatcctattcatccagatccgcgaagccggaggggaccacgtgcgacgagacgtggtcacgtgtcggcagcgtgttactgttgggcctttgcgtgtgtgtgctgtttatgtattattataagaatgcgtgttggtttggggtgtgagtctaatatttgcagtgctgaaaatgtcgcagttgttggaaaaggccaaaaact

SEQ ID NO: 18895 - DNA, 876 bp, Glycine max
  Intron number 2 from transcript Glyma07g03050.1 (locus Gly ma07g03050) derived from phytozome v7.0 (chr-ID Gm07; pos 2112929 to 2113804)
ttgcactttcagccaccatacctggcttaaagaaggttagtgagtgttgtcacatattttacaatcgaatgatcacgttttaatgtggtgtcagtcaatgatttttatttttccttttaaataatttggtttctataatctattaataaattttttatgtacagtgacaataagatcataacttaagatcttgtatatattatttcagcccagctctctaccattagactcatcttagtaaattcacctttcactagtttgatttgtcataaggataatcccattcaacattgcataaaaccgagtcagaattagactacactttgttacaaattaaatggtagtttaaaaagcacctaaaaggaatttatagaaaatgtaatttctttgcattgtttctttttgtatcatttaatgacattaatattcctcgtggaacttcaattgtctgactttatgtgatgttatgtatgagcgagatcatcaataccatggacatttaattagaaagcaaataaagaatcgatctacctagatatctatatatctatatcttgaagaaagaaaaaaaaaagaacattgaaaaaaataaacaaatagccacaatgttttaagacaactaacaagacaaaaaagaaaaaaaaagtataaatattacaagttttatgacatgataagaagaaatagataaaaagaaatataaaatgttaaaaatatatttaaataaatggttgtgcaagtatcattagtcaaagaatataagacaaatttaggctttgaatacattatattgtgcaatttaatcagtaactcatcaagaatgaaatgttttgagttctagattgacaaggccactatactcagtgaagcaatcac

SEQ ID NO: 18896 - DNA, 1011 bp, Glycine max
  Intron number 1 from transcript Glyma10g05160.1 (locus Gly ma10g05160) derived from phytozome v7.0 (chr-ID Gm10; pos 3992649 to 3993659 reverse strand)
ttagtgacgaggagttttcagtgaatagggaagtacgtttcgctcgcacttcattgcatggtatttttgtttgctgctgcatatgcttttgtggtccatttttccgaaactttgtgtggtactagtaggtacaaagatttatcattaattttttgtttttatttccattattaacctgaataaagagtgtccaaggtccagtaaggaaaatgtgtgtaatggttaggaagtttaccattatgctctagttacaaacactatgctaaaggagttaactatttgtttttgttgcatgattcactaaactatttgttatgatctctttatgtgtttttcatagaatttttttttaactatgatgattcttcctctttttttttttttaattacatgcatttttttatcttcagccaatgctgtgctctattgcaaatttttacatagctggccccgtgccaggatgaaagaggttgatgcgaaacagttttcagctaacctaaaacttactcaaaattaatgtttttttttttgtgatttcatttgttagtggcaattagctatatgtggaatttgtgacaaaatttatggctacttgattaggaaatttgattgaaataattgcatattcattgtgtgttagtcttaggctacatgagagtgttttcatgtgataagttcatgcaaagacgttttgggttcagatctattgtctgtagtcataattcaggggtttcttcgaatatgttatgtagattgtatagatttaagagaaggaaaagttttgttttttcatggttcttattcttttttttttatcagcatggttcttattcttaatggcactggtatttgtgaatgtttttccctattggtgataaggtgcatgctaaagtttgttctatctatagttcagatttattggcaagcttttttttttcattgaaattctttggtaggggcatctttctaaatagttattattgacagtctttccacaatcgagcattttgg

SEQ ID NO: 18897 - DNA, 558 bp, Glycine max
  Intron number 1 from transcript Glyma08g46000.1 (locus Gly ma08g46000) derived from phytozome v7.0 (chr-ID Gm08; pos 45231003 to 45231560)
gactcggtgctgctttaattactgctcttgtgaaggtgaacttgcattttttctttgcatgatagatcttgagaaagatttaaatttgaggttaacatattgacctttgcaaattttcgattggcaagaatgagatatccattcactacaaatataatttgcttattatcggcaattttttctgacatttttttgtttacgatttattatgtgtctgtattttgcagaaaaacataaattggttcatttggttgataatattcgtgtaaaatatcagatgcgagactatgcatatgaatttgttgcttcgtcagttttgtcaatataatgaaatcaactgcttgttatatttttcatcatatgtatcctattattatccatattgttttgtttttttttgctaattagtgtcctagcggtcttgtgcttggtattaaagtaagaggcagtgggttctaattccacattatgcatttagagacactggtgtttataattttgtttacttactattgacacgcaggtgaactgtgaacttggttggtcagagcttgccaa

SEQ ID NO: 18898 - DNA, 267 bp, Glycine max
  Intron number 4 from transcript Glyma07g36840.1 (locus Gly ma07g36840) derived from phytozome v7.0 (chr-ID Gm07; pos 42109449 to 42109715 reverse strand)
ctgagtacgtgtgtttgattcataattcacaaattgtctcttttctgctttaaatttgaacttagtgatccaaacataatcaagagtccccccccccccactccatttttgtggtctcttttctgttttcacatgccactgaaatataaagtaacttgtaatgaaaggaaattcttgttttgtttgtcaaagtttaatgtgttcttagccatatgttgaattcttttttcagtattgaagcagcttgtgctgcacaccccactgctg

SEQ ID NO: 18899 - DNA, 823 bp, Glycine max
  Intron number 1 from transcript Glyma06g18820.1 (locus Gly ma06g18820) derived from phytozome v7.0 (chr-ID Gm06; pos 15073718 to 15074540)
ctttcaatcaaccacattttgttgctgaattttttgtaagtgcacgcttttctctctttttcatttttgaaattgttaaatagtgagacattgttttgacaaatgttttgatgagaacagtaaattactaaccacgaattatgtctgtcatgttcctttattttataattgattctatgcacacccgaaattttacgtacaaattaatatcatccctctatcatattgttttggttatatatgcatttacctgcgtgtttccgtatgagaaacattaagagaaatcaagtaagaaacaagatgtttctttcttactagttgaaaattgaataaaaaaagagagagagacttgatggaaaccatgtaggaccattgatttacaacttttgatgcaaaacgtttagtactataccaaggaaggcttgttgatcttccactgtcaattgtgcaaaaggaaatgccagctaaaaacattatcttaatcaaggattcttttattaatgtttctcacgggtgattctatattttaaaataaattttaacgaataataaaaatgtatttgcacatgtttgtgtttgcggtgaattcgtgacagtacaaaacctaacgatacttcagcaaggaaggttatatgtttctggaaagtaggttgaaattgtcgtgataacaattcaaacatgtgcttaaaaaagataatgttaaaagtgttattctttctcatacattgagaaactctttccataattaatagtttgtgggtgtcctaaatgtgttcttgttttcactttttttttttttggcaatgtaggcaggtttactgct

SEQ ID NO: 18900 - DNA, 757 bp, Glycine max
  Intron number 1 from transcript Glyma10g30110.1 (locus Gly ma10g30110) derived from phytozome v7.0 (chr-ID Gm10; pos 38843215 to 38843971 reverse strand)
cccccatttttcttatacaggtccaacttatatccagtctcgctaatcattcacatatcttcttcatttcttaattccacgctttgaattttatagtagaccaccatatttaacaagaaaaattgtatcttacaggactattaggtaatcatggatggtcataaatctaatgaatgttgatggtgatatataattgagtttttattttagaagaaagtattaataaaaccccattacgtactatataaaagttgataagaatcatatatagtaacctgaaattatataataatttctcatttttaataagaaattattatatgattatgtgagtatgttcaagtttctttctttttttaatacacaaagaaagaaatcaaaacatcaagaaaaaagtaccactgaaattaaattaaattttcttaaataatatattgaatttaaattttgtagatgaaaaatgtaataagaagaaaaactataaaaaaaaatgactaatcaaattctcacaaacaaagtgagtgaatatttgtacgaataacctggatcataaaataaaaaagaaaaactttcatatgacatataattaaatttgttaaagttaattaagagaataataatacgaagattaagttggatcataattttttttctcaagaatcatttgagagtgaataatatcttagaatgaatatatattttgattttggattgatacacaggtgacccgtttgaagtgcggtggtttcatcttggc

SEQ ID NO: 18901 - DNA, 966 bp, Glycine max
  Intron number 2 from transcript Glyma06g41610.1 (locus Gly ma06g41610) derived from phytozome v7.0 (chr-ID Gm06; pos 44907009 to 44907974)
aggtcaaggtaatttatttgtataacctatggtggggaaggacatccttcttggtttggtgtttatataaaactatttagtccatataccaccacatctctgtgattttcaattcatctatttctatagtgcttctaattggcagaacatgcaatgctatctaatatccataaaatcatgtaaagggttgtccagaaaataacatttcctagttgtttaattttgaatgcatgtataatatcactagagcttctattttattcttaagaaagaaagaaaaaagaaaaacactctcaggtttcaagcctgtaacttattgattctcaaataaagtgtgactttgcggatgatataataaagttacctataaataaatatcataaataatatcttttgttatcttttgtgaatggtttgaaaggacaaattctgtgcatgattcctgggtatatatcactcatatttattattctcttaaccactttttgttctactgctatgtgctcatattttgttctatctaagaagttgcctccaagttggaaatcaaagcctttgttttgatgagtggaggagctctggtggataagactgtttacttttagattccaaacccaactttgaggtcatgtgggctgtttttatgtcaccaaagacaatattattaagattattcctaatctaatctcaataataaaaaaaatcatgtaggtttctagccttttaacttataataatggcattattggtcataagaataatgaagtgtgactttgctgatgatatccattcgtgacttataataaattaataatatattttcttatcctcttttattggtttcaagagacaaattctgatgcataattgttgagcatcatcacttgtattcataattctcttaatgcgtgtgttgtgtggctctatctaggaagttgcttccaagttggaaattaaagcaattcc

SEQ ID NO: 18902 - DNA, 373 bp, Glycine max
  Intron number 2 from transcript Glyma07g37480.1 (locus Gly ma07g37480) derived from phytozome v7.0 (chr-ID Gm07; pos 42517893 to 42518265 reverse strand)
ctcaacctgttcaaactgcatttcggggttacctggtgagtttgtccaacccattctctttgatttgtgtcaccttaagaccgctttccataaactttacattcactgctaaattcctcacttgtggatttcttacagcatttagtgatttctaaaattcaactcaaagcgagtaaaagaaataacgaaaattggcaaaaaaaaaaaaaaaacagagagagagagagcaagtactaatagtaatagaaattagtaagtggaagaaaaaaccaaagtcaacttactctattctttgtcattgttttctcttgatcactgactgatataagacattacaggcaaggaaggctttgaggctcacccaaaaaggagt

SEQ ID NO: 18903 - DNA, 992 bp, Glycine max
  Intron number 3 from transcript Glyma07g38230.1 (locus Gly ma07g38230) derived from phytozome v7.0 (chr-ID Gm07; pos 43050175 to 43051166 reverse strand)
agacccctctttacctggcagcaattcgtaccaaagatgcattttattgtctccatggtcacctacaaaacaaagatgattactcgccatgtattaagagcaacggggacactattcttcactctaccatctctaatgaatactttggttagtgccactctcatatggtgcaatttgttttatgctaaaatagtttcagtttttatgtatgttggctgaagtttgatgaattttttgtaggtttggcacttcaaataattcggatgtacccaaatcttgcggatgctgtcaatcaggatgggttatcacctcttcatattcttgctatgaagccaaattgttttaaaagcagcacgcggatggagtttttggatcgtatgatctataattgtaagattaatacttattcccatctagttttttgctatataattttctaagtttgaagtttttatttcattcaattataatttattttacgtaaaatctgtttctattcaaaacatgcattttctcttaataaaaaaaacctaacaatgaacaaaaaaaagagagatcaataattagttgaattaaaggttagtattcaacccccaaaaaatatcaaaggcatttttggaaaaataatttttttgaaaatttatgatttatacatagtatagataataacatttttcatcatacctactggtcacagaggattgagtttcattatacatatatagtagttttgtagtctctcttgtatatttctgacaaacggttatggcaggtttgcttgtgaatgagttgaaggaagagacagaggacctaagtagtaatggagaagatacacattttaactatgcaatgaactacagaacatgcttcagcttcttaaatttgttgaagaatgcagttaaagctataagtgcgcgaatcgtgtttcatgtatttagtttggtttacctatttcatgtacatggccagccaatataactcttcagtctgtt

SEQ ID NO: 18904 - DNA, 970 bp, Glycine max
  Intron number 1 from transcript Glyma13g35060.1 (locus Gly ma13g35060) derived from phytozome v7.0 (chr-ID Gm13; pos 36555834 to 36556803)
gttcagtgtcactggcgtggcagttgtaaattcctctatcttttgctcccctttcttatgatttaagatcaaaacatcataaatgtttataatataatagcttatttttctattatcaatttagggttttttttaacaaaatttgtgttcttatggcctcttaatctatgcctagtgggatcgacaaagcctagtgtatgacaagcttttcaatatcagtagagtagttgctatgctaccggtctcacaaattgcaataaatgtttgaaagcctacataaccaactgccattaatgttttgtttcataactcattcagtagtataaaattgtcttcactatgtctagaatacctctccctcccattgtaatttggtgcaagataaccaaattggtccgaaaataattattattttaatttttctttataacattaactattttttttttacttatatcccttataatattaatggtgatcaacaaaatctataaataaattaatgatgatataaaattaattttataaaattattacttttttttttcttggtctcggtacaaaaaacctacaacaataattattttgatataatggagtgtaatttttacagtaatgattatacgtttttaaaacaggaaaaaagatgagaatctaaaattgtgagtggaaacaacgttagaacatgaaaacaatatactatgtaagcctgtaggggagattaacagggatacaattttctggcgaaatgtcaaattattgtttctaatctttatttctctatacttaagttctgacatataaatggtagtccaaatttaacatcataacattttctcaatgctcattgaaatgaatgcaacaagactaaatattgttactagattaattcacagcatggaaattgcatcataacatccttatttttgtcctaggttggtttgagtggggcactggaaacactctgcgg

SEQ ID NO: 18905 - DNA, 811 bp, Glycine max
  Intron number 1 from transcript Glyma08g22110.1 (locus Gly ma08g22110) derived from phytozome v7.0 (chr-ID Gm08; pos 16786965 to 16787775)
gttattgcttcatttctgctcagctcacttgcagggtaattgttcttttacaccttaaatattatgtttcaatttattattggttagcctataattgtttgctgattgtaactttctgattgtgagttgtgactccactcctcaatagtgtatcgtagtttttaacttgaaaggttaggttcattagttatgtatttatttatttaatcgtcattgcttctttgatgttgttgtatgaagtaggaacctttagcattttcttaaactattgtcatgtatttagcatctttccagtttttttcttttccatttttttgtttgtttttgtttggtttagcagtgttatgcttacaagcttataaatgaatgttaattctttaatctgtttgttctctttgtgttggactggttgtactgtgttatagtgtgagaaaagaaacaaaaagttaagctttgaacctttgacatagatgtgccttgaattcggaaattttaattgtctctttcatccggtgcgattggaatgttaaaagaaatgagatttggtttataaattagatcttgtgtttggaatgttacaaaataggaaatgtttagtgtttttttataaaaaaatccattggatttaacggtttagatttagaaattgtatgaaatattgtgtttgttctgtgattattttgtttgggaggaatgaaccaaaggaggcattcttagctgttgggttatggctttaatgcatttttgactgaaattatgtagtagctttaggttgtacttacaccactattaactttatgcagggcggtat

SEQ ID NO: 18906 - DNA, 998 bp, Glycine max
  Intron number 1 from transcript Glyma13g43660.1 (locus Gly ma13g43660) derived from phytozome v7.0 (chr-ID Gm13; pos 43266006 to 43267003)
gtttccgcatttgggtttctctccgattgaaaaaagtaggtggctttacactaaatttgtctgctttcacttctcaccaatctgatgcattcttggattttttttttctattttaagtttgcttctcctaatgtgtatgagtggtttcggagttcactgtataggaatgtgtaatgggtttttatgaaagaaatcttttctttttttgggtaaataatcagagacccttttcaagcttttgctagattgctcgatcagattttgttctgggtaataaccagatcatgtgtaagttgatttcactgttgaattttgagtgtttgatgaatacttttaaaataaatcttttgcaatcgcaaccaagatattttattggggtatgcttcttaggagctttcaaactgtatctatatctattacagtttcttcaacctttttttaaacttaatccgtttgtcaatcctgatcactgttcattcatttgtttgttccaaatttgttttgaagcattatgttatcaagaatgtctttggaaaagcttttattggatcgtttgctaaaattgtcatgagattcaccattctaaatttatcagttcagatggaaatttagattcttttattgctctttgtgcagcaaatataacttctatttggaatggaaattaatactcactccgatattaactgagttgcaaaaatatcaagagatttgcagatttcttttctttttttgggctagaaaaagcatttaacaatttactaatatttgtaataattctgctgctcatcgttgccaaattttgcaagtttcatttcctcttataatatctgtgtacttgggggggaatagaaaaacaaaaatctttgagtggctaaatcagtaagcaaatatttcatgcattgattagttgttgtgaactttggtcatgattcctattgtctaggaattaatacaatgctatctctttagctttttgaatttgatgcagcaaggaa

SEQ ID NO: 18907 - DNA, 949 bp, Glycine max
  Intron number 2 from transcript Glyma13g20360.1 (locus Gly ma13g20360) derived from phytozome v7.0 (chr-ID Gm13; pos 23805677 to 23806625)
ataggacaaataagtgtttacagcagcttcaactggtatgtgttctttttatttggattttcactttctaccttgtgcaaagaaagattagatttagggtctgtttactttcatttttcaaaaactgttttttgttttaaataaacaacaacaaagaaatcacacactcacaccgagctagataattcacacccttgagctaggagctgaggactgcaaaacagaaagaataggattaggaaacatcttccagctgcttctgtttattggttttggaaacaattttcaaaagttttaatagaggagatataaggtgggttggatggttaaggaacaagggaaggggggataggttgcaggttcgatcctctctgctaacaaagctaacattctaacaactaacatttgccaataaaaaaaaagtttgaatagattttggatgtgaaattgattgttgagtagcatagaattatttcagaaaacaatttttaaaaccaacaagtgagaagaaaatcaaacatgcctttagctccaagttttgtgttattatttgattggtagcgcttcacaccttagccttaatttgagtaggtagtaacggccaccgggggttatgatatatctgcaccaagataatagagttggcactcaatgaaacagacttgtaaaaatcaatattatttttccaaccaataaagtaacaaacattccttttatctttccggtaatgattgtatattgtgtgtgtggcagtttcgggagtcctctcagaagggggaagatgcttctggtattaaccatgaattgacaattctgcaaaaggtatgtcttcataaattatcaatcaaatttcattctaattaccgatgataattcttctattcatttctccatcttaggaaaacaaaaaaaaaaaaatcgttaaagcataatcacacattcactgtta

SEQ ID NO: 18908 - DNA, 296 bp, Glycine max
  Intron number 3 from transcript Glyma12g32050.1 (locus Gly ma12g32050) derived from phytozome v7.0 (chr-ID Gm12; pos 35636867 to 35637162 reverse strand)
gaagcgtaagtcacccaaaatatacccatctttttcaatgtaactttttgtgtcaatcctgttaaaagccgaaaataagactagtatgaggattgacttgaactcttacacggctagggttcaaacatgagattgacttgaactcgagagttcagattactgattgaactggaataatcttgtgttagttgtttatgcacattggtgttttttaatggaattcaatttgattaatttgttttgataattttaattttttttcttcttcaggttctttaaggagtgtccgcaccctg

SEQ ID NO: 18909 - DNA, 599 bp, Glycine max
  Intron number 2 from transcript Glyma12g32050.1 (locus Gly ma12g32050) derived from phytozome v7.0 (chr-ID Gm12; pos 35637392 to 35637990 reverse strand)
gctttggattatcttcagggctctctcttggccatgttagtaatttcttcatctctttttcttcttttttgcttcttcttccatctctcgaatttctcccaatttttgtcacaattgggttctgattctgatgacaatttgattgatgtgttgttcggtttgctcaatttgacttttatccttcaaaaagggtctttgttttttcacaagtcaaaattggtcttagtgtgaagccaagccggccggctcaaaactctctcttgtattcttctcgttattcgcaaaacgcgttattccttctcactgtttgaagctactacttgctcactttcccccaaaaaaacgtatcaacctagtcaaaatcctcgtgttttctgcacaactcttatactccaaataataatttaaattatcccatcaattagtcctccctagctatgtgtttacacacgtgaattagacagaaagcaaaaaacaaacagaaaagtgttgttgttttatatatgcttgctctttgagtgtactgcactgtactttatacctggtattattgtattgtgttagattgaaaaccataaggcttcggaatctcaaagatc

SEQ ID NO: 18910 - DNA, 559 bp, Glycine max
  Intron number 1 from transcript Glyma11g13240.1 (locus Gly ma11g13240) derived from phytozome v7.0 (chr-ID Gm11; pos 9425225 to 9425783)
cactgctcaccatcaacaggagcatcgtaaacgcggtatacgtaattttatgtttgtcatgattcaaaattgaatgttttgtattggataggatatgttctcagcaagattcatttgaatgatatgtttgatatttgacttgatttataaggctttaccactttctcttttctagtccctttcattatcatgtgctgtggtaactgcatcaagtcagtcatggggcattgcattagataatgacatcagacatattcagtttgttaagttctgattgatagcagtttattattgagactgtcggttagataatcaatttttcatgtgttaatgatagcaaggaagaaccttaggtcattttgtgattgattttaggtgactttcaactggtatacaatattccctggcataagttagaagaattcctagaagttttgatgatatttatggtttctgctttgttatgatttcaaagctgaatgctcctgtagctacatattctttagcaaaattttggttgctagttctctattaactttttgagtttatcagggcaaag

SEQ ID NO: 18911 - DNA, 788 bp, Glycine max
  Intron number 2 from transcript Glyma05g31070.2 (locus Gly ma05g31070) derived from phytozome v7.0 (chr-ID Gm05; pos 36289986 to 36290773)
aggatcgggccaagttgattgacactcttcaggtgtttatgtctttcttacctttttcacttgtctgtctttagcactcagagtaagctagtgtatatatattgcactagcttccttatatttttttttatccataaatgctaattgttagtttttactagtggggatttggacacatgatctctccttctccctttaccactaagtcaatttagaacccacattgcttcattacgtggttgttagtttaggtgcttcgtaattcagttattaagtttctcataatatgaatgtcactcagtcttctgaacttggctcttgcccttgttactgtttagaatttaattagaatgcattaacaacttagaagctttttagactgtcgtccaatcataagcttttgaacatggaattttaccccatttcaatcctagtgtggaaaaatggagttaacgttcattgccattattattattttttttttctttttggctattcaatttgcatatagaagattcccaaagtatgagaactagagatgtttatttccttccttcgttaatgaacaagagaactagcaaaaccatgctcatgagaattgcttcttattccttgtcaactattttgggagggcaaatcaaatttatgcatgcgtgaatgtcatattttgatgtttaaccagtaaagaccctttcaattgtcatttcatttggaatatgatgtcattacattttccttgttttgatcatgcaggattggaagactgagagatacaaagaaataatcaa

SEQ ID NO: 18912 - DNA, 488 bp, Glycine max
  Intron number 3 from transcript Glyma11g15880.1 (locus Gly ma11g15880) derived from phytozome v7.0 (chr-ID Gm11; pos 11544894 to 11545381)
ctcagttacacctttcaaagcagggaaagaagcaggtgagataataaaactattacctactccgcctttgttattgtgaggctttttctatgatgaaaccttgaacgctagtactgactgacaccctgttgaatatcatttattctctgattactgtttcttgttgataacaagttcttctgtttataattttcttttcttttgcattttctaaacgtgttacatgcaatatatggatcgttgtatggatagacatcatacttaatggttaataatatgagttcacaactcttaaaatagatggatattgtcaatttatgacatgaagtttcatcttattgttgtagtatctttggtttggactccatatatcgtttcctttttaatctaaatttaatatgctgtctttgagtttttggatgatatagtgatgttgtgtttcgtcttttgtaggatcttgttgatcgcatattatccgttctctcaga

SEQ ID NO: 18913 - DNA, 859 bp, Glycine max
  Intron number 1 from transcript Glyma12g06890.1 (locus Gly ma12g06890) derived from phytozome v7.0 (chr-ID Gm12; pos 4699606 to 4700464 reverse strand)
tcaaccattcttttctcctccaatttgcccaagttcgttcattcctttatcaacactcattcattatatataaccttgctcgctgtctatttgatgaattaattagagtgtatatatgcaaattatatgccttcattttttttaatgtttatgccttcatcgatctcttcttaatttctttcttttgggtactgtttgattattgaattacctattagtctcttcatgcaaatgtgcttggtatgtgtgtgctagtcaggtaataaaactaaaacatgcaaggtgaatgttgatttgagtgttgattttctattttttttctgaaaataatttttatttttaagatttaaaattgaaaaagaattacattaaagtgtcaaataaatatattttcatcctaatttttttaaaaaaataaaagacattcaaaccaaccgttactttagaaaagtaaaaaaatttcatttttttatgagatcacatatattctttttatgagaaatattattattcaaaatgaatgataaaattttcttttcaaatatttaatactcatattatacttttaaactcaactcaaaactttggtaagtcataccaattgtgtaacaattgatctaagtatttcgtggtccttttaatttcttaagaaacaactcaaatcatcttaaaagtcactgtctcctcttttgcgtagcccaatcatgttagacggacagcagtttattttttcatcagtatacttagacatataattcttcttttatttcaaacactttctttagttatttgttatttttaaaccttatcattatacaatcttggtaattgaaggtatttgtggttttggttttcagcc

SEQ ID NO: 18914 - DNA, 690 bp, Glycine max
  Intron number 2 from transcript Glyma11g18960.1 (locus Gly ma11g18960) derived from phytozome v7.0 (chr-ID Gm11; pos 15559514 to 15560203 reverse strand)
tgagtttcttcgtcctctgaaagcttcccttgaaggtaggtcactttcacttacgatgttcagttcacaccaaagatcgtagtctactagctgtcatttatctttagtagctgtcaagttcttgtgaagtcaccttgttctaaaagttagaataaaacattgtgatattaccagagactgaggggagtaaatttagaccatacaagcagcaattgatggttaggattaaaattaaaagttatttaatgatcacgtaatcacttaaaatcatatgactttatgttttagtcttaagcttttcttgatttgattcaatggccatgattcactcctctcactctcataataaaaaccctctttctatatatatatatatatatataaagagagagagagagaggaagcgtaccaggtgagaaatgagagtgagatgaacgaatctcaactacatgtccaactttgacatggctattaattgatgtggtcactattccattgttatgactgagtttgttttatgtcattagacaatatacgatcctggcctgttaattactttgtttgcactcggcacttggcacttagcacagcagacagtttgttttggaagaatttatttactgtgtctgtgtagtttctagcacaccttgacaatttctcttcattgcataacagagtttaggaagaaga

SEQ ID NO: 18915 - DNA, 707 bp, Glycine max
  Intron number 1 from transcript Glyma07g30440.1 (locus Gly ma07g30440) derived from phytozome v7.0 (chr-ID Gm07; pos 35449062 to 35449768)
ttgctggttcagctcttgcttgcactcttggaaaggtagaagtagaaggcttctatttcctgcacatgtttgagtttgtgagtttcatcatcagcatgatggtttctcctgtgtaataatatatatatatatatatatatatatatatatatatatatatatatatatatatgtatgtatgtatatatatgtttatgtgttccaatgaaaaagattaattggtgtaaattagagtaataaatgaaaagaagtctcaataggatgaaagaaaaagcagtgaattttatgtacaatcattcaatgaaattttgtccgggtagaaatgtaaaagatatggctatacttatagggcactctatagaacatttttttttactgataaaatgtttttttcatttgctcttttctcttccattttctcagcaattagacaaagaaagtatgaagttgtgtaaaaagtcatatagatctgtttatatagacttttggatcagtgtcattgagaaagtactaatgtaactatttaaccagattcacttttgtgttataaggtccgtgtcacttatctatggtatggcactgcaacagttgctttctgataacttttatgatatagaaaatgttttggaggaccctcttaacttttgtgtgaatgaagtatatgtttgtgtggcgaatgatcaataattttgcttctttattgtagg

SEQ ID NO: 18916 - DNA, 267 bp, Glycine max
  Intron number 1 from transcript Glyma09g38820.1 (locus Gly ma09g38820) derived from phytozome v7.0 (chr-ID Gm09; pos 44077964 to 44078230)
gcctcaggggaattcaccgtgaggcagaaatctgtgtatgcataaaaaaaaccctttaaaagtttcaaaattttattttttcgtaggaatttttcttcacttttgtgttaatactatgatggggtggttgttagcatccccatgtatcttcaatttcggtctaactctagtgtggtgagtaatttgaattgggtatagtgaaagagtggtttttgtttatttatttgtttggttttctgttgggtttgatatagtttactttcaata

SEQ ID NO: 18917 - DNA, 560 bp, Glycine max
  Intron number 1 from transcript Glyma07g34440.1 (locus Gly ma07g34440) derived from phytozome v7.0 (chr-ID Gm07; pos 39366205 to 39366764 reverse strand)
gtccctgttcagcagaacttccccttcaccaggaggtactgatgatgatggaggctcttctgctttgagaaataagactttgttttatgcttctcgtttcgtgttttcgtggtttttattttattttattttatttctcaagccttttaatttttgttgttgttgctactgctgctgctttagattagaccgagtggaattattattagggtttttggattataagaaatgatataccgttggagtctttgatatattctttttgttgccaatgtttttttttttggtttcgcgtttagctgcgctcctcgcttgtgattaatttgaatttcagagatggaattcttaacctagaaactagaatgcgtattctcggatttgggggaaaatcgtaaaccctattttaggcttgaaattgaaagtgtcgtctcattataatgccttaatatagatataagactttgttttgtgctctcgtttcgtgtattcgtggtttcttatttcgtgtttttttacatgttgctgttgctttaaattagatcgtgtatgttttcaggtga

SEQ ID NO: 18918 - DNA, 845 bp, Glycine max
  Intron number 4 from transcript Glyma06g09240.1 (locus Gly ma06g09240) derived from phytozome v7.0 (chr-ID Gm06; pos 6795610 to 6796454)
atacacttttcttcattgtggacctgcacgcggtatgtttgtgttccttctactacctagactgatgatatgcccaaggatgcttttatttttttgtttgagctacaggtctgagctcgtatgactaaatttttttgtatatattatcatgtgaaaaagaaaggatcttgaaattcatgattttccttttatttgtgctgcttctgatctgtagtgagtttactatttgctcaagtgtggacttcagtatcttgtgccatttactatttctgggaccaattcacaaataggtcaatgcattcgaagcttcttatcaatgagactgaacagctctgcccagaaaattcacccgattacttataactgaggataaagatccaaaattttaggataatttaagttgaccgtacatttttgtttagagttgagatttcaactagaatcctcacaaattatccttgttgatagtataaggagtggccagactttctaggtcagagatgtacaggctatgaagcatggacactggaaatcacatggacacagacaatataacactgtcccagtaaaatatgaagtgcctttttaggatatgtaacaccacttcatgtttgacttgtgtcagataccattccctttttttaaagtgttcatgcttcaaagttgtgccttataacatgatccggctaagtaaattcgttttctcggaggaatttgcggactaattttatgctttccattgtacttgattaatggtcaaagccacttttctgttttcttgatgttgaatgttactgccccatttctcatcccttcagatattatcttacagattacattaccat

SEQ ID NO: 18919 - DNA, 709 bp, Glycine max
  Intron number 1 from transcript Glyma09g27390.1 (locus Gly ma09g27390) derived from phytozome v7.0 (chr-ID Gm09; pos 34200841 to 34201549)
tcttaaggatcttcttccaagactgtttcataagggtaagaaatactaccttcatttcatatctattaatgtttaaagcttacacaaattaaggagtatttaatgggtgtataatgcattattattatatttggactaaaataaccttattttggttatgtttggttactgattttgaaaacagtttttttttttctaaaatttgtttgtttcttgagcacatttaacagtgtttgtcctttaaacatatttttattttctaaaagtttgttttttgaacacttcgacaaagcacttgaagaaaataggagagaataagaaaacacctctcagttattttttgttttttttttatttattttatatttaaaacaattatttcataaacagttttcaaaactcaacagattttggatgaaaaattgattgctgagtagggcaaacttgttttaaaaaatcagtttgtaaaacaaaaaagtgagaagaagaaatacacccttaatatctcatttatttgtgataaattactattaagcaactgctggaaaggagtataaacaacaacaaaaaaaagactgagtttgtaaaatatcaatagttttgaaaaagaacaaggacatggaatgcaacctgattaatgctttattgattcatgtgaaatattgaaatggatttaattgtatgttttggtcaattgtgaatgataggt

SEQ ID NO: 18920 - DNA, 357 bp, Glycine max
  Intron number 2 from transcript Glyma11g11460.1 (locus Gly ma11g11460) derived from phytozome v7.0 (chr-ID Gm11; pos 8169484 to 8169840 reverse strand)
gcttgaagaaagctattgatttctgccgtatgctttttcttcattccttactttttatcttttcctaaaattatttcgttttcattttgctagctagctaggttaggaattgtaatgctccgtgcttatctatttgcacatactttgtgttatttgagtattgaattaaccataatacatataggcttgaatttggtttgtgatttgtcatggtcacgcggccttgtgttgaattgaactcgcttaggatgttcttaccaaaattggaactatgtcggtctccttgtctttctaagagttggctgattttctgatgtcgcagaggaagtgaaggcaaaatatcctaaaattacatat

SEQ ID NO: 18921 - DNA, 766 bp, Glycine max
  Intron number 1 from transcript Glyma10g30400.3 (locus Gly ma10g30400) derived from phytozome v7.0 (chr-ID Gm10; pos 39070843 to 39071608 reverse strand)
attcacttcctatccccttcttctctctcaaacaggtttcttcctcaattcccaacccttttattcactcacactgcaccacttctttatatcaaaccttttttttttatataaatttatcatctttgttttttagggtttaaacgttgaatactcattcatgggtttgtcttcaacgtctcatgtaacggttttgcctgtatggatcattcgttttcgttttcgtttttttcctcctcttctcttcgtatcattcctttttttgttttactctcacccactatgcctgttgttatgtatacgcatattatcctttgcttcaattcaatacccttcacccaaaggggaaatatatattctagtttaatttcccccctttcttttgggaaaggtgggtcggaggattttatttatttatttatttttaattctccatacacctattttttaaagttttattttttataagtgccaactacaatgagttaattgttttcattattaattaattgcattctagtacccctcatgtgccagcatgtgttgtatcacttgtatgtcgtgtttttctgcctgttttgttattccttaaaatgggggaatttcgtcaattgcacttttcttcttcctcgatgtcacattacccttgcctcacaatttcctcacagtgaaaaaaatgttttgtttatggagtatttgataatgttttggatttaattttcttaaccattttctgcttgtttgccaaattaatgtggtgtgcaga

SEQ ID NO: 18922 - DNA, 770 bp, Glycine max
  Intron number 5 from transcript Glyma07g28990.1 (locus Gly ma07g28990) derived from phytozome v7.0 (chr-ID Gm07; pos 33416813 to 33417582)
tctatactattaatattgtggtttacgttgttcaggtggaaattctattgtttacaaagtttgtatatatgaatgtgatcaactattgaatgatgtctgactttggttgcgattcactacatggtggctggaaggaaaattttgtgtgatatctaataataggatatagtattatagttgattgcaactaggttatggttgtagagatatgaaggaaaagagaataatatttgtttctaaattctaagtgagcaatgtacaagcatttaataataacgagctagattcaaaatttttctattttaccttgaaacatcaaactgaattcttttgcttcctctatgctggcatcctagatttgttaacatgcctccttccattgataagtgactcccactctcatagcttcctctgattcctctgtcttctctatgtagaagtgagtcaagctaggcctagctgaagcatagcccaactaggcagttagttatctctctcctaattctgatcaggtgcatcgtacctcatagtctgatcagttgcattgcaccttttctctctccttacaaataccttagttattttattaggggttctatcagtttgatggcaattaacatttaatattcaatgtatttatcttgtgtcattagttcttattttaatatgcattgcaagttttagatggcttttactttcacgttgactagttttgagtttgttgaatatgacccatcttgttttttgtttaatgtatatcagattacttt

SEQ ID NO: 18923 - DNA, 816 bp, Glycine max
  Intron number 2 from transcript Glyma11g00580.1 (locus Gly ma11g00580) derived from phytozome v7.0 (chr-ID Gm11; pos 252792 to 253607)
tgaggttgatcaagttgttgggagctcaggtatataaattaaaatacatatataccctcaatttctctttttattcttcggggccttaaaatttaaacggatccaaaataaaattaaacggctaaaaacaataaaaaaaatcaaattaattttttttgaatttgtttgaatgattatttttccaaatgaattgatttaatttagattgtggttgtatttttaaaaccgaattaaattaaataaaatcacaacacttataataatagttatattactttaatggtacgtgttttatgtgtatataatttaaatttcataatattttatagtgttatatatataaattttatataatatatattattttttgttttaaataattttttaatagataaaaatttgatagatttttattataaaaatttaaaatattaataagtttcataaattattattaataatttttaatacaatttaatttaaaagatatatatatatatatatatatatataaatttcaacaaaataataattaataaaaataataaaaattttcacccaatcaaatcataaaatattagtttgatttgattcaaattttattttaaatgaaaataaaattcaatcacaaattttattgtaatcaaactaaatcacatgttttataaatttgattagaataattttctgacgaatgattaaatcaaactgaatcacagtgggtttcatatactaatacaagtaagttatataatggtggtgagtaaattaagcaattaatgaattaatatatatgtatataggttgaagcagtag

SEQ ID NO: 18924 - DNA, 488 bp, Glycine max
  Intron number 1 from transcript Glyma10g28690.1 (locus Gly ma10g28690) derived from phytozome v7.0 (chr-ID Gm10; pos 37554233 to 37554720 reverse strand)
taagaaaactaaccaggataatttcacaccgacaagtatgtattccttcatcgctttctgctacctctcacctcgtattcataggaactcaaactacatgtcttcttagtatgttctaaatgattttctgctgccactgtggctccaattcaatcatgcaaatttagttttgtttcttcaaatccagttaatcattttattaattgcttctatctcttgcttttcggttgggcaattcaattgttctcactctgcaatttacgcttccactgcaaatattttaaccattcatacgcccgacctttgaattggtttctcagcggaagctatataatcggtggtctcatttttttttttttttatattcttatttgcttggctaaatctagggaattttcaaatgattcatttgggtgattctgactccttggcatttgcatgtttcgctcgcaggttgtaggttttcgttcctattgcactgacaaggt

SEQ ID NO: 18925 - DNA, 498 bp, Glycine max
  Intron number 4 from transcript Glyma13g43240.1 (locus Gly ma13g43240) derived from phytozome v7.0 (chr-ID Gm13; pos 43012682 to 43013179)
tgcacctaaagcatccaagtcttccgctccgtctggtatcaaaacaaactggtttgctatgcttctgatatttatagcttaaggagtttgaatcaagagtgaaattatatccattgtgtagtcagcccagcagcataaatattcttaagtatgtcttgatatgtgtttcccatcattttctacttgtggagcctgttctctgaattcttgttaaattatatatggatattacggagttagttggttactctcctgaaccctaagaggctaagacatgttcatattacctagtaaccaatcattttcatggctaataaatttaatttatcagatagaaactcaacaaggatcaaatatttatgctttacttcaaataacaacttgttctgttaatcttcttcttccttcccccatgattcatcttcaatatgaaattttgctgatttatgttgcacttttgcagacctgggtattgacaaatccatattcatcaagcct

SEQ ID NO: 18926 - DNA, 376 bp, Glycine max
  Intron number 4 from transcript Glyma11g07000.1 (locus Gly ma11g07000) derived from phytozome v7.0 (chr-ID Gm11; pos 4938040 to 4938415 reverse strand)
cagtgtgctgacatatttttcctcaaggtgtctttcaggtttttactagatgtttgtgcttgcattaattttttttatgcttgatttttacaatgttagcattaaaaatggaaatcatgatagatgctcgcagccttgaatgtattaattacatctaccaccaatgcatgatttcttctactaactttaattgtgttgttattgggtttttccttccttttctttgctttctatatctaagctagctgtatagtttattttcaatatttgaatattcagatattgtgctgtttctcatgtccatttgcttcaaacatgttagtgaataatgcatgaagtttgtattggaaaataggccgacatttgccaattggga

SEQ ID NO: 18927 - DNA, 792 bp, Glycine max
  Intron number 1 from transcript Glyma13g28530.1 (locus Gly ma13g28530) derived from phytozome v7.0 (chr-ID Gm13; pos 31542849 to 31543640)
gctcgttgttggttaggaaaagcaacggggataccattcttcattctaccgtcgttagtgaatactttggttagtactgtcattgactactctaaaatacacttatggtgtttagttttggtttgattcttctaagattaaaatttcattttgatttaagtgttacactaaatagttctttctaataatttcctgcattaacatataatgttaattttggcttatatgacaaatagacatgcgtgtaatatgtcatatcatgatttgtcacgtgttactcattggcaagttattgatataattaaatttaagaaattcctaccgtctaaatcactatttgtctatatatgtatctatggtctccattaacctttactcttccagtttcaaaattactaatgtttaaatattaaaaaaaaatcatattactgatgtgatagttttcaatgtgatattaaaaaatttattctaattttgcgcctaataaactacatcaatccaatgattgagtattgtgtctatcaattattcaactatatatctccattaatcatccaatagttataagcaatgcatttatgaaatgtaagaataatttagtaaaattatttcaacaagtaacttatttatggtaaatatttataatggagatgtatataacgaattttgataggtttggcgcttcaaataatagagttgtacccaaaccttgtgaattctgtaaaccaggacgggttatcacctctgcagattcttgcagcgaagcctaattgtttcaaaagcagcacgcgg

SEQ ID NO: 18928 - DNA, 621 bp, Glycine max
  Intron number 2 from transcript Glyma10g06110.1 (locus Gly ma10g06110) derived from phytozome v7.0 (chr-ID Gm10; pos 4860270 to 4860890 reverse strand)
cctcgagaggtatgtctgcttcagccagcagaaaaagcttctagttttttctttcttctctaataaaattttgcaagttgtctcttttttttttttaacttgtttctcttcatcaaagatcgagctttaaattttgattttgttctttcttttttcttttatttctccactttccccattgcttctatattctatttatgtattcccactggttattccttcctctttctgcagcttctttgttttcagttaagccttcattgctctctggttcaaatatatatgcttattgccaatttcaaagtctagtgtatcacaattttgttgttttaaggtttggataatctggtttatatgtgtttttcttttgcaaatgagatctttatatgttctcagcagctcttccctgttctggttttccttcattggctagaacttttccttttttgatattgtttttgttttttagtttcaatctcttgaattataaattattgatgtctgtatagcatgctccttctctctttactttttttttttaatcttattttctgttccatctcctgtgcaatggttccttttgcagctaactggtgaaacagtgggagaagtaaaagctgt

SEQ ID NO: 18929 - DNA, 807 bp, Glycine max
  Intron number 1 from transcript Glyma13g07620.1 (locus Gly ma13g07620) derived from phytozome v7.0 (chr-ID Gm13; pos 7815288 to 7816094 reverse strand)
ccacctcccttcatttctctctctctctctctcaggtttttttttctctctctctctctaacatgttattttgttctagatcgaaccatgttttaaatatcatagtttcttcaaaattttggcaaagttgtgtcttttggtttggagtctcaaacataacatgtttcctaggacagatctttccacacgttactatgttgttgtcttttttttttttttttttaaatgttgggaaaacgtgtgttttttttggtggggattggagatttatttcgaaggcctctttttgggtcctaggttttgggtgctttttgaaaatggaggcattgggtttttgtgggttaagttgacctaaatgttggttttttgaggtgtgccatcatgggtctctttgacctggaaaatgaagtttgaaattttttcatgctttgagctcagatttgatggttatttgtgaaaattcgttgaacccttatctgctggttttgaaaaattgtacaagagtgaaatgggttgcggaattataattttccaatgttttgtgtttaggctgaatgaatctgtttgcgtattggagtagtagtgttacaattttttagatcatgctcttaatttctttgttaataagaaacttttacatgtgtgtgtgtgtgtgtgacattatatcagaataattttgttgtatagattggggatggtgttacaattcttaaggtcatgctctcaatttgggcatgttctgagtataactttattttattttgttgtataggcgttctactgtggaaaaaaggtgattttgaagat

SEQ ID NO: 18930 - DNA, 969 bp, Glycine max
  Intron number 4 from transcript Glyma11g36090.1 (locus Gly ma11g36090) derived from phytozome v7.0 (chr-ID Gm11; pos 37626243 to 37627211)
ttgctcaacctgatcaggtgtgatttaaatttcgtactacatacctcttgagtttggttttggcctcatttttgcaggcaatatactagtgttccaaaatattgatgtacttaaatcggtagtgccatatgattattgtttgtttaattttcaattcatctagtatttcgtttggttgtcaaatattagccagccatctacttacattacatgtgtatatttttggtgcatcttctcttttacatttgtgtataattttttattttttattttcaatgttatttttttacttgaatatattctgttaaattggaataatctgtgcatatgatgagttactcggattccccttcaagacatcatggatgatgcagacccgagtttctgatgcacataaatttcttttcttttttttctaatatttcattattttgtttctttaaatagacagcagtggttggtcgtctctttttagcctgtttatgtccccattttgaatcaacaagtactgtatttttttcaattttatgtatgtgaatgtgaaatagtggaggggtggttaaagtcaactcttggaagtggatgaaggcaaggagaaagggttttgtttataaaatgtcttggtttttaaatcctgcggcttgtctaggggtggttgcaaattagcttacatgtgttggggtgggcctcagttgttataagcagcctcaattggattatggaccagacagtgtgtgatgatgcgttatgatagtatatatctgcggctgggtcaagaggaaattgtggctgtggtttgagtggtgcatggattttatatttgtggattcctttttaaatttaaaggaaatgaattctattctatttgaagataaaatcctttttgaaaccccagttatattctatattctatgtattggtttctttatgatttttggtgaccattgcaggctaggattttggggctga

SEQ ID NO: 18931 - DNA, 427 bp, Glycine max
  Intron number 1 from transcript Glyma10g00700.1 (locus Gly ma10g00700) derived from phytozome v7.0 (chr-ID Gm10; pos 449506 to 449932)
gttaatattaatatttgttctcaaggtaaagccaggttggtgtttttgttatgacctttatctttttcctctcagtcacttctttttccaacccacaattttcatcatgtaacattttccctgttagaagtggtttaaaacaatgaaaagaaacattaacaaaactttttcttttctcacaacgtgagaaaactttattcttaccagtcatgtcaacaacgtcttctaatcgattgagaatatataaaaattaaacttgagaattttttagatatcgtagtcactcaatttattgtgtgattaagtaatatggtcaatcaaatgattaattggtacaaagaagatttcttatatgatcatttggctaactttttctttttcttattttattttccacaaggatttagttgattccattgaagattga

SEQ ID NO: 18932 - DNA, 693 bp, Glycine max
  Intron number 1 from transcript Glyma11g34780.1 (locus Gly ma11g34780) derived from phytozome v7.0 (chr-ID Gm11; pos 36591081 to 36591773)
tgaagtcccagataccgctcatcagattagcaccggtttgtaatcttcttaattgcttttcacttttacaattcattcgttacatttacaaaattcacgtgttaacggaatccgcagagtccaaggttgagaagctgaatctatggaaatggtaggaactaggaagaacgcaattaacacatgctttttcttaatttaacaaagtaatgcacaggacacgggaaaatcattgaattttcaaaactacccttttgtttttacctatacctattgattatctcctggcggagtcaacatttccacttgtgtgatacatttattttatgtctgaattttgactttattcaaccgcctcttatctatgttcaatgtgtccttttcttttttattatgatgatagaatcgtgcttatgtttcaattatattattaagtattggaattgtgaaaatgaaactgaggggaatatacaatttgtatctgaacattttaaaattgagagcatgtttggaattctcgcggacaagctttaacggaattctaatcatgcactaaagttggaggtggaaaacaattaccgacattttttgtagcaaggaattttgtgccattaattgtttgacccttctttcttcgcctttaatgtcatttttttttttataaaaaaaactgttcttttttgtgtgtgcagattc

SEQ ID NO: 18933 - DNA, 735 bp, Glycine max
  Intron number 2 from transcript Glyma14g26460.1 (locus Gly ma14g26460) derived from phytozome v7.0 (chr-ID Gm14; pos 32515579 to 32516313 reverse strand)
ggaaggttaagcgagaatttctgcttcagaaaagggtacatctccttctctaaatctttgtcacacatatagatagcactaccaaatgtgcaaaagactaattacattgttccgcctttcttttaaagttatcaatcaaagaaaccatttcactggctttactagaaatagaaaaggctttcgattttgaaacatgtgatattcctcagaattatcaccatcctaatataaatcataaaaatcttcctagtaatttacactaataaccctgaggtttcatcaaactactgagacaccttctgttattatgagcattacaataatcttctcctttgtaggaattgcttgtgtaatatataaagggatgccactttaatgttttcaaacataaaagaagattgatgtaagaataaaaaaaagagtggtgttatgtgtaagaaaaaaattcaaggcgtgtgagtacaatttacttaaatatttatcactaagctagcgtgtaaatatctcaatagagatcacagaataatactatggagaattaactcaattaaggggcaaagtaaataattgctataaaaaataattaaatgtatatcagagtcttgtgtagaattttggagaacgggaattcatgttcatattgtatgcataatatatattgctatgttttatcttaaggtgtatatgtataatattacaggtaagaagtgtggaagtaaaggaagctctgcgcct

SEQ ID NO: 18934 - DNA, 723 bp, Glycine max
  Intron number 2 from transcript Glyma19g43260.2 (locus Gly ma19g43260) derived from phytozome v7.0 (chr-ID Gm19; pos 48962647 to 48963369 reverse strand)
tcttcggaagagattcctagagagtaaaagagttggtaagttgacatatttaaattgtgtatttcttcttcccaagtttggatttgggttagttagctaaatagcactgtctactcaactcttgccgtgtgtgtctgactctacacctaactctgtataagcttgttgggggtcaaggtggaggattcagttgcaccacctgaactcagatattgtacagttctatttaggtgcagatctaacagttgtgtatgtaacattactctggctaaatggtggtgacacatgtcttttacttgcccagtgatctatctgcactcctatatgtaggtcaccgataggctaataaactatttattttgatgttgagatgattgatctggctacattctttttcctgtctttttcccttaaatttagtagtgctagagctgtatgataatgttccaaaaactctaactgtaatgtttacttatcccataacacaagcaattgcttgccctactttgttgatgccctgttcttgttctcttggaacaaacatttagactggtggatgactaacttagatgatttgcattccattctttcaggagggatgctatgtaatatagctaactccgttacacaaatcaaaatttgtctgtgcatatgcatgcacttattccctctagagaaaaaaattatatgaggcaactaattattacaggtaggctggaggca

SEQ ID NO: 18935 - DNA, 370 bp, Glycine max
  Intron number 1 from transcript Glyma17g11300.2 (locus Gly ma17g11300) derived from phytozome v7.0 (chr-ID Gm17; pos 8493880 to 8494249 reverse strand)
cattttcgggattgttcacaggtgtgtttcctgtctgtaccttttctctcacgaatgccataaattgtatggcctagaactattgctatttaaaatgcataagcacaccaataattactcatcagtgctttcaacatcagtgccttgttcttgtcaaatagattttcataaaaaaattggggtttgtaagaaaatattcatgaagggattcagcgtttgaatcatggtttaattttaagtgatttgggatgttatttgtttttgctttagtataaaagctgggttcgtaaatgtttaaataccatattgctcccatattgatatgggttctcaatgaatatagatacaacgattagcagcaatatatcaa

SEQ ID NO: 18936 - DNA, 313 bp, Glycine max
  Intron number 2 from transcript Glyma18g38430.1 (locus Gly ma18g38430) derived from phytozome v7.0 (chr-ID Gm18; pos 45898652 to 45898964)
gcagaaaggttagtgttttctgctactacgtggtgcttataatctggccgtccacgtggaactgagttgtgagagccgttggattaggcgagctgtgttttgagctcggaagggaactaatataggcccttcggtcagatccgatctgaaatatctgaaccgttgattaattcttctatcttaggagcttattttgattattagtattactttacttcggggtctaaacggtgtcgttttttttgttctgttctttgtagagtgtagttgatcgtttttagtttgcaaattttcaggtcagggagtgctttga

SEQ ID NO: 18937 - DNA, 965 bp, Glycine max
  Intron number 1 from transcript Glyma14g04930.1 (locus Gly ma14g04930) derived from phytozome v7.0 (chr-ID Gm14; pos 3398892 to 3399856)
cactgagcctttcagttctaaagttaattgtgttggtaatacttttactgaaaagctttttgatgctttcttctattgatactggaaaatcatttgaaatgcatgcgtgatgtgggcatttcattcatgacatgttatgatggcagctaaacaaagcatgaaattgaggcaatgtagaataagttgtttagtcaatttttatttgaattcagatatatttgcatagactacatacatatattcttgaaaatcctgccattgatctcctaccataagtccataacaccaattaactgcaatatctgcattctacacatttccatagagtagtaccctacttatctttgcaaaacctttaaataactatatataggtccattatctgaactatgtaggaaatgcttgctagtcaagtaaagattaatggataattaagaaagtgcttcattaagattgtggctctgagtaaaccatatttattaattctattgattattgttattcaaaatccaaatgaaagactttgccttggaacttggaagtcaccttttctgttccatgaatgtccataaaaagaagagttaaggagacacaagaattttactgtgaagctgaaaaccatggtatgatctcatcctacttgattgctatgctgataggtttgttctcacatcaagctaaaggctgcatacattttttttggcagaaccgcattctttactcactacattgtcttcagtttcattgcttccttttttccttgttttcacactaatgcattcttcctttctctttaattacatttcatgtaatgttaagttgtttctaaatatgaattttgatctttttgtttagatcaaatgatgaatgcatctgaattgtatttgttcataacttcaataatatctattcaattatttatttttgcagttggtgctaacggatctggaaagacaaactttttc

SEQ ID NO: 18938 - DNA, 561 bp, Glycine max
  Intron number 1 from transcript Glyma17g11240.1 (locus Gly ma17g11240) derived from phytozome v7.0 (chr-ID Gm17; pos 8453194 to 8453754 reverse strand)
tcagtcaagaaagatccccggaaaattgcaagaaagtaagtaactttcgctacccctttgttctttcgattattttcttcactgagtcgcgtttatttttcaaatgggtgtgtggggtttggctttttattttttattttttattttgatttattattattttttactcgtggctgtggtcgttatcgctcggtggggtttgctgttgtagtgagttaattattttttgtttggcttttgagaattggagttcaagaaaaagcctgtttcaagattctacttaaaatgtgactactgaattgaattgcattagcaagctctgttgtgtgtgcaagattgtacttcttgcttctgttaacttttcaactgagtgtttttttaatttctatgctttattccagaaaatgtttgtgtagttcaagaaaatgttcccaatttatggtgatcagatgtctgaattgtgatgtttaatgtgcttatccttttgatttctcacttgtcttctggaactccaataatcttgtgaatgttttgatctttttgaaggtatcagttggagtt

SEQ ID NO: 18939 - DNA, 871 bp, Glycine max
  Intron number 1 from transcript Glyma18g10820.1 (locus Gly ma18g10820) derived from phytozome v7.0 (chr-ID Gm18; pos 9668446 to 9669316 reverse strand)
ctgcagatttaattggtctgtgattcaaaatttactctattggttcttcaaactttcatataataaattgtttactttactgcagataactacctttgaatattataatctgaattatattatgaacattattggtcttttgctataatctcattattggcttctctgcttctctattgcaatattaaacattgagaatataatcacttttctgtttttaaaacagcttaaagtgagagatttttttcatcattgaaatctgtctattctcccaattattccatagttgtcattaagttgtatagtttctgcatgtttctctcctactacatgtttaataagttacaatttacgagtcttgtagttaggaatttttaattgacaaaaaattgtgagcaacactttaagccatattctttattttctgcaatgttttctccggtaagaaaatcatggttgatgggatggctcccaagaggcataagacggtcatcaacatgggagtcagaagtacatgttttagtgtactgacttcagaaaagtttatataatttaatactgttttatggaatataagaacataggcaataggaaaaccaaaggcactttgtttatagaaaggtgggaaagaaacgattgacatatttttcttttgattgggatcggagacaagaaattggggacaaagaaaacatgtattgtacataaagggcctaaaagttaatctgattgtcttattgttgtttttattgaggcatgaatattgaaaatagtgatacaaaattacaaattgtgttttggctaatatttgcattaaatggatggttgggttgcagctgaaaaattgggcctacctacttcaccaccttat

SEQ ID NO: 18940 - DNA, 621 bp, Glycine max
  Intron number 4 from transcript Glyma17g00350.1 (locus Gly ma17g00350) derived from phytozome v7.0 (chr-ID Gm17; pos 99297 to 99917)
gaagaagtgccaaacacaaggtatttctctttttcttaaatgttttttgttggtcttgatgaattagttatttgtttcttataaataaggatccgagggagtattattttggtttgggtatcacaaattcaagtttatgcccataatttttactttttagcttaatatgtatccattttgttttttcttcctttttttttacgccatgttctggttataagttgctttcttgctatgatttcttatcagtcatgtagttgtctattattgcttgcattaatgcaaactgctactaatagtttctacattaagcagttaagtcctgtggcttttcctataggccatttgttaatgatattgaattgatgcagcttcttactttaattggttatttgcttccatagtagagttttctggctagtatgttcaacccgaagattaaatacatatactgacagtcttacaagtctccatcttcatttaagaggatggaaagttcaatatcttcattttgtttggtccctattaactgtctagtgataatgtaacattatttaattctgatgagtgatgagcttatcttctcttttttatcttgatagccctgtgaacctaggtctt

SEQ ID NO: 18941 - DNA, 748 bp, Glycine max
  Intron number 3 from transcript Glyma15g11090.1 (locus Gly ma15g11090) derived from phytozome v7.0 (chr-ID Gm15; pos 8120365 to 8121112 reverse strand)
atagtaaacttgtgttctgggacctaggaggtcaggtatgaaaaaagaaaatagtcaaatattatctatttaagccctataaatatgttacttggatgaattgttagtgtagcttatgagctgcttgtttaaactcttccattctagaagctcagaagctaaaacaataatcatctacatagttcctgaaatgtaattttcttatgcttatttatatttttaaaatgtgattaatgaaagaacgagatgctactttgctttttagaatttcctttgggaaagctatctctactaaactagctggtacctggtagtgtttgtctaaagtttatgttcactattttcagacataacaactaccagttcattaatggctatatattagaaccgttacttgaactatgcaatttggaccatcaattttaccctctctctgtttaaagcctgagttcatttgttaaatttgcaatgctaaatgagtatttgtaattgaaatttatgcatggacaactgatgcagcacttcatttttaattgtaagcctgtatgctagcaggaatagaatgcatcatttcatgcgatgcacatatgtggccccctttatactgtttttttctgctattttgcttctttttatatcattctttttgtgtggtgttggagaggagagggtataaaatatgcaataagatattaatgtaagttcccctattgtcagcctggtcttcgctcaatctgggagaaatatt

SEQ ID NO: 18942 - DNA, 673 bp, Glycine max
  Intron number 5 from transcript Glyma19g38350.1 (locus Gly ma19g38350) derived from phytozome v7.0 (chr-ID Gm19; pos 45273657 to 45274329 reverse strand)
tcctgaatcccctgcctgcatatccggtgaaaaaggtacaatcttaaaatatgttctttttttataaaggattgttttctggcgtcgtttgattatatgtttctgatgtgatttttaaaagttaattgttataattttttatccttgaaagaatgaactttaaattcatttttaaatcgttattcatagtaaagtaattgttgtaaatactttattttacttgttttgactaaagggccgtcatgtgataaaacagttctaattgttttattacgaagaataattatttaatgcataatatcgatcaattttaaaattatatatactgttagctaaaagaacttttttcaacatgtggtggagtctatttcaacttttgatgataatgacaaagaaatggaatgtcaaattttttaatgataaaaacaaaaaaaatgatattatcatttggatttaaatagtattacataaataattttatattttcatttttaataagtttatatattttcagataaataaagtttatacaaatgttgtagtcttaaattattattttttattggagattgaaggtgaaaagggggaagggagactagaggaatatttaaatgatttgttgtggaaagattcaaagaataatttgactagacttagaattgtggaaatttag

SEQ ID NO: 18943 - DNA, 447 bp, Glycine max
  Intron number 1 from transcript Glyma14g05090.1 (locus Gly ma14g05090) derived from phytozome v7.0 (chr-ID Gm14; pos 3531727 to 3532173)
ctttccctgccccaagtcacctttggccccaaaaggttccttcatcactcttcaatttcaattccccagttcttttcactttatgaatcaaatttcatttgcataatgttttcccatttgaatttcaactttttgtttttaaatcgagtttaatttttgtgttattagtatactgtcaattgatcagaaattatcattggcgtgacttttaagattataattatgataaaaatgaacgatattgtaaaaatcctttacactgttagtgtatgctatttactctgttaaattttataatttgagatttaatagggcaatgaagctgattgtgattcatcttcttcttttttaatgtttataaagggtggttttgtttgttcaattgtttatgcacaatggtttggttacacaggtggcaactgcctgaagcagcaaacacggtttcag

SEQ ID NO: 18944 - DNA, 837 bp, Glycine max
  Intron number 2 from transcript Glyma15g23920.1 (locus Gly ma15g23920) derived from phytozome v7.0 (chr-ID Gm15; pos 24230927 to 24231763 reverse strand)
caaggtacactcaaaaacaaatattccagcctttttgcttatgtgaataacaatctaaaacccttttgcaatttaacttataatggtgccacttattacatacatgcaaattaattaaaatcatggttttaaaattggcctgggacagcaatttgcgtcgcaatatcaaggcttttcttttctctaggactgtaattgtggccacatcatgattttaagagatgatctgtgaccacaattttagctgcaatatcaaagttttttcactctctgcgattgcaattataaccacattgattgctattttccacaatgtaaaaattatagacaacacaactgtaatttaaaacattgattgaaatagaacatcaacgatttaagaatgtatatattattagagtaatattctttggatatgtcaaagtgcaagcacttcattaacacattttttctttatcgttattttcttattgcatcgtatatatcacttatcacaattacactcatttatccttcaatcaatgggtgtccaatcccatgaagcactcacgcatcactttccatattgttatgaacccccgatcttaaaatttcaaactattagagatgccgtaacttaaatagataggaaaaatcacacgaatgattttatataacaaaaaaataaaatgaatagctatgattcaagtgatcgatcagtgatctaactttttcccattgaatcaaacgtgagaatttaagtatcaacacaaatcctttgattttgtatagctcatatgtatgtgcatatttatatttataggtggattttgtgttgaaacactacaaggacctctc

SEQ ID NO: 18945 - DNA, 915 bp, Glycine max
  Intron number 1 from transcript Glyma20g08830.1 (locus Gly ma20g08830) derived from phytozome v7.0 (chr-ID Gm20; pos 12518178 to 12519092)
aacgacctcaaaaagaaggtattacaagtaagcattcagaaattgattatttctaaacacccccacaattctataagttttattaatactttttttattgtttttctttatctttcttttccgattataatcatattatatgatttattatatctagatccaaatctactccaacaagcctttccatgtcccttttccgtttttttttataaaaaaattgagctctttctcttttattctttcttcttctccatgtttttggggctagagaggcaggacatggccaaagaaaatccaggttgattatacttatatttctattttttttttctttatttctatctttcatgacccatgagtgttaaataggatgttgagtgtccaacaattattctttttttctaaacaattttttatttttatcatgtttgaaccacattatgatgtttcacaaaaaaaaatattttaaaaatattttttttattaatttttttatactaatgagagatttaggtttaatggaagggactagttatcataacatgatgaatcaaagttcaaatcctcgtcgagagatatgcttatatttagtgtctgcttgtatctcaaataaattgctcttgaagtaaaagacatgtgagaaaaaaaataaatttattttgaaaatcactcatttttataatttttttttcaaaaatttgaaaaatacaaaagcactaaatagttatggctaattaaattgttagttacattttctgctctacgtatgtcaaactataggctaaattacaatcattctttccatttcatcaattttatgttcccttattctctcaattttctctaacttttgtgctatgttacattaattttcaaacagaaacgttacgaccatatagtagatacgaagttatt

SEQ ID NO: 18946 - DNA, 914 bp, Glycine max
  Intron number 1 from transcript Glyma14g27990.1 (locus Gly ma14g27990) derived from phytozome v7.0 (chr-ID Gm14; pos 34323755 to 34324668 reverse strand)
aaaagaccgtacattacctcatttcagctggcgtaagtgtttcactgttttttattttttatttataatttgaattcggttgactagattctattgattgggtgagtatgcatttcttttttacttgacatatggcaggagtaatttcttttgtatatacgtgtttaaaattggatattgttcgtctagcgatttttgcttctcttcattttaatttctgaaggtttcgagatgtaccattccacatgaagcaaaaattaattgaaatttataatttaaaagaggtgatattctatgtactattaaattgaacaaaattgttattcataacaatatataaaagaaaatatttccttttttgatctctacatttgtcgattattttgtcttttaattgtttttaaaactactcactactatattctcttccattttttatttaacatctactctctattcttctttcatttttttttgttttataaaaagtacagagactcttcaattttctatttaacgtttactctttatttctctttctttttatattttaacaagaaaaatagagttctgtatctctctttaatttatatataagctctgtagcatgccggtccacatcacatataatagtttaaaattaaaattaattaatgtacttaacagctgcatagctcatattggtatattaaattgtacaagaaaaactgaaaagccaaacaaacatttttagtatcaataaattcttggtttcacgtgacatggcaatcggagctttctcatagcaagttgggcagacttaaattgaacagttaagtagattttttctttttaaaatgaaattgaaatattgtattttgttttgattaaattgggtaggaccctgggacagacaacaacccatatttggggtt

SEQ ID NO: 18947 - DNA, 1003 bp, Glycine max
  Intron number 4 from transcript Glyma17g10170.2 (locus Gly ma17g10170) derived from phytozome v7.0 (chr-ID Gm17; pos 7597360 to 7598362)
ttttgacccgaattgataggtatgctcttgattagtttacacttattgaatctaatggaattttacgaagaacaatggttttattatgaactcttgaaacaatttcttaattttggtaacatttacaatttggatggtgtttgttgatcgtgtttattaagtgactagttaactgactagataaagcatcaaatgtctcatgaaagtcgagatctaccatcatattgcatacacaatctgaataatatgcggatttggatatgattgatgaatcctgtgcataagctgaattccatttgtttttctaatttaagccttattctggccgaaatagttacaacgtgtacctatctgttacaacatcagaaaataaactcctgtgtagatccgaaatattgaaatgataaataatcataatatgaaagtcaagagtgtattgttccttagaaatctttgatagccactcgggcataggctggtaccttgattgggtatgccatgattaatactaatcatgcaggaagcaactaacccatcataaatcatacgagggatgagggagacaagcgtggagtgttttgtgtattattgtgctttgcaaatattaaatagtaaccaaatttcttatcaaaatttcccaaaaaagtcctccctcaacaaaacatagccaaaatccttaaccgaagttaagaaggtttctgtcataaattctttgatgttctgtttcgttgtcaatcatgtgtaaagagttctaataagtgaacaaaacttgccattctcccaaaaattatatgcatttgtattgttatattaagcgcttttggtgatataaaactattggtaatttatcaaattttattaaaacatgacatcatcttctccacctagcaataatgtgtgcttctatttggtaatgagtgtttcttctaggcatgtttcttaacagttcattcctactaatttggcaggtgcctggaggaaggagcagaggattttctgttga

SEQ ID NO: 18948 - DNA, 347 bp, Glycine max
  Intron number 2 from transcript Glyma19g06340.6 (locus Gly ma19g06340) derived from phytozome v7.0 (chr-ID Gm19; pos 7217604 to 7217950)
gattccttgcttggaattcgagttggaggtcaatttcttgcaaacacttttggtttaatcatagattttcttattcttagtttgtttcaacttattttcaagaaataatggcttctcttgctagtgtgctaaaagtacttttggaaacaaaacaaaaaatggttgtgttccaaaatttaaatttatctaacagatttttctatttgagagttatcaatatgtatcaaatctgttcctatctctgaccaaattttattcttccaaaacaagcacttggttttgagttttgatggttgatctgtttgtttgcagcacggtttcgtgtaccgtgagcacaacaggtcacc

SEQ ID NO: 18949 - DNA, 579 bp, Glycine max
  Intron number 1 from transcript Glyma16g03660.3 (locus Gly ma16g03660) derived from phytozome v7.0 (chr-ID Gm16; pos 3077941 to 3078519)
aatcaggcgagacagagttttcttcattctcgaaagtcgaaactttcccctcattttcattcttctttcagttatcgccatccttcactctttgcttctaataaactctctatttttgtttcttgaaggaattagggtttttattttcttctttttttctgtgtcgttttggtaattaatctgataaccgatgattttctttggtttcatgcgctggaagtgtttgattaggtttacatgtcatgatatttttttttttttgctggtaaactttttagacttgcgtggttgataatcgctgtttgtatttggctgttgtttgaagttttatggtttttaaggttcctataattaattccatactaatggttttggttcctcatatttttcgttcttgttaatgttaaatgtcaatgttaatgtttatcattcttgctgatttgattttgtttattctcaacggtagttgaatcataattgatgaatttgcttggctttctgaaaataatgatgtgtttgtgtttgtgtttgtgtttgtgttagttcagattagcaaaggtaggtagttagttatttgca

SEQ ID NO: 18950 - DNA, 680 bp, Glycine max
  Intron number 1 from transcript Glyma17g04930.1 (locus Gly ma17g04930) derived from phytozome v7.0 (chr-ID Gm17; pos 3304581 to 3305260)
ggacttgtaagtgggtgccctttttgcttactaattgtcatttgtcaattgtcgatcggtctactttttagataatgttttgagatcagttgtatacttgtttctttgtctgcttcttcattgtgataatattttttttcttcgatatttatttaatcctataaacagtaaaagaaattaagatactttatatgtttatgaatgtgatgaaatattatccatacatactcatgctataaagaaaatttatatgctaaaaaaaattgctggtggcagattcagattctttctaatgtgcttctgatcagttcctcaggctggagtggaccccttaggcattatgtgaagtgtcttgcttagcacttaagccctctcatttatgcacaacccaacaatcattgctcaagaaaaaagcactagcaatcattggaccaaaacataagaaatattgccaacccacaataagaaagaacggtgattcactgattcttatattttgttattaaattatttttaacaaattttattcatagaacaaaataaatcaaaatcaaatatataataacggaaatactatgggttattttagcgttgtaaattttcaattttggggaaaatgggggcgcggtaatttttttacaacagaaacaagcagtaacagagtgggctagggtttttta

SEQ ID NO: 18951 - DNA, 998 bp, Glycine max
  Intron number 1 from transcript Glyma14g40380.1 (locus Gly ma14g40380) derived from phytozome v7.0 (chr-ID Gm14; pos 49336868 to 49337865)
tcgcaaagaagccgagaattgtgactgcttacaaggtatcatatacactaaaacttgtatcttgtaaaaaactaataataatatattttcactcataatatagatagagtttctttttgtgctcatgtgattattaatgattataagtataaatctagtgttaataaatattattttttagtttatttatttttgttaatgcgacctctattttttttcaaaattatcaccaaactaacctttgactctcacttctatattatattttcacttgctcgtcatggagatagatagagtttctttttgtgtttatgtgttgattaatgattattagtatagatctattagaataatgaaaagaatgctactagatctggcttctgaaactcacttaattagaatcaggttaatttcctttttcttttctttctggtgcaataattgatgcttcattatttttgttgttgtttgagccgatatgttttgcttcgtttttccggaagttgactgtgtagtgggagaacaggaatggaccacgtggccatactttatgatgcgtcgctgaatataaaataaatatctttttttgtttcgcgcaataatgatattatatgtgactgtcatagttcaatagtgagggatggattagtcaccgaggatgtggttttacttttagcagtttcaaaaatgcaccaaatttgtaaataaactttgaatttgagttgattataacaaaattggacttacgcaatagttacacgaatttacaagtagaacctgaaacaatctagattcacgcatcagaagattttgtgtgagtgcaacttgaaacaatgtagattcatccagaatattttgatactctggatgtctaaagattccagtagtgtctgtgaacatggatttgtgtgatcttttgtttttttgagttttatgtatgttgaaccctttttttttgctcaggttttcaagtgtgtcactcacttggaggaggcacg

SEQ ID NO: 18952 - DNA, 606 bp, Glycine max
  Intron number 2 from transcript Glyma18g50010.1 (locus Gly ma18g50010) derived from phytozome v7.0 (chr-ID Gm18; pos 59276971 to 59277576)
tcggtttcctcttcctgggatagcagccgtgcaaggtttggattcactttttagagaaaaaacaactttttatctgctattctctaattttgtttccatgaacaaaacatacaattacttagtattcttaattttttaagtattgttctctagttaaattagaattagagtttcaatagctaacttatgttaataacattaatgaaaatctttattatacaaattagtgatgtgaaacaccaattctgattggagaagaccccaactagagtagtgagtacttaagaaattgcatctatgttttgttttatttaacattatcaactgaatagactttatcattggtatggttcttgagatagtttttgtaaaagtcagcaaacttactaatggattgtgattgaattgtcagtacgtagagactatttacttttcttttttaattataagttaagttgtttttgagcatagattaagatccaaaacgcattcatgtttgattttaattgatccattggtagtgttaatttcagtgttgtgttaatgtttgctaactttttatgttttgcagcgtctctagcaggacttctactgggggtcgaagaa

SEQ ID NO: 18953 - DNA, 523 bp, Glycine max
  Intron number 1 from transcript Glyma14g11220.2 (locus Gly ma14g11220) derived from phytozome v7.0 (chr-ID Gm14; pos 9612603 to 9613125 reverse strand)
tttctttttcttggtgaagggtgttggaaaaacacgtaaaactgaatttttttttccacttctttttttccttctctctttctttgcaaccaaatatgcccttcctttgctgtttcagttggtccattttctttaaaaagtcatccttttcccgcgaatgctgagtttgacttggtttgtttttgggatcttgtgatttttctttgtaatgcagttgtcaaagttgtcaatttccacattgttagaatgaattatgttacttcttttactgatgtcaaagttgtcaattttcagcatggttctcattgtggaaatgaattttcaataaaatgagggttgcataataatataatataatatacaagtgtatataattacatggtatgaatttattaatatgatgtggaagaacttgattttctttgacttaaaggttcaaactatgttctgatctgcatggctaatgttagaatactttttcattgaaggagcaacgttgttagagataaagaagtcattcagg

SEQ ID NO: 18954 - DNA, 552 bp, Glycine max
  Intron number 2 from transcript Glyma19g31960.1 (locus Gly ma19g31960) derived from phytozome v7.0 (chr-ID Gm19; pos 39735699 to 39736250 reverse strand)
gtggaaccaaaatcagaataagaagggaaagcaaggttcgtttcggttttgttctgttctgttcttcgtttcgggtttcaacatgtgtaaggctgaaattgcttacgtgtttcgtttttttttttttcctgttgttcgtgaattggttggttggttggacaacggttcgtgattggtggcgccagtttacttgggtgagttggcaatgcgatgcttaaagcttcacttgttcttttcttttggggcgcgtttggataaacttctaaataaccacttataggacaaagaaaaatggcaaaatgaatcaaacttctttcaatttatgcatctcaacttttggataaattagatgaaagagcttctgtagaagttagatgcatagcttgattttaacttgccgaataagtttgatttgttttcttcctttttatgaagaagtttatccaaacagggtcttattctttcttattatcgttatcattgaacttgctggagctgcatcttttcttaagataatgatttttgttgttgatggattctggacaggggcgt

SEQ ID NO: 18955 - DNA, 165 bp, Glycine max
  Intron number 1 from transcript Glyma16g32550.1 (locus Gly ma16g32550) derived from phytozome v7.0 (chr-ID Gm16; pos 35716905 to 35717069)
acacattggggaaggagtttgagcaatttgggtaagttggtaaccaaaacttgtcaacattattttttttcttctattcctccttgtttgatatcatttgctttgactctatgctaaattgtgtgtttctattggaaaacaggagggtttaccaggactattgtg

SEQ ID NO: 18956 - DNA, 341 bp, Glycine max
  Intron number 2 from transcript Glyma17g06410.2 (locus Gly ma17g06410) derived from phytozome v7.0 (chr-ID Gm17; pos 4564199 to 4564539 reverse strand)
tcccgtatagctcagctctaacataccacctttatgtatagatcttctctgtttctaccttcttatttatattgcttgcattgctctaaactagtatatgtattactttgctaagattttgtttttgttttacagaatcaatcttcctcctctgattccattagtcaaatttacttttataagatcatctccctagtacaattgacttatttgatgtgttttaactttgttaacattcagaaaactccctacgttgttgtacaaaaaaatattttgctttgaaactcacaaaaacgtgctgatgcatgttgtccctctgttaatgtgcagaagatcccctt

SEQ ID NO: 18957 - DNA, 360 bp, Glycine max
  Intron number 1 from transcript Glyma17g15760.1 (locus Gly ma17g15760) derived from phytozome v7.0 (chr-ID Gm17; pos 12490036 to 12490395 reverse strand)
caagaactcggagggctgttttgttggagataaaggtttgaatctttctctttgtcatgaggcacatatctttactgccttattatctgatttttggattgtcataatttgactctgaaatttttatattcatttcctcttctgtttttctaatttaaatgttctgatcattcgttacctgtgtcctggcatattattctttcaattaaactgtttcatctaatagtcataaagctttagcaattaatacaatggttagttttcactagttataagatgttaagtaataaattggaagattttaactgatttattaatgattcagtgggtgtgcctagaatctttgctgtcaattccttc

SEQ ID NO: 18958 - DNA, 557 bp, Glycine max
  Intron number 2 from transcript Glyma16g23010.2 (locus Gly ma16g23010) derived from phytozome v7.0 (chr-ID Gm16; pos 26638782 to 26639338)
aacttcactttgcaggctgattctccccttgcaaggtaaaccctaaaactctctttggatttgatgttcctctcgtgcatttccccaattatgcctcggccattgatagttagctgatctgattttacgcttcttttctaacatgatctgcgatggacactcttttgtggtcttattcgtacctgtatagttttttaaaacaagaaaaataaaatgaattcgcaatttgtttgatggatattattagtttcctgtaatcatttgaaggaatgcaatcatttgaaggaatatgtagtcctgtgttgttcagaagtttgattagaaattgagaatttgccttagcattgttgatacaatgtatttagggtattgctggaattagattgtgttgctgcttgatggaaagtggccactttgagttttagatgctgggttaacgaagctatgtttttttttttaaaaactcttttatggattgtccttgctttgaagctattttctctgagcgtgatggtatttcaggaattcaaggtccccttccccgtggaaagctcagt

SEQ ID NO: 18959 - DNA, 1032 bp, Glycine max
  Intron number 1 from transcript Glyma15g13240.1 (locus Gly ma15g13240) derived from phytozome v7.0 (chr-ID Gm15; pos 9877196 to 9878227 reverse strand)
ttgctttcactgattctgagttgttgcacgaccaggttggcatttcagtgtttcatgctaagtaacatttgtttgttttactcacgaccaggttggcatttcagtgtttcatgctaagtaacatttgtttgttttatggtatgtttatgatttatgaagatccagactagcatttgcatgccgaaattgaaatcacttgtatgaatttttgtagctattagcaacgtgtctgttgaagtattgcatcgtttcttttcccatcgattgtttaggcatgttatgcttctctgttcatgtttcgatttgtggatggacattgagataagcattattgtgtctaccaactgggtttgggtctagcagaagtagctagccccccacaacttgaggtaccaaggtttgaatctctgatgagagaggtgtctatatttagtgtttgatcatgcctcgaataggcttgcttccgaaagagtatacctgttgtggaaaactaaaacaaaacaaaacttcaagcctttgtgctattgctgggtttgcacaaacatcatatggtgtttcatttcttaatacttattttcacactgaatcgagcatggctgttatttacttcccaatatcttttgtttgtttggatgtcctttttcttttttgtttctttagtttgtatatagaaaattgttagagatttgtgttctagcaggcacactgattcaatttgaagagcaaattacttttttctataacagctgatgacttggttatttttcatgcacatgtaagactttttcttcaatgtaattggggatgcttggtggactaggaggattgagtttaccatttaaatatcaacagatagcctatattccaaatttgtttttaaaaatacattaattggcattactttgacatgtgccactaacctctaatagttctttaatgtgtatttgtgagtatttcccaggtcatttgccattaactatcctttcgtttgaatgtgattatggacagataacatttgggaaaaaattggag

SEQ ID NO: 18960 - DNA, 464 bp, Glycine max
  Intron number 2 from transcript Glyma17g17360.1 (locus Gly ma17g17360) derived from phytozome v7.0 (chr-ID Gm17; pos 14169854 to 14170317 reverse strand)
gaagatcaacttcttatcaacccaaaagtagattctgtctttctctctcttgctctctgtctttcttttcctcattgttctttcactgcttttttaaaacattattgtctgagttatagaatttgggtccttttgtttctttctaaagtaatgggtttgataactggttggtgggatgctttggatgtgagttgtctcaatatactgacttatttatgatttaaatttattcataacggtggaacttatgctatcattggcatttcttgtactatggcaattttcacaggttttagtttcaaacttattacacttatgattccaggcatccctggatagtttaaggactcgctagaaatttcagtataatattctaaattcaaacaattattttgtaatcattaatgatggctcaacaaatagtaattttcaactaatgtgtttataggtgggaaaatccactg

SEQ ID NO: 18961 - DNA, 364 bp, Glycine max
  Intron number 1 from transcript Glyma17g34960.1 (locus Gly ma17g34960) derived from phytozome v7.0 (chr-ID Gm17; pos 38928527 to 38928890)
ctttcttccctctcaggttcgcttcttaaatttctttccttttttttcttcaaaattttcgaactgcttattgagaatttttgttttggatacgtagttcctatggctagttttcttttttaaatcatattattggtaagcaattttatcaatgactaatctcagtcggggacacgggaccttgatggccacctctagtgaggttctcccctcccaagtacattttttccatccacaaggctcaaaaccgagaccttactttagggactaaattcagtgccactcagaccaatgacttttcggttaagcgttagtgttttttgacttttaaatgttgtttctttgattggttcagagaggaaag

SEQ ID NO: 18962 - DNA, 521 bp, Glycine max
  Intron number 2 from transcript Glyma20g34980.1 (locus Gly ma20g34980) derived from phytozome v7.0 (chr-ID Gm20; pos 43302906 to 43303426 reverse strand)
aaattcttatttcatcataccttggttcagtaaaagtttgattctttgatctggccttggaattttccacctatatccatctaatctcactgggttttatggtcttctatttgcatttggtgtagagcaaaatagcagttcaattatgttaagaaaaacaaattgtgatgatcatataaaagttagatgtactcaccacaaattattgttttaaattataagttttgatgcgttgtttgtgcaattttcattaaatttgcttcttttcatcgttttgctggtgtgatttttagatatttccgacattaattcacctaaattgtatccagactttactttagtatgcatgcctgctactgacgaaagttctgtatttttcttcccttgatttcatattttgaaacttaccagatagagaaaagaaagggaatacatttatgtactttaaatttgatctctgttaaaattttacctatctatttattggtttttggccatgttatgtgcagcaaaacacaaaa

SEQ ID NO: 18963 - DNA, 833 bp, Glycine max
  Intron number 2 from transcript Glyma16g04690.1 (locus Gly ma16g04690) derived from phytozome v7.0 (chr-ID Gm16; pos 3954370 to 3955202 reverse strand)
cttggattcagtccagtgagatcaaagacaaaaaggtattgattaattcattgcttgttccagaatgcaaccaaagtgccaaagtttttagttttctatgtttttttaaacattagttaattttgtcggcgatgtgattgtgtgtgtatatttgacttgctttgtagatatgttttaggtgtaggagatgataatgctaatgcgtgtatggttttaatttattttttgggaagatcacgaaaagaggctgtctgattagcatgtttgggacagccgaaatctcacaattcggctgtttttgtagaaaataagctgtttgataaaaaatgtgattccaggaaagctacaatcttggatgtatgttttgctggcaaggataaatttggttaaatgaccattacactgccgccttaaccattatagctctactgtaaccgttacagcgctgccataacgctataacatggcgtttttcaacccctccaccataggcaatttgtaaagggaggcccacaatgatgacaccataggccgcaggccgcaggccgcaatggcttgtatatatggtggagttgtggccttccaccatccagcattgataaccttggcaaggattcagtaatcacgttgcatcatgttggtatgaaatatgaatatgagctgagtggattgtgttagctgattcattgctggttagatggtagtgctccttgggttgacttgtgtgatggtgtgtataatgttttaaatattgaatgatgaaatataactccttggcattgagtttgacaacactttctcttgtgacatcttgacacaggttagtgcctcat

SEQ ID NO: 18964 - DNA, 245 bp, Glycine max
  Intron number 1 from transcript Glyma19g31720.1 (locus Gly ma19g31720) derived from phytozome v7.0 (chr-ID Gm19; pos 39517283 to 39517527)
actcactctcttactccactctcttcaatctcgaggtccgtactgtttcttttcttcgcagaaaccattgtgcttcttctcaccgtatgtgtctgaattggcttcttttgaggtttcttaagacgtacttgtataattaatttgaattgaattttagcctcttgtattttcttttgaaaaaatgaatagttcgaggattttgtttatttttcggtgtttctgattgcattgttttgtagcctttg

SEQ ID NO: 18965 - DNA, 612 bp, Glycine max
  Intron number 1 from transcript Glyma18g53170.1 (locus Gly ma18g53170) derived from phytozome v7.0 (chr-ID Gm18; pos 61503530 to 61504141)
gaagcgttcgcaaaaacaagttcgttgatttcgttggtatgttatgtttcctccttttccttcattcaaatctacagttgttttaaactttggttaatgtatgtaagagaatctttatagtgcgtgtaattacagaaaaatataactgatgtgatcgtagatacaatcgtgatataattgtgaagtgtcaaaatatcttgacgttagagaacgtaataatttaaaatcatcataatatatatacttttaatgaaatagtacaaagatgcaattggaagaggtaaaaaactttagtcttttaaccgagtggaataatatcatacaaataacttcaccaaaacttttgtttgtaactgaatctaatgatattgtgtgaccgaatcaaacaatatcatatgaaataacattgccaaaactttattctgtaatcgagttttatgatgttgtgtgatctatacaataaatctcaattcttgttgtactgcaataatgcgattacttaattatttccgaatcatgtgcgtgaaattaacatgaccctttttgatcaaacgtcttattatgtgatttttttttcttcaggtgagtatcaccttgatcttatagtagggt

SEQ ID NO: 18966 - DNA, 434 bp, Glycine max
  Intron number 1 from transcript Glyma15g14840.3 (locus Gly ma15g14840) derived from phytozome v7.0 (chr-ID Gm15; pos 11284406 to 11284839 reverse strand)
tttgagtgttttctttggctctactgcattttgaggtttctgaacttagtcatgaacattttttttttattccttgtttctgcatgcttatgcacaatatttatagttgctgtataagagttgctaactatatgtatgttggtattttattttgtcaatgaaatagtccttgttatgcaccatagatgtttctgcttctgcttgttctgttaacaatcagagttgattaacatgctttttgttcaattttgttttaaaatctaaaagcaccgcaccctctgttctctcttcctttgttttcttttttcctctaggatctttcccactcaaaaatgatggtggttcctttaaaataaaccattctgatagcggtattgtttactattttttcttcaacagcagcatcgggagaaaatctctcaaaggaccacgag

SEQ ID NO: 18967 - DNA, 486 bp, Glycine max
  Intron number 1 from transcript Glyma18g07220.1 (locus Gly ma18g07220) derived from phytozome v7.0 (chr-ID Gm18; pos 5876090 to 5876575 reverse strand)
cttgcttgagttgccaactttaaggttagagatgcacttttttttttctatgcttaaggttagagatgcacttatttgattccattctttgcttttgtattctgatctggggtttatctttctgagactttatcagtggttgcagtcagatttgaagtttttctttttcttttaacttctactgatatatggattcatgtatttgaatcttgaacctttctgttattcttgaattgactgctttctttttaaaggaactgaatataactcatcatcagaatcaaaaactggttgctggaattttgttctttagccaaagaccagaaaagtgttgtgacttagttataactgagattgctaaaaaaataaaactgtttctttttgttttcttttaatgttcaattttgacctttatcagtaatttgttgttttctgttgttggtgttttagtttgtcaatttccgtgctgcttggttggttgcaatt

SEQ ID NO: 18968 - DNA, 676 bp, Glycine max
  Intron number 1 from transcript Glyma15g05200.1 (locus Gly ma15g05200) derived from phytozome v7.0 (chr-ID Gm15; pos 3712950 to 3713625 reverse strand)
cctcagatcttcattctattctgatttcatactctgtaagctctctctcacccttttttttttgcttctgtcttgctggatggatttaataaagaaaaaaataaagcatttatatcccatgttttatttttctgggtttgatgcgtgactaggttctagccttgtacatatgaatgagtttttccatccaattttacaagatttggttttgttcctgtctgaaattttgatccaatgtgttgccatagaagcagaattttccacctttgcccttctgggttttctccttatgcatcccactgtaccacactgagtttttgaatatgttgtctccctgtgtgcatagctagtgttcaattttgttgttaacagccaagtaagcagtttaacaatttactttttaagttttcaaagaattgggatttctgagctagctcaaaggagttgtgatagaaatgatagttctgaggatgaaaatgcttcaatcagattctgagattaaaataacttgagttgtatatattcttctaatacttgtgcttgagttttacgtagtctttatcatgttctgtatgatttcatctctccattcatattgcttgatgagaatgatgatctttactcttgaatctgtctacatactgacagttatctattttgatttttgtcctcagaa

SEQ ID NO: 18969 - DNA, 695 bp, Glycine max
  Intron number 1 from transcript Glyma14g17630.1 (locus Gly ma14g17630) derived from phytozome v7.0 (chr-ID Gm14; pos 19365409 to 19366103 reverse strand)
gggtacgaagtttttttttatttacttttctcatttttgtacaccagcaaaaaaattctatattgactgttttctaactgttataaattataactataataaatatttaatacaagtgcttttgtatagctcaaattccttgagtctgattgaacatgtggaattttatattagcttgttcaagcaatatgctttaaaaatgaagattattgtgtatgcttgatgtaagagctttcttccaattcaaataatgaagattacaaataaggaattattacaaaaaaatagttattatacatgacaagtttggatgatttctagatatgccatttaatttataaagcttattcaaaatcataaaagtgggaaattcctactttcttgattgtagtccaaattccaaacttcaaatttatgttgtgcaagtagggcttctagtttgggggagtgtgttaagttgcaacttgattatgcttataaatcatcattgagaatcatttaaaactattttcacatacaatctatattctgcttttgacaatcttgaaagattgtatgttattttatgcttaccagttgctgctacttccatcctcatgattttctctaatatcatgcccctgtatagtctttgattatctgattactactatttcatgtcattgtgttgcagatttgaagctaataaacaattg

SEQ ID NO: 18970 - DNA, 515 bp, Glycine max
  Intron number 1 from transcript Glyma18g01120.1 (locus Gly ma18g01120) derived from phytozome v7.0 (chr-ID Gm18; pos 566358 to 566872)
tcatttatctccgagcaatccttttccaattttaggtattgagtacagattcgagcttttatttccccttttttttttgctgtgcaccaattactgcactgagcacagattacagttgtaccatcgtgattgattattaggcttaatgtttgtcaagggctctggagaatgaactatacttgatgtttggatggttctgtttctattctctgatggctagctatgatcttcatgttttgcttggcagttaatgcatggaatataaaatattttgtataaggacacgagagattcttgatttattactgagagtgatacccttggatgatttcaatatgtaatctgcgtattttatgttagactgtgttttctggtataatcatatgactactagtatgttgtgcatcttgtagcagagctatagatctagagtttttctcttttttttttctttcagtattgttatttggattgatagggtttgagtatttttctttatgtttttgcttctttag

SEQ ID NO: 18971 - DNA, 671 bp, Glycine max
  Intron number 1 from transcript Glyma17g10990.4 (locus Gly ma17g10990) derived from phytozome v7.0 (chr-ID Gm17; pos 8263051 to 8263721)
tctctttcccatactccttccctcactttctccaggtattcattcattcctcttcttacaatcacttgatcgattcggaagcatatcaaggatacccaaaacatcaatttacctcttgtactttggattgaaagattgaaaatcgaattcactcactgggacccctttatgtcatgatgggtgtctgtctaccattttttcaaattgaaacaaaagaacaatctctgggtagcttgcaatcagctaattcaaaagtcatatgatttacttcatccatcatgcatgcattgtcttctggttttcgtacatgttatcttcatttgggaggactgtgacatcatgttattctgtttttgaacctggatggttctgtttgatttgcgtctttgctatcggatttgataatggaggtttgggaatctcattcatagggttaaaaatgttagcttcagagcttcattctatgtgccagcatttccatgtatttttgtctgtggccttgtgttcatgttgagttttaaaactacttttcatgtgattggtacatatttatgcagatttgtgcctcggggtatttaaaaggataatatagtctgctttaatgttcttttgttactccatgttctgtgaattcaggaggaaaatttcaaccacagtgaaggctacatctc

SEQ ID NO: 18972 - DNA, 951 bp, Glycine max
  Intron number 1 from transcript Glyma18g47710.1 (locus Gly ma18g47710) derived from phytozome v7.0 (chr-ID Gm18; pos 57289280 to 57290230 reverse strand)
ttagcttcactgttagggccatccaatcagaaaaggtgcacttcttccttcaatttgtgttctaataattaataattactctctttgtctttttattgctaccctcttatgcttaattctaatcaatgtcctttatgagctagtatggatgacccttttcttttcttcttggaatatactagtaatattagtatagattatgccaatatgttcatctttcacaatataattttgattatggatatgttatcaggtttcagccactgcacttctataatgatttaggaatcaaggatagaaatatatcacagaacatcttataaaggataggaatatagtttaatttcattatattatcagtgatttaggataaatgtgtcaattaatttaggaatatagtttaattttacattgtcaatatatgtcaacattgaaagtagaggtgaaaaaatgagttacttggcttggtggcccccgatgcgggttaagagtttgatttttttgaaatttgtcaattaatttaggaatgtagtgaggcagactatgaaagttcagattcaaattcaagcttctaaaatgaagtccaagttaagtgagagtttgatttttttgaaatttggtggtttttgggagctaaggttatgatcaaattgagttaaaatgacccctatttaataattccagatttaacattcaaagtcttagtcttacatttcatcaagttggtcgactaactgaaccctacctattttctattttgctgcctctaatgtaatcaaagcgtgtctaaattaaaatttatatacagaaattcttttgtttcgtttaattaaaaaaaaaaaatcccaacatcaatatattcaataagaagccattaatgttttatttttgggttattgcaattttattatggcagccaacctatcaagtgattcaaccaatcaacggtga

SEQ ID NO: 18973 - DNA, 686 bp, Glycine max
  Intron number 1 from transcript Glyma19g40410.1 (locus Gly ma19g40410) derived from phytozome v7.0 (chr-ID Gm19; pos 46824021 to 46824706)
ctctgccaacgccgctgcttccgctgattacggttagctcaacacgtatttcttcactactgtttttttacggttatccagaaaaattatgttctgctttttttttttccttcttactcagcgtttcgattccggaagcgttgtgtattgatgctcttgttaatcttttgacgcattttcacgcatgttcactcaattatcttttgttaatacactattagttgtatcaatgaacttattttgcaaatcttttgcagctagtgaaatatcgtgtttaattcgatgatttgtcacctttttcactgatagactgatagtatagagttttacatgaacaatgctaaagtttgagccactgatgattagtttggcatatgaagcgaagagactcacttcattttcggtcatataatccttggtgcttatgtattggagcctcagtcacatagtattttgagcttctgattggactagaacatggacatagttgtaaaacgcatattcacatctatattattttatgttaataattcaggtgcgataaattaaaaaacacatatgcttgtgacaaaaaggagatttcacaagaattatgtgattttagatttctagtacgaaaatataaattgtttggattgctttactgtttttagttgctgacctttattttgattgaccaatgctag

SEQ ID NO: 18974 - DNA, 722 bp, Glycine max
  Intron number 2 from transcript Glyma16g02900.1 (locus Gly ma16g02900) derived from phytozome v7.0 (chr-ID Gm16; pos 2481528 to 2482249 reverse strand)
tcaaggaggttcagtacatccaggctgaagtaggttctctaataacagagagtctttaagattgttaaactcttactgtaactgtttataatgttgatcaatcatctagtttattaatattttgttgctttctcaatttggttgtgatctttgtgtcatgcttaagtttggatttttctaagatttattttaaagtcttgtgctactctgcgttcacattcactgaggaaataacttttgtgttaacttgcagatatttaaatatatccacctactaatacatatatgtgagtgtgaaggggattttttaagtggttgtgagattgttacagaaacttgaggtcataggacactaggtctggttatggttatgtatatgaaaatataacttatgcatggtggaagaacaaatactagttaaacaattgctagcttgagagacacatttttgtgctattaattgctgaattcattttttatattttaaatttgttggcatggttaggaatttttaaatacttcaaagttaaaattcaaaatgataatttactaacaatttgtttctaatgttgtcatttttgttaattgtctagcttggtaagattttcaaagaaagatgatttttttgggccttctattgggattatagagggctattatttacattgtttcccttcatatttgcaggtgaaaattataaagtgtcttgttgagaatattgt

SEQ ID NO: 18975 - DNA, 550 bp, Glycine max
  Intron number 1 from transcript Glyma15g15450.1 (locus Gly ma15g15450) derived from phytozome v7.0 (chr-ID Gm15; pos 11879071 to 11879620)
aaaacattcagtctttttcgtgggctctaaaggcaagaaccttatgatattgtaacttgataatcttgtatttgatttctcaattgtctgctatctaatgtaggctttaattactatgctgaacctactatttgctagcttttgataaagttttgcaaaaataaaatctgatctatttttttatatgtataaatatcaattagtgagaacatataataaatataagggttttattaacatgtgaacacaagttaaggtatcaaatgctgtttggattttcaaggtaaggaccttaacatgtgccctgataactgctgtaaacgaaaccttattattaaagcagcaaaaaatgtagttttcttttcaatgtttgattctttgcttaggtataatttttgttttcttgataggagaataacaatgacaatatataatccattgattgatacttttgttgaaatttcctttacatgatgtttttatgagatctgattcatttgagtttttgtttttaacctaattgtcattgatgcaggctttcttgggcttc

SEQ ID NO: 18976 - DNA, 1043 bp, Glycine max
  Intron number 3 from transcript Glyma19g22420.2 (locus Gly ma19g22420) derived from phytozome v7.0 (chr-ID Gm19; pos 27116393 to 27117435)
caaagggccaggtgagtctgcagcttttttcttgatccttctcttgaaagctaacatagagtgactatgtgcccatgatatgatgtttctgatgtcaagttaaagcagttttcctggagtgtaggattaaaaaaagtagtgttgaactcaaaacacacgtcatagtttcattttggttatgtttggactgatgcattggaaatggatggaatggaaccaaatggaatagaatcacatcaattgccattgtttggcatgtttaaaataggagatacttctattttctctcccctagtgcaggatgcaattgggtggaactaagttattatgcattctccttaatcatcattctgttcacttctatatgggtgaatattttttatattccatcttagattattcaattgtgtggcaattttattctaattcattccacaccactctatcccattctacccatcattagatatgcaaacattgcctttgtgattccttatgcatttttttagcatttgcatatcacaaaagtataaaatgtgagagtggttaatgaaattctttgcaaacattcagctcattggcttgcatatcatgtaagactgggattgaaagtcaaatcctatgaggagttatcaacagaataagacaattcaatttcatggaggttcgtttcatttgatatcatccagaatgaatatcgatcttttgcaatatctagttataaagtcagctccgaagggatcatataatttgcctaaattatcactactagttacttctccggaggatataaccattactcagttttagtgaagccttttgaaacaaattattccatgaataagttacaacatataatcaaatgccaattgagttcataccgacggctagccaagcttctatcatcttgcacacttttgattggcatttagagtgtaatcaattactgagcaatttgcttatttgtcttgagaccattttgctaatacaagtgttccttttatataggttcttgggaggttagcatctcaaatagctactgt

SEQ ID NO: 18977 - DNA, 626 bp, Glycine max
  Intron number 2 from transcript Glyma19g37310.3 (locus Gly ma19g37310) derived from phytozome v7.0 (chr-ID Gm19; pos 44514759 to 44515384 reverse strand)
caaaaagagctgcttctgctgcgctcttcattcaggttcttcgtctttgcttccgatttccctgattttaaaaaattaccataccacatgggtgtcggaataggataaattttacaaattacattacacgacaaagttataacatataaaattaaccaaccaccgaccacctggatcaattgtacaaagttattctagcttaagtttcaagttcaggctctgtgtagtatgcaactctgttaaatacgtggagggcacccatactggtcttactcggcttgagcatattgccatcggcagaagatacatatggtctttataaaaaagaattaatctaaaattaatataaataaaaaccttaaatcagagagagagagaattcatgttattgtactcaattttattgtggtgtgaaatactgaaattataaaaaagcaaaaaaaaaaaaaatacaactagaaacattcaaagtgttcatgcagtgtctgacattgatacttgtttgacacattataattacaagtttatgagaaaatcgagagagaaaagaaaactaaggttcagaaaaaaaagaagaagctgttgttcttatcttttgacatggctgtaatttctcatatctatag

SEQ ID NO: 18978 - DNA, 706 bp, Glycine max
  Intron number 2 from transcript Glyma18g46260.1 (locus Gly ma18g46260) derived from phytozome v7.0 (chr-ID Gm18; pos 56022257 to 56022962)
ccatctccaacatttctgtggaggttcaaggtctgtatatcttacacaatttgcatacatttggttctagataccactctctttggggggatttctttttctgatttgcagagggcctggaaggtctttttatctggagtgtttttttttaatgcttcttaggtttgaaaggaagctgataaaatgttatgttgatactgttcacggaagctcacaagaaaattaaaataagaatgaagtgggaaaaaaacgaaacacacccctttatgatagctatgacattgctagcaactttctatatatttatttggtttctgttaatattatacctgcttggatatctcaaagttctgccctatatgctttctcctcttcactctgcaatttatttattatgcttgtactcatagatatatacaagctttcattatgatttctgaatgtggaaaccttgctgcagtatgttttgtctgtaaacttgtaccttattgcaatgtttgtgttattctaatgttccttggtaatgttagacgaattcaattttaaaaatatataaagaaattctcttctgcggactggaattttatatttgtggaagtctctgtcaatctaattgtattcctactataattggatatctttctttaatttctgtttttacactatatatgtatgtttttttttcccaggtgacactctttcttat

SEQ ID NO: 18979 - DNA, 915 bp, Glycine max
  Intron number 2 from transcript Glyma14g03800.2 (locus Gly ma14g03800) derived from phytozome v7.0 (chr-ID Gm14; pos 2479114 to 2480028)
caaggagtagggatctcgtcgacaggtgcctcgcggtatgtatccatctatctaaggaatctcaatcgtgatatttcatcacatttataatttcttatacacgtaacatgtccatcaagtatcgaccaatgagtttctcatcgatgactaagattgcttactttatcctttactcgggacttactttagaggagacaaatcctaattatacagcgtaatgattttgctttttctttttgtggaaaaaaaaatatcacaaccttgtgttttctgctattgaggtgtatgttttggatctgaaggagaaggaggttgtgcttgtgttgtgtgagactctctagcataatgcccgaactatatttgctaatatgctgagtttcaatgtgtagctagttgccatcatgttttggaatagaatctgacttctgtatgcattctctgaagcctgtacttattttactgtaacaatgcgttggcagaaaggaatacaatacatcgtctgttgggatgactcttacttgatgtcttcacacgatttgaaattgaattaaccatcttgaacacttagacactggttgttgaatgtagacatttgttcacaagaatcatatactcaagtcttttttactcctcttttccttttcatatactcaagtctttgatgcgttgtttctttgttatagaggaaaaagttatagattcagtatctatatgttttgggtgttttttgtgatatccctctccaaacccaacaacaaattccaagcaagggcaaagaacaccatttttttatttattttaaaatttgatctattgcatatgcaccaatgcagcatctatgtactttaatgtgatatcatgtcaatgttttcttccttagattgcacccgactggaggcaggcagtgacactcaa

SEQ ID NO: 18980 - DNA, 599 bp, Glycine max
  Intron number 1 from transcript Glyma14g36920.1 (locus Gly ma14g36920) derived from phytozome v7.0 (chr-ID Gm14; pos 46253278 to 46253876 reverse strand)
acacaccttgctttcagtaagcaaaacaagtgagcatgccaataagagagagtttcatgtacagtgtagtgtacatattcttgagggtttttgatgttcatgcatctgagttctgccacctttttaagttttaacctttttgccttttatggtctagagtttgtggagggttttgctttcccttcttctgtctgtgctctttagcacaaatgaggggtatactttttgcttgcatgttatgtttgttcacaatgcccaccttgtttggacctcagagccttaattctatatttgggcattttgatcctaatttggaagcatggattgcagaatccatttgttttgcctttcaaactctcctcaccatgtatatattgtgtgtaaatagctttggttgccacataatagagtatattttgtttaatttattttttacaccattaaaaaagtgtataatgagtatgtattgaaagaatgaaataattttagactattattcaattatatttcgtcgtttttaaagtatctatcataaaagtcaaacaaacttaaagatttaattttttgaaagcataaatattttttttaattgtaattag

SEQ ID NO: 18981 - DNA, 614 bp, Glycine max
  Intron number 3 from transcript Glyma20g01490.1 (locus Gly ma20g01490) derived from phytozome v7.0 (chr-ID Gm20; pos 1019963 to 1020576 reverse strand)
ttggatcgcttggtgaatattgttattttaaaacaagtttgatcttgtattatacttaatatagtaattataaattgagtgctccattaggatttagaaatatggcttttgtacatcgctttttggataaggtagatctcaaacattggaattcatgacatggtagagccagaggatgaattcacggatcactgatacatttctacatattgctatgagatgcttattatggctattgtttcatatgataatgtggttccttcttccctattaacgataaggtagtggatgttttcacaaacactgacacactataaatcaatgacacttaacaattggaattagtctctgttatgaagagtttgtgaattaaataatggtttcctttaagcaccaggaggtgtgtgattaaataactagtactctaatacattgcaaattgaaaatgggtgggagtgaggacaaaataaatgtcttattcacttataaaaatctattggtggcaatactgtctttttgattctgataattaatgaaaggtcttctctttttgctctcctgtttgttttccccttactttttcttgagttgaaatctagtgtagcattattttg

SEQ ID NO: 18982 - DNA, 900 bp, Glycine max
  Intron number 2 from transcript Glyma19g40500.1 (locus Gly ma19g40500) derived from phytozome v7.0 (chr-ID Gm19; pos 46884875 to 46885774 reverse strand)
tttaacgtggtttgaaccacctcctccttctcaaggtaattgagcctttgtatttagacatgttattactaatcaatggtgctttggtgtccttgatcactggaaataaccgagagattattattgtatagataacataggtagtctatatttgtatttagtatagataacaaatgggagatgtataaatctttttgttaaagcttcgcctttattcatctccacttgtttttatttcattatttctgccaaagtgatagggagaagagaagttatgtttatgctaaaggggtcatcttttttatttcatctccactatgtttatttcatttttttactaatgacatttgataactttttaaacaagtcctcatagattttatattttaccagtgaacagaagacaatgtcgatgcttttgaaaatcttttgctgctttgttgaatgtgaaatgtaaagagaaaattatgtttatgcataaagggtctgcttactctcgacatctgatgactgttgtatctacataattcttcatagattttgtattttagcagtgaacaacagacaatgatgatgcttatgaaagtttttttttgctgctttgttgattcttaaatgtaaatttgaatagtggtgtgtatgttactaaaagggtgtactatatgtaaccactatttatgtgttttatctgtctatattggtggattacatatgcagtttgaatttaatatttaatattacatacacttcaaagcctttgtctttatctaatttaatgtcagatacttttttctacttttatttgaaccaagagaataaagaaacaagtcccttgtgtatattaacatatctttctatgtttcagctcctactttagctgcatcacctgtgaatacacct

SEQ ID NO: 18983 - DNA, 793 bp, Glycine max
  Intron number 1 from transcript Glyma18g40770.1 (locus Gly ma18g40770) derived from phytozome v7.0 (chr-ID Gm18; pos 49460553 to 49461345 reverse strand)
cttttgtaaagagtgtcaagcgtgtcgtcgtcaaggtctctttcgtttcttaatcacacaacgtactctgtttcgtacagaggaaacctagaaaacaattgttcttcatgtttttaagctgatgtcacgtgtgcatggaaggggtggctctgattggatatttttactattaacaaggttttaaatattagtggcaatggttgtattgtggttttgccgcgtttgttgatatggtggcagccaatacagtcgagggacagttaaaaaatcttgatgttataattcaaatcacagttgcagactgtttttaataaccttgactattaatatatttcataggtgaactaggaaaatgagatctactggaaattgtcacttttattgaaccaaatcaaattggatttttcctcttacttttacatgtgtgttactaatcaactagccctgctaatcagtatcctaagacaatggttaaagaatcaatttgaataaaaaaaatttcattttttaagatggcattaggatagcattagaaatcacaatagaatgtagtggtacatttttttaataattttatttttatttttgatttcttaactggtgcatgaggacatggttagcatcttccttgactattttttatttcttaacctgatggcgctgcttaacattttccttgattaattagtatattatcagtgaaactatttttttttcttatatcattctttaagtaaccttttgtttttttctcatactttgaaggttggaacagctgtggttactcgtagtg

SEQ ID NO: 18984 - DNA, 807 bp, Glycine max
  Intron number 1 from transcript Glyma17g10580.1 (locus Gly ma17g10580) derived from phytozome v7.0 (chr-ID Gm17; pos 7947625 to 7948431 reverse strand)
ccattcaaattgcaattgtgagtatagaagaagcggtaagttgttattctgtgtctcctcctcaagccttattcggattcagggatatttttttactataggaacccatcccaattgcaaatgcaaactatagggcttctgaattctctcaaaaagtataaggaagagtgcatggagtaatttaaccttcaattttactttccaaagtttatttatgtttttgtttttatgtggttcatcaattctgttttgatatgtacaatgagatgatggatgtagggcatatgccattgaagctgctgttattcttctatcatcaaaataagaagtatttcaaaattagtttgataggcttactaacctatttacagatcttatcacaaaacaagcctttaaacaggcttgctggtctggccagacctgacttttgtgtaggttaggctatgcctttaaataaggcttatgacagagaggtctagctcaggctttgtactttcaaccaagtctaggttcaagcctagcaaagcctggcttaacctgtttccatcccttggtgcgatgtccacctcaagtttgatctataagtgatttttggttatgagcttctgttacttattattcattccttttccttttctttgatctctctattttgaaacttaataaaatgaaatgcttctttgatgagtaactgttttcatttctgctgataatatgaaatccctttctgatatagtctctttcatacaattgtcttcggttcattcttctgcttgctttgcaggaatctttcttgtaattccaatc

SEQ ID NO: 18985 - DNA, 571 bp, Glycine max
  Intron number 2 from transcript Glyma20g34080.1 (locus Gly ma20g34080) derived from phytozome v7.0 (chr-ID Gm20; pos 42529352 to 42529922 reverse strand)
ataatttggtacctaatttgacatgtagcttctaattagatgtagcttttggtttgaggtcttatttgcataaaagttttgtttatttagtttttaattctagaattctatgatttctgtttttttttttttttgggggggggggggggggggttctagatttaggtctttttcaattaatttctctataggagaagaaaacaattttctgttttttttttttattgaagctcttttcatttaactttttcaaaagttaattgcacaagttgatatgagtttatggtgtagctcaaagcatttcgccttcttattttattctccaataaatgtttatggtgaattttaaccatacagagtcttagtatagagcacatattcatgtttgttccctcatatccattttgtttcctagcataacctggttggacagatgtaatgtggcattgtgcttttaatttgacgctaaagtcttatagtttctggaaataaaatgaagtggagttgaaatcaggaaatgggaaaatagttctgtttcatcagctcatttgagtttttagtttcaatttgg

SEQ ID NO: 18986 - DNA, 462 bp, Glycine max
  Intron number 2 from transcript Glyma19g33100.1 (locus Gly ma19g33100) derived from phytozome v7.0 (chr-ID Gm19; pos 40746341 to 40746802)
aagagagcttcaaagaacacaccactctcaatcccgtaattctcactttccttttctctctttattttttggataatcttctaattggtatgaaatattttttaattttatcaatagttaatctctttaaaaaaaattacatacatccaaattaatgaacaatgaagtcacctcaaccatgttattattcaggtaaaatatttactaattttatggataattaatttttactataaaaaaaacttagctgattactttaaggaagttttatcttccgatcatatttttctaaccaggttgaaaacttaagaaattgagtttcacttaaactaatgatatttttggttttttcccctgttttaataataaacatcttggtaatattttaatttcttatgttttatttatttatgatcaaaatgtgcagaagcaaaaacttgcgcttgcaaaacagttaaatct

SEQ ID NO: 18987 - DNA, 938 bp, Glycine max
  Intron number 1 from transcript Glyma14g39440.1 (locus Gly ma14g39440) derived from phytozome v7.0 (chr-ID Gm14; pos 48539940 to 48540877)
agtccaaggcccacggtaaggcccagcatcgtcgcatgcttcctcttctcttactacctctcatgggtttcaagttttaaattcgcttgtagattgaaattgatgtaaaaaaaatgaaaattgtaattttctttgtgaagttgtaagaatcaaaggtttaagaggactgctagcaaggaattatttaatgcattccttcatatatatatatatatatatatatatatatatatatatatatactcttattagttaaaatgcatcgagaatataaaatcgagagaaattatcagataagatgtaaagtctattaaatttattatttttcctaaattttagccgatgaaatgagaaagaatattgttcaaaatcaaaagaatattcaaaatgaataaaagaatatattaatttttcttgttaaattacttattttatttcgtcccatgaaaatctgcaatctttatgttttagtttctatatctaaaaagtataaattatttgctttaattctcacatatacattttttaaactatttttagttgttgtatataatattttgatttattttagtcattagaatttcagatgatggaaactaaaatggattaaatagtgtatatagaaagattaaaacttatatttttaggtacaagtgttaaaatatgaaatttgtgaaagtataggaaataaacgagtgggtaaactaaaaaaaaaaagtgttttcttttgttcaagtaaatcgtgagttttgtttatttacttaaaatcgacttcaggtataaaccaagactatggttcgttgcttttgctttgagtgtgggtcactagaaaaagcttgcaatcaaaaatattttttgttacaaaatagaaagacgtgtacaataacttgttttaatttactgtaattgtggttcgtgtgttgcagacaaatcgagtc

SEQ ID NO: 18988 - DNA, 1002 bp, Glycine max
  Intron number 1 from transcript Glyma17g11390.1 (locus Gly ma17g11390) derived from phytozome v7.0 (chr-ID Gm17; pos 8550338 to 8551339 reverse strand)
tggcacctccacctctcgctccgttcatcaggtgcccttttttctcactcttccccccaaaatcctttcttacaccctatttcctcaatacccatttcgttttttacgctcaccaacaatttttcaattcaaaaatttgatttttcacatctgggattgatccacctggtcgcccccttttaatcatcgggatggaaattaagtatctgtacctattgttttttaaatcagggagctctttttttgggtgtagttataaaattggcgtgcaaatttagcttttcataggggaccaagcaattgagcttgacttatggttagttatcttgtcaaagtataggcttttaggtaaggtaattgattttttactttttggggaattgattgtgggagatcatctttcatacatgtactcattcgcagtttatggcggtatattcattatcatggttgttggagttttcagaatctgatcatttgtcatttgattaatacggtttgacatatatgagtttaatccatcaagttatctccttacgatgcctatggtatgattctttgtcagaaatatgggatttagcatattgctagtgttttcccaaggtgatttgattgattcagtgaatggtgaaaatatctactaacatcttgaaaaattaaaatttcacgagttacaagattttgaatccaactctttctccattcactggcaactggcaaatactggcactcctttactttctattgattcagaggcatgttggtcgatattaatttgtgcatctcagcatctatacaatgatggatttcaaagatcatgtttgttcttaactttttgactactctcgtgaggaaaacataacttattagtatggtttgaaattttatgcactagccttgtagactcaactggtctcacacgctacaatttggggatgactgttaaataaatgctaagagtgattgatacaggaagtgaccgttcttatattgtgtttttag

SEQ ID NO: 18989 - DNA, 513 bp, Glycine max
  Intron number 1 from transcript Glyma19g12650.1 (locus Gly ma19g12650) derived from phytozome v7.0 (chr-ID Gm19; pos 15988933 to 15989445)
tgttttaggcaagtaaagtctcctaaccctagttttatacatgttcatccaagtctagagaattaaattcagattccatatgaccactatacaattaattaagccgtcgttagatttaaacaattctcaagaaatggatatactagtcttttggtgatttttcttcatagttttatttacttccaatttaaaattatattcatgaggtgcataatatctacagtattctcttttttacaagattcagaatatagtcaattatattgtactgtattttgattttaatgttagcttaaacgttgtactcatgagttagagtaccattcgtactcgatctcttcaatgaattatctccttattgctgatataaatattaaagaagatcaatccgtttgtggtgtgcatcagtcgactgttcctataatcaatcataagcacttattccaacatttgagagtaaattgttttattgtacgtgtttgattcataattggtataattgcagagaagatc

SEQ ID NO: 18990 - DNA, 931 bp, Glycine max
  Intron number 2 from transcript Glyma17g12930.2 (locus Gly ma17g12930) derived from phytozome v7.0 (chr-ID Gm17; pos 9847072 to 9848002 reverse strand)
ccactattgctgcttctgtaaagtctttaattttggtattgatcgtagccttgtcaatttcttgctttaaaagggtcatttacatttttctttattttttttttttgtattttgtctttccccttttctcttgttgtttgattccaaaatttgttaagatgaacttgttctagcttcttgttgttctgctagtgcttcagggaatggctagttttgtattctacaacagctttgggtgtttaattgttgttattagttgaaaaattactgagattcatcttaatgtgctgaattctataatatctcttggcacaaattcataaacaattgttagatctggcttgaatatactgctaactgctcttggaagataccaaataccatgtttcacaaacgtatgtcttgactcttgactatcctcaattcctttgccacatccccttctccaacgagtagtgtttctctcttgatcttctctctctctgtgcttatatcccatttatttgcatcactcttcggattatcaaccttctcgggcatattcattgttagtcttcatccctggtctaatattctttcttgcacaggatttggtcattgttttttagttcttaccttttgatgctctagtatagtctctaagttggtcttagttacactttgtaagtctcgtacaaatgccttgttttccatttttgctatgttgttaaatgattacttaacttgagagctgattttgtggttacatggcaaaacaatttaaataattttatgttttccatttttgctatgttgttgaatgattacattaactggaactgaatttatggttacatggcaaatcaacttaaatgaattcctaggctttgagcttgtatttgagtggtaatttgcttgcagcctttcaggtgttcttggctagattgccacc

SEQ ID NO: 18991 - DNA, 1028 bp, Glycine max
  Intron number 2 from transcript Glyma19g45140.1 (locus Gly ma19g45140) derived from phytozome v7.0 (chr-ID Gm19; pos 50389676 to 50390703 reverse strand)
tggtatgtgtgaaattgccgttctgtctctcgctaatgctgactgtaacatctgaatcatcgtctttgttaatagaacatactgatacagattgtattcacttattgaaatcctgttggaggttttgctggcttcgtctgccataattgcttttgctttgccttgcatcttacttctgttctttatttcaagcatattcttctgtggttttgcttctcattctctgtaataacaaaatctctattttggactttgatttgttaagttttagctcatgtatgagctagttataaaatactagccttgtttgtaaaatataagccaactttcctacataatatgttatgtacactaatttgatatatatatatatatatatatatatatatatatatatatatatatatatataataaaatacttggattatgtaatttaatatcatatatttatggtttctacaattaatatatagttatcaacaattcctaaaaatgtagttatcatatatcctgtgcagtatttattgtaacctaacagaatatctataataacttatcatgtgtaagcaacatatacattactatataggataatacaagtgcaaggaaaattacccatataaatctatgaatataaattcagtttaagttttgttcaatgttatcatttagaagatatttttcttatctgtcatatttatcacatgtatgtctttcatcctctcccgatcctgtgtgagatctcaattttgacaacattggccattattactgatattgtcaaatgatattaataatcccccgtttattccttttctgtgttagatttattcttggtagctttagtttgctgtcatcaatcatcaaccatgataaatgaccaaatgagttgataattggtattttggggatttgctgattgttttaattgcacaaactgcatacaatcttgtgtacttttgtaaatgttagatttcttttgttgttgtaggtatcaaggagtctgatactggtttagctgcacca

SEQ ID NO: 18992 - DNA, 639 bp, Glycine max
  Intron number 1 from transcript Glyma15g05630.1 (locus Gly ma15g05630) derived from phytozome v7.0 (chr-ID Gm15; pos 3972766 to 3973404 reverse strand)
ggccgattctttcgccgcttctctctttccttgtggttagtttctcttctttcagatctatcatctttcaaccatgctccagctcctactagatgcattaaccatcgtacctatcccattcttctttccgtgattctggattttgctgcatctcattgcttaggtcgcggttctctgaatttgtatattttatgcatatgcatgtgattcatatatgctgtgattctgtgaatgcataaaatatcgcaaaaacgcgttgatatttttcaatgtgcttgaggaatgaatactcactgctatggttctggaagttgagcattttaaccttgatctttgttctgtttccggtggctgagttccctatggtggcctgtataatttattctttttagaatatggatttcaaggaaaattaatagatctgtgtatgaagtgttgtttccggtcaaggtgctgtttccttttgcgcagtcttgcttgcacgccaagtatttgatttaaagtggaaaatttatttgttatgtattgtgctccttaaatatactaggaaaggaactgagagggtggctgggtttcattttttataattcactcctgcaatccatttatgtcaggtgttctcgtgttgctcgtaacaaa

SEQ ID NO: 18993 - DNA, 507 bp, Glycine max
  Intron number 2 from transcript Glyma14g09310.1 (locus Gly ma14g09310) derived from phytozome v7.0 (chr-ID Gm14; pos 7318552 to 7319058 reverse strand)
gacaccacaaaacgggtatgtatatatacatgtctagtttctctatgctcttcaaagtagtagctagtcataatatgtaatgtcaatcctagactacggaacatgtgaatcaactaataataaactgttggtctcacttaatccgtcgtatcgagtttagcttctagctagtgttgaatatttagaaaataattttcttttcatcgtaatcttatttgactctagcatgattgtctattattaaagtacgttcatctctataaaacaaaaatataataacctgggttcaagctatctttttaattatataaaccactaggttcgaccttgtagacgaaggattgagtaatttgcatgaggttgttgtagacgagattattattaagaaaattagttgatgggtgtaaaattgtagtgtatatatatatatatatatatgacatggttttgattgtttttttttcttggacagggggaagtagtagaaagagaggaggaagatagccc

SEQ ID NO: 18994 - DNA, 370 bp, Glycine max
  Intron number 1 from transcript Glyma18g46290.1 (locus Gly ma18g46290) derived from phytozome v7.0 (chr-ID Gm18; pos 56054479 to 56054848)
ctgctagacaatcaggtatctgacgagacatgtttatcatttttatataataggaaaaaaaatcatctacctaaatatattctttttataattgaaatttataatttaaccttgaagtttagaaagcaaccacatgaagaaaaccaaacaaaaacttgtacttcagggtaatcgttttacaagaatgggagagaagagccagagagcttttgtgttatcaatatgtcacttaaaattcaaaaaacaaattgaggataaagagtcttattaatcatatattgcccatataacaaccaataaattctaagtaatctttccgtaaccttgaatttcagatagaaaaaattgttttatttctgcttgaacaaca

SEQ ID NO: 18995 - DNA, 941 bp, Glycine max
  Intron number 1 from transcript Glyma15g25400.1 (locus Gly ma15g25400) derived from phytozome v7.0 (chr-ID Gm15; pos 26716053 to 26716993 reverse strand)
gtcccaagctttgcagaagctttcttcgattctgggtatgtctcttttgttgttctcaacgttcaactttgcagctttttctccttttaagcaaaaaaaaaaaaaaaaaaaaaacataacataaaaaaatgtattcttttgtttttttagattggtgaatgttcagttggtccaattggggttttgggggtgttttaagttgctagtgttgggaacattgttggggcggggcgagtttggtcttttacggttaaattgaagcgttatgttaagatgatgttttatgttaatgcatctaagattgatttggttttgaagaatgagaatatgctccaataagactggggggtgggaattaaactattaggaaagatgcatgaaccaagaccaatataactttaaaactgaaagctgcgtacttggacttgtaatatgggtagttttttattattgtaattactagtcagtctaggcaatttacttcttcgagaggtccaagatgaattgtagaacaacaaagtagatttggccatttttgtttttggggttctaaccctacgtaagcactctcgtattagaatgattgcaaaactgaaaggatgttttgaagagttgatttgtgggaatttggcatgttgctggattctgatgtcactgattttgagcaattattcaatgagtatagagaaatatgatagtggtcaattgttgtcaggtttgatttgttctgcaaaatgaactttagcactgttttatctctgcacattgttaaggtatttattctgtttctgcatcattttacaaattggacgtttcctatcaaaatccagattaaattttcatattttttgaactttgaaatgcagatgttacattgctttggataatggaatcttgatctttgttaattcatgacttggcagacactattcaacctgctg

SEQ ID NO: 18996 - DNA, 330 bp, Glycine max
  Intron number 2 from transcript Glyma20g26450.1 (locus Gly ma20g26450) derived from phytozome v7.0 (chr-ID Gm20; pos 35928586 to 35928915 reverse strand)
tacatcaccgaaagttgtgtaagtatatgcaaattaaataatcttctctctgtctctccatcccctgttagcacttagcaatgaaaatcgcgttttgttgccatgatctaacgctgtaacaatgtgagacctcttttgttggacatttgaattgtacagctgcacatatgggcataagctcttggttgagtttctgctcaactcttctgttttgtgtgtatttagaattttgtagtatctttttctctgatggattttttggccttcttgatatggaaccgtacaacggatgcagctatcagcatactaaatatcacaaacgtaagtctc

SEQ ID NO: 18997 - DNA, 927 bp, Glycine max
  Intron number 1 from transcript Glyma15g15020.1 (locus Gly ma15g15020) derived from phytozome v7.0 (chr-ID Gm15; pos 11462251 to 11463177 reverse strand)
cttgtccgattccgccaacgaggccagtgaatcaggtactctctaactaacctccaccaaccaaactttccttttcctcattcgcaattctagatctctgattctctttccattttaatttccaaatttctaatctgcgtgattttagggatactctcgctgcatattccagaatcttctctctcttttttttttttctattcattgtttggcttcaagttttcgtgcatttggtttgaacttgtgctggtagttatagttagttgctgctttggtttctgtgagttggatgattgatcgttgctaaaacttgttccggttctggatttgcttccttcgcttctttcctttgtttattttttttcaaagcaaataacgtaaatgttcatttccgttcttctggtgatggatgacgtgtttcgtttttttattgacgcttgaaatgatcgattccagtttcgttctcttccttttatagttacagagatttcaaattctgcttcattctccaaacgcaacgttttggtcgttaatctactctgttttgctgcgttactagtttatgcatcttttttagttaatttttaaatcatccttattgactaccgtttcatgtttgatgttttttccctcctaatttggatcatgaagatcacgtggctatacttgtgaatgacttatttttttaatcttgtttgagatagcttattaatgtttgtacttggagggagtcgatattaatctctatctgtgatttcaactgatatggagaatatattacattattaattatttgatttcgtattttattacattttaaatgcaacttttggtattgtaatgttgcaaatattcctatgtatctcttcttctgcaatataaaaagtaatgcacttgtttgttgccagatctatctgcttcttcgtc

SEQ ID NO: 18998 - DNA, 935 bp, Glycine max
  Intron number 1 from transcript Glyma18g18050.1 (locus Gly ma18g18050) derived from phytozome v7.0 (chr-ID Gm18; pos 19283093 to 19284027 reverse strand)
gaagagatcctactcgaacgccccaagcctcttggttttccctccctccctctctctctctctctctttcattcgtttttagttttttcgaatattactaggctttgtttcataattggttgttaaaaggcgttttcttgtttgattgatttattgtgttttctgtgcctgtggattgtgataataatgtctgatggatacgatttacttttggtgttggaaaaatacataaactgaatggtttcattttgcttatgaatctggggaacattcagaatttagaaatatatgatatggtactgtttgttgcattgtttttggcctttcattttggtgttgtgataccgatgtttgcgtgaatttgctttgatttggagaataagggtgtgtttgatttccatattttcaaaaaatgtttttagttttttaaatacaactaaacaaggttgctcagacaactggtggagggtggtgtaagacacggaatgttgaacaagatgaaaacagaaaaagatgaaaaaatatctcagttttttttaatgtttgttttggaaacaacattatagatttttgaattagaaattgatttttgagtagtatgcaattgttttaaaaatgaaaaagaccccaatctcttagttaacaccaagagaggggaagagagagaattgtattggtataataagtgttatgtgatagaaagagagaggttcagatagagagaaataataagtgttaatggagtatgtgatacgtaaaggtgtcctaaattactgtattttttaaaaaaattaactctctggttaagcattaaagtcaagatttaaacttgaggtcaatttatatagtataggtaccaagtggtctatcatcagtatataatagctctaagattctgtgattgttaataggtgccaagtcagaggagccaaaga

SEQ ID NO: 18999 - DNA, 771 bp, Glycine max
  Intron number 1 from transcript Glyma19g00770.2 (locus Gly ma19g00770) derived from phytozome v7.0 (chr-ID Gm19; pos 483336 to 484106 reverse strand)
cctcttttgctgaagtcaccggattcagcgtccttgtaaatatatacaactaactcctctttatgattctatatgtgcactaccctctgttgtttttctcatttttagttcaacttttcgattcaactatagcatcttttaaacatatatattataagcttgtattctattttattggaaagctagctattttctgattcttgggtgagggctcttgatacagttaattagtacctagtattagcatactactaaccggatcacatgtaacagtacaacgggttaacatttaggttgattcttaattgatttatcatctacatccaaaaagccttattctttgtaagaagcttctacagtttggaaagaagttttgattctttaaaaaagaagaatctacttcaaccgatatgccctaggcacggcattaacaagttagccagattttgggttggtggggtggcatggattggattttaatatagaaaatagcattctattggttatttatttgtgtttgatacagttcagtttggttgataagccttcttttgaaactggatctgtacaaacagttgaaagttgagaagttaaaaaattgccctcattcaacccatatcgaatgttagtttttagtttttgttaacaggaagattcgatttccttcatcctttatcaacaagcctaccttatatcttccgcgtgtctgtgtgtttgtatatatccttttgaaatgcctagtgaatctgagtactgtggttgcagttggga

SEQ ID NO: 19000 - DNA, 430 bp, Glycine max
  Intron number 1 from transcript Glyma18g41870.1 (locus Gly ma18g41870) derived from phytozome v7.0 (chr-ID Gm18; pos 50846225 to 50846654)
ctggcttcagcaactatacaggaacacactttcaaagtaaattactaccccatttgatttcttttctctctttatgattgtttatgtaagcaacttagtgttgtctacatttgcctttttttctgtcttttgcttttgatgtgttaataaaccactcaagatcaccacattagtctaacacaactatttcaactcctcacctaacaatagtatacagtcaacttggctctacgttagtgtctaattaacctttgtcatatttgatttgaggcataacattttcatctaattaaacatgcattaaaaaagatatatgtctttctttctggaacgtaatttcgaatggagggatgttcctatatattagtgcaatttcatgtatttcacaaatttcaggttcaaaacacgactatcaaacgcttttgcaagg

SEQ ID NO: 19001 - DNA, 802 bp, Glycine max
  Intron number 2 from transcript Glyma18g41870.1 (locus Gly ma18g41870) derived from phytozome v7.0 (chr-ID Gm18; pos 50846757 to 50847558)
atattactcttcattggtaaaccctcttccatatgtatatccttagagaatttaacaaaatagcatgaagtcttttgcctacagattcttaatcgacgctgcattcaatatatgaaattctcttcttaattaatggagcctcagaaatgtttagtactagtacttgctagctctaccaagctctatagactcaaattaattcacacatgaatgaggaagattctacgtaattaatatgtggagccatcataaattagctagacccacatacccacatgacattaatttgtgttctcccttatttaaataagaggccatatctagtagtatactttttctttcaattgaatatataattactatatatatacaattgatatttgtgtatgtcataaaccaaatcacctatcttacctgtttagtagcttttcctatgtcctcaattaaaacaattgatatttgagcaaaaataggaaaaaaaattaataacagagtatattaattacagtacattttaaccacgcgttaacttttaaatgaggagataagaaagaaacaagtcagtttatgtgattttcgatcgcatttaagaaaccaacttcttgttcttttggtttcaaataaaattcagatatgaccatttcatttgataaataatcaattgttagacttaaactactaccaaagattttcatgtaaatatttatattctctttttatttgtagcgcccacaaaattgtgttttatttaaattattccatcattatattgtggatgaaattttgaactacttgtgtaggc

SEQ ID NO: 19002 - DNA, 823 bp, Glycine max
  Intron number 1 from transcript Glyma15g11590.1 (locus Gly ma15g11590) derived from phytozome v7.0 (chr-ID Gm15; pos 8543738 to 8544560)
agatttccaccattctgagtaacttcacacaccatgtaagtgccttttcccttcttttatcccttccctccttgcattttcccatgtggactcgtctttgctcttacataaaacaccatgatctgtatttttttttccggattgcttgtgtttttgatgattctgatgaatatgggaattgaaacttggatctagacaattgataaaagatttgagttttaagtgtttcttgctaggtggggtgttatgttatgtgttgttggtgatacataaactcttttgtttcatttgttttggttgtatgattttccgtgtcatatgtcactgtcgcgttatgatatcttgattcaggttctgagttctacaatgcgttggatggaggttttctatgatactttggaatttgacgtacgattatctcatggtatttatttcattgtttgagaacatgaactgtgcccacttctggtctaagagaagaaatgaaattattgttctcacaagtgtcacctctgaatctggccagtgcaataaattagcctcttttgtttgtttgtttgtatcttctaagttttgatcatatctagaactgtaacatgtcaatgaaatgacataaaacagcttgtttttgtttcaattttgacctgcaaattttgcccctttatggggtagggactagagagagtaacatgatgagtactatgttaatgttatactatatatgacatggatttctttgaaccctccaattaatctagtgttatgctgtgtatagattaaattttttgacattgaactccttttattcctcagataacagaaa

SEQ ID NO: 19003 - DNA, 500 bp, Glycine max
  Intron number 1 from transcript Glyma15g12400.1 (locus Gly ma15g12400) derived from phytozome v7.0 (chr-ID Gm15; pos 9159177 to 9159676)
taattattttcaattttcattgttaggtagataagttgaaatggaccgtaaaagagcgtgtgaataatttttttaataaaaaaatgtatcaaatttaaattcaaaaagacaatttattttaaattagagaaaaaaaatcagttacacttgaaacagattcctcgtaactgagttccacttacggcatcgaactcaacttggtttgaccctatgcaacgctaaaaaaatcctcttttgtcgcagttttttcgacaattgcctctttcatattttttttcgctgcattttagcgcgtaaatacctaaatcctcagcggcaacgtaaaagcttcagtttttgtatcaattcgagtgatccaattgcactattccttaattgcaacctcaaaaaaatctagggtttttatcgtaaaaagtagaaagtatagctacccttttcttccattctgatcctgcgcctcaacaaattcaaattcattcaggagttcgcgcagagaatca

SEQ ID NO: 19004 - DNA, 931 bp, Glycine max
  Intron number 3 from transcript Glyma15g12400.1 (locus Gly ma15g12400) derived from phytozome v7.0 (chr-ID Gm15; pos 9160000 to 9160930)
tgccagtggagagaattcagaatctggagctgcaggtaagttttccatctctctgcagtttttgaacaattttgatcctatacaatatactacgaaattataggattttttggtatttgagaaatggtgggggaagtaggagagagggagaagaaataggtgagaaatgaaaaggtggggttgtttgatcgtgtggaaataggtggggagacccgcaccttttatttttttactgatatgtgcagaaattgcagtaactgtgtttcggtcactgataatcattatcaatgggacataatcgattatcatttatcagtgctattttacatatgaacgtaattgttttatgattcataatcaattatcaatgataattgattatgaattcttcaaaactgggtgacattgtgtgatctatgtatccaatctcacttagttgctgtaaaatgagataatctcgaccatcttcatgtatgtacaacatattgacaatgaatatattatgatgtatttattttaaccactaaaagtttgtaactatggtgtattatagatgtaacttttaaattattttgtcaacatccatcaaatacaaagttttactcatctctcaatgcacacactggataatcttttgctgaagatattatgtaagtgtggcccggaatttctttttccacttataatgaaggaaacaaggagaaaggttgggatttattgaagtcgtgctggaaggcatgtggaatgtctgttaggttaaagaaaccaactaattatttttcacacacaaaaatttatagaagtaaccattacttggaccttaaatttccttgttgatcttgatcatgtatatggatgtttgaaaataaaattttactggttttcatgtgaaccaggccaaggagcaggtgaagggaaaaaggctctgtac

SEQ ID NO: 19005 - DNA, 601 bp, Glycine max
  Intron number 1 from transcript Glyma16g26640.3 (locus Gly ma16g26640) derived from phytozome v7.0 (chr-ID Gm16; pos 30720158 to 30720758 reverse strand)
attgcatcatctttcactcgcatcagaatcacagggtttttttctcttttcttttttcttcttaaatataataattttaaataaaattgttatcttcgtttcttaggattggattttgctgattatatccaccgaacccttttgtgattgctttctggtttgtgatcagagaatcttggatccgattttgcgttgtttgcttgcctctcgtcaattgaatttctcccatttgtgatcaatatgtatcgctctgtttatattattatttttttaataagaatttgtaagttgaagatttatgttttctatttgacccgtcaataatttgaatatgattgtcatatttgatcatttgatattataattctcttgttatttgctttttacgtacactcactgatttcatctttgaattggtgcattatgtctgtttgtgttgctttgttgggtgttctgttctaactagacttttaggattgatgatttggtgagatcatcccttgttagataaattttagattgtgaatgaaatgttttatgaccgtgaaatctctcgattgtttcaggttcagttgctgtggatagttgttaaaatttgcct

SEQ ID NO: 19006 - DNA, 391 bp, Glycine max
  Intron number 2 from transcript Glyma18g44880.1 (locus Gly ma18g44880) derived from phytozome v7.0 (chr-ID Gm18; pos 54603402 to 54603792 reverse strand)
actggtatgctattcaaatttgtcatgatctctttgtttgtagactcaatttggctaataaaactaagaaatcacattcagtggcagggaaatctatgtgctttattagcaattttatgttgtttcagattattcatagatccgggatcaattgctgaaaatttttcttcttctcaaaatatatactttgatggaattcataaccaattcagtttaattcagattagaatgttttagttgctgggttagtgtttattcagctttttgaattattacatgcatatacacagaataaagtaaattaagattactgttggttgcccaatttgtaattattatgattattgtgttattaggcttctcactcccccggggacccctgtttttccat

SEQ ID NO: 19007 - DNA, 437 bp, Glycine max
  Intron number 1 from transcript Glyma18g44880.1 (locus Gly ma18g44880) derived from phytozome v7.0 (chr-ID Gm18; pos 54603860 to 54604296 reverse strand)
actcttcaggtgcttgcttgctccatcttttttttttctttctctctattcttaatatctcccaacacttttgtttcttcttgcttctgtttttgtttgatactagtttccaattataagaagaagaaaaaacattccttgtttagtgggaatgaaaaggatgttttgtaatggttaacaaaaatatgatgatggtgatgatgataatgttgttaaatgattattatagataattgccatttgtgaaggaattgcatgattatgaaagttgtgattaagttatggttaatttccaatgtatattatgagggtctagcctcttggccatgttttttgttttttttaggtgatctctatgttttatattatgtgtgtgatgatggtttgtttttgtggatttagtttcggtgaaactggggaggctctcagttggaaca

SEQ ID NO: 19008 - DNA, 930 bp, Glycine max
  Intron number 1 from transcript Glyma17g00970.1 (locus Gly ma17g00970) derived from phytozome v7.0 (chr-ID Gm17; pos 545180 to 546109 reverse strand)
acaacaactgcctcgacgaacaattagcggtgattgtatcgataaagttattggttttatattatgctagtttttacttgttaattgttatcttcttctgttttaatattttgtcaaaatattatatgattttgagttttgccctgcattaaaatattagcacgtttgcttgcttctggcaaaaagtattttcttttgcaagttctttactttcagactataatatctcagatatttgtgtttctggttacacggtattacttaaattacttaatgccattgatttttcattttagttcttttattttccttttctaatacttagctatatgtctctaattgtgtttccttttacactgtttgatatagtttttagctttttagtttctaataattagctatatatctcatgtttacccttttctgtataccttgtgttatgacaggaacaaaccagcaacaatacagacagcaagcaggcacaagtgacattatgcagcaagcagacagggtgcttgacacgaatcagaggcctaaaaggaaaaccactaagcctcagcacctcaaggattttgtataaacaatccttgcaaagcgtgctgagctggcaagaccttattggccacagaaacatagactgtctgccatttatcttttttctgttatggtttattccttttctgttgttgaagattccactaaggccggtagtgccattcttgttagaaatctgttagaaccttttgtctctatcagtagctgcagtgcctataagaatgaatgatgtatcgtgatgaagcaagcagaaaataaaacttccctttcttagcttcttctctggaggttcctagacctcgaatgctaggaattactaaattgttcttgtttttatccctgatcatatcaccttgactttgatgttagttcttg

SEQ ID NO: 19009 - DNA, 861 bp, Glycine max
  Intron number 2 from transcript Glyma17g06750.1 (locus Gly ma17g06750) derived from phytozome v7.0 (chr-ID Gm17; pos 4814271 to 4815131)
acgtgcggccaggatcagatctcacaaacttccaagtaagttctctctcttcagtcattttaaccttttttcctccaacttggacctagcaaattactacacagtacacactactagaagcaaattccttggcatactaaaaagctcatcttaaacatgtatgttattggttttaagttttagctactccaacagattgtattgtataattgtccccgagttaagtttagtgctgttaaaaaaaatgaactgaactgatgtcgaattgaagtaaattgtgctaataaaactgaactgttttgaataaaaaaccaactggaactacttgatccgaactgaactacaacctacgagattaaaaaatgtgaaaaatttacttcaaaattagatgtttattcagaacaattcaaacaattcggatcagttttaaacactttggttccattcagttcatccaaactgttacgcagttcagtttagttcacccacagttctgtttggactttttacagttcaattcatctattttgcccacccttacttgagtttcttcatataaatttcttcatcaacaataagagaaaattataggtacaccaggtactgttatctataactttttgcaatatcaaacattgtgacaaaattatgaccctgactacaatttatatatatatacacacacacacacagtaatgtatgtctagagggtaagttttatgtatatggtcacttaagctaatggtaacagtttaatagtcattgggtatcaatgataacatatttagacagatgataaattaaagtatttttgtattgtgtacagctgccgcctgtgtttaatttcccaaaatctcaact

SEQ ID NO: 19010 - DNA, 773 bp, Glycine max
  Intron number 1 from transcript Glyma18g47360.1 (locus Gly ma18g47360) derived from phytozome v7.0 (chr-ID Gm18; pos 57027396 to 57028168)
ccatttgtgagatcaagtactccctcaaaagtgctggcaagttagtacccttttccattgatgtattgttggcttaattggttttgttttcatttttgtgtttgagattttgagtcagtcatctcaatcatgaaccactcatgcatcatgttgatttgcaatcgaatggatgtggtggttggattttgcagatctgtttgtattattaattttaatctgatttcgctgtgttgaatgtcctaaataatttaatgaaaatacttttcaaacaagtatttctgtgtcttaaaacagttaatcttttattatttgtgatgaaaataaaaattatttattattatttttcttttaattgtattttttatttgaatccaattaaggatgttgaatttataacaccatgttggtatttgagtttaatatactctcaaccgttgaaaaactaacataatatttgttataaaaaaaattgataaacttattctaaatcatggcaaatatattatttattttttaatattttcttttatatgattttttaaattgaataagaattataaatttataatagacattaaaagtgacaatacactcccttattcgcattgtaaaatctgcgtttctcatgtgatatatatatatatatatatatatatatatatatatatatatatttttttttttttttctttgcctaattatttacatttgtgttttggttggttggttattggtgaagggagatagcatcagggacaatacctgacccaggg

SEQ ID NO: 19011 - DNA, 802 bp, Glycine max
  Intron number 2 from transcript Glyma14g13420.1 (locus Gly ma14g13420) derived from phytozome v7.0 (chr-ID Gm14; pos 12818709 to 12819510)
ggtgaatcggcttgctagacttggtaagggataagggataccggagagtttgttgtgattagttgctttcttgatcatgtttgtatgagttgatttttcactcagatgtttatgagatttgctagaagctatggcaattgtgagaaaggaaattttataatgaactctttgctatctgaaaaaaattattttgagggatcaatgtgctacctgacctctagattctagaatgacacaaaccctcttcatcctctttcagaatttaagtaatacaagttctggactaggtgaatttgctgttgatttttgcatgtcaaccacaacctagcaatatgtagttatatatgtggccatgactgttaaactttgagtgttatgattcagattaatctttgtttttaaatttcctgtttttaggttctaattgtttattctgttggatataaataaagtgctgaatacttgtttttgggttgatgatgatgaccagtaacttcaaatatgaaaatcatatatttaatagaattcttcaccacatgcattaagtgacagttttgccagtaggtttaatgcttaatgccttcaacatttaaatctctggctgttttaccacgctgcaaattttcccatttaatatgcttgttatgtcataaatggcacatgcaaatttctcatgttcctgtactgcatcttgtgaaaaagaaaaagaaaacaactactaagcatttcgtggtttctaatggtaagttttgtttctcaatatgaaggttttctttgcaactgtgttcttccacccagccta

SEQ ID NO: 19012 - DNA, 827 bp, Glycine max
  Intron number 3 from transcript Glyma16g04340.1 (locus Gly ma16g04340) derived from phytozome v7.0 (chr-ID Gm16; pos 3678238 to 3679064)
atttttcctcacaatattggccttggagctaccaggtatattgataatttgatatcaataatgttttgtgtcgtaaggtgtgtgagatgagatggctgaaaaggaagagagcaattggaagagaagaaaaatgttaagagagaaaaagtgagaaatgataaaaaaaaaaaaaggcagagatagtagaagagaagggatgcagaatgaatataaaagaagggtcttgctaattagtgcccttaggacattggttaagaaactaaaaggagaaaatatttattgtagagaacataggagtataaaataagttatggacagcgtaatttgctcatcccagtaatgttttttgtccttttagtttcttaaccaatgttccaaggacactggttaacatttgtcataaaagatagtgaatgtgaaaaaataaaagtccattgactttagcagcattccatatgtcttagccatttgtttttaaaaattatattatgtagacctataatttgaagtttggaccatgatcatgaaccaattcaggcattaattaccacagattctaaagcaactcaggcatgcatagatttgtatcagacttgcacatcctagtctggaaactgaatgtaattattttatctggtttgtacccaaaaaatgctttatcctggtatgttattgtcctaaactgaatatatgctttatctggtttccctttgcacaaattatcctattgttattctcgatacatttactgttacaaagggtaatattggatattttcattttgctggttagggaccctgaattagttaagagaattggagctgcaa

SEQ ID NO: 19013 - DNA, 273 bp, Glycine max
  Intron number 1 from transcript Glyma18g13270.1 (locus Gly ma18g13270) derived from phytozome v7.0 (chr-ID Gm18; pos 12751816 to 12752088 reverse strand)
gtcaccttcagggtaatacaatcatggatttttcaccatttgcctctcttttatcattgccaccaatctaatttctttcaatttttcattgcaagatgggtttttctttttgatttttaactcaggaaatttaattttccttttattaattttgcttttctagttcatttttctgatgctgtgagtgtgaagagttcataatggatgataatgtttttttttggtatgttgaatcagtttcaccagtaccaggttgttggaagggctcttccc

SEQ ID NO: 19014 - DNA, 899 bp, Glycine max
  Intron number 1 from transcript Glyma18g10380.1 (locus Gly ma18g10380) derived from phytozome v7.0 (chr-ID Gm18; pos 9243707 to 9244605)
tggtgtttagtggaatttgcgtttggcttttttgggtctgtttggttttagtgattgtgatggaaagttggaattttttaggggtaacactcttcacttgacactacactgacactttcctttcctttgagtgaagggaattattgtaagtaataattttagcatataaataaaatcaacattgatatttttacacattcatgattagttatgcatgtgcacataatattaaccgttgatttttttcatcaacaactgaaatttcttactttattctgtaaggtaaattgttcactttagaaaagctgcatcccttcttgtaatatttagtagagggggtaattacattatcttcacacgatattacactgacactctccatcttttgttttttttggagtaacggtaaagtaagtaatttcagttgttaataaaaatctacaatgatattccaacatgttcatgatttgttgcgtacatagtatcaaagtttatttatttatttatttttcctttcaacaactgaaattgtttactttattctgtaaggtgattgctcactttagaggagttagatcctttcttttggacaccttgtgcacggttactaccaaaaacaaaaaacagggaagttgtgtgtaatttcttaaataaagagggccattctagggagaagttggtgtagtttttcattgataagcgtgtcagtctagcaagtgtaattatccctgcataaaatgggggaaacttgtttgttttcaattttggttgtgcaagtgaataatgacatggctatgatgggcaccttttattgttgccactggattgatttgaaatttgatgtttgacattataagatgttaattgttggagttttcaggtataaagtattgaaggac

SEQ ID NO: 19015 - DNA, 572 bp, Glycine max
  Intron number 2 from transcript Glyma20g28780.1 (locus Gly ma20g28780) derived from phytozome v7.0 (chr-ID Gm20; pos 37697021 to 37697592 reverse strand)
gcaaaaccctcgtctctcgtacgcagggtaccaaggtattgtttgtcgaatattcaacagagaattgggatttttcctttttttattgtgaatttattggttttgtgttgtgggtctgttgtatgggtcttcaaaatcagaaatttgttttgatatagcttcgacttgtgttctgatttttgaattgcatctattataaatgcttgctttcattttgctacgggactttgtttctattctgttttaatgcgtttcttggaatgactgatttttttggtttttgatgtactaagtgaacttagagaagctaaacagaatggtagctacctctttgaggtttgctgttctcgtcagatctctatgttatatgggaaaaaataatatttgttttgaagtgtgtgcttaatgcattttgtttcaatgggagaacgagggtttaagaatcttccaagttgcctattttcatgggttttatggtgtgtgatttggtgatatgaactttgtatgcttatttagactggttctttcaaatgacagattgcttctgaaggacttaaacatagagtgtttga

SEQ ID NO: 19016 - DNA, 531 bp, Glycine max
  Intron number 3 from transcript Glyma16g28350.4 (locus Gly ma16g28350) derived from phytozome v7.0 (chr-ID Gm16; pos 32328292 to 32328822 reverse strand)
aagaaggaaaaacgcatagaatctccccttgtaaggttggtacttagcacacatcatgtactttttcatttcacaaacatcattatacttggcctttcactaatttgtctgtgaaatttttaatttggtatatgttaaactccatcagttattaattcactcttcatagctttatttgttattcttcacataagaatgatactttagttcttaaatgccttctgcttttgaattgagttatgcccttttattaacttgtttaattttctgttaatgtacatggcatctatatttgaattcgcaacaatgtgtacaaatatccacatttactcctattatgttttgcatctgattatagctactcatataagtgtttaagacatgcctcttcctggctcatcataaaattaaactttatcaagatgatttatttgtgtttaacctaaaattattcccttcttgtttggataaaattgtatctgttattattttgactgtttctgcctttatgtgcatatacatacaggtata

SEQ ID NO: 19017 - DNA, 1000 bp, Glycine max
  Intron number 2 from transcript Glyma16g28350.4 (locus Gly ma16g28350) derived from phytozome v7.0 (chr-ID Gm16; pos 32328877 to 32329876 reverse strand)
gttggcatagcagaagtgcaatcagctctagtttcatatccttaatatatagtggtttctgtgcttggtgtgaagcactgggcttgactgcataatacgtataaccatgtgtgagcatagcatcaactgtgtttttgtgtgtgtggaaacatttatgtgcagtttctttgtagtattgccaagtgatttaaaatttttagagttgagattgagactagagattgggtctcttttaagtctcgtgttttgatggataccaccctgaacttatgtgcaatttgttgcttgttttatggttaggatgtgatttataaattccatggttgtgttttaactgcattctggacctaatcatatttgtggtttgagggagttacttttgggatgcttaattgcagtgttatcaatgtaatgggatgctgccctttccttctcaattagttttagtcttgttgtttctggtgacataaatgcttaggttagtatatactatttaatattcagattttttccccattaaactaattacatgagttgctgcaccggttttgattttgaagataaatttgaattttttgggaaagcatccagtgcaactggaatctgcaaggaattctgttttaaagaattatttttgctggtatcagtaaaactataataaaccagttcagaactgataaactagtttaaaactgtctctggtctagctctgaattggttttaagcagttagaaccaattctgagccggttttcacttgttaaactagttttaaaatggttactggttggttcagaattggttttgaaccattcaccaaaaaaaaaatcagtgtggcacaaaaatacttgttgcaattgcaaacctcttttttttttttctgaggtaatggaagattattaattcaactaggttttgggtgttgagttttcttcacaaagtttgtttcttttgtcaattggtttcctatacaccacacttctcttccaagcaacaggaac

SEQ ID NO: 19018 - DNA, 967 bp, Glycine max
  Intron number 1 from transcript Glyma18g04340.1 (locus Gly ma18g04340) derived from phytozome v7.0 (chr-ID Gm18; pos 3091863 to 3092829 reverse strand)
gtatcattctttttttctgttcttcccaccttccttttttttaacttgatcagcttgtttcttaactctgtttgcttatattggacttttgaatgctccaactttgttggttgtatgcgttcaatgtttttgactcacaaacaccacggaagacttgcttcagatgaaaaatatatgatgagttatgtacatccaaagcaaaatagaaagactttggatcaattgacaccagtttgttctagcttaataagtgatctttaattcgagtttttgttgtctataatggtcctataccagaattgcgaagatatgtgtgattattacccccaaaagaaataaaaatagaaacaccctgataacaaatgcaacagatttattggtttgattgaggaacttggtctaaaaatttattaaactaatgtctcccattacccataaatagctttcaattgagtttttctttcatctgcagtgtctcaaccgtgaacttggatcccctgcacatttaaaggaactaaggattcgaaaattgttaaattcagttcaaaaggataagcttatcatgcaataaaataaagttaacggatgtgatttataaagttcacaagagaactcgacgatcgtgatctctccaaccattgcttttaaaagttaaaagtagacaagaaagagtgagaaaaattgataatagagattattccctttttattttttgaagaaaaagcttttgtagtgtaagattgcaataatgttactcctcaacttcttttcttatgctttaattttttacaaaaagaaatgatgaagtgtaaaagagaagtgtatgaattaaactacagcaataacattactgagatgattagtagaaaaattgtttccctccctgagtatgtctatagagtgcttatgtatggcctgtagtgaatccatgtttctcttttgatatgggcaggtttgaattcaaagg

SEQ ID NO: 19019 - DNA, 685 bp, Glycine max
  Intron number 1 from transcript Glyma17g15320.1 (locus Gly ma17g15320) derived from phytozome v7.0 (chr-ID Gm17; pos 12034810 to 12035494 reverse strand)
gctcgcctcgtcgccagcgatccggttgattcctcattctctctctctctctctctcttcaatttcgttcattctgttgtgacgttttttgaaatgctcgagcttcgcgtctatgcagatttggaacagaaactaactgcattatatcaccatcacagttcttattttgttgcatattttaattgttttcttctttgctgtgtttgtcgcgctttgtacttgatgtgataactttggtgtggtgtaatgtactatatgtattggatctaactagcttttcagttttcaatgtcttgcaaatttgttcatcggagaagtaattatttattttgcttttgtttttgaaaagatcgatgcactaaattttaattgcgaagttaaaaaacaaaaaagagctagttttgtgaatcgtgaagagattgtttaaaaaattgggaaattgattttgctcgggaattgtttgtcgatgagaattggattgttatggctatgcagtttgagaattagatggttagttaatgtttcacggatgaacttaaaatccctatatgtgtagctgcctggtgcctgttcctggcttcctgcactttttcttttatggtagtttggtggtacatgatgattttgacttccggatgcctgaaatcttgattggttgtctgctgtctctaggcattcagaaagg

SEQ ID NO: 19020 - DNA, 902 bp, Glycine max
  Intron number 1 from transcript Glyma18g28890.1 (locus Gly ma18g28890) derived from phytozome v7.0 (chr-ID Gm18; pos 33237363 to 33238264)
gccattagaggctgtaccgaatttgaaccttagtggttttaaggatgtttctaaattctaactctaactaaagaaaaataacaatcgcataggtacgagggtttaattttttttttaaatattcagaaataatattctcatttcatatttcaaaaaaaatattttcatattaaagaaataatccgtgaatcaaacttattcaaccctacattttgtacaagatatatatgtttcaactagttgaaaaatctaagactactagaaaaaacgtgaatatcccttttaagtagtgtttttcattactttattatatgatatcatttaattatataaactaaatcatattattatattcttttagtgattcaaattaatataaaaaacataaaataaaatttaatttctataaatatttagaaaatatttaatttctataagttataaaaatatataatatttttaacacaagatttgctagaactttcaaaaaatagaacttaaatttgtattgtaaataataccatactcataatagcaataattaatatgattcaaattaaattttaagaaaaatctacactctatgttatgaggaaaatactataagataaaaataactattattatataaagaaaatttttaaaataaatattttctaaataaaataaaaacaaaaaatttacatgttgatcaaaattccaagtctttcaagagacatgagtttaaaagatattttagtcataaaatcatcttttagcaaagccattaaaaatagagtaaaatgtagcatttttttcttctttcacgagagtatttatttaacataataagagtgaatgaaagtgtaatgcttatatctttcacaggggtaaaaagaagaaaatttaaagtaagattataa

SEQ ID NO: 19021 - DNA, 583 bp, Glycine max
  Intron number 2 from transcript Glyma20g25840.1 (locus Gly ma20g25840) derived from phytozome v7.0 (chr-ID Gm20; pos 35487127 to 35487709 reverse strand)
caagttctgattgattactatcccatctggtaaagtccatttccatcatgattatttcaacgaggacattaatgaatatgaacatttgtacccttaaaaataattttctttttttgttggaatacacaaatcaaatttaaaaaactcaacttgcttgatacaattcttgtcataattgttgtactatttattgatggttttcctagaaattttctccatatgcaagaacttttgtcctgtactcttttggcagcagaaagctacaaaaatctacctcttctaatagagttacatgttgacaaagacatgcatagaatttcactaaaatattccgtatttagatccatcatgggccatagccatcccaaacacaataaacaaagtaagtaataagcacattatcatagtcagaataagttgtgatgggcataatcgtagcaaattttctgaagacttgtaacaattttaaggaaatgaaattttagtttcactagcatatagttaaatcatcatggcatgacaaaaccataataactagaaagaatttaacttgtgtcaggggagaggtggttgaaattgacac

SEQ ID NO: 19022 - DNA, 931 bp, Glycine max
  Intron number 1 from transcript Glyma20g24850.1 (locus Gly ma20g24850) derived from phytozome v7.0 (chr-ID Gm20; pos 34495141 to 34496071 reverse strand)
ctcacttcgaaatcgaagtgacgccgcaagacacggtttgtccctcgaaacttcttccgattggctttcgttccaaattttcttattttcttattttcttcatgtagcgaattggattgtctcggaagtttctcctccttccaagagccctgaatttgagtgttaattagggtttgtttggtgtttcgcttgttcgaattgttattgaattttgattacaatttggattaaattttaaatttggattttcaaattgatgactgatttggtgtggagcgaatgaatgaactatattattctcgtctgaacattctctggctagatagttttttcttttaaataaatttaatcttccgattcattgcttgtgggaactaatggcaaagtgtttgctgctgctcctctggattataattattagtgggaattctgttttcggaggtttgggattcttggcatatgatagtgaataagttccacattacactgtttggagcattacttcataggaatatcaaaccagtttgtgctataagaagaaatctgggctagatactagttctaaattctgattgctattcgtattcatgggaatttcaacaatttagtttatctgagtttatgtactgctacagttggatcaataaccatgttatcactggtttatcagaattggcactgtcttgacaacgaaatctgtactttttgtctttttgaaggttgcatgtctaagtgctttatatgacccaaattcggagtttttatttcaacaaatgtgtcaatgcttcatcctttaatcatgtggatttcgtgatttgtttctgtcatcctctggttttcctgaacttcaataatcagtctgttacatttgttgtcattgtggctattcttttcaggtttctgaagtgaaaaaaaatatagaaactgttca

SEQ ID NO: 19023 - DNA, 627 bp, Glycine max
  Intron number 2 from transcript Glyma18g02690.1 (locus Gly ma18g02690) derived from phytozome v7.0 (chr-ID Gm18; pos 1723520 to 1724146)
tgaccattcattggtataatatcaagctagcatcttaacttcattttagattatgaagaccctttgacttaattttacacatctgcttaccacgatttatagacatatagatattagtcttacgaaaaacatttttctcactttataattatactactcccttcactcctttttatattaaaatggaaagagtctctctctaccatgtgaaaaataatatataaataaaaacatatatactctaccatgtgaaaaataatatataaataaaaacatatatacactttttacttcttgacattctaattttttttacctttctttctttcccatgatatttatcatttattctctcctctattctcatttatctatctcccaaggtgtgtacattccattagaatgtgaaaatgaaaaacattcacaagcataatgtaaaaaaaataatattatttctcataaccctatatatatatacacgccacataatacgtacgaacgtaagtgatactatcatgaaagttcttgaatggctttcttttcagggtgaatacatatattaatggatagtggtttttgttggtcattgtttcttattattatgtccttaggcacggtgttaggcaa

SEQ ID NO: 19024 - DNA, 570 bp, Glycine max
  Intron number 3 from transcript Glyma20g31210.3 (locus Gly ma20g31210) derived from phytozome v7.0 (chr-ID Gm20; pos 39862593 to 39863162)
gctatcctgactttcctcaggtctgtgatcttctccaaatttcttccaagttctcattgatttagctccacctttatttcttttgtttattgtgtgggtggggtgtgggggtaggaaacctttagcagcagacactatatatgtaattatttatactttttctagttttgatcttgttgtctataaattgactcccccccggctccttgccaagtgggataagattattgtaattgttatttataaaatgccttccaatttgacagcaaaattttgctgcttatttagcagttttagtggtaatgattcctgttctgtcaaaatgtgtgaagagctgctgtacttgtgattttggatttgtgaaaaataatgctacatttgaatatctctactaaaaataaagaaactggaaggcagtttctcttctgtttgttgattgtaatattggtttcctctgtcagttttttcaaagctgctgatgtgattgtgtcatttctgaaagtcattgggtaatattttttctaaaatcgtgtaggttgttagtgaagaaacacaaagtactgttgtgga

SEQ ID NO: 19025 - DNA, 649 bp, Glycine max
  Intron number 1 from transcript Glyma17g04330.1 (locus Gly ma17g04330) derived from phytozome v7.0 (chr-ID Gm17; pos 2899644 to 2900292)
gttcatatctctctgttctcttctacctctcaaggtactcactcattcttttccctcgttcaatttcggatcttgcacttcttagttgctttgctttgctttttcctcaactgggttgatctaggatctctgtttccccaaaagcttttacacaaatatgaactgcactttgtttctttagttgctgtggaatacgcatttggctttcagttctagtcaaaatcatatcctaatgccctttcttttatgtagcttatgaataaaaatttcacttcccggggccggggattttggatttctcattaaactttgaccttgagctgactgagatggggttttagcgaattttgtaactgtacttgcttctatgtagtttttgtttatttgtttcttatatagccaattttgtttgagtatatggacatctatgttaacaggaattcgaactttgagcaggggaattagtccatcccttcccctaaatccaacatgcatgtgtgtgtggttaaaaaaaatggcacttttggtttaatttctgttttaccgttttctctggctgaatttttgcatgtgtattactctgtttgtgaatttcctctttggcactaattccattttgtgtgtgttgtgtagtttttgaagtatagag

SEQ ID NO: 19026 - DNA, 977 bp, Glycine max
  Intron number 4 from transcript Glyma17g23500.1 (locus Gly ma17g23500) derived from phytozome v7.0 (chr-ID Gm17; pos 23381927 to 23382903 reverse strand)
acagttatcctattgtaagtctatatgttactattattatatatcaatggtaaattatactcacctctcttgaaaaatacttgaattttactgtcctctctattttgaaatattacactcgtctctttggagagattaatatgtgctacactttagtctaatttgacatgaacgagcctgacagaagcctggtatcttattaataagaaatagggatttctcccttaaatatagagcctaacttacagagggactgcatctcccaatgccaaatgccccaattctttcataaattacaagatggcttctcttcaactcccctcttatttataggcaacatgccttatttcttccaccaacctaactaactaactactatctgataagagccttggcagaacaaccccataaaagctagctattttagttggagatcgcaaggccttataaaccccacactaaaaataccaagttttcactttctgtttgagaggataaataggagggagataagttttttgtgtggcacacacatgaaaaaaaatctcccccaccccccctcctcaatttggcatgataggagacaatctctctttttgattttatttttttagttccttaaaacttttttttaattagaataatttttttttcatacaatttatttctttccagtgtctcttttactaatccaaataaatagagataaatttgtctactttcctacttattactatctatccaaagtcccaacaactctattctcttttacttctatgttttctatttttttctcttatttctttctctttttcatttctaatccaaacaaagcattaggttaagggggtttaattttcccttttattgatttaatttgaggaaaggttttatttgaccatatgcctgtctaataattatatgaatgtctttgtttactaggtggctgaagctgttttgaaggactgcatattagt

SEQ ID NO: 19027 - DNA, 1008 bp, Glycine max
  Intron number 2 from transcript Glyma14g05340.2 (locus Gly ma14g05340) derived from phytozome v7.0 (chr-ID Gm14; pos 3777266 to 3778273 reverse strand)
aacacattatttgtactggaaatttgtgtattaaagtatgtccagcttattgaaataattatttctgattcagttttgactgttgccatgccgcataatgtaatcaattgtctctactttatagttttcaacttatattttatgaaagcacaagggacactggtatgaaggtccgattttttttatctcgccttttgtcttttgagaatgaaatgtttttgttttaaaaaaatctcgtagttgtaagatttgagttcattcagaaaggttatctctcattacaatgtgtgtactagaacatttagctgtaggacacatcagattttgttttgtcgcactcaccttgtctgtgttatgtcctgtgtcttcgtcattgtccatgcttcttagaaagaaaattggactattgaaaatttgtaaaactgggtaatcctgggcatgtgcgttgaaggtttgtaatcctgtggccagtggtgaaaccatgttaaagcctggtgggatgctccttaatatttgtgtagcatagggcaaattgaaagctgttcattgtctcccccacactgttttcttgttgatacaatgaaacatcatttttttctgtaaccaaaaacattttcttattcatataaaactggttttcaagtttgtttatatcagggaaaccatgttatttatgacagcagaatgggggtttaataatgatttatgttgttttactattctgccattggtagcatggttactgtcacattcttgtagcataacttctgttcatgcattattttccccctttgtattatccatctgcatctactaaaaataatttagtacatttgttatggttctatttttttatatgctatttattttattcacattaacttgcatgatatggaattagatatgtttttagtggttgaatgcataagctaattacctcatttatcttcaggaaattcgtgactacttaaagactctttgtccagacttgcatataactcgtggtga

SEQ ID NO: 19028 - DNA, 1002 bp, Glycine max
  Intron number 1 from transcript Glyma14g05340.2 (locus Gly ma14g05340) derived from phytozome v7.0 (chr-ID Gm14; pos 3778374 to 3779375 reverse strand)
tctcaccgatcaccaacgtgccttcttctcctcaggttctctctccccttgcttcaatcattctttctctttttctgtttcactgattgtttatattttatcttatgtgtttttatttttttaaattaaatttcgtatgttgagggtgtaacttgttgggactggattggattggttagggattttatgcgtttgtttgactccgatccatttttcgcgtttttcgatttccagacactcaacttaatgtgagatttctaggcttgttactcatgtttctattcgtttgattaatataattttgttgatcgtggagattcttcgtcaacctaatcccagaaaatggaataaaacaattaataataagtaataactgtatcaggaggcctaaagcttgttttgggtttccgataattgggtaattagtttgctcctcctcacttttggtggcaaaatgaacatgaagtgaattcaaattgagacagacatggctgctgtggtgacaaaggtggatttgtaattgtgaaatatggctttattatgttcatatggatttgtaattgtgaaatatggcttttggtggaaatttgtataaattggaggaaatgttcttaatttcgtttcttaagttcagcttcttgctgtacaagtaataggctattagacttgtcagaaatcacaaactgggttgttctttccaccatggcatgctgagggtcagattctttttttcttttcatgctacaaagctgtttatgagcaggaattctaagattaatagaatggtgtatgcatatagtatatgatttccattcccttttttatgttggcaaactaacttttatttgaatatctgattacagaacatggtactgtgtatatcctgttttatactttatgctggataaattgttttagctgttagttactgttcttttgtttatgggcaataacattgtttctgcaggttcccttagtcaactttcggttttttgattgttg

SEQ ID NO: 19029 - DNA, 1032 bp, Glycine max
  Intron number 3 from transcript Glyma16g21930.1 (locus Gly ma16g21930) derived from phytozome v7.0 (chr-ID Gm16; pos 25269968 to 25270999)
gaaggtttaatcttgggttgctgttctgctggtatacactccttctcagcactaataattaaatgcagcaaaccatacatgtaatctgcaattatgcataacttagtaaacacagacttttaattcattttttcaatggtaggtttgagaaattttattattttaaggctcctagtctctgtcaggtacggatggtgcacaaaaagagagacacgggtctaagtgagacccttttgtctttccttattctacggttcagcaaccggagagggaatggagaaataattatatggtccgggactatgtggtctgatcaattttcgcgtaactttttctttcatatattgaaagatgtgattatgtgttatgtggagattgataagaaccacatggtcctgtatcttgttttggaccatgtaataatttctcaagagaaagacacaaggtctaattgggactcatttgactttctctccttgctgcaccatcctgcaagtggagtggatccacatccaatcatcaagatgaaaatgctgcttcatagtccgtctttcttacattcttactcttggagctcatatgtatatatgaataatacagttaccctgagactgcagaatcaatcttgtcacctgcagatttctattgattcagaattttttgtcctctgcctaagtctaggctttctctgtacttttctgcagattctaaaatattaaaaagaaaaaaggattatcctgtgaaaccatgttaatgtcatgtaggagttcacatgagtttgatgccacccaaaattcagactgatcatagttatgtgcttattttacccacaaaaattgtacttgaactaagaaaaagaaacatcctgcaattttcgtgtcctgctgcctgcattacatttgaaatgtattgtttttaatagtgcttcaaatttttgcatcattagctgattgatgcatcttatggttgatctcatattttagattgatatgaacaggaaatttagggaacttgcttatagtcattattcca

SEQ ID NO: 19030 - DNA, 783 bp, Glycine max
  Intron number 1 from transcript Glyma17g33310.2 (locus Gly ma17g33310) derived from phytozome v7.0 (chr-ID Gm17; pos 37074491 to 37075273)
tacgcgctgctcaacctcggcattggaaacgacgcgtcggttttttttttccttcacttctcttcctcaatttttttttctgttagcgttttattttatttatttgttttttggatgaattattatgtgttgtcattttctattaacattgtttctttcttttttttttttttttggttaggttattcattaatgattgatacgtcgcttcgcctttgatcggttttttttttaatgtcgtttttgctcgtaatttctttaattgttaaaacgacgggttcattttggtagtttttgattttctgttttgcatttccagtttgcatgcatcgatattttttttatgtgatataaactgttttctggttaatttccagtactacacttggtgttgcctttcattgttttttgaattagttgaatatccttgactgtaactctctgatttttttaattttatttcttgattttttttaaaaataatttggataaatgttttttggttagatttcagtactacccatgatgttgtctttcattgtttgttgtaactctctttgattaacattaaaattttgatatttttttgtcgtatttttttaatgtcttgtgtgtatttttatatgtataagtacatgttttctgggtagttttcgcttttcagtactataaatgatgttgttgcctttctatgtgattaacaacaaaaatttgatttaatattaattttttgggtgtgtttttgcaggaacaaagcagctattgtgaaagttgggtctgttg

SEQ ID NO: 19031 - DNA, 294 bp, Glycine max
  Intron number 1 from transcript Glyma19g39150.1 (locus Gly ma19g39150) derived from phytozome v7.0 (chr-ID Gm19; pos 45920913 to 45921206)
gttctccctcctcaaacgacgtcgttttcggcaaggtaacctccatttccccattttcgcctcaaccaaaatctgacttattatcgtgtcttactgctaccacatgctgtagtgtagtagttctttgctttggaataattaacttaatttatctgaaatgtgccgtgcttctcttattatctatcacttgctgttattttgattaggattaggaggatgataacatgttatgttgcgctcctgtttgttctttttttttatttcaggagacatctatagaattggtggttattg

SEQ ID NO: 19032 - DNA, 666 bp, Glycine max
  Intron number 3 from transcript Glyma15g06680.2 (locus Gly ma15g06680) derived from phytozome v7.0 (chr-ID Gm15; pos 4713206 to 4713871)
ttgctctatctgctcttgttccgggcctaaagaaggtgccgaaattgttgttattgctctttttgtcattatgattctgagtatactgcttctgtcttccataaagctatatgttgaacacatctcggagtttctagacataaataaccagctaaatataagtttatctagacatttagttaactagttgtgtagtactgatttcttcttgctttatgttgtcgaaacatatatatttcatcttagccccgtaagaaactatggaagattctgatatcttcgtttggtattttttcatcaatttgattaggataagtatccgaaatcttatgaatgaaagacaacaaagctcttgaattaaacatgtaatattatatgctagtaatagtaatagtttttgttgctgttgaagttgttattaatttttgtccatcctgttgctctttgtttaaggtatttttgagtaaacttctaagtacttataggagatgtacaagttgattttagcttatgcgaaaagttcaatttattttatctttttatttttttcttctataagtatttaaggagaaaagtatctaaacagaaccttattaggttgtgtctctttcaacctgaaaccatttttgaagtctctcttttgttttttcaattccctactaatag

SEQ ID NO: 19033 - DNA, 1011 bp, Glycine max
  Intron number 1 from transcript Glyma20g28010.1 (locus Gly ma20g28010) derived from phytozome v7.0 (chr-ID Gm20; pos 36983744 to 36984754)
agttttggttccaaaacaagcgcacccaagtgaaggtaggtaaattaaggagaaaaagcctctgtaacgatagacaaatagcaccataagtttgtttgcttaaggataattaccttatatctgtctttcctgtttttctaattaagaaaaaattatttttatggcatatttattttttctttggtttttttccctgcaaagtttatttatttttatctcttttttcccatcatattcatttatcacacacactcacacatatatatattcaattaaaaaaacaatacttcaacaaacaaaaatattatttttaataaaatattaatttttaattagaaaatacttaacaaatgagaaggatctagattttctacagtcaatttttttaagcaatatatcatccggttaacagatcagaactgttccttaaaagatttagacaactcagattttgtgtttcatacataaaatatgcattagactatgagtcattcaatttttattcaaggagttcaatttaatcactgtctgatatgactggggaccaaattcatttcgggacagaaacaaaatttaaagaagaaaagcaaagaaattataaacatacacttgctttgtcttttatcttatttttacttttgttttttttaatcttttttttttgtgttttttcatcacgtcacctattacacatgtcactttttctctttaattcttttttctttgtatctctcttgtttcaattctaatatcctcattttgaagtgagcatttatcactgtagaaataatttcaatccatctctatctactcgtacgaaatcctaaatatatatgtcactagcactctaaccagtattaattattctcactaccattttttccacactttaaaaaaacaagattgaagtatactttatcttgtcttaaatatatcgtaatcgaatactacatgttgcgccattatgtaatgatattctttgatcatgtatacagacgcaacaagaacgat

SEQ ID NO: 19034 - DNA, 633 bp, Glycine max
  Intron number 1 from transcript Glyma20g00440.1 (locus Gly ma20g00440) derived from phytozome v7.0 (chr-ID Gm20; pos 230693 to 231325 reverse strand)
tctgcagaagattgcacctgaggcttctgaatgtatttgataactggttatggattttttttcttttaattacatgtagtgcatcactgtgttgtgttgatgaggtaagggattcatctgtcattaaaatgtttataccaagaattccctttgtataagaaattgatgcagaaaattagtatggtttgtaaataagttggcatttttgccatacaatgtccaattgctataatgacatttgattattcagatgctgatcagtataatcacttttatcttgcaaatacaaatgccgggactactttagaagtgaagtaggggggaaatgagggaaattaaatggataaagaattgcagcactcattcatgtctgattttcttacatccattttgtttgtcctcctaagcgtatactagggatgctacttagtgtctcttccaattctccatgtactttcctttggtcttctttctcaaagtgtccaaatcacaaattagaagaaggatttattttaaaccagaataatttgttcaaacaggaaagaattatctacaatagaacaagtacttactgcatttttctgtcttttttttacatgtattctaattgtttcatcctcatatttcaggtat

SEQ ID NO: 19035 - DNA, 973 bp, Glycine max
  Intron number 2 from transcript Glyma16g00870.2 (locus Gly ma16g00870) derived from phytozome v7.0 (chr-ID Gm16; pos 526644 to 527616 reverse strand)
gaagtcgtccaagaaaagatatcgcgtctcttgtatggatactgcttattgcttacatatattagtgcaacacttcgttttaaatgttaactttaccacctctgtaaaatgattccttttgttgacttttactttttctttctactgtccttattgttgcttgatgcaagatattgaaattattggaatttaagtagagaaggataaaagaaagatcacgctgaataatagaatataatattgatttgatgtatgatatgtaatgtgtttaggctttatataaagcagtatcccttattttggtttgactcaactttttagtgggtttctcttcttaaaaagagaagtcaggaaaaacacaattttagaaaaacttgtaaaaataagtggcactttttcctacaaaaccaaaactaaaaaaatacagcttctattaaggctaattggaggaacttcataaaagctgggtcactatactatactagctatagattcctcataatcaaattaggaaagaactcacgtaatatggaaaccattccgatgagattgttgaagatgttcttaactattctaagattcaacaataatattatgagatattttttagatattttaataccaaacaatcttgttcttttgtaagataaagaaagtaactcagtttgcaagttaaatgtatgtttttgtttgagttagatacataatacatagttttcttcatttttttaatgtcaaagcaaatgcttcttatcaatgttgtcttcaggcattgctttgtatgatagcatctgggaaatgtccctttggtgcttcatgtctttccagtggtgcctttctactcctgctgtgtctttccagaagtttcttgatagttcttgatatcattttgttattcattttagaaagtgcttttattttcttaaaatcagaaagcattatgtttttgtttcagaaattccatccaactgga

SEQ ID NO: 19036 - DNA, 571 bp, Glycine max
  Intron number 2 from transcript Glyma17g08180.1 (locus Gly ma17g08180) derived from phytozome v7.0 (chr-ID Gm17; pos 6059814 to 6060384 reverse strand)
actatcagcttattgatatctctgaagacggctttgtaagttttcttatacttccaacactgaagatgccatggaagtcaattatgttgtggtttgtaaaatgaaaaagagaaattaatatgcaactacattgctgaggataccatgttctgaaaactgagattatcttttgttgaaggtttctttagaagataaaattagtcttctggtatgcttctgtaacatggagaaagtcaaatatctcctattgtttctactttttttttatttctaacaaaagcctttacattcaattaataattgtttgttttgtttttctccttttgggtttataatctaagataagatggcattgggtgcacttccaacatgatatttttctgaagttgaataaatataacttggttaattttaaaaagtaaaacaatgccatgttatgactctaactggtagtgtaaaagcaagcatccagcaagaaaaaacagttagattattgcgatttttctgagagtagcaaagcattcttaaccaattggcatgggtttcttttaggtgagtctgttgactgata

SEQ ID NO: 19037 - DNA, 991 bp, Glycine max
  Intron number 2 from transcript Glyma14g07440.1 (locus Gly ma14g07440) derived from phytozome v7.0 (chr-ID Gm14; pos 5632987 to 5633977 reverse strand)
tttacatacccaaggattattattctgggtgagtcactcactcaattaatagtttatttgaggactaggttttattatagattaagagttttttttagggttaggttgtgtttttgttttcaaattgaaggcaggttgttgagtagttgattgtttcagggtgtcgaagcgctgttgggtgcagatgttagccttgattttgatttggtcatgtttagataaacttctcaataagcccatataggagaagaaaataagaagatgaaatgaaataagctcatgtataagtgaaaaatcagcttttggagaagctaaacgagagagcttctacttttaacttacaaagaagcttgtttctttttttctttatttttttctctcttggaagtgcttatgagaagtttatccaaatagacctaagtgttttattttttaaattttggattgttgaattgatcttggactggtttgtcagggggtatgtttgtttgaaattgttcaagttaaaacaagaccaagccccaagtttgaagaggagatctactcactcttttaacaaattggtccccaattttgttagtgttcatacttcaaaccaagagaaattatataattacacaacacaatgaatgcaagattggttggttggttcttggcccaattgaaggcgtcgtgaggaggtttttttagtttgtggttgtgggagctttgtgctcaagtgcttcttgtaagtacaacgagtgttgaagaatttttgaagtctcttctgtttagaatgtaagtaaaggaaaggcccagtcacaactaagctttggatttttagaggatttagtaaattcagcaaccactgctgtgtgcatgtttcaagtatgtaaagaaagcatattctacaatctgtctctgccaatgtttttctagcaatgttggaatgaagcttcacttttttccccatacagagaacctcgaggctttgcatttgtgcagtttgtgg

SEQ ID NO: 19038 - DNA, 964 bp, Glycine max
  Intron number 3 from transcript Glyma19g29990.3 (locus Gly ma19g29990) derived from phytozome v7.0 (chr-ID Gm19; pos 37698703 to 37699666 reverse strand)
ggctcagtggttaggtatgtgatgctgttttggtttacctctcatacaattaagcttgatagtatgagtagttgagtagtaggttgtttcactgatgttagcatactgcaatgcctgactgtttattcatcatgagtacgttcattaactgcagctaagctaatgatgttatatttgttttttcatattaggaagttgtcttctctctgttctagcttatgctgactggcatgttttttcctaactttctcagataaagccctgcatttaatcttaaacatgagtcttgtgataatagttcacacattctgtgctataatttgtcgacatgttttccattgctgttaattattgggtgaataaaattcaatacttttgggactcttcaagcaaagaaagtcaatgatctttcttttccttgaggtctttcatttaaactcgcaactaaaagaattaatcttttgtctgtgaactttgcataattgaacatttctggtggaacttgtaagtattagttgactgaactgatggagaaaggttattgataatagggtagtaattgagtttgggggctcaatcacatggtgattggtgaggtacatgaggtttgaaatctaaggcatagagtagagatatagaagggaagcattgcttggaatatgtagtttttgaaaatacatgaacttactaaatgtgggactgtttatatttttcatttctaagagccttgtttatgatccttggaaaaaatttgatcctgtactttaaatagttaacatctgggtttcatgtatgttttgtctcattgtctgtatcttttcctcattgccgactggtgtacaaataaggaggcaagacctgcagcatgtcatgattttaatggtgattttctgacctttagccttatttaattcatattttttttgcagcaaatttggtattaggatctggatctattcttggg

SEQ ID NO: 19039 - DNA, 699 bp, Glycine max
  Intron number 1 from transcript Glyma19g29990.3 (locus Gly ma19g29990) derived from phytozome v7.0 (chr-ID Gm19; pos 37699988 to 37700686 reverse strand)
aagaacgcgtttcagctggccacactgttgatttggtaacacaccacaatttatttattttattttattttatttattcttatcaggcacgaaaagcaatagtaatggaattaagcatcctttgttgttgttgttgttgttggtttttttttttttttttttttttttttttttttttttataaatcctaatttttaactattttgcatttccattcaaagattcctttccctctttgaaattcaggtgtttttaagagcccccaattctgttgattcgcaattcaaattattcgtctcgctctcaatagagaagaaaaaaaaaactgcgtttttcaaatcggtaaattggtcagtgttagggtttatgcaattcttatttttaattgatttatgtgcgttctgtgttattgaagtttagttctatcagtttatgttgttttatttcagtaatctgattctgatgcctcttgtatgtggggttaggggaattaccctttctatggtgttaatcaacatctgaaacggagtgggttgttgaaaagttagagtcctagcttgtgtgatgcatggaaattgaaattaatggatttttgattgagaacattgatgcataatgtttttgaacttgatggttctgtgctctaagaaatggtcctttattgacttgtaggctgacacatagtaaagaatcatatta

SEQ ID NO: 19040 - DNA, 461 bp, Glycine max
  Intron number 4 from transcript Glyma16g16060.1 (locus Gly ma16g16060) derived from phytozome v7.0 (chr-ID Gm16; pos 17149400 to 17149860 reverse strand)
accctgcagctcttcacgctgtatcctagcacacattatctgtgccttattagtttcattaccatatgaggctatttatgcaatatagggagagattcttaaagaattcaattttgaaagataaacaagtagcctgctgctatgtgctgattgatatttgaattattttgtgttgttatacatttaattattgagaattgaatccggattcttgtcttttagcagcttttgcacccaaccatacatatagttcaggagatctttgtactttatgagtaactcagttttatatgtttaatcattttttttctgttatggatttgcttttctatttcatgcatttcttcagggaagcctagaattttgtcatgcttcctttgataacaataaaccttgaatttccatgttttgctacatcttcaaattgttttccatgacttccctagaaatcacgaattggg

SEQ ID NO: 19041 - DNA, 880 bp, Glycine max
  Intron number 2 from transcript Glyma18g03120.1 (locus Gly ma18g03120) derived from phytozome v7.0 (chr-ID Gm18; pos 2060248 to 2061127)
gcaaagtagcaggtatgtttcattccttataaagttcaattttttatttatttttttaattttggttccatccagagaatttcatatttcgtgtgtcagttttttgcatctgttgttggatcgtggcaattatttatagacaatgatttggaatgtgataacaaattaagttaaagcagggatttttagatgcgttaaatcgacacatcagtcactggtttcctttaggaattacacgtaacaaattgtattgtgcatcagaagaggtgccatgatattctcaagtatggtgcgaggaaaataagggttatttgattctgaaatggaattgcacatgatggcaccatcttgcatattgtgatggatgattgggttggatttgtgtcattttgagagtgattgaacgcacattgcaacttgtgtgtttatactagatagcatttctcaacatatatatcatggaattggaaagtggaaagtaaaggatgcctgggtagttctatttcatggcagtctaaaatgcaaacttttgcgacccattagagttgctctatatcagtctgtctgacccagttgccatctgaatgatttagtgacacttggtcataacatgttttccttcaagattctgttaaagggaattaacttatggtaatagttatttttacttccttcttgattgcatgtgtcttatttcatcatatcaactattggtgaagaaggcagcgtagaattttaatcccgattttttctgccttagttgtcatgttcttggttcataatgagttaatactgaatattattacatcattatgcaatgatccttagtggatcactcaaaacacttaaaatgttgcttcttgcttcaggtcgcatagtc

SEQ ID NO: 19042 - DNA, 216 bp, Glycine max
  Intron number 2 from transcript Glyma15g40810.1 (locus Gly ma15g40810) derived from phytozome v7.0 (chr-ID Gm15; pos 47793887 to 47794102)
caacgcgtaagtctcgttcattcatttgtagtttcatacatctaatcaaggttttaaatagtttcttgtgtgaaccaattgtggttgcggataggtaaaaaaatcttgatgtggaagaccgtgttttgaaaccttactgcatgtaattttgtttcattttgactcttcataatcttctgattctgattgttttttgtttatttttaatctgttcag

SEQ ID NO: 19043 - DNA, 995 bp, Glycine max
  Intron number 3 from transcript Glyma18g05880.1 (locus Gly ma18g05880) derived from phytozome v7.0 (chr-ID Gm18; pos 4525998 to 4526992)
tcacgtaaatttctctctactgtgttttcataattaattaattaatttttttctgtctgagttcttagaatttcgcattgctccatggaagttaaaaattggtatttatttatatatatattctttgattatttaatttcctattaaaacaatgaaaattgaaggttggcttgtcaatgtaattagttgatgtaagactgatttggactcagttgacattgatttgggaatcttatgtttgacgttgatattttgatagtagcttgtttccataacttagcgcacgtttagattcacacacacacactacatgatcattcaattgtataaagttggttgctgcggaaaaatcctgccttggtattttgtaatgggatatgatttaaatgactgagaggtggaaaatgattgatttctgaatagacaaagagtttgacacttcagttgcattgaactacgaaattggggactattgtaggaaaatatgattgatgtggtgccattagaggttgcatgatcagtctggagaatttcaaaactgcaatattgttgcaattgctggttgttttttaaaatcatccatcattaagaactttcttttttttctgtaaattattttaaatctactgtcattaacgtgattcatcgtaatttctgaatatgtagagacaccgtgaagaatcttctttcctttaaagtgtatattgttttgatatagatctttcgatctatatctagaactgctgtgggatggtaataaaatagctatgtatgcttgttgaatgtttgagcttttaaaatggcaatgaaaggttgcaaatgtgagagtgagggttatgccagacagccagagacaatactatctagttttattcactaatttgcagtacctgtaatttagtagttgggatggatttttttttaattgttattctcaacaagtattgttgttttgtatagaatactggctaatcggcaatctgccgcacgttcaa

SEQ ID NO: 19044 - DNA, 968 bp, Glycine max
  Intron number 2 from transcript Glyma20g00220.1 (locus Gly ma20g00220) derived from phytozome v7.0 (chr-ID Gm20; pos 39543 to 40510 reverse strand)
cagcatcagagtttcattgcaggcaaagtaatttttccactacgcatattatttgatctcttcactctttgcttcttttctatgcttgaacctgctaccactgcaatttaatatattttactggactttttgctttgcatttttatttactctgcaaatgttcatttctatttcttgatggaagagaaataacactctttagaaatttactctattaattaatgcaacactcttaacttagatgattgaatccctgttgctgataggacttatagaaccctaatcctaatgtgatacttacatgaatgcaaaaccttggtcaaaactagacttcagcctctatataaatgtttatagaaagaaagtttcggggagagaattcagtggttcaacaaaattgtgtttggagtacttaatactttgtctctgaaccaacttgaccaatcttaataaatggacactctctcaaactgatccctaccaatgtttccttctttgtgctcatgtgcctctaatgccctgctgcccttgcctttttcatcctaaagtacaccttttgatgagtgggaggttaattcttatcctcacactcaattaaccttatttttacacttcattaatagattagtaagtttttttttttttttttaaaattaagatctactcacctaactgttaaatgtaaattttctgtattctatttgggaattcttgcaatatgataaattgcaaaaatatgatgcctctattttattcttaattgttatcttattacaactcttggcctaaagagacgacttttttcaactgaagtaggtcagtaggtggctgactgaatccatgtggagggcttcttgttgggggttgtgttattatacagtcaacaaatgaatgatacttgtgtaacatatactgtgtcttggatacagatctaaccattgctatcatctgccttcaggttgtcgttg

SEQ ID NO: 19045 - DNA, 453 bp, Glycine max
  Intron number 2 from transcript Glyma18g00590.1 (locus Gly ma18g00590) derived from phytozome v7.0 (chr-ID Gm18; pos 238785 to 239237 reverse strand)
gcagaccgacgatttctcatcgtacctgcactcgtgtgtgtaatccttaccttccctcaactcaactatataaatctaaaaggacatttcattcatacttttataaagtttatcagaaagagagtatatataatcacacgggttaatatatcaatatgaaaccgaaaaacttggaaacatcaaagaatgtgtcaaaagaataataatgttacaacaagctggccaaaatcttacttgtgcccctgtcatggtgattttttttctgtcttctccattttcccctaacaaatatatgttttgcccactttgtgtattgcaagaactctaaagaaagatatctatcaactttattctagttacttttttttttctttcctccatttttaaattacctaatacagtctacttttttattttattttattttatcatatatcagatcaggtcgagtat

SEQ ID NO: 19046 - DNA, 534 bp, Glycine max
  Intron number 1 from transcript Glyma17g17470.2 (locus Gly ma17g17470) derived from phytozome v7.0 (chr-ID Gm17; pos 14327162 to 14327695)
taaaattttatctccataaggtaagattcaatctgacgttgaggtgatatggtaatctgatagctcacatgtatatgaactgctaatttttcagtatgtacttttaagttttaaccattcaagtgaccagaggttggttaaatttcttacattttactatttgttcttgtagctggacccttgaattgcgaataacagtctgtcaaaaaatcttatctcatacagctttacctattttactaccctgaaaaattcacttggtaaatataatagatgattggtttgttaaatacatccatgcttgcatgttatgtatttctttttttgagtttagagaaataatgtaattttttcaaaaggcttgtaaggaagctggcaaacaaaagaaaagtgattatttcctcaaaataatctcatccaaacaagcaagtctaattgtggactttataatcttctctacttttgatcatgacgttaagctgctcaatatattatgcagtttcctcttttgtcaaaaagtgcgggctttcaaaa

SEQ ID NO: 19047 - DNA, 721 bp, Glycine max
  Intron number 1 from transcript Glyma16g07400.1 (locus Gly ma16g07400) derived from phytozome v7.0 (chr-ID Gm16; pos 6644716 to 6645436 reverse strand)
gtacgttatgatagtgcaaagctagagaggaggtactcaagaatttctgatcattatagttccatagatcaggtaacagcttaatttttttagtattttatttagcatttaagtgatgtttggtttgagaaattattgtatgatccaaaatacgtgtgtccgtgatctggactaattttcaagtagttgaggttttcaatttcaattacgagaaagagttaataaaactgacggagattaattgaaaccacgaggaaaatagcttattttaataagtttcttgttgaaacttaagctctttttatttaagttttctgggcaaatttatggaataagatttcgtgtgataaaaaaattgttgaataaatgcttagttaagctgtttactcaaatgtaccctaagatgatttttctttttgtctatcttgacatttaggaaggttatatttttaaaataaaaaagcaaaaatgactacacttgtgcaatgtttgtcatattgaatttgtagaaggatgtgtatgtgtggtacttctttctcagatgtagatgcattatgaactagatttcagattcagagtgtagatggcagcatgttcatcttgctttgatatgtgcttgctgaactatgctaaattgaattcgctgaagagaaagataaatgcttcgtgtctttagttatttgcaatgagtttagaactacacaatttgcatatagccatt

SEQ ID NO: 19048 - DNA, 536 bp, Glycine max
  Intron number 5 from transcript Glyma14g22940.1 (locus Gly ma14g22940) derived from phytozome v7.0 (chr-ID Gm14; pos 27257792 to 27258327 reverse strand)
tggtgccttcagaggctttaggtgaaatacttcaggtttgtctgcgactttgttctatccttttgctgcttaaacagtcatttatttctttaacttactagtattattattattgggaaggtattgtgtctatgttttaccttgtcaaagaagctgttgtcaactattaagttaacatttaacagatatctttatactatctgatatttagacatgtttctgtgcacttcttggcttaacaaatttgattcttgcataaaagatctttatcatgttgcttgatgctatccgctaatagtgcacaagaaaactaattctcattggggcattctctgattgagttagtcaggaattaatgtgtttaatcccatttatggatttgttcctaccttggttacagaaaccatttcataatttaatattttattagtgtatataccaaaaaacttggttaaaatttccattaacttattcaaagttcttgtttttccttactcaaaggtgtccttgggttgtgtcactccatttgcagtggt

SEQ ID NO: 19049 - DNA, 896 bp, Glycine max
  Intron number 2 from transcript Glyma19g36990.2 (locus Gly ma19g36990) derived from phytozome v7.0 (chr-ID Gm19; pos 44250450 to 44251345)
ggttacagttctttgttggcggcaactggaagtgtgtaagtatctttccctctaagtgttttttttattattattattgttgttgaaaatcaaaatgctatgtttatttctggtgattgagtagttgagttgtttttttatttttattttgacattagaatcttatagtagcacaccgttgaaatgtaaattacacgccataactctctgcgtatgttttggtttagaataaatagcctttgtaatcacgtttccgtgtaagtattaaacttgcccctttctctaactttatatagctgtagcagcatagagctcgttctgaactctttgtttaagctttctattcatttttatttctagcacaagtgtccttcacccctttcttttcatctgccataccttttttatatctgagaaatctactactctgcatagagcactaaaggatcacttttttttttccctttatcactatgtggagcagggaaaatttagatgatagacgttattctttctcatcgtgtcttaaatttttttaagaaacaaaggttcatgtcacaaaatatctgtgtctgtaaaaaaaaattccttcatagtttattattatcccgtctacctattcgtttgtgtaaaataatgaaattattgtctcttgcagtcttacctggttttttgaaacatgcatttccattttgctttctttggtagtttttgttctttttgatttatgtgctcaacaacttatataagtacaaatgtagcatttgaaattttgattgtcatggcataatcaattactagttcagttgactctgcaatatatctctatttggtttttattacctttgctgttatctctagaacggaacaaaagactccatcagtaagcttgttgc

SEQ ID NO: 19050 - DNA, 819 bp, Glycine max
  Intron number 2 from transcript Glyma20g08860.1 (locus Gly ma20g08860) derived from phytozome v7.0 (chr-ID Gm20; pos 12583509 to 12584327)
catcgcctccttattcaacttttataataagagtaatttatgatctttacaaactccatttttttatatatattttgaacacaccattaatgtcactcatttttaatttttgttcttcttatcatatcatatcacttattatatatagttatatatttttttctctctcactaagtgttgaatagaatttaattaatttgcaaagaagttaatgagagaatttttataaattaattttaatttatatgagaaacttagtttattttctaatattttcttttcatacatgtgtttattgataagtttatccaaattagggtgtgaaaaaaatttgaaccagatgcattaactgattgaaaactgaactaagccactttgaaaaaatctaactgttttgaagaaaaaaccaaactgatcctctttataaaaatggtccgatttaaaagtggttcaagtcgtttttgttgaattctttacaaaaatcgattcatatataggtataaaatgaataattgaacttaacctcaccaaacataaataaacgcaagccattttaaaaaattaaaccaacccactatacaaaataaacgttggattaaccaaaccatttttataaaatggttcataaatgaatcggtttggatttaaataaaataaaattgcccggtactgatccaaacaggagattcttaaaataagtgaactcctctctttctctctctatatatatagttttataagatactaagatacttacatgtgtatatcttttcacttttggctcctcctctattttggatctgttcatgttcacaggat

SEQ ID NO: 19051 - DNA, 972 bp, Glycine max
  Intron number 2 from transcript Glyma15g31250.2 (locus Gly ma15g31250) derived from phytozome v7.0 (chr-ID Gm15; pos 34448576 to 34449547 reverse strand)
taggaatcaaatctgagaaccattctcattgcccggtaatgttgtgccccctttttaacctggtttcaataaattcagcaatttacatatttctttgtttgttgattcagtattgctttggaaagtgaaatcccttttatgtcaccatgtcttgattggaacgattatctaaaaatcgaatagactccaatttggacttttgttagtgtttaattgattcagccaattaattgtgtcaatttgtggattggattttacgtgaatttcatttcattcaaaaatttgccttaccttcttgtatgccctgtggttccattgaagcaacacctatggattcttgtaatggattttgttgtgtgaatatcttcactgataccctttagatggtgccaacagaaatttctgattaatttccttatgggctggactgtactttttacataatcccccttcctgttggcatattaacgttttggaatttagatcatgctgaacaagtctaaagatgttgccacatgtgatgtagtagggttttttctgttgacatttgtcttttgatgtacaaaatctgctttgactccttgtggttactgttttcttcaatctatgcaatatctcctttgttcatgagtcatatccttgtttttccagttgttaggatatttagcatttaaccagcatggagttgatttgtcaaaggaactcccattgttatgcacttaagttagtaggattttaggaactttgttgctttaccaaactggctgtcatggtttcattgcatgcttaatgcttttagtgcctgtgcagttgagtgtgaaatcaaccttgatcgttttttgcaattttattgtgtcacactctttttatatttggataggaatgtctgtcattcatgtagtctttttccttctcttttgaactttgacttagttgtttattcttttgttttgtgtagtgtagtctgtaatc

SEQ ID NO: 19052 - DNA, 638 bp, Glycine max
  Intron number 1 from transcript Glyma20g11270.2 (locus Gly ma20g11270) derived from phytozome v7.0 (chr-ID Gm20; pos 15905571 to 15906208)
ccaagttgaagagggaggcggctggggatcaaagtgtgagtcttatcccctgtttggcttattccttttttgaataaaaaacgtttttttacactatttcttgttattctcacgttgatttgaattcttctagtctcaactagattctgattaaattgaaagttgaatcagcggaaaatattgaactgaaattatgaaattttatttataaattgtattgcaacatttacctgcaaaaacctctttatatcctaaacctatttaacccaaaatcaaggttttaaattatgggagatataaggttggttcagtggttggggagaggtagtggattcgaatccctcccacttacatttctaacaaaactaacaaattaacattttctgataattaaaaaaaagaacaaggttttaaattgtggtggtggttgcagttttgtcacggataaacctcaaaaaccttgacgtagcaggagcagccaaaatcgtgatcatggactgttttttgaaatctcttttaatgtaattgaaccaaattcaaactcccacttggacaatcatgtttatgctagtgtttgtttggaaaattttatttgtgttttctgatttccttaggttgttatagcggaggagcaagag

SEQ ID NO: 19053 - DNA, 850 bp, Glycine max
  Intron number 1 from transcript Glyma19g44470.1 (locus Gly ma19g44470) derived from phytozome v7.0 (chr-ID Gm19; pos 49887859 to 49888708 reverse strand)
tgatcaagttcgttgtttctttgattaccaaacaggtaaatatatatgttaccagattttcgatctgttttttttcttcttcatgaagttaactccttaactttagtcagaaacttgataattcaaaccgtttaaaggactaaaagaaacaagacttgttagtgttctccatggagctaccattattagttggaccgtaagcagtagtaagcttgcttgaaacaagaatttgttagaaaaattaaagtcaacgttttgatatcagtagccattgtcataccatttatttttttttgtattttaatgtctgttgactttaactgttagtttgcttgttgggacttaattaatggaaaaaaaattaatgaaaaacattctgaagtcaggagcttgcgttgcgtgcacattgaaaattataatataaggcagatagttaagtggttttctctatcgtattttttattttgattcattgatccttcaaaattacgtggtgattatatattctttaaaaaatttagtcagcaaataaatctctcaagacccaaaatatgtttctattaattcttcaaaaattgttactaaattagcacttaaaatattatatttggttaacaaaggattagagcatgacacataactgttaatttggtgttatccaaagaattaaatttgataacagaatctttaacagacggtgatgttttagattttcatagaactgattagattattaatttttttttaaagactaaaatagtgtgggatgtaattgaaatatagaaggccaacctactatagcatttactcattatcagtagtactcttgaattttcagctcctccacaac

SEQ ID NO: 19054 - DNA, 640 bp, Glycine max
  Intron number 1 from transcript Glyma16g25270.1 (locus Gly ma16g25270) derived from phytozome v7.0 (chr-ID Gm16; pos 29209149 to 29209788)
acaaaatttcccggtaatctctctcactctcacatatgttaatctatgaagttctctcttgtcgtgttcaatgttcgacacgcatccgtattagtattcgacaccaacacaacacttatactacgttttatattttgtagttgttggtgtttcatagatattaattactaatcacttttttattaaatagtatcttgaatggaaaaagaagaaaaagctaccagtatttactaatgatttgacgttgaatgaatatttctttttaaaggaaattaaattattagtatgaggaatgtaaatttagtgattatgtcaataatgtgatatatcatagtgacacatgttatggttaatatattaattgttatgtattttgtttgatatttcaaaagttaatatataaaaataatattaaaggagtttaatttagatggatgaggaatgtatttgattgttgtaaacatctcattcctatcttaattagattctcacggataaaaaagaaaaaaaattatccaaagtatcatacattgctttcttgttcatataacctcatgagttatgtttttcacccattagtttccaattgtttttgcatgttatagtggcttggggttcggaacggaagaaccagtggcac

SEQ ID NO: 19055 - DNA, 535 bp, Glycine max
  Intron number 1 from transcript Glyma18g00410.1 (locus Gly ma18g00410) derived from phytozome v7.0 (chr-ID Gm18; pos 133538 to 134072 reverse strand)
attctgtttggatttcttggattacaggtactcatcttcattgctactttcagttcacaaatgaatgcagtcatcacttttcttgtttttttgcttcagtcgttcacgtgaacttgtaacttttatataattcctgccatcacggtatgcagacaaaatgccttttgctctttgttttatcctaatgcaattcatgttacttagcattgaatgaaaacccgtgttgctacaggaagcacactcactctctaggtgcttatagttttttttcttttatcttcattccacagttcacaaaaccaaacatactcaaagcagccaaaaatacacaatttgaggcagttgaattattttttgttccaaggcacattctgatttgtgcttgtgcttctaccataactcttaagtggctataagtttacttttactatataactagctaactagtgcttgtctataaaacgcatgtggcatgaagtacgtatcacacattgttgcaggggaattccaaattggggacaatatagaaccctta

SEQ ID NO: 19056 - DNA, 713 bp, Glycine max
  Intron number 1 from transcript Glyma18g15050.1 (locus Gly ma18g15050) derived from phytozome v7.0 (chr-ID Gm18; pos 15080832 to 15081544 reverse strand)
cttctcctggaagattcccgctctacgatccagtcctttcttctctctctctcttttcagatgttgactttatctctcttttttgtttaactccaggacatttcgtcatcttcattttgatttggggtaggggttttctcatttcttgctttaaaatgcgtcagtttcgtttttttacaatgtggatttcatggtaataagctccctgcttagtgcttagttcaattgccctgtcgttttttctgaactgagttcgtatgtgtacttctaattgtgattacactatcatgaatacatacagataataatttatttaattacttaagaataaagattaaagttcttgacatgatagtgtatgggtatatgaattttattcatgccatagttaaacgatttttgctaccgacgtcttacaagagacttgcgaggttatatgcaatataatgtattggtgttaaattgcggtgatgcagctgcaattgcgatacggtcacggtgagttaaaaaaacctttacattctagtggtctagcggcaattgcaaccagttcttaaaaccattatttttcatcttagttgttatggtgtttttcttttttcatatttttctgtgaccctcagcatgcagcaccatactgttatgtttaaattgcttatcaagatgatatcatattgttaaataactacctatcctgttctgcatcacaggca

SEQ ID NO: 19057 - DNA, 769 bp, Glycine max
  Intron number 1 from transcript Glyma14g25340.1 (locus Gly ma14g25340) derived from phytozome v7.0 (chr-ID Gm14; pos 30731547 to 30732315)
aaggaaatccatatcttggctgcataggtactttaatttattcccccaaatattaattacccatcttcttcacataactcttcattcacaatttgacagacatttgcaatcatataccactgtttgatgtttatatacagttttttgttggattagttggtgagaagtattcactaatttttttaatgactaatattcactaattaactcattatctttatttaagtcttttcttctaattcacagttttattcaatatacttttttgtaattttcccgtttttgtagttttattgattagttattttccaatttttttctaatatctcccgtactatgtatttggctaaagatggtgaggagtagacaaaagatttaacatttgacatggtattattggaaggttacaattattaattactgacttcgaaatttagtgaagtaggaaaaaattacttcagaactaatcacgaatattttgattcttaaattcttatttattatttttaatataagatctaattaacctaatatactaaatatattatgaatacataaggatctaaaacttataaaatttatataaacaaaaaaacaaaaaataggctactatttttggaccatatcaatttaagattagacttaggtttcagttagctccataactacatctcttttattgactttgaaaatatagaacctaccacaacaaaatttcaatttagtgagttctccgttgtttctatttgggatttgcagacattgacga

SEQ ID NO: 19058 - DNA, 695 bp, Glycine max
  Intron number 1 from transcript Glyma15g07260.1 (locus Gly ma15g07260) derived from phytozome v7.0 (chr-ID Gm15; pos 5091730 to 5092424)
taagcttgatccttccaacaagctctacttcccttgtatgcttccctcttcttccaattcttcttttatccagtcttctatctttcactgtactactttgcatctgctgggatatgattatatatgatccaattttatttgtggcttttacttgtttcgtttcatgttggagaataattctgagtatagatttgattttggatcaattttgacatgtttgattatacatggggaagagttcataattgattttggatccagaactggttctgagttaaagcaattttgagttacttttgtgttcgatccaaaattttgcattgaattttacttctaacttgcatccaaatataaattatatcacttcaaaattaattttaaccattatgcattgtcaatgtaatttttttatttatttacattatcaactaatcaaaaacatgattttttagataattattttaaaagtcaacaagcttattatatatagaatttataattggatcacattgtaaaattgttttactaatagactattttctctttttgtttttggataatgataagcaccttcttttagtaactatataccctcctaatgcatccttgtattaattactagtaatctataagaaaaattattatataaatgcatatgattgcttgaaagtctcatcctttcttgtcatgtgtag

SEQ ID NO: 19059 - DNA, 824 bp, Glycine max
  Intron number 3 from transcript Glyma16g28240.1 (locus Gly ma16g28240) derived from phytozome v7.0 (chr-ID Gm16; pos 32209432 to 32210255)
agtcttaaaggtccactttgggaagaagtttcaaggtatatataataaatataatttatatagttcaatttcaatacatctaacctctcaattcatctcttttcattttgtttgccttttggagtcacttcaatattctatttctttttgtgtgtttgaagaaagtatatataaaaacttcaagctagctccttcaagatcgtgcatgtagatctatgaattggttctcaatttccagttcaggcaattaaaaatcatttcccttcatgtatattcgagccgttaagagctatttttttttaatcacatgcaccatcaacttttgaaatcagcgaatcttattcttccagtctgagctaaataaatattcaatatgaacttcgtattaattaactgaaatttttatatctctgtgtcagctgtttataaacaaggcatatataaaatgaacccgtgtttgaaatgaatcattctgagagttttcagttttctattgatttgctcttaatttttaagcctctcttctttgttgcctttcattgtttcctttgtttagtttttttttgtcttatttgttaactttttaggtatgaaccatctcttcttatgttgttaattcagtacatcaaggaaagtacatttcgttgtctatgattttacccttgctcatgggaaaacatagttcattttttttataattttttttctcaactctttttctattggatatatataatgttaaaaaaatttgatctttctctaattttatgcataaatctacgcacgcaggaaattggcagaacttggatatcaaagaagcgcaa

SEQ ID NO: 19060 - DNA, 553 bp, Glycine max
  Intron number 3 from transcript Glyma16g01680.2 (locus Gly ma16g01680) derived from phytozome v7.0 (chr-ID Gm16; pos 1257351 to 1257903)
ggctcgtccttcaccgagtgatattcttgagtggcgtaagtttgtttcacactgttccatttcttatattaatttatgttaagctctaatgttcagcaagaagaaaaagattatgttgaacctttgatatatcatgtgtttggccctgtttgcataagtttctctataagcacttaaagaaaaaagaaaataagatggggaaatgaaataagtttctcccataaactaaaaacagcttatgcataagttaaaattagctttttggataagctgtctttagtttatgagagaagcttatttcatttttccttcttctcttagtgtttatagagaagtttatccaagcaggacctttatcaatgttgtagaacctgtaaccaacagatcacaaggcagcagcctttgcttcaagcctcaccctccttaatatcattatactgtcagcaagaaaggaaaatgttgtagcacgatgtcagcaattttattttaagttgtttgttatggaatggttgatacttgatactgaccttattctatgttaatgtctcagatt

SEQ ID NO: 19061 - DNA, 759 bp, Glycine max
  Intron number 2 from transcript Glyma19g35980.3 (locus Gly ma19g35980) derived from phytozome v7.0 (chr-ID Gm19; pos 43403719 to 43404477)
gaaggtaattccctttttcttatcactccatcaacgaacatggtcttagttattgctatgtgcaatctcagcattttctcaaagttgtaatttgcatgcaactcctattttttttttttttgtatcttttccttctttgttctattatatgttggttgaatgattttatttgtacgagtcccgcctttcttaatgagatccgacaggattttttcgtaatcaaattgtatcattttatcgccaagttacaaatttgtgccaattttgcgtggggaactaattgtcaggtctccttgattcgtctttattttttgaattggcaagagagctaaattagtgacgagtagaaatggggtgtccttcacgagtttcactgaagctcgggggataatatacaggtttttcccaagctttgttttgtgcttggatttattcgtgatgttatgtctgggaactgtaccccctaggcgtcatgttttaacttgaatggtcttattgaaggtttctggggttttggctaaacccggaggtctgtggtgggaggtttgccatggtggaattggtcgaaattcctgtcgggtgttgactttggcgattctttctgtaatgttattgcttgtttttatggaaatggcatcaatcacaaactggtgtttagttcgtctttgaggggcgaagtatcatacagttccaagtagttaagtaaatgatggccttactgtttctggaaaccatttccgcagagttcgaggtgtggat

SEQ ID NO: 19062 - DNA, 831 bp, Glycine max
  Intron number 1 from transcript Glyma19g02370.1 (locus Gly ma19g02370) derived from phytozome v7.0 (chr-ID Gm19; pos 2089218 to 2090048)
gaacttcttctctgcttcttccgtgagtcgcgcgttatgatttgaattttgtactttcaatcttttttgtggatggggttgttttcatttttgtgttttgctttctgggatcagctcaaaattttcatttttttttttttgtggggggtttgatttttctttgcagttttttataatttggggaacttttaggtttcttggatccgaagttttggttgataattccggtttcactgtttctgacttttagggttccgttttagtttttctggaatctcgatgcttttcttttcctgcataattcttaggaaaacaaaaggagaatgtagaatttctaattcaaatgagtatttgtgaaaagttgaaaactgagtttttgttcttggattggtaattgagtgttattttgctgctgtttcgttagtcttttgttttggttttttattccctttcaaaagtcagatatattggataaactcaattataaagttttactgtagtgttgtaataaattcaatattttatttggtatgaaatttcttgttgagtatttctttatcttatatttaggtttttggctatgagtcttttgttcttgttgacttcttaccaactgtttcgttgtaattacatttatgaagttttgaaactgctagtccattcctggtggcacagttttcagattttactatatcactttattggtaaaggggtgatgtgaattcttgaagttaaaactgattcgtgggaggaaaatacaaattttcaccaagtttaatctagtttgatgagtagtgactagtgagtggtattctattgcaggattgaaag

SEQ ID NO: 19063 - DNA, 475 bp, Glycine max
  Intron number 2 from transcript Glyma19g02370.1 (locus Gly ma19g02370) derived from phytozome v7.0 (chr-ID Gm19; pos 2090222 to 2090696)
tgagacgaaaaccaaggtatctgctgcttcctttcttccacctaccttgtttcatggaatcatggtgttattatttagtttgtctttctctcacctgaaatcatattgtttttgttaataggatttctagttactttatttactaaaaaaaatgttctgtcctacttaacagagaattttattgtaatattactggttattattggtctatgtaatggataaatttttctgtaaattgagattgaatttttaatgctcttcttatttccctactccattcctatttcccctgatcaatttatttctctggatttatggttcaggaaatttactctttgcttctaatatttcatttttactaagatttagaaaagacatcgtaaaatattctcattctacttatcgatgatatttcctatgtgatttattatgatctcttattagagtttgactctgtcattaacttgtcaggaca

SEQ ID NO: 19064 - DNA, 323 bp, Glycine max
  Intron number 2 from transcript Glyma19g29580.1 (locus Gly ma19g29580) derived from phytozome v7.0 (chr-ID Gm19; pos 37222552 to 37222874)
cctccagctaaagcttattctgcttaaagtttgttctcaaataaacactcctcttatatgcttctagagttttcacttgcatttcttctagttcctttgccatatcctaaccttcaaagatttcccctgtacctatgatactgcaatgaataaattgagaatatagaagagaattttaaagtggtttatgtttatttgaaaatgaatctaaattactgtgatttgagttcagagaatttcccttcatattttatgttttttttttccttttcttttgataaaagaataaataattaagacaacctaacttgtatgtttttagt

SEQ ID NO: 19065 - DNA, 996 bp, Glycine max
  Intron number 1 from transcript Glyma15g40290.1 (locus Gly ma15g40290) derived from phytozome v7.0 (chr-ID Gm15; pos 47248042 to 47249037 reverse strand)
aagccagattctgggtggactacattgacaaaaaggtacgtgttttaatgtgttgtcatgtgattaacttctactactttttctttcttttacttctcaactttggaaggttcatttcaaaatttgaaggctaattctggattataacatgttgggttccatttccaaatattgtttttcgccgtaattattgtgcatgtttgatttccagtttgaaatgttaccacatgcgttccaatgcacatctaaaggataaaaacaaaatgaatggaaaaaataatgaggcatcttgatttgttagaaaaattacttatgccgtaattttacaattgcaaaccaaatgtgctcatagtttctatatcatataagccatttcttacccttgtcaatgtttccaaacaggttggtaatgtgtttccttaagggttttcaaattagattttaggtaaactcagttttataaatttaagtgaaattaagtataaactttgacacaaggtgatttatatatgaatatttttatttgaaaatttacatatgaaattaattaaaagttacatattgttttcgctcttagtcagaagtgcttttatattatacaattagtcaaatgttttgaagaaacaacttagtttaattgaaattaaacaattctttttattcaagcaattatggttggatactaaccatacagcccaacacaaaattaatttctttctccgtgatacatattttaatgtataatttgtagttaaggttaaattgaacagtattttcaattatattcaacagttcaaatttaatttttctaaaataattttgctgcactttaaatcaaatgccctgtttctaacgagaatatttgatttttttggtgtatatatatatatatatatatattggtggaggagttttagattaatttttatattttatatgataatttttgtttttattatcaataataatagtttgtggtattcaacatatagattt

SEQ ID NO: 19066 - DNA, 987 bp, Glycine max
  Intron number 4 from transcript Glyma20g15970.1 (locus Gly ma20g15970) derived from phytozome v7.0 (chr-ID Gm20; pos 21900701 to 21901687)
tgcttctcgtgcatttgtctctggaaatttcacaggtaaatgagttgtgtgggttggttaaggttgatgtttcttaatgcgagtgaatattaattcagaattggggacagttaaccacaatcgatgagaactgcattttcactatcaactatcgagagatgagagaatatgtagtgttctatatgtggggccgcgaaagtgttgatttcacttaaatattgttccaaaattacttattttgagtaatttctaatattcactttgtttcatttggttctgattttggaaagcctgctcagatatgtgtttcatgattttgcaattttatacgtttcaaatttatttgatgtggtactcaaaattgattacatatgtctcatcttctcaatgctttaaattgcagttgaaatggtttgatattagaataaacaaatactagataactaaatggacgaatacatttgtttgtagaatatggccattcttgaattttaatcagagttctcaattttttatttgattgtggacttcctcctcttcatcattccagaaaacttgccaaatgatcatcctttggttatgtttgtatcatatcttgtatttatattttgccaaccgtagaggtcatctacttctattcaccataaaaatggtcaactacttttgtttttgatagtaaagtgaatttttattgattaacaagaagatctttagataaataagtagatggaatgctttaaaatttgagagggagaaaatagaagagaaagggttagcagaaacaaatggcattgtaattccttttaaaatttaaaattgaaaggcctggatagaccttgtgttgaacaaatggtattgcattaagagtcttatatcacagtagtaccaaatatttttctttattgctgtttttagaaagaaaaaaaaatctttaatcattctagcatgtcttttaactctttatatttcatttttctcttgcaggag

SEQ ID NO: 19067 - DNA, 481 bp, Glycine max
  Intron number 1 from transcript Glyma17g01800.1 (locus Gly ma17g01800) derived from phytozome v7.0 (chr-ID Gm17; pos 1113615 to 1114095 reverse strand)
attatctctatacctgtttcgcacacaccggcgaggtattctctttttaaagattcattctttccatttaatctttcatagactactatcgcatgattttagaattattaaaatagatcgaaatcgaattactcttcaatttttgcgagggtatttgtccaatcaagaaacttatgtggacgagaaaggagattcatactgttttctttttcttttgaagatgtaaatttgagattttttttatgcagatttgtgttctctgttgtcaaactcttgttttatgattatgagattttgctaattgcataatctgggagaatttgattgatttaggtggattgttatttatatgataaattgtcaaaatattgctaatatttaaaagtgtgctggtgattcaaggtcattctgaatattagttactgatgaatgttgatttcctgcagctggcttcagttaaagtcattaggaacaaacaaac

SEQ ID NO: 19068 - DNA, 837 bp, Glycine max
  Intron number 1 from transcript Glyma15g35440.1 (locus Gly ma15g35440) derived from phytozome v7.0 (chr-ID Gm15; pos 40082598 to 40083434)
gtggtgttgtgtgctggtaatcattaatttaactttatttgagtgttttttcacttcaggaaaagtgtttttttttttttcactcctgccattttaggacttttggggtatttgtgactgccatgtttgctaatgctacttttctaacttctaaccaaatgtttgctaatgctacttttctaacttctaaccaaatgtttactttccttaacttgtgctatcaatggcctttgtcactagagtaatctgaattatttgcttgcccttatgtgcttttgcatcagacaaacacagttgcctgcaaggttgctaaactagctaaaagttcagctaggttggctataaaatttggtgcctaacttcagaactgaaactgaatataaagctgattgttaccttaacagctaatcttttaagctaaaactgaaaaactagtccttttcaagttatacacttccaaactttggttcatcctttttcttttcttggaggaaatcagaaaaagttcacaccttagagttgactggttgaattcatatgattatttcatttttctctttagtgtcagaaattgagtaccttagctcaaaaagcagtgctttctatccgtaagagagtgcgggaggattgaagttaaatgctgaattgttttatgggattttcaattttaatattttgaaaggaaaatcagtgtctgattctatgttttaccactagtaattttttttatttttctttgtctttctcaatcggttgaaactgttttgccccttctgatctaaatttgttttgtcctgtacagcgctgcctatatcgtctctctttccattcctttat

SEQ ID NO: 19069 - DNA, 968 bp, Glycine max
  Intron number 2 from transcript Glyma15g35440.1 (locus Gly ma15g35440) derived from phytozome v7.0 (chr-ID Gm15; pos 40083409 to 40084376)
ctatatcgtctctctttccattcctttatttcgtgagtttaactatctactggggtttatgttgttacctttttgcttgatgtatactctgattttgtgacattgttggaagttgtctgaacatatttatttattttgagtgcttcaagttcaatatcagtttttatttatatttataattaaagttcacactcctgtcaatcctcaaattatctctgttttggcatttcaaaaatgactttaagtgtcaattcactgtgtaatttaatcatcatttttatatataatacaaataattggttccataatgtaggtttactgtacttggataaacttatactgtaaatcttttcctggtagttggactaactaaaagtagttgtgtttcttggaatgtccatggccatgaataacttacagaaggaagggatgtatttgagctattttgaaggagagactctgaatttagaaaggatttgttattgatggaatgtttgtcttattgcaaaatagcaattctttttttggccaatgtgaatgaacttcactcctccaatgagactactcaaacacattgaaattttggcatgcacacaactaattagtggtctcaagaactgaataatgttcaatctaaataatttaaaaacctgagacattaatcagaggattttcttcaatataccaatcccccttcatttttttcctcaacaataatataccattctctgttccctttcaacagtataaatttgctgagactgatagttacaacaagttggatttgccaaagtcaatttttaatgtcttattgctctctgttttgctttttcatttgttatgaaataatcaagaaatcaaatctttgttagtatttaactttatgctgatgcacataatatgtatcctcaataatgcaacatttattttcaggtaagggattttaatattgcgaaaacagaagctga

SEQ ID NO: 19070 - DNA, 507 bp, Glycine max
  Intron number 2 from transcript Glyma20g29070.1 (locus Gly ma20g29070) derived from phytozome v7.0 (chr-ID Gm20; pos 38013314 to 38013820)
tttatatattcagggtatctaaggataaggatgatgaaaaaaattcatactagataggatttggaaaattaattagataatagtggataaaataaatgaattttttctctgccaacttataagactatgtttgtgtgtttattttttttggtgaatagattatgtttgttttaaagtttggaaagtacttttgcaaaaatgaagaaagaagaaattgttgctgtgaaagtaaaagtactttaaaattttcttaactataatccaaacatgcactaatctggctaacaagatatccattttgcggatacccactagtctgtagtataatattattttgatgttttcaatttgaatattatgattggggaagaatatgtttttaattttccctgttaaaaacttccacatatggttgcatttgttttagcctcaaaatgtcttcatctgtggcagggttggtttcaccatagtgtcttgtcagattttctaggagatagtatattcacg

SEQ ID NO: 19071 - DNA, 820 bp, Glycine max
  Intron number 1 from transcript Glyma19g30090.1 (locus Gly ma19g30090) derived from phytozome v7.0 (chr-ID Gm19; pos 37764599 to 37765418 reverse strand)
acagtttccataagactaggtcctgactttattatgttctggcactcgcacttgtagtccatgtgaagcagtgagaactcttgaaaatatagaaaccagaaatatggtcctcaaatgtgtacactgtgtaacatatggaggatccacttttgatgaggtagaaactgcagataattaaatttaaattagtaaagctaggacctcgattttgaataccttaattcaactgaacataaaggctatgaatcttccttattattgcgggatgtaggtaattgtatttcagctggaactgcgggaccacatcattttttaacttctaacttaaaggaaattcacattagataagctgatatgttaaatctgaccatataatgaaaggggtattatttgtcaagcttacctgtcaaaaaaggaagtggtgttttaattttttttttaaataaaattgagagggattctcagctattaaagtggaatcttcaagaaggagcctctcaaggatggatgtgttatgtatgattgttttgatctctcttcaccaaatggtagtggttgtgggcttccacattgagttataagtgaatatgccatatttttcatttttctatattgaatttctactgtcagtttatgcattacttttttatctctgaaattttagatcatgttagaattatctctatcttttcaactcaaactaatgaatgcctgattttactatcttcatataaacatgaactataattatagtaatattaatgaacttggatacttgtttacaggtagatccccagaccaggaatcagtagggtctggc

SEQ ID NO: 19072 - DNA, 588 bp, Glycine max
  Intron number 1 from transcript Glyma14g37480.1 (locus Gly ma14g37480) derived from phytozome v7.0 (chr-ID Gm14; pos 46760778 to 46761365)
cagctggggataatcttcgcggagaacacaaactggtaagaaaaaaaatattttttattttaaaaaaaaaactttttaagggtttttggtttgggatcgagtgttttttattttaggatgtttttaggaagtggggttgtggaaagtttgaaactttcgttctgaatttaatctgggtctgatttgattgaattgatgaagaatttgaatggttgagttttttctagatggtttggtcaattttatgaatttatagctatatgaggtatggaaagttgtaatttatttactcagttttgtatgatctactattggtaaagagaataagaaaataaagcctttaatttatgtctgagtttaggagttctttgagtgattagtgtgtgtaaattgactaggttacttaaacgttggattgaatagttaaagctgagaaattagggaaagatcatcatgagtgtgattttaattgaggattgattaatatgctcttgaggctcatgcttaatgagctaaatggatgcgagtggaatgaaatctaacgaggaggaaatttgttttgattgcaggctttttttggcatatttg

SEQ ID NO: 19073 - DNA, 775 bp, Glycine max
  Intron number 3 from transcript Glyma15g02230.1 (locus Gly ma15g02230) derived from phytozome v7.0 (chr-ID Gm15; pos 1489741 to 1490515)
tgtgtttgtgtcagtccttggattgggggtacttgagaattgatcgaacaagttttggtgatttgttatggatgaagcataattattttttatgtcacatgagagagatctcaaatgggtgcggcttggttaatttatgtggtaaaaatatttggttccgtttcagctttatatccttggaatgctgtttagtttgcgtgatttatgcatctttgtgtatcttgcagctatttgttcatttattgtcttctgatttgattataaacaagcaaattatactgatgcagccttgtttatttttttgacagattgaatcacttattatgtgattaattactataaatatcacgagttctgaatataatatgtccatctttctaaatttgttacaccggtggcatatagactttcggaatccagtcatatctctctctttaaaatatatatatatatatatatatatatatatatatatatatatatatatatatatatatatatattttgggggttgcatggaaatttgtcgttaatcatcattcccttcgcctttcccttctgaaccattgtgttgtgtttgtttgttgctgttgtgttggttgaatgcgatgcccttgacggtgcaattctattttttaaatggagaaagagaaaaagacgatacttttaatgttatacactgttgcgagatccccactattatgcgtattcttacttcttagttgcttcttgctttttagtggttatacactgttgcgagatccccacttcaaca

SEQ ID NO: 19074 - DNA, 716 bp, Glycine max
  Intron number 1 from transcript Glyma15g03650.1 (locus Gly ma15g03650) derived from phytozome v7.0 (chr-ID Gm15; pos 2560458 to 2561173)
tctggtgtgtctaccatgttttgttattttcagaacttcaatttagttccatgttttttctgtaatatgtttcgtgattttctcttgctagtctattcagattattttttttggtgggtttatgatttgtgaatgctattttttatttatttataatagccttgctccttgaatttatattggattttgtctatcgtgacttagtttgattgagtttattgatttttgggattaattctgtagaaatttcctattgtttgtgagttttcaatctgatattgggtgtcaagttgttaacttctgtgcaataattttactaaggaatctgtctcttggtaagtgtatgcgagatcattgagcactttaatgttttgttataatggaaataatgtctggtttcggagggaaaagaaacgagaatgaaattttgattagtgattatcaattagttaatcctggtacaaacaatacagaaggttgcattttttattgcgatttgaatatttcggtgatcatttaggatattcaagttcagttttatgtctctggtgactcaccataataataataataataacccctcaaagattaggctaacttggtcaaatctttttaagttcaaaatttgtactttttaaaccaatctaagagatttcgttgtttaattctcctgactaatggtgacacgttaaactgcagttcggatatagaagttg

SEQ ID NO: 19075 - DNA, 830 bp, Glycine max
  Intron number 1 from transcript Glyma14g12220.1 (locus Gly ma14g12220) derived from phytozome v7.0 (chr-ID Gm14; pos 10963001 to 10963830)
gcagaagattcacctgtcagtggagggggcctcaggtttttgttgtatccatctttctgtagatctagaattggttgaatatgctgaagaattggtgtgtttattttaatggctacaattattgttggttaatggtattcttactaggttgttgttttgtgttgaatgattttgtctgttatgtcatttttttttaaatcggcaaatgctagtttgttacaattttagttttgttagcagacccattaaactcgtgacctttcccctcttttcttctcccttaaccattcaacccaccttatatctcccgattttgtctgttatgttatttccgttttcttgtattactccacgggtgcttcgcagatttacgatctcaattctgttttatgtggttgttgttagtatgagttttgtggtcaagggtcaagaagcatatttattggattttttttatggtatttaaaaattatttgaagaggggccttggttgatgtagaactggtcaatctttgttttgttgaacatcatagtcaagttctgctttttttggtttattattggttgttgttttatttgcttctctttatcgtattgtctataaattatattggataatgttataatttatactcttactgctaccagaatgaatgaattagcagaattctttctactatgatgatgattgaacatagatggtgatttatgtgtgcagaattcaaagattatagatgattttaattggtttttctttatatttctgggtttttagttgattgaatgatatgattttgacatgtttgttatgatttgtaactgcagtcaga

SEQ ID NO: 19076 - DNA, 926 bp, Glycine max
  Intron number 5 from transcript Glyma17g20610.4 (locus Gly ma17g20610) derived from phytozome v7.0 (chr-ID Gm17; pos 19753115 to 19754040)
cgattttgggtactccaaggtaaggttttatttttctcacttgatcttcatgttgtgagtttcatgcttccatattattttactgggacttgtttaggttgagtaatacttaactccaattactttctgctttctttgtgtgcgtttcatttttcttcagtcatttctgttcttcagatttagactgatgatggaattgagtagttccttatgttactaaaagattgtttcagtaatttgggatattggaagagagacatttctacatgactgttgatggtgaatttttataatctaaaatctttagtaagcttgttcttcattgtggattcccatgtgctagagtttggattgtcaaaattatgagcctttaagcttgtcatatatagctttgataaaaaaaaaagactaaagctccatcaattatcaagccattgatgaggtaatccatttgataggaggcaaatttgaatttctgatgaactctgacatagtgatattttccttttctgttcctaaatttaagcctgcttctgcttttgtctatgtttcccatataaatgcataaataaagaaaatgctacagtgtttcctgatgttcttgagaaaattgataagctggccattccagctttttggtattgttagttgttaagctaacttgtattgtatctctgccttgtgttctagagtactttggaattaaaattcgtgttgagttccttgaattgctgtcaaccttttatttcactgattcaatttccttttacttgaacatttccatttttcaatacaatagtggatttacaactatagatgatcattgtttcctgttgtttttgttttgagtttttttttccccaaatctgattgatggtgtgatttgcccagtcttcagtgcttcattcacaaccaaagtcaactgt

SEQ ID NO: 19077 - DNA, 1023 bp, Glycine max
  Intron number 2 from transcript Glyma18g47080.1 (locus Gly ma18g47080) derived from phytozome v7.0 (chr-ID Gm18; pos 56729900 to 56730922 reverse strand)
tctaatcatcatctaacgattacaattaatagaatgtgtgaatacgagaattcttatctagccggaggaaattccgatctaaaatttattaaataaaaaaatatgattttcaaaattatagtttttaaattatttggattatgatcaattttgacagaaaatcaaaaagcttgaagcacattttgtctttaatgtattattttgattttatattgatgagtgaaactaatatttgcttacttaaaatgggtttcggtttatgttattgttttgagcagtctcccagaagaaattgttgtagggttgaaccgtcaaaggaagaaggaactatggtgattgacgtgggagaatgcaggaaaaacgaatttgctcataaatagaggcatggggagtagcccaactttctgctgataattctcatgttctttattatttactcttatttgttgttctttaatgattttgagaatatcatagcgaaaggtttagagtatgaaaaagacaagtgttacaagtgtaaattggtgttttttgggtgggaggtcttgtgattatgtaaaatactataaattaattacattggacttttaagatgcatgtgatgaaagaatactgatatgatatggtaaatgagttttttaaatacatattacgtaaaatatacatgaacaaactatttgtgagttttaatattgaaagtaatatgatgtcggttaactaaatcaagcagcaaaacaaaatttcttactgcaaccccatgtatttgacggcaacatctttacgtggctgtttccttgcaaggtgtactgtaacattccaattttttcgtaaataaatttaaaaagttttttagtaaaaaataaataaataaataaatatagagcaaataatagggtgagtaccttaggtataaatagttatgttaatctttttggcctcattttcttttttctccttttcctctcaaaatcctttcttttttccgcagcccaccaaatcagtctcagaaaaacaacgatctca

SEQ ID NO: 19078 - DNA, 256 bp, Glycine max
  Intron number 1 from transcript Glyma20g37930.1 (locus Gly ma20g37930) derived from phytozome v7.0 (chr-ID Gm20; pos 45675483 to 45675738 reverse strand)
tgggcttattcatgtaaaaataaacttcctctttttcaatacctagtgcactaagtgaaacaaggcatttcaatgtgtcatactcaatgcatacatcgacatcaagtgtgaattttttctattttgatttgtattgattttcatactgtatcagttgcagtggaattattttgttgtcattatttcttcctctctctcatttcccccatttatccttgcagtttggaattagatctgctgttttaaatcctgagtt

SEQ ID NO: 19079 - DNA, 869 bp, Glycine max
  Intron number 1 from transcript Glyma20g02570.1 (locus Gly ma20g02570) derived from phytozome v7.0 (chr-ID Gm20; pos 2140773 to 2141641)
gaccaagctttggtcgcgttacgatccttccaccggtaggacctaatttttcgttttaagaaaataaataattaaaaagcacgttgaaaaagctgaaactgatgctatttagttgcgcgtgttgctaatttaacggtttttgctgttcgttgatgctgtcaattttctgaagatgttttcggattgaagatgaaataaaattgatatcgaattaagtcaaattgcaggtttatatgctaaaaataaaaatacgaattgttcgttaattttttttccttgctttgcaacaacttattatataattgcagtaggacagggagcaaaccttgtgattgaacaagtgcgtgtttggataaatagcttaattaagagtttatcagtgaaaacttatttcttttgataagcttcaccgatcaccatggaagttattaactgcatgtttggtttaatgtttatcagtatttgatgcacgtggagcaaaagctacagatagtagtttctgagttttagttttacgctgttgacatgaaactgccacttgactcaaggatttgatatgcaaacaaacaccagctaagtaaaagagcttataggagtcactttctaaagcttaactaaataccttcaatttttaacttatgtgcttatatgataagtccaaaccagttctgaagaagctattctaaatggccccaaattgtattcttgtgtctttaatgctcgtgctgtccaagcttctgttcctggcctgtttattttcttcactgaaataatttgtgttctgtgctgacgagtgtgctgtaagaaactgactttggcgatcttaacctacctaataatctattttgaaaacaggaaaaaccgagtcc

SEQ ID NO: 19080 - DNA, 490 bp, Glycine max
  Intron number 1 from transcript Glyma19g32600.1 (locus Gly ma19g32600) derived from phytozome v7.0 (chr-ID Gm19; pos 40353800 to 40354289)
tggccatttctctaacaacatctcctttcagaacggtaacctacttgttctgtattcagttcttgttgaataatttctttttccccactttttaggtcattttaatgtttccttggatgtccgtacattttttttagcaccgcatggaaaatagttgttgatttcaattgcagttgcatgttctgacttttgaaattagacagcaatgatatgttgaaagtggttagatattaaaatcatttatgattagcagcccaagattcgattttggaagagttgaataaatctttgatgttaacaaaaagctgtggtgcttgtacggaaacaatattgggaatttaatcttacctttattcatactttttagtaacttgagttcgagaatttataagcttttgacaaacgcccttatatatattatgttgtaaagaagaaagtcttgattctcagttgttactgagaagtaatttatgtttgtaaattgcagggt

SEQ ID NO: 19081 - DNA, 604 bp, Glycine max
  Intron number 3 from transcript Glyma18g51220.1 (locus Gly ma18g51220) derived from phytozome v7.0 (chr-ID Gm18; pos 60154178 to 60154781 reverse strand)
taggattcatttttccagctgccatcactcttaggtgagtttaatcactgttttttattcttccaggattctgattattgttggatcttgacatagcaaactgaaaatgctattatgccctgtttggataaacttttctataaacacttataggagaagaaattaagaaggtaaaatgaattgcacttcccccgttagttaaaattaacttatgtacttcagcttttagagaatttagatgaggagactcctataaaagttaaatgtagaagttgattttaactcatgaaagaaactcaactcgttttactttcttctctttttatttttttgtaattttttatagagaaatttatccaaacaatgccttactactggaatctatagtaccatgtaaagaaattatgtggacttgttaaagcataacaaaagcatggggaaaatgatctttgaaatttgagatgtttattttccacttaagcagttgtgctgtatacttcaatttttgtgtttatgcttttgctgatacctaattgatgtgttttcaaccatcattttaaccatgcagggaccgctacaacattgcaactaaatcagacaagat

SEQ ID NO: 19082 - DNA, 628 bp, Glycine max
  Intron number 3 from transcript Glyma19g28770.2 (locus Gly ma19g28770) derived from phytozome v7.0 (chr-ID Gm19; pos 36356574 to 36357201 reverse strand)
aaaggaggaatcagataccatcctgaggttaacactaaaatttttcaatttattaactactcaaggttttacctatggttgtgatagagacatgcattcttttgattgaagaagtagtccagcactgagttgctatcagatttttgtcaattaattgtttggtttctttcccttaattttttgtataactttgaaataaaaacaaatccatatctttaataaaagcttaatttttttttagtccctcgagttagggagtttggttttttagtcctctaaataaaaatttgtattttttaatccctcaaattaaaaaaaaaaatgttctttttagttacctctgacagaatttgagagactaaagactgtaaatttttaattaaggaaagggactaaaaaaatgtttttcaaatttaagggactaaaaaatttaaatttttatttgtgagactaaaaagtcaatgaccgaaaacataattaagcctttaataaaagataaaatctatggttcaaattacaactttcgtttgaactagtccctggaactgtttatatttgtatatggtgtgtacttttgattctcagttctcactatgaatcatttaatggaataaataggttgaccctg

SEQ ID NO: 19083 - DNA, 378 bp, Glycine max
  Intron number 2 from transcript Glyma15g19190.1 (locus Gly ma15g19190) derived from phytozome v7.0 (chr-ID Gm15; pos 16320583 to 16320960)
tttccacagtaacgaaacttcaagaacataagaaggtacttgactcttgaacctccatttagtatttaacacaccaaaattatatttaaagttctttcatagttcatttttagcataatgattaaatcaaaattgatatctgacttaataattgactaatgttttaacaattattgattacagtcatagagttttataatgtaactatatgctagaatagcggaataagtgttttttgaaaaagcattctcttccctagtttcctaggaaatgctagaatttgtgagcctccgcatcatgttaatattttttgtagtagttaaattaaagcttttgaaaacaggttatcactggcatcgcacttcctgttggatccga

SEQ ID NO: 19084 - DNA, 718 bp, Glycine max
  Intron number 3 from transcript Glyma15g07240.1 (locus Gly ma15g07240) derived from phytozome v7.0 (chr-ID Gm15; pos 5083038 to 5083755 reverse strand)
ggcagattttggagttcaagcactcataagtttcggtattaacttagtctcatgtcaaatataacaagtagcttaacatttttcttaattgtgatgcctatataaatcaaaccaatatggtgtaattgtgatgtttggataaacttcttcataagcacttgtaagaaaatacgaaggaaacaagaaataagcttctccataagataatttgtagaagctctctcatattagctttttcaaaaatttatttttaacttacataagctaattttagtttatggggaagcttgtttgatttttctttcctattttcttctacaaatacttatggagaagtttatctaagcaggcccttaatgtggtcaattgtagttctacttaagtttctcttctatatggggatataacaacaatatgatgaacgttaatttaaaggactcggtgaaacttaaaaactgctaatgaactctgattaatcctcataatttcttgtcaacgtgagtcatctaaagtgtaattgtaaacactagtttgctacagtatattttccttgtactaaactactaatgtaattagcgtagtattaggattagcatgtagccttgaaaatgatttgtcaagttattattcgttcacagggattgaaaattttggttttatatcttatgtggttgtcaaaacagagttaaataagctgttcccttctatacctttggtg

SEQ ID NO: 19085 - DNA, 549 bp, Glycine max
  Intron number 3 from transcript Glyma20g29720.1 (locus Gly ma20g29720) derived from phytozome v7.0 (chr-ID Gm20; pos 38558771 to 38559319 reverse strand)
catttacaaaattttagaaaggaagagaaattcaggtaagattattccctctcctcaactgttcatattgatgcctttgtttgcactaagaagcatgaactaagtgaaaaacaagttatgcaactttttttggtcacacgccaatatcttataatgacagaaacaatgagaagattaccggttactcctcaacctgaatccacaatatggtgctccccacaacttgaggtatgctaaagttgaatgctctaaattttctttctccattttctaggcaagagaattggaaaaaaaatgttacttgttatacatcccatattgacaggtgatattattataagagggggaaaatcctaaccatgtatactagttttatatgattaagtctaaattcaaatttatatgattaagtctaaattcaaactttaagatggtatccatctccggtgtgagggggtatgttggttttgttaggttgaatcagaccaaatccaattctaccattaattgttcattttattcttttggagcacaggtgattgcattgaa

SEQ ID NO: 19086 - DNA, 375 bp, Glycine max
  Intron number 1 from transcript Glyma20g29720.1 (locus Gly ma20g29720) derived from phytozome v7.0 (chr-ID Gm20; pos 38559739 to 38560113 reverse strand)
actattcatattgataatttctgcttcaagtatccttccctttttaattttttttctcttcttttaatttctttcaaattaagttttggttcttttaacgatgaagttgttgtcatgcttgcgattttctgttatgcctcatattcttcatttacttgtacccttttatcacaggctaatctttcaggaaatagagtttatgtcgagtctattaacattccatttaaaccatagactttaaattaatggcacttgccttttttggttttttattcctctctagtttcttaagttgcattgcaataaattttgattatgattatactcttttggtattaagctacttggtcgagaacggagttgttttcattgtgt

SEQ ID NO: 19087 - DNA, 560 bp, Glycine max
  Intron number 4 from transcript Glyma14g39890.1 (locus Gly ma14g39890) derived from phytozome v7.0 (chr-ID Gm14; pos 48960864 to 48961423)
ttgtgctgctgagacttgcaagagaagaaaaataggcatgtccctttgtgttgtctttccatttcaaaactgatatcatctgattgacttgaattttggcacttcaaattaaactgtgatattttctgattgcatatggtattatgcctttgagtgaggctgtattagaattctggacaaaccaatgaatttgttaatttttcttattatgctgctattaaaatgggcatctctggtgctgagaattccttttattacaatgattaatctcttctaaagtataatgctgccatgaaaaagatcctttgttggatcccttgaaattctgttccatacaaaaaagaaattatgtgtattatagttatgctagtttttcagtcgaagcatgctttgcaataaaccaatagttaccattgattgatgctgagagggccattccttgtaggttgtaacattgtcgacactgcctttgattttacagttccttgcattgaccattttggattttattttttatttttataggtgagccaagcatagttggagaaagatcttttagc

SEQ ID NO: 19088 - DNA, 713 bp, Glycine max
  Intron number 1 from transcript Glyma15g41870.1 (locus Gly ma15g41870) derived from phytozome v7.0 (chr-ID Gm15; pos 49085258 to 49085970 reverse strand)
ttcaagctttttttcaccgttcctcacaagactaggtaaaagggtgatctcactttttcacaacccccattgctaaaatcttcggtgttgatcaacagagcgttttgaaagcaaaaatgggctttcttataaccccgttattttctgctttgcgctcattttgattcctttgaaaacggaatttgtttagatggattcatctgataaggatttttttttttataaaaaaattgttttggtcaccagctgtttgataaaatgcttgattgccacgtgcaatggattattgtcccagtgagaattctgacgtggtttgtttgttttgttgatagctaaaatgtttagctataatcaatgcgtatggtggttattggtttattgccgaagttagtgaactgaccctttccccgtcttgccttttggtgtgtgcgattttgtggatgcattcactgggtttgtgtttgtgttgcatgtttaaaggttatttgattgttggttgtaataaaaggccagtttcatgtttttggcattagaatttggtatatagtacgcgctttcttttgattggtagcttgggttccatgtgatttggttttatttggatttgtaatgattgtgtgtcttttcttgtagtgcgatttgtaacacacctttttgttctattttggttcttgtaaggtttgaagctgttatcattggaaattagcacttct

SEQ ID NO: 19089 - DNA, 591 bp, Glycine max
  Intron number 2 from transcript Glyma17g03370.1 (locus Gly ma17g03370) derived from phytozome v7.0 (chr-ID Gm17; pos 2236250 to 2236840)
tatatcgatccgtcaaagccctccacacgactaaggtgagtgtgtttgtgtgaaacatatcgttagtgaattttccccttaaatgtttgaccaaattccttttatttataaattcacctctcaacgattgatgatctaacatttaaatatttttaatcaatgttattttttattattctcttttacaatttgcttttgttgtgactagatgaattggatttgttcattttagaagtcacacaaggaagattttgttattcatcttattctgcatgatgtgtaaatgtagttcaaattaccagctaagacgttgagggttttatttgtagtcctctgatgtgtggacaaacattaaaagaaggattgtgtttcttattaatagtcacattcatattctttctagtttctaacaacttgaagcagaattgaatgagtctgaaacaaacttttgcctttatctaaaggagttcacagattaatctcccgtgatagccctgcctggttattcttatttcaaaagtaatggagtcatatttcaagcatattatagactatagtttttcttttgaaaaaataaaggatatttcttgg

SEQ ID NO: 19090 - DNA, 709 bp, Glycine max
  Intron number 1 from transcript Glyma17g14750.2 (locus Gly ma17g14750) derived from phytozome v7.0 (chr-ID Gm17; pos 11504849 to 11505557 reverse strand)
aacggtaatttttttttttcatctgctcccacatgacgacaaattattcacaaccttcattatgttattagctctttctcctagattgaaaaacatgattacatatcacttagaaattattaagatcacatgattcgaaacactactataatttttcattctttgtttagaatgacacggttgaaattaactgccaatataacttccattttgttgtttgattgctttgtaaagatgtcgtattgtatgaatagttttcttcggcggtgagaatgggatttaagaaacgattgtcacagttttgtggtttctgaagtataactatatggattaggatttcattggtgtctctacttggaaaaggatcctatagtgaacaaaaaggaaaagggtaatgaaaagtgatagagacaattatcaacgtttagcctgtaaaaaaagtttatttttttaaaacgagttttttatggggtcaaaccccgtcttgtcagaatgatttgttttaattaaaataataaaataaaagtttgtgattacctctgaatgttttgacaagtggtgctgtactgccgataccaattctcttttatctcaagctaattttttccctttttttttttggttggattgctgtgacttggactgattggggaatctggtttgctctgcttcagatcctaacggtaagggcacttctaccttgcttaaa

SEQ ID NO: 19091 - DNA, 757 bp, Glycine max
  Intron number 2 from transcript Glyma19g02480.1 (locus Gly ma19g02480) derived from phytozome v7.0 (chr-ID Gm19; pos 2211463 to 2212219 reverse strand)
gtgtcgacaaagcttagagaagcatctattcaagagtatttcctaatttcaacttattgttttgtagaaatttttgttccgattaatgcattatgtctgttattgttttaatagtgtttgtcttatttgaatttcttttactactcacatgtcactttattgttttaataaaaaaaattatttacaattaaaaataaaataaaaacatatttacttataataggcaattatttttcttcattttttaatcaaacaaaaattacaatgtctttgctgctggtaagtaaagcatggattggtgaaagtctttggtcttgatactgtttaggtaaatttggtgtgaagctttcacttccttaatgtgacataaggtatacaaattacgcgcatgattataaaaatgaaaattgatggaagatttttgaacaatctaagataacaaaatcataattttctacaaaccaaatgtaaaattatatctgagccttgggcttttaagatggaagatgctttgttattctaaagatatttatcaatatataggttctaatgcaattggaggaattagtttcagtagtattacgttattttattgtcctcattcattgagtgaaataagaacaattctatctaattaaattcacctttttatgataatgttacttgtacttttaatttgttttgtgtaaaatttaatttatttagttataccattgaattaacaagtaataattaatgtcatgtatcagcaagaagt

SEQ ID NO: 19092 - DNA, 1029 bp, Glycine max
  Intron number 1 from transcript Glyma19g43380.1 (locus Gly ma19g43380) derived from phytozome v7.0 (chr-ID Gm19; pos 49046459 to 49047487)
ccgccggagttgctggttttactgcagcttattgggtcattcacttttctcttatttatcacttttacccaaaaaattcatttaaataactagtcgtatgtcttagtaactcatttataatcgaaattatgaataaatacttaaatcattttttttaaagcaaactcttactataaaaattcataattgtgttttaagttaacaaataaattttgtgatatattttttatgttgatccaaatgaaattgggatcgattttcttatatagaatcgtattatgaatgaataaaatgaattaataataaagactctataataataggttctttgtctaattaattgtatccaattattaatgttaattaagtaagttttttgaaaaaaattaatcactaataaagattaattattgataaaattagtaaatactttattgtatcaataacttaaaaaaattatataaggtactattttacaatttaaagaatttctttaatattataatttttaaacatgttttttctttaaaaatattgttgctaaaataaaactcaaacaaacggccctgtatataatacctgaaaagaaaatgcagatctttttttttaggggaaatgcagatcttgttaactatctgcactataaatatcataattggaaagtatataataattattttgagttatacatatacaacacctaattaaaatatcatatatgatgcgcgaatatatttttcatgtttcaactaaaatataaatatgggtgatattgtttttaaaaaaattgaatgattatggtacacataatattaccaaacaacttttgaagtaaaatttaattccactcttaattttatttatatgtacaaatatacaatgaatattcaagagaaaggaatagaacattttttgcgtgaataatttgaagtagttaattttctttataaaaaaaatgctgacatttgcattgcatgtgatggtggttgaataggtgggtccacgatctgaaaaggacagagaaatatt

SEQ ID NO: 19093 - DNA, 245 bp, Glycine max
  Intron number 1 from transcript Glyma20g29310.1 (locus Gly ma20g29310) derived from phytozome v7.0 (chr-ID Gm20; pos 38214399 to 38214643)
agattagccacctcctagatttcgatctcttttcggttataattccatcttcttctttcggttttcagtttttcaactcgattttgattgctttttttatggtttcttcaaattcagttgaaattttaatgttccaaaacaagttaaacagtgcctcaatagttaacgtatgcatgtgcttattaatctctattttttttcggattttaggtccagaatttcttctcctctgctgaatcaaaggc

SEQ ID NO: 19094 - DNA, 347 bp, Glycine max
  Intron number 2 from transcript Glyma20g29310.1 (locus Gly ma20g29310) derived from phytozome v7.0 (chr-ID Gm20; pos 38214835 to 38215181)
ttagattctataggttcgtttctttatacgtaaggttcacgtgaatgagatcaaactgtttagattcgtaacaacctggtataataattatctttatacaattatctttatccaatatacacatcttaaaaacaccactcaaaatcaaatgttgtcccgttttgatgttcatctaatattttcctttctttttttgttatcctcttcatgaactgaatacatctctggtctctttaaatttggttctgagaaaaatgctgataatttaaatgcatttgccttcattagtgatcctgtacttttgcatttcaggtacaaggttggtcagcgctttggacggcattttg

SEQ ID NO: 19095 - DNA, 370 bp, Glycine max
  Intron number 1 from transcript Glyma20g35910.1 (locus Gly ma20g35910) derived from phytozome v7.0 (chr-ID Gm20; pos 44105973 to 44106342)
gccacaggtaattaatcctttgattccttctgtttccttttttgtacctgctggtgcaagtgaaactacgtgtccacccatcattttttttcttcatatctatcaattttctttaacatatgtatcatgtatgtacctttcgctttctccctttttcctttgcttttgccataacataaagaagtagatcaaaagtttccatttatatcataattatatacataatttcctccatctttctcgatcgcgaaaaagtgcagaccaagtaaattaatttgctagttatgatgtatgtatatttgtttgatacacacacctgcatgatttgattaattaatttgtttatatgcatatataattattgaaggag

SEQ ID NO: 19096 - DNA, 937 bp, Glycine max
  Intron number 1 from transcript Glyma19g43690.2 (locus Gly ma19g43690) derived from phytozome v7.0 (chr-ID Gm19; pos 49256089 to 49257025)
attattggttgcaaaagaggcatcttgtgtggcgggtaccttttttctttaatttgtggctgtaaagagcgtggtgtggcagttctggtttttctatgacacgaaggatgacacttgtcaatgcttgcttttaactaaccgtgaatttcagtttgatgaccgacccccttgaacactctttttttttttaagcctcacttgaactgaactcgtttctaatttaccattcattttggtattttctatattggtctatgagtagcttagttttaaaattcagcagcaactcacaattaccaccacccttttgtttttgttcatgagtgtggcggcttcttatttatgacttcaagctaatcatcttttcttcttgttgtttgctatttttttagttataaactggcttgtgctgtatgttaggcttcttatttcatgttaatatgttatttaccttggcgatttcaacttgtactttatcttaagaataagcttcaaggctaaaccaatgtacacaccttgtgcaggtgcggctgattttccttttgtaccccacataagttgtagatattgtgattcaaatgacatttttttttctaagcttctgttggctagcttatttgtttcctcataatattttgccattcttagagtaatatccatgaaaattttgatgtgtttgggtattggataatcatgttgcagtacttctatccgttttctagagcttttgtgacttgaaccctttacttagaggattaagcttaaaatctagaccagtgagatatgaaaaggcagaaacaacattagcttaccaaatttctgtatatcaatgggtggtaaagataacttactattagtggttgattagctgacacacaacttgttttttatgttgaaatcaggacagacaaagctgattcacttaggagcctcaaga

SEQ ID NO: 19097 - DNA, 741 bp, Glycine max
  Intron number 1 from transcript Glyma14g38970.1 (locus Gly ma14g38970) derived from phytozome v7.0 (chr-ID Gm14; pos 48135781 to 48136521 reverse strand)
ggctctgttagctacaccgaccttggtgctttcaggtacgtatctcaatctagtcaccacacagatttatacactttctttctttctttttcgtttttgctttacaaaaattgatattagatatgtaaatatattatcactcgctggttttgatagctggggttgttgtggcttgagaagcaaagaatttagggttgtatcggtaagatgaaacttagaagtttggggatattctaattaacaggattaataagtttttatctcgataatccttaatatttatctttgttatactagttttggagacaaattaaattttagttttggttgctgaacaacactaattatactttctttttggcagtgtacaacaataatatttagaaaactatattcaaattttgttctaaaaatatttgtttttagtctctaaaaaaataatcatctgtttaatttctcatgtttttttatataaaaaacactcttattactctctaggtttatgaaaatagagacacacatgacacatttctataagtaaaagattaaaaggagataattattttttgaaaaaccaaaaacaaatcataccttatttgcttgttgagattaaacatatatttttaaggaaattaaaactatatttaacacaatcgttaataatagcattagtatatatagaaatgatgaaccgaaactaattttgacctctggattcggtattttgcaggtatttggtgc

SEQ ID NO: 19098 - DNA, 835 bp, Glycine max
  Intron number 1 from transcript Glyma19g26660.1 (locus Gly ma19g26660) derived from phytozome v7.0 (chr-ID Gm19; pos 33757655 to 33758489)
cctcctttggttgctcaggtaagttttatgactttttcttgtaccttgtttttaatgtccctgaggagtttgtttgttttgtgatccataaggctgaggtgtttataagcaaatatttaagtgcactaatgtagagactagactagtgatatgacatctagcatttatcaagctctttgtaggaatttttatgtggcagttattttgaatgtctcttaaacggttagcaacaaagtattttttgggctaaactaaaggagtgctattgataaaaaaaaaaggggtgctagtattcccctaattaaaattggttttggtttgtgaatgtttatcaaaacagtacaacttttttaatgctaaggatagccagtttatgcattttgcaagtacttgagttactatttctggagggaaaatgttacacttattattttgtataggtataaagaaaatagagatagagagaaaaaaataacagaagagagaaaataaattttttttttgcacagtaaagagagaaaataataaatgtaataaatgatgtgatgaaaaatgaagagaaacagaaaaaaatgtggaagtgagatgaaaaagaagattaatgtatgaaaataataataataataataataataatccatttctgtatcagtactataacatcacagcatctcttaatcacttatccttttccctatacttgtgataaacaatcaattcctttctaaactaaaagactgaaaatgattgaagagatggcccctcactttgaattggtgagtattgcagttttgaaagaaagtgtcaactctatattccaggtgaccaagttcaa

SEQ ID NO: 19099 - DNA, 564 bp, Glycine max
  Intron number 2 from transcript Glyma17g05460.1 (locus Gly ma17g05460) derived from phytozome v7.0 (chr-ID Gm17; pos 3798828 to 3799391 reverse strand)
atttagctgccagtaaaacacacgcggaactcgtaaatcaatgctgttttttggtttgttgtgtttatttcagtttctttcttgttatcatatagtagtttcatttcaaaacatcttctaagaagttttgatgtactgtacagccataatttgtttttattttacattccctttttttacatcaaattcaccttgttttacattgttttctgttttaaagatttacgacaagtagtgaaaacaggaaatggaaaacttttcttacaccaaattggtcataagtctcaaactccctcatgtcatctttgtaggaagacaaaagatgattatttgaatgttttctaaaacatgttttccaatcctgcccagtttacccatcaaccaccaagctcctaatcattaaaacgatcgctgagactttctcttacgcagtggagatctaaatgcattattttgttgtttttctaccatttgattgtgttataacttataaatggaaatgaaatggttactcggtataatactgcaggtggagaatctaatacttgaagttcttttaggtaa

SEQ ID NO: 19100 - DNA, 697 bp, Glycine max
  Intron number 1 from transcript Glyma20g01230.1 (locus Gly ma20g01230) derived from phytozome v7.0 (chr-ID Gm20; pos 840525 to 841221)
cattcacaacccaacctccctttctcggattcaaggtacccttttcaacgttttctcttacaatattcttgctttctcctagtaggcaaatgtgaaatgcagcatgtatttttttcatttattatattatttatgtttcagggtcaggaaatttgtatataacgcattactcaatctgaacattgccggttatgatatgttgtggagtttttgaatctcttagtataaccatgtgtgtataagttgtttctacaatttaactagaaaattagattaaactttttcatataagtttcataagctatcctagaaagctttttgaaaataacttatgaaaatatcataagctttttacaaataccataagataagttcaaataagttgtaaataagctcttccaaaaagaccctaaataatacatgtactcacggtaaatgtcttttacagtgtcatccaatcacagatcatcgtgtataataagttcattgacttttataataaccaccttaaaagtcattcaaaggatgatttcttattgtttgatagcataaaaacttatattaacagtgtatgcctattagaactcttttgaatcttgtctacctctacatttggttaaaaaagtgtttttctaaggtctggttactggcttcataaggtaaagttccccctttttcttgttgcacagggtacatc

SEQ ID NO: 19101 - DNA, 887 bp, Glycine max
  Intron number 3 from transcript Glyma14g04430.1 (locus Gly ma14g04430) derived from phytozome v7.0 (chr-ID Gm14; pos 3010525 to 3011411)
ttgttcgattgtgtgaggtctctctctctctctctctctgtggaccacacacgtgcaattatttgtctttctcttttttaaatcacctttttctttattttattcttgccatgtagtttttctatttttaatagcagcagatgctagtggttgagtctagaactttcttgcatgtttcactaagaattctgcctaatgcgtgtaccgttccagaaaatgcttaaagtatcttggtaaatatttataatcatggggtgatttggaaggtttttttttttttgtaaaattaacaattagcttgttttcttttatttagttgaggagatagtggaaagaaaatggagaaaaaagttgacttttagaaataaaaattcaaacttttttttaatcttttcttcaattcaaatttcaaacttttcccttctcattttcttcccacccttccaaatatgttgaatgcttgaatcattattattaaactgctgcctttgatccaaggctaaacgagacagaagaaagctttccaatcctctgttgctactgggcttgagatattcttctatcatgaattgctcacgtgatgaacttttttatatatgtggaataaaagaagttaggagttaaaataaatatgtgttaaatacgtatttcttttcagagttatttcattactttaactcaccattctcagtccatctggtaattaatttgctgatggtgctattttgtgtgcttgtcatctagcatttgaactagtgcatactatccaactaaacagaaattttcgaaggaaatatatctgctaatagaaataaaattgattctcagcacagtttactttgttgcctaattctgtttctgattttgtaacatcttttttgcaggtc

SEQ ID NO: 19102 - DNA, 370 bp, Glycine max
  Intron number 2 from transcript Glyma19g24250.3 (locus Gly ma19g24250) derived from phytozome v7.0 (chr-ID Gm19; pos 29684241 to 29684610 reverse strand)
agacatttcctgcacttttccatctataccggcaggtaaagaagaatcttggtggatcatgttgattagtgtgtaatgtagaactgttgtaaaagtgagaaatattaatgcagaattgctgatgatcatgcaactaacgatggactacgggacccataatttttctttgatcaagcactagttcaatttgctttcttttttatgaaaaaattctattgatttgttctacatgctaatttgatatctaatgtctattcctcttttttgttttttgtggaaatttactggattttctagtagttgttcgtttcccttaaagcaacattttccaacatttggcatctctattttcagggattcttaccagcag

SEQ ID NO: 19103 - DNA, 991 bp, Glycine max
  Intron number 1 from transcript Glyma18g47000.1 (locus Gly ma18g47000) derived from phytozome v7.0 (chr-ID Gm18; pos 56661774 to 56662764 reverse strand)
gcattggacctacaaggacgcagtcaaaggtaaggtttattgtgcaaatgttacttttatccaaaagaaatatgaacattcaaagtgtgtttcatcactgttgaaaaagtttgttatcctttacatgctctcttctaaatacatttatacactggtagggctaatataatgttggcgaagttactacctttttgcaatactgtgcataactaaataaattgtatttttgttttttaatcacgattttggtggtggatttcatttgttacttttacccctttattgccaattcagttgacaacatttataagttttaatcaatgttattgtaatctaaatcatctaaaataataatattgttaataaatacacaattcaatctgtgattaattaagttttctgcaaataatactttaaatatataactattgtttggaaaaagaagatattgtgattattatttaatttatttttattgtcttaatgatagaattttcagccaatgatttctgttcttcaagtgagtcctctttggagtaagataatttccatgtttcaatgtgggcgtatacttgtgatttttttcattaggggcttgacatttgaaccaaatttaattgtcattcgcatgaaaaatcagtgtaacacataatttctttgtaaacccactttctttcaaagccagtggaaagattctaaattcaaaaacttagaaagtgggttttaaggccaagagaatagattgcaatttccagaaatggagtagtactctgggcatacaatgtcagattggatagtagctctaatatttgattatattgttttttgtattcgttccatgctaaaataaaattctgtaacttatttctatttgactcatcctatctctcgtagcaaaggtcttgatgcattaaccacatatggatggataaacaattacttctctgtctctgcagattatccgtggtccatcattttccttcattgctaa

SEQ ID NO: 19104 - DNA, 394 bp, Glycine max
  Intron number 1 from transcript Glyma15g11350.1 (locus Gly ma15g11350) derived from phytozome v7.0 (chr-ID Gm15; pos 8321286 to 8321679 reverse strand)
ttcccttgatgtaatcccctttcttcgcactctcacttttagggtttccaattttatttttttatgaattcggtgcgtctgatttgggtttattcttttttaatatctcgatttgaaatcaaatcgtgaatgcggttgtgtgggtatttatcgttaactttaaggagtttataatgaagctgtggttggatcgcgtttattgttagcttggtctgttgaaaagttgtcgtgttttattgttttatttttccttggaaattttgtattttgaaggattaatttcgttttgatcgcgctgatttttgaactgtaggtgactgtttctttgttgattgatgctcatttttgtggtgttgcagataatttctccgtatcatttgtacttgaaccctag

SEQ ID NO: 19105 - DNA, 572 bp, Glycine max
  Intron number 1 from transcript Glyma20g38810.1 (locus Gly ma20g38810) derived from phytozome v7.0 (chr-ID Gm20; pos 46320566 to 46321137)
accgtaaatcctctcatcaccttcgaacacaagaggtatattattcgttattcacctccttcctctcgtatttccttccttccctctcgcttttatgttagatccgtctatcaacacttcattttcctctttcatttgctttatgttttggtctgaatttcacttggactactatgcgacttgccgttgaattagtggattttgaagatcgctctctgtccgttgagtttcagttgacgccgattgcaagtttttctttcttcattttaatttttgttacttagtagtagtgagtagtgaatagtgataattcagaatctgcgctgcgctgaggcaatcaatgccgagtgctgtgcgaattgcgttttgtgcggaatgtgtcgtcgttttagctttgggggcgacgatgggcgattttagttgcgttttgctttaattcgttgtttcgtttcgtactacttgtttgtgtgcagttaattattttgagtctctgttgattttttttttatctttttattgttggattctgttttttatttttggaaattaatgcgtgtttggtgtgaacaggg

SEQ ID NO: 19106 - DNA, 822 bp, Glycine max
  Intron number 2 from transcript Glyma14g11670.1 (locus Gly ma14g11670) derived from phytozome v7.0 (chr-ID Gm14; pos 10227801 to 10228622 reverse strand)
cgagcgggttcttcgtgcaccgccttggaccccaggtacgtgacgaaagatttcaagaattttttctgattttgtgcataattctcaagaattcttcggttccatggtttctaaattgaatctagttaattggaatagatttgatctaattgtgaagtgttattataattaaatgttattgattttttaaatattctaaaaaatttaattaaaatgcactaactagttatttatttcttataataaaatcatatttaaaactaatatttgtttataaacaaagtagtaacaaattttaagttgacaataaatgatgttttcttgttccattaaactcatttttaattggttaatagtataatttttttaatttactttatacagtattcaatttttttaaatcttgtaagatttttgtttttatgtgtatttttttacggttaactaattaaaaattatcattaatataaattttaagatgtttattataaaaattaacatatatgataattgaatgatgatataaaaaaaattcctgatactgtttattcatggattattagtatgttgtatttgtaaagacagaaataacaattacaatttttttaacactttttaattatttaaaaattactaatgtaaaatttatttgcagtttactctattggattttgtgaattttagtgaacttgaatacgttgaaaagagagtattgctaacattttttaagtacataattatgatcaatcattttaaatggatttggatgataaatatgtttatttgtgtattttcactattttgtaggagtcgttgggtctt

SEQ ID NO: 19107 - DNA, 375 bp, Glycine max
  Intron number 1 from transcript Glyma14g11670.1 (locus Gly ma14g11670) derived from phytozome v7.0 (chr-ID Gm14; pos 10228982 to 10229356 reverse strand)
gcataggccaaggcttctctggctcactcttcaaggtagccacacactgttttttactgaacaaatattaattgttaatttttgtttgcggatatttgaaccaacaatcttttcctttgattatctctccgttcagtataagtagttatcggtaaatgttaatggtttggttagtttttgcacctaagatttgaaccaactatctcttcttttgttatctttcttttattgatgaatgattattaatttttattagcaaagattgaaactcactatctttcttaattaagattagttagcttttatcaatgaagattcgaactcacgatttctttcataggtagtggcagactattactggaaagacgtgcaaaa

SEQ ID NO: 19108 - DNA, 646 bp, Glycine max
  Intron number 2 from transcript Glyma17g09960.1 (locus Gly ma17g09960) derived from phytozome v7.0 (chr-ID Gm17; pos 7423573 to 7424218)
ccagcaatcacttttgtgctagcggttaccctcaggtaattttttgcattcttttcctttactttttattttacataataatatcaaaaccgaacacaccgcaagatattgtgtatataattacatttacaactcgggttttataaagtatatgttgttacattcaacaatagaactgcggcacaacaagatacggagaaatgctgataatgcattcttttgaacatattctctatcattcttatctatgttgacgattcacaaactacaatattatatatgttattttttgtttattatattttaatatttttccacattcgtatattaaattttaaaattttcatgttaatctttagattttttaaagtttattttgatcatttatttcatttttttattacaaatgttagtgtgtattctattaatattttaaattaattattttatttatatttaatgttcaatcaatatttaaaatattaacagacgaaagaaatgatcaaaactaaacttccaaaacataaaagaataaaataaaattttaaatatttaatatacctaaataaataaataaatattaaaatataatagatcaaaatgactattttactctcttggttaaaatataaccatatattatagg

SEQ ID NO: 19109 - DNA, 510 bp, Glycine max
  Intron number 1 from transcript Glyma16g25310.2 (locus Gly ma16g25310) derived from phytozome v7.0 (chr-ID Gm16; pos 29242420 to 29242929)
tcgtcgccttgggtcccattcaattcggcttcacggtaagagaaaacgaagaagatgcactttagagaataaaatgcaccaataatcattgaggttttatctgatttgtagaatttgttatgcatatacttgattttacaacaatcatcagatttatcagcgagggattagataatttcctgcttaaacagtgatattgaattcgagttctagtatacaactgcgttaaatacttgaaagtagaacttcgttgctgtccgtagtaattgcctctagtgtatgtagcaaaaaaagggagtaggataatatcttgagaatttagatttgatcgagcccaaatcgcgtgagtttcatgttgtccacatcatctattggataagatttttgttgatgtttgttattattggtaaaggagttaaattaaaaggaagtgttttattcttagttttaactattttgaatttttttggcgcagtgtgggtattcttctccaacccaaggggctatagt

SEQ ID NO: 19110 - DNA, 798 bp, Glycine max
  Intron number 2 from transcript Glyma17g13880.1 (locus Gly ma17g13880) derived from phytozome v7.0 (chr-ID Gm17; pos 10669907 to 10670704)
gattttgcatcaggttagatatgtatatcatatatgtttcatattaattcaatttaattactcgtactggggcagtgattccctacaccacccttctagagaaaaaaaaggggggtggggaggagcacacatgaatttattgactctgaaacttacgatcacttttgtattttttgctttatttaattcaaaatatgttgaattgaatctaggactacaattatgtctgatatgaatgtacaatttggtgtgtgatcagtttttttttttttttcatttttgttggtataatgatttggttgttactacttaatatgcgtgatggtgttttcaataaaatcatggaatggaacatttgaaaggtgaaatgagtaaaatggggtaattggactgatctcctctgaggttatggatgattgcatttataattttttttattaaaaaaatacatctaccttccttatattctagctctattgtatttgcaagggtaccatgtgtctggtttgtgaataaaaattaaatgtgcaattctttaaaaaaaaaacattagtgtaaacgtgtacaaattatacctaaagtaaggaaaagtagatgtaactttttaattaagaagagaataagtgtaactaatgctaaacttaagggatgttagtgcaattatctcttaaaaatgatatgatatacctgatgctggtggttgaagtcattttcattgatgtctcaatttcacactaagcgaatgtcatgatattcttgacagtctgaacctacgtctccgaggactccgtccactcc

SEQ ID NO: 19111 - DNA, 564 bp, Glycine max
  Intron number 3 from transcript Glyma19g36130.1 (locus Gly ma19g36130) derived from phytozome v7.0 (chr-ID Gm19; pos 43491161 to 43491724)
gccgcaaaagggctgattatctttcatccaagaaggtaaagttttctgctgtagttatttcccttttatattgttcttttgcaaattgctttatgttctatttagcgtccgccttatctgaagactcatttgatcactgtcagtagtttgaatgatgcttttagcactgaattcttagaagatgattttggctcttgttttttgagtttatagtatccactagacatgcatcttaaataaaaaaatgctggtccaaacatgacccgtggtttttgtcgcctttcatgtgttgaatttttggatagcttccttttgctgtaatctgtattttactttcactagttctgaatgaagatatcctcctcaatccttgccatggggtataaggccaaaacatgagtgccaattttctagaagatagtagtttgcaatgaaaacttttggcaagaggaatcctatatcatctttcttatatcatggtgtttagtggcaaaatagaaaattttctatttaaccaagacttatatgtctcctaacacggatatgttctgccaacaggatata

SEQ ID NO: 19112 - DNA, 812 bp, Glycine max
  Intron number 3 from transcript Glyma19g29170.1 (locus Gly ma19g29170) derived from phytozome v7.0 (chr-ID Gm19; pos 36731852 to 36732663)
agtcaattactggggaattgtccttgatctttcaggtatgccactcatagtcttgcaaatgagtgcttgttttatatcttttaacaaaatttatatgcttttgttttgaaatggataaaaggagaggtgagaaagaggatgaaaatgattctaggaagggttaaaaattatccttttattcctgctattgcacttaactttttataattgaaaagagcttttctttttaaattatctgtggcgccatgcccatttctaaagattacccttatagaaggaatttgtcgtagtttgccttgtcaaatttgaattagtttggaagtaaagtacaaagatcttttgctaattccagcatggaggttaaagtcactttagggcatagattgataactttcatgaattagaacaagattggtagattttttttttgttgttgaattgaatcatcttggttatcttctccacataaagaatgagtggtcactgtaaaatcatttgtgctgctactctctccctactggttatgctttaaattgaatcatataggatattgggaactgctggtgcaatgattgtttaaaggagttactattccaactacttgatttgtggactcaacatacatattatatgcctactttcatttttaatatgcctatgtttctgatgttttatttttccatactagtcgtttgattgcttctttgaaacaaaagcagttttgttcctgtggactttttaatagttacttaacttctatgatgtaatccattgcagtctgttgctcgtagtgttgcttcacagatcttgac

SEQ ID NO: 19113 - DNA, 608 bp, Glycine max
  Intron number 1 from transcript Glyma17g01730.1 (locus Gly ma17g01730) derived from phytozome v7.0 (chr-ID Gm17; pos 1056576 to 1057183 reverse strand)
cactgattttggtctctctgtcttcattgaacaaggttcacattgcttttactttggatcttgatttctttcttaggattctatctattgtatatttgcttcttctttatttccattcatcttgagtcataaactcataagtacactgatagcccaagtttatgtctaacataacattgcctgtgagacttcagaacttcaaatgccaatgcactccactcgctatcatattaccttgatagctgcccgaacaaacaattcagtaattgtaacttaatgctatgagattgagttttttttttttatctaggtatctgattagttccatgtgaaatgttatatttgattttctaatgaaggtgacgttttgtttgcttttaagcaaattttggatcagatactacattggtttctaattccttttcagtgtatccaaatgcttttgttcatttttgctacagcttgtactgaattctaattgcatttgactgctatggtatttctaaagggcttgcatattgttacccgatgtagtgatgtgaccattactttcacagttgataattcattgtattttctgacctttattatttcagggaaggtttacc

SEQ ID NO: 19114 - DNA, 1043 bp, Glycine max
  Intron number 1 from transcript Glyma18g49550.1 (locus Gly ma18g49550) derived from phytozome v7.0 (chr-ID Gm18; pos 58934143 to 58935185)
tcaagttacctgcaaaggctcctgagtaccgattagtaagcttatgttttttcatcttctctctctctctttcttgcattgtagttgttcatattccctgtgctcccgatcttctttcggttgggttgatatgctgcatagagttttctgattcaggtgacttgatgaaaaacttggggtttaaacttgttctagactaaaccaaaaggttgatacgttttaaaaatttagaatcaatgaaagataatatgggggcatgttggaatcttctatctgatgatacaacattgcttaatttgtctaaccaaataatagcacaaatttgtagcttgtttgtaatcttcaccttcctagcatattaaaaacttgagtaaatcactcctagaaaacgtaccaactgcagagagaaagagtttaatgaatttgaatgtggaaataaatgtttcttcactgtgaactgcatctactgcctatttattgtggtatttgctaataaagttgcctaactttaactgaatgagttagcatgaacacacaggacctctccaactgaaacaattctattcctttacatattttatgtattttacatttacttcatatacatgaggataataatttctgctatgatatattcagacatttagctcaaaataggagtccactgcaatgaatggcaaaccttacttcttttctggttttattgtgtgtttgtgcataatttggatacaggttgttgtctctaaatgtcatccaacagacttggctcctctaaagtgaaaaggtgcaccttagaaaataaagtacacttacaatctttgattagtttaaatttgtgataaaatcaaagacatatataataaaatttgaagttaattgcaattcctaattaatagtagttattgcactctatcgtctaaagtacactcactttgaaggagtcaaatcagttatgaaacttgtgtgttttgagtttatttttgctacacttgtttactaatccatattaaaatttgactggtgtggtgcagacaagaagtcac

SEQ ID NO: 19115 - DNA, 563 bp, Glycine max
  Intron number 1 from transcript Glyma19g28060.1 (locus Gly ma19g28060) derived from phytozome v7.0 (chr-ID Gm19; pos 35421057 to 35421619)
aattctgtgcatctaaagaaattcacctatctgtatgtatagcacataaagtgattttatctttacattcatgcaattagattgagttgttagtacatattctttgagggttcatgatgaaattatttgttccccttttcataaactttgaaaaaaaaaatgtttttagtatttatactttaggtcaaactttgtttagtttctgtcttttcaaatcgataaaatcaatcctctaacttctacaaatatgttacttaagtccctctccactaactctatcgatgacaaaataacatattggagggataaaagtcaagtatttttaaaacttggaggaagatgtcattgatttgaaattatagaaacttggactaagtttgatcaaaggtacaagaacaaaaagacaattttttcccataaacttttctacaacaaaattatgatttttgtacatattcaaatggtggcatctcaaaaaccattgttctcactactaattatctattatgataaatttctttttttaagggattttctccattaggatcaaaggatttctcaac

SEQ ID NO: 19116 - DNA, 885 bp, Glycine max
  Intron number 1 from transcript Glyma18g41320.1 (locus Gly ma18g41320) derived from phytozome v7.0 (chr-ID Gm18; pos 50160222 to 50161106 reverse strand)
cctggctaatcgccctgttggttacaagtgtggacgtaagtttgattacgtaccccttctttatatataagggagttacttaagtaacactactactttgctaaaacaagactattaaatgaacataattaaaagtgtatattctaatcaataattacacatactctataacttctatagtgtatcttctctcactttagaagtgttatatctatcaatgaggtgtcgttatgaccccgctttagcgggaacaataaatacaaaggtaataagaaatgaagtatgcttggtagaatagaaaaatatgagaggaaataaaccataacaagtttatgaatgattttggcttatcatggttcaaaagtagaaaaatgctatggttttctttctatttattttttattttttttaaaccaaacaatgttattttaactcttttatttattttttacccatcatatttctcacctattttttcttcttattatcaaacacaccctaaaagagattgaatggagccaaattatttagtgaagataaatatataattacatcaaataacaaataatatattaaaagaataatgctagtcacacaacaatttttccaataaggagagaaacagaaagagaacagagaaaaatatagaataagatggaggatatagagagacagaaaatataatgaacattttatgaataaaaacatcaccggtattaaacagggtttcaaataatttattgttaatattcctcttcatttatttgccagatgtgttttgttttttgtttttttttttgttttatcttgcaatatgctaattctcatataaaatggtacttttttgcagcttacactctgccttgaaagagttgaggttgttgc

SEQ ID NO: 19117 - DNA, 549 bp, Glycine max
  Intron number 2 from transcript Glyma16g29450.1 (locus Gly ma16g29450) derived from phytozome v7.0 (chr-ID Gm16; pos 33266527 to 33267075 reverse strand)
aattcttctctaccaaaagcatatttgcggaaagggtaagtaccccgtcaccttgtcctttccctttcttaatcatactataattatcactattcactttgatttttttctgtatataaatgataggtatgacttttaagataagtactgtaacagacaacaaacttattgtgcatgtcaatttgtgattgtaaaaatcttctgttaagtgttgtcaaaagcagcaacttagctgcctaggtattgaggtgtgcctgggacaaggagggttgcatgatatatatgtaatgtggctgatttagctgcatcatgcaaattctgaggtcttgctcaatcaattttaatttgaacacttaattattttatatgatggttaaatgtaatgaggatatttgtggctaaatttgatttaaattgctttctgtgcgtcatcacaccgcatcctattttatatttttacattggatgttctcaattctttatccttgttcaactgtgctatacttgatttaatttttgctttgttgcatcaattgcagtactgcgtgc

SEQ ID NO: 19118 - DNA, 629 bp, Glycine max
  Intron number 2 from transcript Glyma15g33780.1 (locus Gly ma15g33780) derived from phytozome v7.0 (chr-ID Gm15; pos 37700296 to 37700924 reverse strand)
cagaatgtacgtcaattttgtttttattatacttactctgaactttgtggctattcccttttgtattttactgaactgctacatagtagtggaagaagtagaattactaggaaaatgctagcaatatggtgtttgataccctcttttaaacacactattattgattcaattttattggaaatcacaatatattgtccatcatacgttttttgttgaaatcagtccagctcataattttataattttcaatcaattttaacctataataaagattgtgttagaaaatgtatcagatagcgtgttgctaacactcctccatttactatgttaaaacaatggaatttctggggttttcaattgcagtttacaattaaaattgtggccaacctggttgggtggtccatgtcttcaatatgatcccaattacagccatattttctacaattttagtaatcacaatccaactgccaaaccactttcctttctttgatatcagtttgtacatgcagttagttgaccacttgatttttcttttattgcaacggcatatggttcattgctttgaattgtgagcaatggtttattcttatacaggctactcaacattttccgtctctgagactaccctg

SEQ ID NO: 19119 - DNA, 689 bp, Glycine max
  Intron number 1 from transcript Glyma15g33780.1 (locus Gly ma15g33780) derived from phytozome v7.0 (chr-ID Gm15; pos 37701003 to 37701691 reverse strand)
gaccctttacccaacaattgcatcttctcaagcaggtccattttctgatctctcttcatcaacccaacattttgttttagcaaatttcagtggcacacctgagctttttcaaattacagataataccactttttttccttccctacactgaccttttttatgtttaaaatcattacagtaagatcccttatatgttaaactaacttacaccctcttaatgtttgaaaacattacattatgtattacactaagactcctacaagggaaatggttaaaaaaaaggtgttcgcgtaatttcctaaaatctcagggatatttactgtaatttagtctctctctttctctctctctctctctctctctctctctctctctctctctctctctctctctctctctctctctctctctctctctctctctctctctctctctctctctctctctctctctgttgttatttgttttaaaatcttgtttgctgcttttcaggttttcttatttgtggatattgccaactatgttcttttaatgttcaatcttgatggtttgaaagtaccttgttcccagcattagtttacttgatggaatttggaaatggtttcttgagtgaactagttagttgctttgacttattctcattttgctcacccttttcttacttctctctctttgcaatgttaatgaag

SEQ ID NO: 19120 - DNA, 581 bp, Glycine max
  Intron number 1 from transcript Glyma20g24790.1 (locus Gly ma20g24790) derived from phytozome v7.0 (chr-ID Gm20; pos 34444401 to 34444981 reverse strand)
gaaatcaaaagttatcgacactttcgcgcgacacggtaaagtgttttgctcattcctatcgggatttgaaacactaggttttctttcttgatactttccgactaaatattttgatgtcgaattttcaattgtttggttttatgagctcttgaaatgttttagatgccgcatacgcgtcttttaagttgaaaccgtaattaaacttaactgaatcctatagctttatacgcgcgcgtgcacactacacatacaattgaacttggagctgctactttcctgtcgttaaactcttgatttgattttatatgcgttactttaactagagctggaaaaacgtgagtcaagtaatgtgtatgaaattggttaattaagatggagttccaagttcaagggattttattgttaatgattacatttaattaatgctggtgtggtgatttagtagtattttctgtttggtgtactaataattgtaattctattttctcattattttttgaattatggttatgtttgttcttctaacgatttgattaatatgctgattttgccagaaatattgggaaccaagcaaaatatct

SEQ ID NO: 19121 - DNA, 824 bp, Glycine max
  Intron number 2 from transcript Glyma14g40370.1 (locus Gly ma14g40370) derived from phytozome v7.0 (chr-ID Gm14; pos 49328850 to 49329673 reverse strand)
gcggcagctgcccgtgattatcagaaggtgatttaacaattcttcacttcaaaatgcagttatcttcacgattcgcaaaaaggaagacaaaaccccccacactcatgcgtgtgtgaatttggaataatttagtgcgtgtttggatgtgtgtttgtagaattgattttgaacaaacgtgattttacagaattgattttaagtaaaacgtgtcatgttatgtttaggtcttaatgcaattcattcttgctattgctgtttttccctttcgatgcagattttgacgatttgatagtcatttgtttacaaagatgaatgaaactagtgtcctacattgcgtcgtaatttatatatttggatgttatatgaatattgtaacgtctttttactacttgaatagttgaatctggctatgcatttgcatgtgttttcattttgtgtgaataaaatagatctagtagtgctactagtgcctgatttgaaactcttcaacttataagattgctcaagttttttctatgaactccttcctttaattatccttttcttgttttcttatcaaatgttcagaatatagcgctatgtttaagagcttaccataaatggtgaatagttgaatactgtatgttttgggtgatagtttatgaagtactactttctcaaaagtcttatgtggtttgtttttaaactaatttactgtttactcaaatgctaacattatgctataattttctctaaagagtgatgttaatgtaatgcataattcttctgccagcagcaacatattcgtgtaatctaacatgtgctatgatacctgcaggaattgc

SEQ ID NO: 19122 - DNA, 613 bp, Glycine max
  Intron number 1 from transcript Glyma20g27750.1 (locus Gly ma20g27750) derived from phytozome v7.0 (chr-ID Gm20; pos 36813700 to 36814312)
tcctccaactccaaccacttcttctaactcgggaggtaatattatatggttcagaatttcatgctttgagttatacttagattgatgaaaaggaatgaattattgaaataaaataaggtgaggaatggaatataatgaaattaaacttttattattttttctatattagaggggaaaaattaaagataaagaattgaagacaatggaataagttcttttagtgttattcttcatgacatttcattgttacactagcaaggataaaattttgatgctattctcctatcagatgaattttatgctaatccgcctaataaaagtttctatcaaatgtcaacattaggtaaaacttcaattctgattagaaaacaatactagaaacacatttaaactgtatctaagttttgtcctattagcaattgaaagtagttcttgttatatttcattcccttccattttgtcctcttccatcatcaaatgttgtattcatactagttgcaaatatcttgagaaacatgacaatttgttgaataagatggaagcatttacaataaggttacttcattttggaaatacaggaagtggtggaatttcatcgggtacaatagttgca

SEQ ID NO: 19123 - DNA, 512 bp, Glycine max
  Intron number 1 from transcript Glyma17g08610.1 (locus Gly ma17g08610) derived from phytozome v7.0 (chr-ID Gm17; pos 6373810 to 6374321 reverse strand)
gtccgaatttggcttctgcattggtgagaatagcaaattaaagtcaacagttcatgtaataacattaattataactttgtttcacgaccacaaatacaataattcacacaatgcatgatgctcatttgagactttgataagtccttttcggtgtctctagtgtttatcatctggcattggtcaattaacacgagaataatagaaagcagagcagttagccaccttagccatgttcttcggatacgctatagtgccgtaatataagacaaccagtttaatttttatttttttttattcttcttcctactttaatttagttcaatgatcaatgttcaacactttatttctccttttataattctccattagtttaatatccttttaataatataaaaaaaaacaaatgcgttatctacacctacctgtaacctgttcttaatttattctgatcttattattatgccaattattgttttagtttttcactttcaattatgtcgtattttataggg

SEQ ID NO: 19124 - DNA, 356 bp, Glycine max
  Intron number 2 from transcript Glyma20g26670.3 (locus Gly ma20g26670) derived from phytozome v7.0 (chr-ID Gm20; pos 36041945 to 36042300)
tgtcagtgcgcgtgcttgctgcgagctgtcccgtaccttccgtcgttcttgtcaagatcgctagtagtctcgttgtgagtcttgctggtttggttctaggacgcatcaaaaatgtttttttttttttttttttaacagctacatgagaaatgttcttcaaatgcgttttgaaaaaaaattattactaatgttctggatgatagaaaaccttaaattgtgggcctgatagatgttaaaattaggtagtcgtagtcctgtttgtgtgtgttgttctatgtgaagagatgagatgggtagaatttgtgagtttgtctagcttggttcataagaaggtattaagattcaaatttataggg

SEQ ID NO: 19125 - DNA, 578 bp, Glycine max
  Intron number 2 from transcript Glyma14g06720.1 (locus Gly ma14g06720) derived from phytozome v7.0 (chr-ID Gm14; pos 4946783 to 4947360)
gaaaatagggattttctcatcgcttgcatcgccttatatcctgtccctacattttattttatttatttgtgtttggttgttttaattttggtttgcatgagataattggatgtggaaacatctaaaattaaggttgtttggaaatgggaatttctggtgtcatgtttttgttttttgctttttttttctttgctggtgttgtctgattagggtgatggaagacaaaacatttgggcaaggttttagccgttgctgtttcctcgcaattcttgacattgaaggaaaatgtggacagatgcgaccataattgtggtcacagagagccccaaaacattaatgttgcggctgaaatcatggtttgtgaattgttttttaaaaccttgcatctgggatcaagtccttttgaggagggattaagtctttttcttgggatgcttgaattgtttgattggaagttattgaggttcctagttaaacgagtttggtgctttatgttgaaagggatctttgattgctggtgtttataacttttattcattatgcttcagctctgtttgttccttaacactttcacacgt

SEQ ID NO: 19126 - DNA, 752 bp, Glycine max
  Intron number 2 from transcript Glyma15g33570.1 (locus Gly ma15g33570) derived from phytozome v7.0 (chr-ID Gm15; pos 37288270 to 37289021 reverse strand)
gattctaaaaagaaattgcagtttgtcttttgctggtataaacagacacacatcattgcatttttagagaattgctcaacacacataaattgaccattagactgcaaagatagggttcaattgggcaacaaggatcagggaagagaaccaacaagatactagtcatctcagagcacacagagtaagaggaaggaagaagagctaaggagcatttgaagtacaaaggtgagttctttaattgtgtttttaattttcattattgttgcaactgagttatcaatattacaattcaatttgcggacttgtggatctatcacttagtaatccaaatctgaaacaataaagggttattgtacgtaatgtttgaaattcaaggggttaaatttgtaatatgtataaaaacacagagagagcatatgtgtaattatgtaatcaagggtaattctcgatttcaattttcaaaactaaagatgaaatcgatatgggtgtgggtgtcacagaaatggttttaagcaaatcaaaagagtttttgtgtaagttgagtaaaatataggagatagcattgtatacatgatggaactgaaggatgttactgcctacattcattttctttgtatatagacctatcttaagacgaaaaatttaggtaagacccttgattttttatttttattatttttacacgtgacccttagaagttaacgtctatcattgttcataaatattggttaatacaaagatcaaccatacac

SEQ ID NO: 19127 - DNA, 395 bp, Glycine max
  Intron number 2 from transcript Glyma17g10680.1 (locus Gly ma17g10680) derived from phytozome v7.0 (chr-ID Gm17; pos 8026155 to 8026549)
ttgttcttggctacgattccattgattcttataaggtatgattcatcaatttggttcaattagctaattgaagaagaaaaaaatataaaaaaacaaataaaagcttctttaatttattattctgtccctttatcccttgctctttgtctctggttcaatcttaaggtttatttatttatattgtatatagtgtttgatcaattgaacagttttaatcgatttaagttctgatttaaaaacaagtagcagcagtaccttcattttgtgttacacttccataaaaaaaaatctgtagagtttatgtcgaaagtgaacaacttaattttcatatcaatgataattcacctgcattttactctagaaagtacactcaaaataaaaaatgtggttgtaga

SEQ ID NO: 19128 - DNA, 736 bp, Glycine max
  Intron number 4 from transcript Glyma17g10680.1 (locus Gly ma17g10680) derived from phytozome v7.0 (chr-ID Gm17; pos 8026876 to 8027611)
aacaaggtccctactttaactacttgtttgtaatttgcccatgtaattcgtgtgtcatcactacatctcaggccttatgattcgatgtatatgataatattattattgaaacttataatttttaaaattaatgacaaattataagacaaaacttgtatacaactacttatttttcaatgatatttggggtttcactttaataatccgcataattttttataaaatattttattatgcaaattattggagtgaaactttaattttaattaaaaaattgtatgaacaacacctataaaattgtatctaatttttgttttaaatgatatgataaaatatgcttttaattcctatattattaatgaattttatttttacttctcaaaccttcatattatgtcattaggtctttgaaatgtataagtgtttttagtctttcatcataacttggaattaaaaaagagcaaaaatcaaagataagcccaaagactaaaaacatgtttttttataaattacaatatgaaagttttgtctatatgcttttggttttggtgaaactatgtaaagattaaaaacatattttattataaattatatcataggcttaaattaatcaatatactattttacaaaacaatattttttcattggcataacctttttttattatcctcttctgtgctctaactctaaaaatttgctaggctttcctggaaaacttaaggtctcagtgacttac

SEQ ID NO: 19129 - DNA, 814 bp, Glycine max
  Intron number 6 from transcript Glyma20g24070.2 (locus Gly ma20g24070) derived from phytozome v7.0 (chr-ID Gm20; pos 33773812 to 33774625 reverse strand)
acaataagtttacaactgtgcaatttactggagaggtacaaattcagttattactgttctctatatggaaaagttcatgtataatgatgcattcacattttattgctttttcccatcattatctgctgcctgtgacttgtctcagtagcattgaaatttcaattctgtaggacctatttttctagtagaaaatacataattgagctgatcattggctttttttttaatgcgctttcttctaaattatcccagtggatacataagacaaatccaattataactatcccaagagcttgttgaagctgcaacttttccttccttcaaaaaaggacaattgagtttcaccagtatcaatattatttacactacgtatcaattgacttgattaatttcttattttacattatgcttttgtttttcacctgtttacttgacatttgtagcagaaagtggagacttcaattttatgatataatacagtcaaatgtacttgttataaaccaacttctaataagaaaataaaggaagaactgtgaaacattgaagctgtagtatgcaaaaggtttggctgctgagggatgattcctcaagtgattaatttcacatgatttagtctgtcctaagtttgcttacaatttagccatgagtattgattattgaattgaaactaaaatttttcctttaaattttttctttgaatttcttttacatgttacttttattgtattggaatcagtttattccaccttttgacttcctcttttcctctctttttgtttgtccacaggtgttaaaaactcctgtctcactggac

SEQ ID NO: 19130 - DNA, 796 bp, Glycine max
  Intron number 2 from transcript Glyma20g24070.2 (locus Gly ma20g24070) derived from phytozome v7.0 (chr-ID Gm20; pos 33775584 to 33776379 reverse strand)
tctctctcccgcttcagatcgtaaacgtctcgctggtgcgtttttctctcttccgatccatttcctcactcctttcgcttcgatctttcaatctccattcaattctgcgtttctcgatctcattgtttcgcccaaatcttactatcacttcttcatttgtctgctcctaaggtttttgaataattaaagtatgaacaaactagctcacagttcgatcacttatctactcgaataaaaactacagtgactttaattttgaatattaccgttgtttttttatgtttgtgcacatatgtttgtttgtttttttatttgttcatcatatttagctctgtcgtttaattcagtagcgattggttcggatcaatccattttttaaacatacaaatgaagtgcaatttggatcggagtcttgttattgtcgctgaagtttttgttagagtgaaccgctaaattgattttcaaaaaattaggtttgtttttaattatatattcgaggaactaagtatatttgaagcactgatttagtggttaaaatctttcgactgttttggtggtaactcactaagctttcaaggaatagtttaatacagtagtttttatttactttcaaatttttttactgttatggtgtctgtattgattttgttttggattgtattttcggagtttgctttgtctttaattattgattatttgatcagagcagtgcctttttagtatcgcttctcgtttgtgttggcataaattgacttttgttcaactcttcttttgtgtgcttgtttgaagttccaag

SEQ ID NO: 19131 - DNA, 465 bp, Glycine max
  Intron number 2 from transcript Glyma20g35010.1 (locus Gly ma20g35010) derived from phytozome v7.0 (chr-ID Gm20; pos 43312381 to 43312845)
tgcagtcttatttctttgacaagaagcttcaagaggtgatctatcagttcgtttctcctatatatatattctttacatttttgccccaaatttgagcattttgagtaaaagtacttttgattagttaacaaactagtgcctttaaaatgcttctgctaaaccaattcgtctaaatattcttactcgatccatcttggtagaactttgaagaaggaaaagtaacatgggaatgaagaaaaacatgtaatatatagccagatagctaggttcaataatggcttattaaaatttctcctattactccctcacataaccttgacatgtgttgtcaaagagaggtcaagattgagctgctttataaataattccctttttttcccctattcctggtctcttctgttcttctattgtttttttatttgtatgtcagactcatataaggagaaaaagcaaggaagctctaaa

SEQ ID NO: 19132 - DNA, 523 bp, Glycine max
  Intron number 3 from transcript Glyma19g34390.4 (locus Gly ma19g34390) derived from phytozome v7.0 (chr-ID Gm19; pos 41997668 to 41998190 reverse strand)
gctgaaaaggaacaaattcacgttgtagagggaaggtataccgtctttcgtgttataactttcaagtgttttaatcttcatacatacttttttctttccttcacttgcaaattcaaaatgaagatatgatataaatgtcaattttgtttgtggagtatggtgcagcgaacctattattcatagcctagatttgctaatcgtcttatgggaaatgtagtaagaactcaatatagaatgcaactttccttacgtgataatgatagacactgaatctgtgtctttcttttcttgtccacaaagaaccatagttattcaaaagcatgtttagctgctatcattgaaacttatggagcagttgattcctcggggaaaaaaagaaataggtgaacctgaaaaagcagcatgcaaagatgaaaatagcattgaaatttgtctacaaagttttttgtggtagaatacgaatagattgtcttagctgagttgatatagttacatctgttgcttgcactttgcagtcgtgttg

SEQ ID NO: 19133 - DNA, 848 bp, Glycine max
  Intron number 1 from transcript Glyma14g39970.1 (locus Gly ma14g39970) derived from phytozome v7.0 (chr-ID Gm14; pos 49019863 to 49020710)
gagaattactggccgagccccttcttctgctaaaggtgaatattcttaattatctgggtcattcctttatccaaatcaaaagtcttgtgatgccctatacaattataatgaaagttaagaaagatccatgaaaatgtgtttctgaactgttaattgaaaggataattttgcttcacagtttcattatttcagtgacactttctaagtgttgtaacgttcaatggtctacaggaaaaacgtactataagcggtgttgttaatagcggccatggggccatggcagaatggcatggcaaattttttgacaaccaccataggcaatttgtgaagggagacttgtcatggtgacgctataaggcgcaatggtgtgtttatatgaggaatttcagcctttcaccgtgttccaccattgataacactgactataagtttatttagaatacctgcccccttttcgtggcaccctatttttgggacagggggatacaattacaaacaatatagttccagagtttccacacattaagaaaagaaatatttacgtgtatgtgtagacatatctcatttaagaagaggtttcttcataattctccggaacatggacatttatatattttcacatgttaaatgaatcaaagtacatttctcatatgtatgaatttatcccattatcatagtttcaggttggtccgtaagaatggtatgtccttactctatacatgttggtgttaagaatgcctattaaaaactttccactccattgatacatgcatgtaagttttatgacattgcttggtgtaatggactgtacagctgaactgaggcagacaattagacaagagacggaa

SEQ ID NO: 19134 - DNA, 523 bp, Glycine max
  Intron number 1 from transcript Glyma14g36750.2 (locus Gly ma14g36750) derived from phytozome v7.0 (chr-ID Gm14; pos 46050376 to 46050898 reverse strand)
ctcacttctatagtttcctgtccctaaatgtattatttattcgttaattatttacgttttgtgaattaaaattttaataagaatccatttgaatttgctctttttcaaactgctgaattctgtttttggctatgcttgtcaaaagcatgttaagtttttgtgtttggttttcctgctttcttaggctattacaccaatggaataagatctaatctaattgatgaaagcagttttcttatttaacccacccatgttatgttagaacctttttctgaaagggattaagtagttacataagagtgtgaaatttgtttatgttgagggaaattactttatgagattagtttggttgtttatagaagatgtaagtccttacatttctttagagccaagcaagtcagtttctgttgagtttgattgaattatgtattgttgtggtgggccctgcagaaaattcaggcaaggcgttgaagttggagagtattagattggaagcttagaagtttctctttggaccaaagaa

SEQ ID NO: 19135 - DNA, 677 bp, Glycine max
  Intron number 3 from transcript Glyma18g52490.1 (locus Gly ma18g52490) derived from phytozome v7.0 (chr-ID Gm18; pos 61087831 to 61088507 reverse strand)
cacaaaaacatctcctcgcaccaagatcttgcaggtgaaattcaattcatctttcaccgttatgatcagttaatgttagtttactttcccatgagtgtttaatttaatttagtaaacttcctacagtatatttttcctactatgccactgcctaattataacgtatgacctgatttgatataatgagttacagtgtgtaagtataacgtatgagctgatttaatgaaagaatccggatttaatcttaaatagttagcaattttttgcactgttttttttttttttttgaattgaaagagttattagttatattcttttttattggtgggaatggaatgcatcctgctcatcgaattattattaaatcagacatgagtgtttaaattaataaactgcctgatgtatatctcttgctatgctgccaaattgttcaagtataatttaatgaaggagatatttctatgcactaatttaatgaagagttcattgtttgatatgacttttaaggtaattagttttgtaaaagcagatgaacttattatgatatatgatatagtttgtgattgaataatagtttaaaaatcttttatgccgttcatgcatatagctgtataccattgactcatagtaataatgattaatttgtgtttttattgtcagggattaggctggggaat

SEQ ID NO: 19136 - DNA, 912 bp, Glycine max
  Intron number 3 from transcript Glyma19g39940.2 (locus Gly ma19g39940) derived from phytozome v7.0 (chr-ID Gm19; pos 46445882 to 46446793)
aactggctcttagagctccacttggccaaaacacggtatggtttttgtcactttttttttttttatataaacttctctataaacacataagagaaaagatgagtagctaaagttaatacattagataaggctcctcaggttgtaacttatgagttattatgtgaacaaaacataacaatgacaatgactaacgaacttcatgtcactatatgttatcttgttgtaaaggttatgttggcctttaactttgactttttttttgtctgaacaagtagcaatttttgtgttttctcgtcccctgctagcagttcttcctctgtataaccttttgtgcactttacccttgtaatgagttactttgttcatacattctggataatcatgttggttgtgctgggttattggcccctaatctttgtgatagtgaaattcaactggatgattaatgtattctaagtctacaatttatttgtcttaatcgtgttcatgtggaccaaggacaaggatgatgcataattttccttgtcagcaaattttcttatataacttaatgctaaaacggttctactttctgtttctaacttgtaatttagttcatccactttcctgccaatctagtgttgtaagtgttgatccaacttaaagtgttaaaagttgcaaaggttgaaatggcaattaactaaatgtagatccactttcatgacaactagacccacaaacaaaattatgtatcattcttgttgtttgtggttctagttgtcttgctattctatgttgttgcagtaggaagaagaaaataataatgcaaggtctgccttttacctgcagtaaggaaattgttaaaaatgatgtgtctatagcatgacatttgttttggaatgatgtttcaggttcttcttagaggtcccaaga

SEQ ID NO: 19137 - DNA, 573 bp, Glycine max
  Intron number 1 from transcript Glyma17g10520.1 (locus Gly ma17g10520) derived from phytozome v7.0 (chr-ID Gm17; pos 7917625 to 7918197)
atcctcactgtattttgcttctaggttgtaactttgtaagttttcctgtccctaattcatctacgtgtgtttgatgtggtgcttttttccattggatgacatttgagtataaattttggtcatcctttttaatggctaaactcttctactgtattcgtgttgcatgcccttcattgaattgcttgtaggaataactcaatcgatgctttgataaaatacttttgataccaaaaccttttcatcttcaaccttactgtgcttcgcctctagtgcattgatatatcaattaaacaagaagtactatagtagaagtttgttggtatgaacacaggtttctctcctgttgaggactgtgactcaatgtgtatcaatggattttactgttggttttgccattggaatgtgttaaataatttccagttgaccttatgtctatatatagcttgtatattggcagttggtgtttggtcaaaatccttctattttctttcattcagttcatgcatgttataattatcatcctcaagtttgctacatcttgctgatacatatgaacattgcagttaaaagcaa

SEQ ID NO: 19138 - DNA, 404 bp, Glycine max
  Intron number 1 from transcript Glyma17g08430.1 (locus Gly ma17g08430) derived from phytozome v7.0 (chr-ID Gm17; pos 6244089 to 6244492 reverse strand)
gttccaagtcaaaaaggtttttatttttaactccgttgatgtattctattatgacatgacattttgatttgtacttgatgaaagagatgagagatacaattgaacacacgccaatgaaggatgtagaattagtttatagttatttactaattcattcgttcacaatgtatggatcagtcttttagtatccaaatatttgctttaatcattaatcctggtctgtaatttggttgtgctaattcttatatatcatatccttctttggttatgtttgggcattgcattacagttttttttttctttttctccgtggtttgttatacaagtgtttcttacatgctctaaatttgctgtttttttcttatctagaagcacagaaatacttcgaaattctctttgcagag

SEQ ID NO: 19139 - DNA, 1064 bp, Glycine max
  Intron number 1 from transcript Glyma18g10020.1 (locus Gly ma18g10020) derived from phytozome v7.0 (chr-ID Gm18; pos 8826090 to 8827153 reverse strand)
agaatttgctgcaacagaggaccttctaccaatctgtatgctccttccgattctctttcgtttttttttttgttacgttcacgatgtatcaattttgatgccctagcaatctcgagagtggtgcgtatttgaggaattagagtattctgcattcaattggagtatagtgcagcgttcgtgattttttttttttttttgtaatttggttggttatatgaatgaattatctcatcattggttttgatttaattctgttgttgcaatcagcgggattttgatcggacgaagttagggattgtttggataaatgcgttttgttgttttctgtaattttggatccagctgctgatttgaagttgagaagatttagggtgatgaaattagatgaagactgcctttcttaattcttgattaccaagaatataatggcagcttagaatagagaaacaaattatattcgtcgagaagtttaacatgttaattttaaggtatttatagtcagtcatggctttgcacttgggaaggatatgaattggtcagtattttgtaaaagaaaaaaaaacatgtattcctagatgttaattgtttgtctggcatttctctgcttgtaaagaaggttagagtgtacatgattccttactttaggcatgcggtgttgccttggttatgactgaatgccaattcaactttttggctcttttatgttgagttgcgatggaaagtgtgagaacgtaaaaacgcacaattaatagttgataacttgatatggttatcaactatttatagcaactcttgtgtttggtaatgcaacatattgagatttatttagtgactttagcaggctctgaagtgtgtgtgtgtgtgtgtgtgtatatatatatatatatatatatatatatatatatgcagacttgcatgcacacaaatcccataaatattcattactgtgtcactattcttcattgctgttctctgtcaatgtatgttattcttctagactttttctaatctcttcttattctgttgcagatttcaccttactttggtaattactgcaacaattt

SEQ ID NO: 19140 - DNA, 996 bp, Glycine max
  Intron number 1 from transcript Glyma14g35990.1 (locus Gly ma14g35990) derived from phytozome v7.0 (chr-ID Gm14; pos 45145100 to 45146095 reverse strand)
gtcgcagcgtggcgataacatcgtttttcgagactgttagttctctctgaatcacactcttgcttcgcgatttttgttttctttgtttttggatctggtgctgtttgttcgatccaatgtttcgatggatttgtgttcagctagagtgttttagtttagcttactgatctgtagcaagattattatttctaactcaataatcggtaattcgagttcacgcatccagatcttacttacttgattcacgtcttgatagcgtgctaagtgattattaattacttccctggcaagattgagaaacacgaaagttgcgtagctgattacttttttaaatatctgaacagtgatgtgtttcggtgagatatttgcaccttttgttgcattggctcgagctcaattgaatgcatcttgattcgttagagttaggaaactgtttgtggaaatgcatttcaagagaagataattgttgagatctgtattggatgctgacttataacacactcccgaaagtgttttttttttataatattatccttgtattagctttaagtttttaaaaatttaggagcgattgcactattgctaaccatggagtttctcgaaccgtagttcaaaatctagttggtggttatggttttaccttttctctgtttcattttcctagtcgtatttttcctatttgttgtagctgcttttaattttagatttcctaggtcaagcagattgaaccttaaaatattaatatatgctgcggaatggaatgcagacatagggctgcttctaatctgcaagtgtttttgagaagggtggatggagtgaaaatgaactgaacattattatcactagaaaaatttaataatatattagtttttatgttgaataaaatgttatcctatcccaatggttggaacttttactatcagactctctgactattgctactttattgtgttgattacagatcgtggtgaagtgcagaagggaagtgcagagata

SEQ ID NO: 19141 - DNA, 780 bp, Glycine max
  Intron number 2 from transcript Glyma15g12980.1 (locus Gly ma15g12980) derived from phytozome v7.0 (chr-ID Gm15; pos 9661671 to 9662450)
attcacgaacccagaaaattaaagaattaaaaaaggtcagatttttttaaccctttaagccaatttaattattcctgccatgaattgcaatttcttcaccccgtttgattttattaattcaattatcctttttactcccttaaaggtttattttaattttaattttgtttgtatatatttgctggagttcgtctccggttagctacgtttaatttattgtttttgcttttcgaattttcttcttcttctgagaccatattataccattgttttgatttctgaaactactgaaaaaagatatatatatatttttttccgttatgcaagtacatattccaattcaattttttttttttgctattgcatgttccaattcatttcatggggtaattgaaaattcccccaaattaatgttatgctgctatcaagctttgcttattttcgcttagcttgtcaatttaggtataaatgggatttttttttttaaaaaaagtatttggttttagggtttgtttaaagtttttgctgctaaatatctccaaatggtgttctttgccctgtacaattgaaacaatagtatctgcagtttctagtgcatgaagaatttggtgtgtttggatgttgtaatttttttatataaaatttaaacttagtacctgcggtgtgtaggtcatagaatttgatgtttattttcttgcactcagttattatcttctactcattttagcatactgcctttatgaactagatatcgagtatcaaaaacggcatctggaaaac

SEQ ID NO: 19142 - DNA, 968 bp, Glycine max
  Intron number 1 from transcript Glyma16g00310.2 (locus Gly ma16g00310) derived from phytozome v7.0 (chr-ID Gm16; pos 85375 to 86342 reverse strand)
tccttcctcttcactggatcaatattcctcccgctgtaagctctctcttcctctccttttctttacgcttattccttccttccttcaatgttttcctcaatttcttatattttaatttcgattattatatattttccctacctatatcgaatgacaacttctgattttcttccattgcctttactacttaatgtgccttgtcaatagctgctctctacggaccaactctgttatttctcactgttcattctttttctagaaatgttgcacaacgtcatatatttcgtatcgccttctctagtattcagaatacaacacagccttctttttttttttttgttgtaattgcaatcaagtctttttactgttttgaacctaatgtttctgttgctgtggacaaatccccagttagaagcaatgctatctatgacggacggccaaaattcttccatataaacatgccattgtggcctatggtgccgtcatagcgggccatccttcacaaattgcccatgacatttgttaagctttttgatgattcaaaagatttttccttgagtttggttagagtatctcaagttatgaactgtgataattttaagcaaatttgtcccagttttccatttaagtattcaacttcctttgttacttattatttctttctttctcaactttaggtgcttgaattggataatcaaccttaaagctatatgttctgtggttgatgtgttacgttttgttactattttgagcgtatggaggggtgatacttgattgatctgcgatgttgcggagtaatctatcctgagtgattatgcacatctggaatgagttcaattatcatattcttttattaatactgtgaactctgtgatttatactttagtactgggaagaaggcacaaccacctgaggatttcctgtatccatgctgtcagagagcatgcgtggaatctgtacatcgggta

SEQ ID NO: 19143 - DNA, 871 bp, Glycine max
  Intron number 6 from transcript Glyma20g08310.1 (locus Gly ma20g08310) derived from phytozome v7.0 (chr-ID Gm20; pos 11649236 to 11650106)
acccacgctgggaacctcagagcttggcaaagaatgtgccttccttaattaggacctaatggtctcaaccttctcatggttagtatatgtattttatctcttaaatgctttatgcttctaaattcataacccttctcataaaatacatacacgtatttgtagaacaaaatttggtcatgattttattgtatttaaattggaggatcagactccaaaataagctaagttaggactggactttgactacatgtgtgacataggtgttcttctacttcattttcattacaatgttacttgtccccggaataatcagaaaacaagatgataatcactcaatgatgcattgaagcatatcttaggctatggagtaatcttaataaagcattaatatggaattttgatgcaaattttgggttatgtatatgtaccttaatacttaaaattctataataccatctctattttgggttttttggcatgcacaaagaaagtcactagaggtatgtgtgaatgaaatatatgatatggtttctagtccgataaaaaatggataaaagaagttcatgaaaaatattagagaaaattattgcaataacagatttcataataaatgatatcattgaaaaattagttatagattgtcccccaataacatcttaaaatctttgtagagtatctcacttggctagagcatatacccatctacttgaatttgtttttagattgagctgaattacatcatatcattatgtagcttatctgacttgattggcgtttgttatataatgatacataccatatagttcaaataactagcctacatgctgcttcattttccctgttttcaacaattttatttcacatgcagaaa

SEQ ID NO: 19144 - DNA, 237 bp, Glycine max
  Intron number 2 from transcript Glyma17g35960.1 (locus Gly ma17g35960) derived from phytozome v7.0 (chr-ID Gm17; pos 39922965 to 39923201)
aacagcaacaacagccacaaaacaaatccttcaggttattaatctaagtaccctctcaatttttttattattgaaatcccaaaccatttcccttcctttccacccgtcattttaccaaccctttttgatattttgtttatttttacaatttctctttgcaattgaatcttctttgcttttctttatatttaccccctttattgttttcttttgctttcagaaatctgcaaacaatcg

SEQ ID NO: 19145 - DNA, 391 bp, Glycine max
  Intron number 1 from transcript Glyma19g03050.1 (locus Gly ma19g03050) derived from phytozome v7.0 (chr-ID Gm19; pos 3166206 to 3166596)
ggaacaacactgccaccttaatccaccaccaccaggtatcacatgttgtttgaaaattattacatggtctaggacaatcacgtgatcaataaaactggattatgtatcacatgaaggttaactgagactatggtgatctagaaccatgtaataattttctccatgttctctacctttggggaagtgggtttgtgtcaaaattcaaacttgttttttttttttattggtaattattgattgttagtttgttagttatttgtcatagcaagagagattgaacccgccacctttgcctccttttcttcttttcttaatcatctaacccattttttatttgcaaaatttaaacttgttttgttgtttggtgtgagttctgtggttttcttgtagg

SEQ ID NO: 19146 - DNA, 587 bp, Glycine max
  Intron number 1 from transcript Glyma18g53470.1 (locus Gly ma18g53470) derived from phytozome v7.0 (chr-ID Gm18; pos 61783334 to 61783920)
actcactttgtccttcaagtgaaccctcaagacacggtaattctaatcagcactcgttattcttcagattagccattttctttcacttcatttctttgcttttctatttttctcgctgttgctgttttttttttaaaggtatagttacatttgtgtcaaatgctatttgaatttgcgtttttccgattattttttggattcttaattttattcagattaaacaattttcttttagttcttttgtaattttctcgctgtaggaggcttttttttaggtacagctacatttgcgtcaactgctacagaatatttgaatttgcgtttttccgatttcttttttgtggattgttgattttattctgctcaaacaattttcatttagttcttttgtaattttctcgctgtaggagtttttttttttttttttttttttttttttttttttataaatttaggaattgttacatttgtgtcgaatgctattgagtatacatttttccggaataacgttttttttttttggtggattgttaattttattgattgatattaggttgctgttgtgaagaagaatatagagacagcgc

SEQ ID NO: 19147 - DNA, 394 bp, Glycine max
  Intron number 1 from transcript Glyma20g34190.1 (locus Gly ma20g34190) derived from phytozome v7.0 (chr-ID Gm20; pos 42621566 to 42621959)
ctcagcttttacaagtgagttgtctgtcatgaaatgaaactgattgtatatattgcaggttttggtttagtttgtgttcttagaaagacataaattttgattctgaaatgaatagatgcaggtcctgattttggatttatatgggacgctacatattttttataaatcccatgaggcatgcttataactcataagctattgctgccacatatttcacgaccattatgaccccttttttaaaaataatttatataagacttaattatgtttctaggagacattcatggttgacaaatgaagctctattgtataatcatcttcttttagtttcacaggtttctcatagttcttctgagatgctgacatctaacttttgtcatccaatgatagtcta

SEQ ID NO: 19148 - DNA, 756 bp, Glycine max
  Intron number 2 from transcript Glyma20g32790.2 (locus Gly ma20g32790) derived from phytozome v7.0 (chr-ID Gm20; pos 41416565 to 41417320)
caggtagctgtgttgtctatccttcattcaagttcaatgtgaagaattgtcataggtttgaacatattgtgactgtcagaggacagtaaaccatgaatatcctatggaaagatattgatttcaattccaaaaacaaagaagaaacacacctggcaatattgattcaattgatgctgaccatcatataagaaacatttgtacctttcagattaccattcttctatagttgtagtagtactttattagtctcagaaaattgtatgcaacttaatttttatatattcttttattcttcagttcattacaaagcaatatgccaatgaattggttgcattagatgtttggcatgtcaatatgtgggaagatggggaatgaagattttcagtccaagaaagggatgattacattgagggcaagcaagattttttattgctttcatatattagttcttaaataaatcatgtgagaaggatttaattgaattaattagagtagctgataaattatgcgaaaatgatactaacaccataattactagtgacttaacatgaattcacattgggtcaaactagaatgatgtctaggtgttttagcaattgataagggtaaaatgtaatactgttattctgagaatgaaatagtttaatattttttccatcatgattttaaattatctgtggttttagttacagaattacctatctttgcttactattctttataatagcccttgtattaattcgcaggtactgtcag

SEQ ID NO: 19149 - DNA, 993 bp, Glycine max
  Intron number 2 from transcript Glyma16g06470.1 (locus Gly ma16g06470) derived from phytozome v7.0 (chr-ID Gm16; pos 5837997 to 5838989 reverse strand)
ttttttctgtttcttgtaagtggtttgggaaattggtcggaaaaggagcagttttggttggggttagttgcaaaattgctgatttacctctgctggccagtgaaaattagtggtggaaggaatttgttgatggaattgtgaatattttattggttgcaagataccctttggcttttgatttaacaaaatggtgttaaccctcttggttgttatgtggttgagtgttttttttcttctactctttgttttgtatatttaatttttatgattgtttacaatttacatgtctaagtggtgatgatgaatgtggttgcagtcacaacgttggttgaaaacaaaatcggttttggtgaaaatctataattagtagtcatagcttgtttactcataagtgattagtatttagtactgagcagctctaatgtaagacatgatttctcttattattaatactgtacatcatatggacatacacgtgttgactgattagtaatacaaaattttcctcttaacttctcttaattttgtagtctttgacaatggatatttttgttatattgattttgtgtggaattgttggtccaatcctgattcaaaggagactataattgccaaggggaaaggtcccggggccaagagaccctagtgctctgtgttcttggaactaaccatgcagcaactataatatttagcatttaaaatttttcttcactgggtcaaatatgaaaaatgttaagctaattagttttatttgctcttatcaactggtcaattatatttaattatattagaggttggtaagagtaagagcacttttatatagattatgtttgatggtgcttgcctgcaaagtcttgtcagttcccaaaattattaagaatgttttaagttctttatataatatgccttgtggaattcaggttaacgttatgccgttgttttgccattattttcatttcatttttaccttctgcagacaagattttgcaagaa

SEQ ID NO: 19150 - DNA, 365 bp, Glycine max
  Intron number 2 from transcript Glyma15g19120.1 (locus Gly ma15g19120) derived from phytozome v7.0 (chr-ID Gm15; pos 16172884 to 16173248)
aaacttcaagaacataagaaggtacttgactcttgaacctccatttagtatttaacacaccgaaattatatttaaagttctttcatagttcatttttagcataatgattaaatcaaaattgatatctgacttaataatcgactaatgttttaacaattattgattacagtcatagagttttataatctaactatatgctagaataacggaataagtgtttttttgaaaaagcattctcttccctagtttcctaggaaatgctagaatttgtgagcctctgcatcatgttaatatttttgttagtagttaaattaaagcttttgacaacaggttatcactggcatcgcacttcctgttggatccga

SEQ ID NO: 19151 - DNA, 832 bp, Glycine max
  Intron number 2 from transcript Glyma16g33870.1 (locus Gly ma16g33870) derived from phytozome v7.0 (chr-ID Gm16; pos 36631165 to 36631996)
tctgcatcacagagggcattccccagcacgacgcaagtcgttatggaattctgaattcgtaatttgaaatgtgtggaatgggcaatgctgtttaaggtttttcgtttttgtggttttaattgcgttttggttttgctatgaagtctgtctgatcatctatgtaatgcttagattataggatggctaatggatgcctttgatattgtttaatttagctcctctaaatggaggaaaggataaagtaagtcatatcatacttaatattctatcgcatttttaatttgaaatacttgtgtgcctaatagtgacagttgaattttaaatcaatgattgcctgctttggataaacttctctataaacacttacagaagaagaagcaaataagaatgaaagattaaataaacttctcccataagttaaaattagcttatgcatcatatgtcaatttgtagaagttctttcattttagcttcttcaaaagctgattttgacttatgtgtaagctaattttagcttatagaagaagcatttttaaattttttcttctctaaagtaagcacttactttaaaaaagctgcttatggagaagtttatcctgatagggccgagattactttaccctttaaagtgagttgcttactttagataagccagatccaacaatgtgctaatgtcaaatgtcttgtgtagtggaaccttttgtttgagcttgggaatgtctggtgtgtagtttactttggagtctgtgctgctgatttgaatgtagtggctgaagttgataacttttctatgtcaggttagggttaaagcagcacttaacaggcagtccaa

SEQ ID NO: 19152 - DNA, 496 bp, Glycine max
  Intron number 2 from transcript Glyma17g29080.1 (locus Gly ma17g29080) derived from phytozome v7.0 (chr-ID Gm17; pos 31113467 to 31113962)
gaagacgaattccgtgttttcggagttattcggaggtaaattaactcgctttaatattatttcctctcaatttcgttttggatacttcaatttctaagttttggttgcagtgatttttttttttgtttggctgtttaggtttattttcgaaaaaaattgattttgtgtttaatatgctgaagacgctttaaatttccccctcaattttgcttttggacacttcaatttctcagtttttgtcgctgattatttttttttcttcatttgctatttaggtttattttgaaaaaaatgattgtttaatagacactatgttaaagacgcatggatttttcccctcaattttgtttttgacacttcaaaatctcggtttttgttgcagtggtttttatttgttttgtttttctaataggtctattttttgaaaaaaaaatgattttgtgtttaatgctatgttatgtttgcagtgtttgggttgcacgtagaccacctggtt

SEQ ID NO: 19153 - DNA, 836 bp, Glycine max
  Intron number 2 from transcript Glyma17g04570.1 (locus Gly ma17g04570) derived from phytozome v7.0 (chr-ID Gm17; pos 3033646 to 3034481)
gaaccaaatacgcaggttttcttctcttttttaattttcacactctgccctttccttttcatctataaagctctttactttctcaaacattctcacctgggtctgtcgttatctatatctttctcaaacatgctttgagtgtttctttaatttttctctttttggttctatagctgttgtactaacaccgcaatttcaatgaattgatgaaactgctttgtttattaagatatggtaaatttaggctctgaatgctgtagctcttttgcattgttgcatatattcaattttcagttgctttgatgagtcttaaacattgtgcctatcgtttagggtgatcaacttaataaactgagcatattgtgattataatcatgagatcagaaatttataaattttatagttctattttctatctgttaggctgatttggctaaaccttatcaaaatccacgttggaaatggttcagagtcccaaattatgaaatgattttttgtgcttaatgtaatgatagttagtgtactttaaggaataaacctccattttcttcccaagattgtaaaacatgaatcacttgagtcatgactgactttacaaaatcctcaatttagtccctgactgttgcaaaaagtctttcagtccctattcacttcattttctaacagtaaaattgcactttttgtcttaactcttaaggctttttagaaaggtgcatttttccagtattaatagtaaaagtatagtttaataatggaatttcttctgttttgcctatatcttgaatgatgatcatatttcaggttggcaatatcagcagtctccccctactgtacaa

SEQ ID NO: 19154 - DNA, 305 bp, Glycine max
  Intron number 2 from transcript Glyma17g05530.3 (locus Gly ma17g05530) derived from phytozome v7.0 (chr-ID Gm17; pos 3879234 to 3879538 reverse strand)
ccgcagtgtgtgagtgttaatagacattttattttcatttttttaaaattaacatattcgactgttcttttgtttattttgatttaatcatttttttcttccagtttagcttcattaggtcacttgttgacttcattgtctctaagataatccttagttagaaatattttaattttatctgttggtctctctttttatatagtaagtgaatccattttttttgtcccctgggcttattaacttaccgttttgctttgtgtatttcattttaaatatctaatcacttttctggcggatatgcagtt

SEQ ID NO: 19155 - DNA, 446 bp, Glycine max
  Intron number 1 from transcript Glyma17g05530.3 (locus Gly ma17g05530) derived from phytozome v7.0 (chr-ID Gm17; pos 3879557 to 3880002 reverse strand)
tctaccaccaccctgctctacttactcctcctcaggttcctcttttcccttccttcttattattttctcatttttagttttatttttctcaatcttcatagtacttattattgttattttcagcttaattattccaaatccgtcgtcttataatcgtgattactgttttacttcaatttcacgctaattgatcaactatcagtttttaatttctgttagatacgtgtgatttagtggtgcgaattcgtcttgtcgttttgttttttttttctttttacttgttgagacttgtaggtatttttatggttttcgaaatgcgatttgtttgattagattagttgagaggagggtggataattttacttttaggaactctttttttttctgtcttcttacatttttattttgcagatagagcctatcttgagtggaaatctgccacctgg

SEQ ID NO: 19156 - DNA, 633 bp, Glycine max
  Intron number 1 from transcript Glyma14g18380.1 (locus Gly ma14g18380) derived from phytozome v7.0 (chr-ID Gm14; pos 20472258 to 20472890 reverse strand)
tagttctccttcatgtcaagcataagccatcttctctttctgcatcagcttctcttacaaccccaagtatgtattcattattatactctcattcatgcatgttcttttcagtgccattatatgaaactagcaataataatgtataacactttctaattttacaattattttaactaccctttgtacaattaggaatgagataaggggaagtacttataaaaaatattaaaaaaagaattgaattgtacttttcgtgtaagccaaattaacttatgcacgtctaaatataaataaattggataagagagtttcttaaaagttgagaaggatttattttcttattttcttctcgtatacatgttttttaaagaagtttaatttattcaaattgagtcatgaagagatgaaaaagaagtttaggatgagattaagataaattatgtaatgaagaaaaataaaaataaaaaacaaacaaataataaaaaatggagttttaaaagttaaagtaagaatgataaaactcgtgatataatataatagcatatgaatgaatgcatccttagattattcatgtatttgttataattcacaatttaaggtggtatcaaaatttatcttagtagagatttgttg

SEQ ID NO: 19157 - DNA, 967 bp, Glycine max
  Intron number 1 from transcript Glyma19g01010.1 (locus Gly ma19g01010) derived from phytozome v7.0 (chr-ID Gm19; pos 703946 to 704912)
aggaagctgtggaagattggaggaggagaaaacaggtattgttgtgttttgtatttttttttcctttcaaattttgaatgttataaaggttttaaatatcagttgtggtcgcgttgtgatttcgtcgcgtttgttgatattgcgagtaaattgtggacaaatgcggctgattataaaaccttgatgttgtggcccaaatcatgcctacaaaaagtacgaattgccccttccccctggtggtgctttctataaaggtccatgtttatgtacaagtccaataaaattggaccatactcaattggcattatgctgttatgagtaagcttgcatttgtttgtggttttgaaaaaaattatgaaagaataaaaaaaatgggagtagttttccccttgctagttactactgctgatgatcaaggtgtcggttgagaatcttcactgtcttccaatgctctaagtaagattagaaaattattatgatcttattgacatatatgtatatttgaatgctcttttgtttctggaaagtggaatggctattgtaaaactctcttttttctctttgaacacatctaatataatataattcaattgcattccaatttgtgtcagaaatttgtcatcttccttaattcttgaaaagacgattctaggaaatgatactgttccatattattctgtcatgtaattaagtgctgctttatgcctatgtaacttgttttctttttattggcatattcttttttctgttagccacttgctttggatgtacttgacttttgtgttctgttaagagtcactcttttggattcatttcttttaaatcttttggttatggaaagttttatttttcttttctttttccccattgacatcctatatatcatttggggagtagaagttttcctggctaaaattcttttaattcttcaggatatagaggcaaacaaccgaaaggttcaggtata

SEQ ID NO: 19158 - DNA, 806 bp, Glycine max
  Intron number 1 from transcript Glyma16g14740.1 (locus Gly ma16g14740) derived from phytozome v7.0 (chr-ID Gm16; pos 15661019 to 15661824)
tccagtggcagaggtagaaagcataatagccctaggtatcaacattctcattgccattttacagtttttaattaggctcaatatataactttgtgtataataattaactatgccttggaaagacacaaatttgcttgtgcttgtctatcttagtgtcactctttttcgaggtttgtcaaggaaaaaacattttgatttagccacattcttgttgaaattgccaaagtggactatttctatttctcagtttgtcatttcaaaaaggacctagcttctatgcaactttctctgtatttccttgatgtctcttagattctactttgtttcctttccccttttatcttgtcctggcactgaatatcaaagttataaaagaaagtgagattagatatagcattcatacttatggcaaaattccttctcttctttatgtctctcttttctgctcggcacacaaactcacatatattcccaaaacacctttgcttctactgttctcccaacctttgaaggtagctttcttaaaagattgttacacctatttgtttttttatttctgaatctataatatattggatctaaacttgttgaagaattttatttcttctgcttcaaattaaaactagacagccaagtttctgcatctttcatattttactaatagtgcatccctagttatgctaaaaaacagttaatgccattaggttgtgtcctttcatttatctaaccctgaatcttttctctggtcctgtaaaaattcactggagccaggaatttggaagacccctccttaggtggaagtgagt

SEQ ID NO: 19159 - DNA, 1008 bp, Glycine max
  Intron number 2 from transcript Glyma17g30770.1 (locus Gly ma17g30770) derived from phytozome v7.0 (chr-ID Gm17; pos 33660229 to 33661236 reverse strand)
ccacctatgtaagtctcataccacatgttttcaatcaaccacaaccactaacatcttttgcaccagattctcaatctcaactactatgtagtagttttttttcttatttatttaatatttattataaatgtcaaaaagtgcttcctaagaaaaaaatatacatatttgttagtatattaaaaatataaaagttatttcatgtttatatatttttagtaattaaaaacagaataaataatttatgcacttgtaaaggtttttatattatcatgtgtaataaatttatttactttataatagttatataaaaaattgtatttataataatttttaatcggttatagtataaataaatttacgctagaaatacataaatattaaactctttaaagtatattgaatgcattaatatgtattcttaaaaggtttaagcttttagaattttcatcaaccatgtagattaacttgtgtcagtttaaatttaatggagtttttaatgttgttttctaattcgtatttgaatcttatgtgccattcaagttttttcttccttaaaattctaatgaatcagatcatttactctgtttttatttattaagtttaaatttgtctctatttttttttaagtgaagtttttttttttatataaatttgagttttgagttttgatcgttattatagatcttatatatagcaacttggtccctctaaatgagttttgacttttgattgttactatagatcatgttttctagatagagtaactttagtcaacttattataagataattgagtatcgaaattacattttaaaaaaactaaattattaatttgactcctctatttatttaattagtttaaaatagtctctttattattaaaaaaactcaaactttatatgaattaaaatcaaattttaatatagttataagtatcaagtacatatttaaatcatattatgtcgttgttgggaactagttttaactgcatcaagaacaggggaagctg

SEQ ID NO: 19160 - DNA, 1009 bp, Glycine max
  Intron number 1 from transcript Glyma17g08550.1 (locus Gly ma17g08550) derived from phytozome v7.0 (chr-ID Gm17; pos 6334362 to 6335370)
attttagacaactccgacaggtgaccatcatttccatctatcttgattttccgtcgttgcttcaagattttcttgtgtctcacactcacatatgcttcttcccaataagtcaatggcttttattttttgtattttttttatggaactactgttaaatatatcatcaatattaatgacatttgacattcctattttcaagtgaatggatcaataaacgtgggattgtttcattttcaaattcaaactttgaatgtgtagttaccttactaatatgggtatgcatgtggtggagtgatggtggtgcatgttcactatagttttatcatattactatttttttttttatctttctcgctaatttttttattatataaaaagttttataaatataatttctattttactgatgatgaaagtgctttactttgattactctgtttacaactttggcttcgagcagtatctaaaagatggcattcctatgcgtgtactgagtaggtataaaatgtttatctaacgatagtcatttgaaaaatttaaactttcatttataatactttattaaataaactgagtaagttgtcaacgtgcactatttaatttatcccatgttatttactagaatatttcaaactaaattttattaaaaataatatgtgatgtaataaatgattttaagtaattttaataaataattaaaaaaataaaagactactagctagaactaataaaaaagagtaatttaaatgcaaaataaatatgcctgaaatagatttgtgaagcatatgttttgagaaagcaatagtggcattcacaaaaaaaaaaaaaaaaaaaaacaaagcaatagtggtataggcttcaccttaagaaccaaaaaaataataaaccgtccggacacttataattaagtctgttcaaatttttaaatgggaataacaaatccacatgtaaccaaaataattatatacatgcaggaagaagtggaaagattgacaagtaatttagcaag

SEQ ID NO: 19161 - DNA, 964 bp, Glycine max
  Intron number 1 from transcript Glyma20g26280.1 (locus Gly ma20g26280) derived from phytozome v7.0 (chr-ID Gm20; pos 35776563 to 35777526)
atcagcttctgcacttcctgctgattccacttttggtaatataagctccacttttcagatctgaaactacttgtttcaactttttctttctttgtattgaatgatttatacgtttcataaacatatgattgcacgactccttttccgaaattccaatctacgctaaattgttttatttatgttttattttattttttaattgtttactttagttggaaattgaaaatcacgaggttcaattgatggaaatcagtatccggaaatgcttttaagcaagatgtttagtcagggacgtcacagaatcgttgagaagtgttgtaagtgtttccacgggtttccggggtagttttttttttttatgctgattcctgttgcaagttaagtgccagaaaactgttatggaaaatgtgtgtggatttgattttcgccattactgcttccggtataaggggataggcatttgtgaagaaatggcatgtgatgttgctgttttttttttcatttaaatcttacaaatcccctccttctgaaacattatagaagctgagatgtagtatctattgtgaatttgtgatgtaacagtttgtgaattgtaaatttgtaatggctggcctgctttaatcttttaaggagttactacattttcctcttgttaggcgaaataaatttgtgtagtcatagataatatatgactgccagctacaatgaaagacaaattcaaagatagaagagactacgagagattctcacataataagacacattttagtcacaatcacaaatgtacataccggtagtatgtatataattatgactgatcttattgttgagtatacaagaataattaaaggaataggcaaaatataaagaagaaatattatttgaatattttgtcatgtgttctattaacattgtgtctctatgtgcagcttcaaccgggaagatactgtagggcctgggccac

SEQ ID NO: 19162 - DNA, 595 bp, Glycine max
  Intron number 2 from transcript Glyma20g26280.1 (locus Gly ma20g26280) derived from phytozome v7.0 (chr-ID Gm20; pos 35778005 to 35778599)
ttgtttcacagaataaacgcagatatcaggtgctgttcttgttcaaactaatatactgtgtgtattcttgtaaagctgattttcacaaagtcttgctcatttaaaaagtttattgtttcttctattgggaacattgctttaatcccttaataattgggtgaagctcatcattgggaggctattcatagataccttttgatgtaacaattattatctaatgcagaagcaaaattgggctaatcaatgtctttttgttatctggcttttctataattgggtgaagctcatcattgggagcctatttgtataagccctgaatttgctgacgttttcttactccctgttaaaacatgtcatatagtttagtgttctgtatgatgaacattctagtctctttgcttgaaaaagctgttaaaattttgttatgtaactattgttgttactggtgagtgcattgagtttgattttttgtattttctttgtttcatttggaattgcttgttcccttctcaaagaatcaggttgatgcatactcttgtccacttttatattcctaacctttcttttttttcaggaaggaggttttgatttagat

SEQ ID NO: 19163 - DNA, 580 bp, Glycine max
  Intron number 2 from transcript Glyma17g33570.1 (locus Gly ma17g33570) derived from phytozome v7.0 (chr-ID Gm17; pos 37479292 to 37479871)
cagcttctattgattgtttgctctcacgctgcactgttagggggttagaaaaaagaaatacctatcacaactctaactttaaacgacaccattttttttttgctattttaactcttgtgttttatttccaacacaaattgtatttggtttgtcaattttaactattaaatacttattcatataactttcttacctcttttgctcaaaattcaaatttatatgcattatagtcaagttttattttctaatcgaatttaaatagagatattttctaattattgtttagtatcaaataaaaattatttaaatgatgtgatatcttttctattttaataaatgtttaaatattttatcataaaatatatcctaaaacattgtaaaatctgttaaattttttcaaatcctaatatttaattaatatataaaatatttattataaataacattaaaacattggtcatcccactatagtgtttttggggccaactattccacaatgatacttatcaaactaactcttctcaagttagaacaaattcagtattatgtttcaatttctaactttcaacttatcaagggg

SEQ ID NO: 19164 - DNA, 201 bp, Glycine max
  Intron number 3 from transcript Glyma14g05330.1 (locus Gly ma14g05330) derived from phytozome v7.0 (chr-ID Gm14; pos 3774295 to 3774495 reverse strand)
ttgtaagttcccatttcccaattttcctactttctcttcccttttcgcccctttgaaaaaaaaatgctattttgctattatatagtcattgtagtgtagagtgtttgtgaaataaaaacacctatttgttttttgactcatcaagttatcattttcttttttgcagtttggaggccttctaacagcgggtatcttggcttt

SEQ ID NO: 19165 - DNA, 753 bp, Glycine max
  Intron number 2 from transcript Glyma17g11850.2 (locus Gly ma17g11850) derived from phytozome v7.0 (chr-ID Gm17; pos 8898581 to 8899333)
gactccatttactggaatccacacgcttttcaccagttaagcttttaacagtccttgatctctgattatttttgttttattttcctttttggtttgatttcaaaagttgcttttttgttcacaagtaaccctgttctactgtttttgtagttagtgctttgcataaatttacgagataaaataatagatataacaagaatgatagaaaaataatattatatgagttgttatataataatacataattatagacagtcacatcaaattattaaaatcacctatataatacgtattacttttttgcaaaactccataggtttgtgttccttctcaacctatgaagctctgattgtcataatatgtactgattatatgcgcacctcaaaacatgagctaaagttataaaataattattgtttaagttattttatataaacaatgataataaataaataattttatattattattaatttatttataattttattatttatcattagtattataagaaatataaataaaaaataatcaatattatattaaaaaataataattattttgaaataattttctttttcttatccgaaccctgaaaacagctgaacataatctagtaatttaaatattttgaacaaattagttactacataaagaaaaataatcgaacacagaactattttaagttttagccgaaataaataaagcgggcccattgagcttaagtgattaatcttgtttagaacaggagcc

SEQ ID NO: 19166 - DNA, 917 bp, Glycine max
  Intron number 4 from transcript Glyma14g27330.1 (locus Gly ma14g27330) derived from phytozome v7.0 (chr-ID Gm14; pos 33490064 to 33490980)
tttctaaagaaggatcttctgctcagttatccgttgtaagtaaatatttctcctatagttgtagacaagtttagtttcatggttcaattccattttcaattcagtggtactggttttctgattgctcagtcttgccataccatgtctaaagtgaaacacaggatgactatggttggtagttttaaagaggtccttatttatttcttctgtgggtgtttgggtaaaccacttaattaagctcttctctaatagaaatttattatacgatagcttattcataaatttgactataaaacctagtgaaataatttataagtttttgcataaagcatgttgaaataagctaaaaagagcttataagaaagtcaaaagccactttaaaagctcaaataagctttctagaagctaacaaaagaaggtcaactttcaagtagttgtgttgatgatctaatcataggatttggtcagtaactttctctgacattttatgtggttatagttttcaagtgtgagccatgttcattagtaagatgaaactgcaaataacatgacttgtattcagttgtttctgttagctaattatgatggatatttagcatgtctttgtcatttcttgttagttatagacatattcaatctgcaaaacaaagaagagtactaaccaaagaaaaatcagctctagttttggactgttccatgattctccattttcaaatgctaggtatccctgtttacaattaacatttgaaaatattatttttttccaaaaactgtgtgggtttggcctttctgcatataatatgtatatgtttatggctaatcttgaatctgctaatatgttgagggatgtcagtataatctctgattggatttggattgcagatttttgaattggaacctggtctatataaggattg

SEQ ID NO: 19167 - DNA, 945 bp, Glycine max
  Intron number 4 from transcript Glyma17g31700.1 (locus Gly ma17g31700) derived from phytozome v7.0 (chr-ID Gm17; pos 34911125 to 34912069 reverse strand)
ttggcagtggtatttaccttactttttttttttggatgtttatgctctcctataatgcaaaattatattagcctgatttgatttctaaatatgaaatgtggacttttatacagacattagggtatgcctatgtctaaaatataggacatcatgccactataaactcacatatatcttcacgagctgttaatgttgagcttgtaaagctaaggtttgactcatttaattaatcgagcctaatctcaagcttgaggttgtttgattaaacaaacaagcttgatcgagcattaacaaatcgagctcaaatagttcacgaatagcttagttcattacaccccaagccatgggtcagcctggaagaaagagaaacaaacagtaaagtaagaaaaaaggaaaaacagaaggtaaggggttccggaatgggaagtgaaagcataaaacagggtagagcaaaccattgcaggcacaatgatattgatggcaactggaaagagaggtgaatgatgatgcagcaacagtggttggaccaaaatggaggaaaaaagtgccaaaacaagagtaggacaatgacactaaatcagagagacacgatttccacaaaaaaaagcaccaatggaaaatgggtcctctgggaaagcacgaaatagggttgtctctgtgaggctctagatatcatgttgagaagaaaagaatgcaagagacatgaccgaatttgtgtatcaatgcacacagaatggagtatagtattatatagtgtgggtaataattatagaggaaatattaccaaattacaataattatgtaaatcctagaatttcccaattaccataattaagggtatctagcaacaaccaacaattgcctaattatcataaataaagatatgtacaatatctaacacttctctaactatctggatgcatttctaatgctgaagggaagaca

SEQ ID NO: 19168 - DNA, 994 bp, Glycine max
  Intron number 3 from transcript Glyma15g03020.1 (locus Gly ma15g03020) derived from phytozome v7.0 (chr-ID Gm15; pos 2109727 to 2110720 reverse strand)
cttgtatgacaagtgatgtttcctttgtttcttcagttgcttatttaattattgaggaatactaggaatatgctcttttaaacacactcttgacaacgggttcaccatctaaagatcgacacattcttaaaaggcatttgctttcaagtttcaaggcaactgaattgaccttttagagaataaacaacaataaagtgtatgtttaaaagaatgtgttcccagcattctcttcatacttatgtcagtgtggcagtgtcaattattcagtaattttgtggactccctgctttgaaaatttgattaatgcatttagacattttccttttaatgtttaccctgttggagttatattattccattttttatctgtgcaatcaccatatcaggctctttttgcaattttaatgatagttccagcaattttaaattattatttaatgctgggataactgaatgtactgaagtttttctttgaagtttaaaaatcattaagaattattttaaaaagggaagccttggtgcaacaattggggttgtcaccattaacctggagtcatagaccaagttatgaaaatgacttttgcaaagtaagactgcctactagctgcatggaccccttgatggtggaaaatttatatcatcaagtaatgtactattaaaagggcattgacttttttttctttctttcttttaatcacattttttttctttctttcttttaatcacatatgtctggaattattgttttctgaatttacattgatttccatttcaaattaatttctagaagattacatagtggatccgtggggtaacaaccaatatggtttctaactgtttttattattttgaatctatctttgatgaggagcttcagattttagaagaagaaaacaaatgttatataaagttaactctaccacaagacaatgtgtgatttttttattcttgttctataggttttgagaggccttctgcaatacagcaaagggga

SEQ ID NO: 19169 - DNA, 675 bp, Glycine max
  Intron number 1 from transcript Glyma15g03020.1 (locus Gly ma15g03020) derived from phytozome v7.0 (chr-ID Gm15; pos 2110996 to 2111670 reverse strand)
cctctttgcttctatctctattaccctaacaccaggtaacccccccccccctctctctttctctctgttcgctcgttactccccaacttcataatttacttatattgtataataataaatccgccgtttttcattctgttttaattgtatatcgatgcctctatgtttttgattatgcgcttgatctaatggctttttttcgcaaagcttttcattggatatttggtgttctgttttttttttcagattatgaatcattttttgtttcgttacccctcgaattttacgccttttggaagccatttattcactcagcgcactgaattttttgctatcctgttgcataggtcccgtggaggaatttttttttttttttaaatatttggtgttctttttttattttttgtatttgacacagattagagtgatgttccgaatttcgatcagttcgatttttttattttttttgttttgatttgttggtgttcctggattgttcttaagctttatttttcttttctgacatattgtgaaaaggaaaaggacttatgaaagcaagagccccttttccttcttttacttgcgatgtctcccgatattttttggactttcttttgttaggcttttcgaagtacacttgtctgtttaattttaacgaagttttgttctgcagtg

SEQ ID NO: 19170 - DNA, 681 bp, Glycine max
  Intron number 1 from transcript Glyma20g38060.2 (locus Gly ma20g38060) derived from phytozome v7.0 (chr-ID Gm20; pos 45768207 to 45768887)
atttccagcttccattatcttctcatctcaatcaggtattcattctctctattttcaatgttttgttgttgcaagatttttctctcacatgcttgttttttcctcttaattttcactttttcttataattcctggtagaaagttagggtttgattcttctatttccgttcttccatttattcttctcgaaacatatgcgagcatggatcgattgagctactcgatggattttggttttaatttcatttctccttgtgattctgtaacagagaaaacaatagaattcttagctgtttatatgactcctagtgtttttgtgagagagagggagggagggagggagggaggaagagatattaactggatgcttgtttttattgcttcttttctgtttcattaagctgccgaataaaacagaatgtaccgaaaggaaacataatgccgatggccatttgtgatatttttcctataactgatatggcatttcaatggcccttcttgggaaagctcaagtatatgtgcgaattatatgattgctttagtgatttttcctcagcgttgctttgtcgaattatggatttttgctttagctgaattgtttcagtagtttacattcaatgtatgggagtttataagaaaaattgttaactctgcaagtccaactgttctttaggggggaaa

SEQ ID NO: 19171 - DNA, 597 bp, Glycine max
  Intron number 2 from transcript Glyma20g38060.2 (locus Gly ma20g38060) derived from phytozome v7.0 (chr-ID Gm20; pos 45768940 to 45769536)
ttcgcttgagagaagtagaggatctattctacaaggtatgcatatctgatacaattaagataaatttctgaaaatgatattgtattattattctgatgattgaattacaggtctgtatacacagttgcacacacacatgaaaagaaaacaactatataaagatgggattaggaatatggggaaatagtctgggacctatctacactaccaaatcaagttatctatggtaactgggatagctatcaagggttgtgaataactacaaatcatatcattatcacagactactattataataaacaaatacctttatatctactgctaacttttatagtgaaaaatgtaaactttaggtttccatcatgtttattagcatttgggcatgttatggtttgattagcagcatattgatggtagcaaaaggcaataaagaatccttattgttctgtctattatcatgcacatgcactatttccccccttcatttactttcttggtaatacccacaaacacgatattccttttgaaatcttgttgtagatgaagagatccggatttgtatttctctaattgctttcttcactgtctaatttcagt

SEQ ID NO: 19172 - DNA, 1017 bp, Glycine max
  Intron number 1 from transcript Glyma19g07140.4 (locus Gly ma19g07140) derived from phytozome v7.0 (chr-ID Gm19; pos 8414128 to 8415144)
ttccatcgccgttcagatccaggtatctccacaaccaccacttctcactcaaactccattcttcttcttcttcttcttcttcgtcgtcgtcgtcgtcgtcattgtcgtttcgtttcatttaacgattttcacaaattacaatttacaacctacgtttcttattttcggatattcatgagttagtgtaaggtttccgcaatctattgtggccactgagcgtgcgtgttaattgatatgcatgcacgacgacagtgagagttcgtgtagaaattgaattgatatttctggcaatttctttttttttttgtttttaatttctcactttccatttatcgttcagcgagattttgtcacgttattgttattattattattgcgttcggtgtggaaccaaaccgagatgccgtgtgttgaatatgtttgaagacacatggcggcggttacagggttacttaataagcctttgtttctttgagtcgattggtgtttttctttttttaataaattggtccttgtctcttgaattgagcatttgctgcgaaattttgaagattcaagtattcaacgttccagaagagttctttgtttacatttatatatagcacctgaaattggctttggagttcttatactgtttgtttgtttggttttgaaattctggattttggattgtgttctgctcagttttgttaaggagaaagtggggtttgagagttttggcattatttattattagcgtgtttggttccacattccagataccccagacgtggtttttcgcgtcagctaagaagctggtagttgtaactttcacatccctgacgtgatttcttacttctcaacaggtttggaaacacgctatatagtatctggaattggatttggagttcttgttatttgttgtgcttttgattttggattgttttctgctcgatttcgtttaaggagataagtggggttgggagtttttgctattatttattgttattttttttggtgttttagagaattgagttg

SEQ ID NO: 19173 - DNA, 231 bp, Glycine max
  Intron number 1 from transcript Glyma18g51310.1 (locus Gly ma18g51310) derived from phytozome v7.0 (chr-ID Gm18; pos 60240792 to 60241022 reverse strand)
ctattggtcacttgctctaggcgcatcaattacaggtaatcgtttcgagtttcgattacttaattactttattttctgttacaaatttaaaattataatcaaaatgctttcttggtgtgtaaaatttaagaatagagaaattttgtcttgttttgtggttttgtttttgtatatgatattcatggagtgaagtgttttcttttccattaaatttataggtaccggcatttg

SEQ ID NO: 19174 - DNA, 575 bp, Glycine max
  Intron number 3 from transcript Glyma14g07060.1 (locus Gly ma14g07060) derived from phytozome v7.0 (chr-ID Gm14; pos 5226947 to 5227521 reverse strand)
tttgcccctacaccattttatccccacgaatataggtaaaaatttcgctctcctaaatcttgtattatgtgaatgtcaaagatcaagtgcttccaatttggtccatagtaaagtacttgaggtttgttatatgggccagtgctagttggaaatcactttttttcttttcttatttctcatgctcagaagtcaagatatttgacagtctgcatgaatgtctgtctacattatgtaattaattgttttattgttgactaaatactttcatgtatacaaacaattctctgaagatatagggcatcacatgatcacatcaatatatgaataaatgatggtgctggagcgtcatttcttacttgtttcaatgaatcaagttgcaaaaggaatcagaatctgtttctcctaaacaaatttgaaaagtgaaaaaagaaactttcaacatgtgcagacatgtagttttgacttttgagggggaggggtagagttctatgtaaatatctaagcaaatgaaaaagaaggatattttggtaacatttaaaactaatgatgtgtagtttgtcattgaacagaagaat

SEQ ID NO: 19175 - DNA, 1029 bp, Glycine max
  Intron number 2 from transcript Glyma16g28180.1 (locus Gly ma16g28180) derived from phytozome v7.0 (chr-ID Gm16; pos 32138426 to 32139454 reverse strand)
acattgcctccggtccccacatttataggctccacgtacgcatactttttcatttttttttctactcaaagtttcaaagtttgcagttttagcactcattttttctttcctcagctctaggcatttgtggctaaatgcctcttagtttatgcgatatgtgattttaagtagtaaaagtaaaatggcactggaaaggaaaccattaacagaaaaaaaaatgttttaaaatgcatctaagtgagtgatttggtgtgcattgtaattattagagactcggaatggagtagtaaaattcttggtgtttgttagtttttttttatcgggaaatgttaatcgttagtttcttgttaatgggatttcccttctttcttaaccacccacccacccaaccttgtatctccttggtgtttgttagttaagccctgtttagatgaacttctgtataaacacttacaagaagaagaaaaaatgtaaaattaaataagtttcacttgtaagttaaagttagcttatacaccagtgaggcatggaacaactgacatgggttgtttggcctaacgtagtggtctcatgttcaagtccttcgtaagtagttgtgttaaatatatggagagtttttctgtccttagtggttctacttggcttgagtaggattatcttcaatgcaggatacttgtgatcttatacaaggaaaattagcttatgtagaaaccaatttatagaaattctctcatttagcttcttcaaaagctaatttgaacttatgaatgagataattttaattttatgggatacatttaatttattttactttgttattttcttttcctttaagtgtttactgagaagattatccaaacagactttaggaaaattggttgtgctgatgtaaaacacaaaatatcactttgctggtttattttgagtctttgttggctacttttagtcctacaaatggttgttttaattaactatggtttatattactctgtagattgctctgggagaatcttcaatcagcgaaggaaa

SEQ ID NO: 19176 - DNA, 864 bp, Glycine max
  Intron number 1 from transcript Glyma15g02180.1 (locus Gly ma15g02180) derived from phytozome v7.0 (chr-ID Gm15; pos 1442905 to 1443768 reverse strand)
aatcgatcacattcaataccacccttcaggattaggtactctctctctctttctctgtttctcgttttcttgtgcacagtctataccgtttgaatttcagcttcccaaggaggaattcagaaccctttttgttttgacgcgaatgagaaaatgcgtcataaaggaaacgatttatctgtttatttatttatgtttgatgtagtttcaagtattattgcggttgcttctagatgcccaaatcacggctccacctagttcatagccacgttcttcgtcctcgattttttttgcctggggtggtggcatatattcaattcaattctctaatttttcactgtttctacatcttaatttgcaaaatggctgtttatatacgtatttcataattttttaaaatgtgtttttttttacgaattacttatacaatttgctgattgcctattcattttcgtggattaggctcctctgaggtacattaagtaatctcagtagttgatgagaaaattaatggttgatattatgtgcacatgctcaataaatcacgaatacgttggaatgtcaatccttttttttttttttttttacttttttttgtttggtttaagttgctggggaaaatgaaaataattgaatgagtagataatttttgtaggttctgaaatgtgccaatattctacctaggaagtactttgtaatctttttgagtttagctctgtgttaaattaaatctcctcattgctcaatagtcaatactgaggaaccaactcttagtcttagctcacctctttcagtcaatttggttttcatgcatccattctgtcggcttgtttgcaggtattaattctgttcccttaaataaataac

SEQ ID NO: 19177 - DNA, 515 bp, Glycine max
  Intron number 3 from transcript Glyma19g05360.1 (locus Gly ma19g05360) derived from phytozome v7.0 (chr-ID Gm19; pos 5789301 to 5789815 reverse strand)
aggtaattaacttaatttatactgttgaaaaattgtgatatattttgtagaatattttttaagctatgatcagtgcttgtctgttgtttgttatagttcaccaataaatactaattaaagaatattcaccctttttatttgcatatcttttgctttttattttttttattactctatttgtttttgctgtcagtctcatcatcatggtggatatgctgggtgttttaagttgaacaatatttttcatggtattaaatagcttaaagactatcttgaatatggatgtgtacattatttgatcaaattttatttgactgctccaatgaaattctcctagttaggagttgtcttcctaaaagaatctatgtagaattgatagtttgaattaaccagttttcataatgaggtttcctcctttactttttgaaattatcttgaggtttactaccctactgttccatgttttggagtttgcattgactagacattatacctattgcagcaactagtcatat

SEQ ID NO: 19178 - DNA, 517 bp, Glycine max
  Intron number 1 from transcript Glyma17g02590.2 (locus Gly ma17g02590) derived from phytozome v7.0 (chr-ID Gm17; pos 1683382 to 1683898)
cttcttcttcttccactcattctcccagtttcgaggtatccactgattctcctcttttggaggaacgccctatttgtttttcaaccttgtttaaacaaagtttggtacttttcgaattggaactctgggtaatcatcatctaacttctaagccctaaatttgattttttattcttttctttaatattcaatattttttaacctttgtaggaaagaacttggtcccctgttaataaattgagtaaatagtaagtacataaacaaactaggtaaaaaaaatgtatactgtcaacgaattagaaattgtcacggatggtaattttgttagcattggcattaattaccttaatactgtcatcctttgcataatttctaattggttaagatgtaaaacccatttgtactgtcactgcatggaaattaaactgtattaaattctggttatatggtgctgatgtattggtggttggatgtatagtacagaaattgtttgtttggaaaattgggttacagaagtg

SEQ ID NO: 19179 - DNA, 231 bp, Glycine max
  Intron number 1 from transcript Glyma15g09170.1 (locus Gly ma15g09170) derived from phytozome v7.0 (chr-ID Gm15; pos 6515907 to 6516137 reverse strand)
gtggtgtagacacggcgtgacggcgatctcttgaggttggtctcttttctcacactcttacttcttcagttaggttattctttttatagtcactttggggtcattttcatccatttcgttgtttctggcaacatctcatcgtatcgaaattagttttcgatgtttacattcagattcgatagattttattcaatccaataacattttgttttgatttttgttgatagataa

SEQ ID NO: 19180 - DNA, 927 bp, Glycine max
  Intron number 2 from transcript Glyma17g14970.1 (locus Gly ma17g14970) derived from phytozome v7.0 (chr-ID Gm17; pos 11709194 to 11710120 reverse strand)
ctaggattagagagaaatacccagaccgtatcccggtgagaactagttctgactttttctctacaactatctgttaatgatgcaatctatgttgttctcttatctgttttgcctgttgaggaacaatgcttttcaatctatgtgactctttttcaaccctataaatgtgttccgatgtttaaatgttgtcttttgtgttttctctttcatgtcataatttggcagcatagatagctgactagcacttgacccttgtgtcggaatattactggatgtgggatctagatgctttatttgcaaccttccatgttaatagtgataaatgcaggtcactgggttgcataattagttaattacagatttgatattcatcaggatttagtgttgtgttgtgctgttgttgagaaattgtaggttcatggtttgaccacttctaccagactggccggcctagtttggtttttgaaacattttggaaatataccgcatgctaaattattgcaacttgtgttgccaattttttaccaattttgattatctccgtggaaatcctttattggaggttaaattaccaattacagagtccattgaattatagaatgaattcaactcatggaagaatgttcaaatgatttttactcatgaaactgcatttgtgacctaggcctttaaccaaggttgtatacagtaatgcaagtatgaagtatcttatgccctcaagctattttatttgcatcttagaactagttcttcttcattctatctgtcatttaagggcaattcatgttcacgtatgcttctacttgctgcctgctgtatgtgtgatacttgaaaatgtacatcagtgatatctctagttattgtgctaaattttctctcgatgtgcttgaaggtgattgtggagaaggcagaaagaagtgatatccc

SEQ ID NO: 19181 - DNA, 767 bp, Glycine max
  Intron number 1 from transcript Glyma20g26920.1 (locus Gly ma20g26920) derived from phytozome v7.0 (chr-ID Gm20; pos 36217350 to 36218116 reverse strand)
ttagtgtaggggatataaagttttatctacacaaggtatgattcagcccagtaaacttgtctagtctccagctgagaatttccatattggcacttaatgattctacaagtctcaaatctcaattatttatggcaatttctggagttactgttagaaattcatttcccaatatattaataatgtatggtgaggatgattcgctctttgatgttattttcccataggactcatgttaaacaaaaaaaaaatagcattatttatggtttttggattttcaagatatttaggggccgtttggtcttcttttattatgtaatttcttctgttttttattcctcaacatttactaaaagggcacacggtaacaaaaatttcaatagatatagtatttgtctacatgtacattattgctctgataaagtgggtcattcatgcatgaccttaatagagagcagagcaattactgacctatgctaagttgtgaaccccgttgaggttgaattgaacagttttaagttccatttgttgtgagttaatactcagatttacaagcctttaaaaaaaaaactgagatttacaaagaatctggttgggccactattacttgaaaattactgtagaggttgggaaacatggctcatattagttacaacatccaaataaacagctaaattaatttggtttcaagttttcattttatgttactgatataccaaatcctttgatgtgtagtttcctcttctatcgaagagttctcatatacagac

SEQ ID NO: 19182 - DNA, 708 bp, Glycine max
  Intron number 1 from transcript Glyma18g02770.1 (locus Gly ma18g02770) derived from phytozome v7.0 (chr-ID Gm18; pos 1795181 to 1795888)
gtgttaaggtactttcttcaacacaattttggctttgcttgatgaaaaatgtttactttttaactttaaagtttgtgcttgttgaagacttgaagggctggaaatgagttgagctaaagaaagccttactggacttgattagagttgatttggctccaagttttttatctgattttttttttcatctcgaactcgattcaattcaagtttgctaatggttcggtttagaatttatttatgtagttcaagttcagatcatttatcaagcgtgtttatttggttcatgaactaagttcaacgagttagctatcaattcgagtctggaactaatttcaagttggtttgattcattgtcagcccttggctctgtgaaagttagattgataatataaccacacggtccacactcatagattttagaattttgacaatttgtttcctctttttgcttactagctatcagctttaaagctcatttaatcacttatacagttggtttagtttaaatgttcaactgatccaagatcatttagtagcttcaaacttcttttctgattcttttattggagctccagctttatggcatttgagtttgtttcttgcttgtagaagtttctgacagctcatgctttaattaaaacaaatggattattctttagttgtacttgttcctttaatatttcaggtgttggggactttcatcactga

SEQ ID NO: 19183 - DNA, 844 bp, Glycine max
  Intron number 1 from transcript Glyma18g44340.1 (locus Gly ma18g44340) derived from phytozome v7.0 (chr-ID Gm18; pos 54068549 to 54069392 reverse strand)
gaccacgggtaggtgatcttctccccaattcatttagttcagtcccattcataggtttcttcagtctgcaataaattgcgtaaattcctggaagttgcatgtgagatagctcgtagtacaagaaaatttattaaattgcaatacaagaggaaagggtgtcccttaatgtggtgtacctgtgtcccatgttagccctattaagggactattttttagtgtctcttcaaagtttgactctcaagggtagaagatctgcagccgtaaatttagcatgttttgtgggtatatcgtgcctgatcaagcaattcatgtggggaattaagtaaaagtctacactctctatgctctatttatataacttttaacaaggctctcataataaaccaaattggagttggagtttaaatttgctgattttcttgcactaggcacatgcctaacacataatttgttagaatgttaaccaatacgtgttaattatttaaaagaactaacccccttaaaaaaatatcttttgatagtcaattttttttaaaatacatttagcaatattgaattcaattaaacaatttgcttaagaagggaggtgcttgtagacttaaaatttgctcacacacaaaaataaaataaaaggggattgatcaaaatcattgaatgcagaaactacaacctttgtcatttaaaggtaaacaatatgatataatatcaattgctgtcaataatggagttgcatgtgttgcatattaaaagatatccaagggctgacttcatctctatatgtgacactattatataaatcaaaactaaagtccaaaacctctgcatcttatattttttttctctc

SEQ ID NO: 19184 - DNA, 698 bp, Glycine max
  Intron number 3 from transcript Glyma15g06330.1 (locus Gly ma15g06330) derived from phytozome v7.0 (chr-ID Gm15; pos 4480697 to 4481394)
gagtacatttcttgagtaagaataaaaaacttcgtaccccattgcccagaggctcttcgctatgcgaaggtatgggggagggatgttgtacgcagtcttacccttgcatatgcaaagaggctgtttccggattcgaacccatgaccaacaagtcaccaaggcacaactttaccgctgcaccagggctcgccctcttcttgagtaagaatgttatttgtaattcaatggagtgtaaaacatattttctaattgtaatgatgtttgcttttataacccaaattatgtattttactatttttatggatcaaagaaagcatgacaaattctcttatcatcactgatcataggaaatgaagagcaaggctgaaggtgtatctatataatgttgtgctctctctgccttaattaatatataattcaacagggtgatcattttcaacttagatagatttcatatgtctatatcaatttgtattatgttttagtatctcatcctatttagttttcagtttctgtcgtggtgagatggatttcagtttgtattagtttccagtgttgtttttcgtgaaatgttatcctcattttgtctttcaatagtcttttttttggatgctttaatacttaactgttcaattgtctgttgctcaatattataaggtgtttattagggttacattttattcccccatgcagtattg

SEQ ID NO: 19185 - DNA, 721 bp, Glycine max
  Intron number 1 from transcript Glyma16g03780.1 (locus Gly ma16g03780) derived from phytozome v7.0 (chr-ID Gm16; pos 3153312 to 3154032 reverse strand)
gttgcaagctactctggctgggactccaaggaacagtaagttgcttcatcatcattcagttttttatattacttttttgtttttttagctcaaatgatatgttatcttcactatataaaatagaggatggataaacaaccaaattatgacccattagaaaattgtatcattaacacactaaccaagagcctgttgaaagaaaaaaaaataaaacagataatccaaagcagaacaaaaaagaaaacagagaaggattagcaaagacaagaaaaaaaaaaaaacaaagaaaaaagaacagtctcccagcattgctgtgtgtggtggcacagatgccgttcactgtggtccattaccacactaacttggtcgacttggtgacatgagatgttacataagatggacgtttgttacgtcaatcaatattagcattgttagtgcaaaaaactaatgcaaggaaggaccaatttgttctactagagacactattagtaacaaagtaaaacttttaaaatttagtatatcaaattaaaatcaataaaataagatgaggaatcaaaattttatattagccatttttttgtttgtggaaagatttatcgttttaccttggatttgcaaaatataacatgataacttgttttctctatctattgctgtatttgtttatggttcttgttggacaaaaatcaattcttctttttatccttctctctatacaggc

SEQ ID NO: 19186 - DNA, 685 bp, Glycine max
  Intron number 1 from transcript Glyma16g28430.1 (locus Gly ma16g28430) derived from phytozome v7.0 (chr-ID Gm16; pos 32386447 to 32387131 reverse strand)
caaagataagacatacagaggtgaatgtaatggttaaaaaaagagaaatacttatataatttcatgaaacctaaggaggtattgcaattcgctcttttaattattaagtcaaaataagcattcattttgtaccataacgttattgaggtgtttcccaacactgctattggaattgactttaggtcaatactctaaaaaatgagacttaggttttattttggcttaattccatttatggttaatctaatatgatgaacacctctaaacaaatctgtaaattttgaacttcaatagtgtcaagttaatcaaattttgtgtgcatgaatctaatcttcttacttttttatgagcttcaataacaaactacagacattaaaagtttcaatatcaattgtcaaacaatgtaggatttaacttttcaaatagctaaacaatattcaacaagacaacagaatccttgacgttgcagtcgcaagaaaaagtgtattttatgtctaaatgaagattgtctataaaattttcagtttcatataccaatttttttaagaattcttatgcttttacagtctgttaagcaatgcaatgactaatactgatgagtggataacgacggggtgaaacagaatcaataggatattaattatttgtagttgctttccgtactagcactatacctactgatagc

SEQ ID NO: 19187 - DNA, 812 bp, Glycine max
  Intron number 1 from transcript Glyma15g12740.1 (locus Gly ma15g12740) derived from phytozome v7.0 (chr-ID Gm15; pos 9419559 to 9420370)
cattttccctgagatcaaactccttccaaatccatgtaacttgtcttcttttttcgcatgtccccttttattttatttttctcgataaaatgtgagtttattagttttttttttgtgagaaatgtgagtggggaagattcaaaatagtcacctttctccccctccccttatcacttagacaatcttgtatttccatttatttattttgttgttttggattttagattgtaaattttcaatcttttttttctgtctatatggtagataggtggtgcaagttgttctcacccttggcctacccagaaaattattgtctccaaggatcaagggatatatatataatggatgatagtttgataaggttaccaagtttactatatatatatatatatatatatatatatatatatatatatatatatatatataatggttgatagtttgataaggtcaccaagtttacttcatttttttattattattttcatttggctttcttcagtttaacctgggaatcaattttgagggcttaaaggttataatgatacaagagtcaacaaatggctactaaaattggagttctcaagtcccaactagtacgatgattgaagtaaaggattatgaatttcaaggacaaaatgtcaaaactcgtgtagaattctttagattagacttgaattttcctttctgaaaatgcaaataggaatttccccaagttgaagtttgaatgctatttctaagcaacaatatgcatctgtgtgtttgtgaatgtctcttatcactgtgtttttgtaatggcagtgggagtggga

SEQ ID NO: 19188 - DNA, 649 bp, Glycine max
  Intron number 1 from transcript Glyma20g29840.1 (locus Gly ma20g29840) derived from phytozome v7.0 (chr-ID Gm20; pos 38643955 to 38644603)
caggaaggaggcagaaaactgtgactgccttcaaggtataacttactctaacttcctctcgttgcgacttttttttagggttttgtctttgtttttagggttcttgcgtttctgctattattttttcgattggagtttgtttgttagtgtttgagagttgtttgtatggttttgagtgtgaatcgatggtctccgtggtgtttatcttgtactgttgctacgaaggagtgaagctaaagtgtatgtattatttagcatgagtcttgatctggaaaatctcgtttgattttactggttttgtagtatagtaatgtttgccgttaattggttgttctaatttttgtaaggctttgttagcgttgttttcgcctgttctgtgtattttgaaaataaaatttagttgaaatggcgaggtgtgaatactagttatctacattgttcattagtttttcatttgttggatttgagtgaagatatgcttgaactatgtgagttaaaaattgccgaattgaattatttccttgcgagtgtacgagtaatactgacatttctgtgctctgttgttatgtttatgagcaattagcgtgctaaaagaagtttgcgtgttttttcagggtttcaggtttgccactctcttggtggtggaact

SEQ ID NO: 19189 - DNA, 623 bp, Glycine max
  Intron number 1 from transcript Glyma19g37370.1 (locus Gly ma19g37370) derived from phytozome v7.0 (chr-ID Gm19; pos 44540574 to 44541196)
gttctcaagtacgtatccatcgcacttttttcttcttcctccatcaactcttattgtaggatctcaatcttatatgtaacttcttctatcatttctgtattctgtgatacataaattcatatgcgctcaaaagacgatgtgccttatgttgtttgtgaatttggtttaccttttcctttctcatttttctgccgtgatatggttacgttgttttcattttctgttttttaaataattagttgtgcgttctacaggtaatgatatctatattgaaattgtattgaacattttccgatgtgcagaaacgttattgcgcaagatttacctcattcttcgttgttgtattcggcttgatttcagtcctgcaacgcagtctttgaaattttgacctaatttaaagctgcttctcattatctgctttcactttttcgatatttagaaacatcagtagcttttaaaacacgttaaaacagcttttgagaaatatatcacacgcatcgaagattgatgaaaataattattgctaaaacaatctgtgtcttgagcattattttttatcaaatgaataatcatttttcttgtaagtgtattaatatttgatattcctttatcagaactgaact

SEQ ID NO: 19190 - DNA, 743 bp, Glycine max
  Intron number 1 from transcript Glyma19g00260.1 (locus Gly ma19g00260) derived from phytozome v7.0 (chr-ID Gm19; pos 71001 to 71743)
cgcagaatcgacaaccacttctcactcttcaatcggtataataagattcgattcgtttcgtttcgttatttattttcttcttcctattttttaggttaatgtcgtgctttacgtgcagcattccgtaatcgaccagatctgagtgtgaaatctaagggtatgctcacgcacgagcactgcttgcgtttttgattgaatctagggcttcgttttaggaaattgaatttgtgctgttgcatgcgattgttttcgctagatttgcgttctctgaaatcgattttaccgtttgctttatgcgttcaattgataattttcagcttcggagttttccttcggatttgtttttggctcctggtgaaaatccgtagctgtaagtgctgttggtttagattagggtttgttaacgtgttgtgttgtgtggatactgggattatgaaatttaggtttacggatgaatgtttgatttggttgataatgtaagttattttaattttaatacgattttgatattattgacaacttgtcaaatcaaatgttttaatttgaatgtgttttttttacttcaatatatgttattttaattttaatacgattttgatattattgacaacttgtcaaaccgaatgttttaactgagaattattcctagcgagttttaccttttatttttgagtaggttattactaacttgtttaattttattattatctaatgttagaattgtattgctggtttccttgcta

SEQ ID NO: 19191 - DNA, 519 bp, Glycine max
  Intron number 2 from transcript Glyma15g42940.1 (locus Gly ma15g42940) derived from phytozome v7.0 (chr-ID Gm15; pos 50354337 to 50354855 reverse strand)
ccaacgtgccggggcaaaaggaaaccaaagttaaggtaatatacaatacattggtcttgaattgggatttcttgcatgtgattcatagaagaaaattaaatgtatggaaaacagtgcattcaattcaataaaattataaaactgcaaggtctaaattcggtatgtttttagttaaatagtttgttaagtggagtggttatgtttagcggaaggggttagtcgccccacaccacaacgaactaagattcaaatccttgctaggagaggtgttcatatttaatgtttgacagtgctttgaataatattacctcggaaggaggatacctgtggcctgtggggaaccaaaagaatattattttttcattatatagtgtatttcagttatggctaattgaatgtttgtaaaaagtttttctccccatttttgattgttgttatagatggtttgatctggtttttctttgtctttttcgttgctttttaggtccctctggctttgtttggaggttcaggaaacta

SEQ ID NO: 19192 - DNA, 930 bp, Glycine max
  Intron number 1 from transcript Glyma18g47310.1 (locus Gly ma18g47310) derived from phytozome v7.0 (chr-ID Gm18; pos 57004606 to 57005535 reverse strand)
aaaagtgtcttagtttcattattaatttctaatgcctcaagctacttactaaaggaactagctttaaatttagtgactcaagataatcaatgaattgagcttcattcttagatacaaaattcattgagtatttttctttcggtcaagattatgaaagaattttccaacaacaatcaaatccaaaaaatatgtcatggctgatcaaatcaaaacaaacattaagcaaaaaagtaagatattaacattaatacattgaatatatatatatatatatatatatatcaaagtgagagtatgcggatacacctaccgccataaatgacggtcaaccctatttatacaagagcaaaagttgtattttaagtgacttttagttaaactcaaaatttctaagctccaaaatttagctgaacatcgaagaattcatttttcttgctatcaaattttagctcccgttccacttttaagctcagctacatcaaagtttgctttttcttcaaaaaataaataactctatagcttttccacttcacttctacaaaaaatattagatacaacccaaaaaactaaatctttactaaaatttaatatttaccaaactaagatgaaaatgaataaaatatcactctaaaattaggtaaaattagattgattaccttatgaaacatgtgaaatttaagtaattaaggcatttatcaataaccaacccatgcacccatatgttcaccgaatacctgaaaagtgaagccaagttctccacaaaatcacagcatcacactcatttccaattctgtgtttcccacaatgcatttcctagtagcactttcaagagcttcttccactgtaaccaaccactgtctgtgtcacctccgcaacacgtgcaacgttgtggcagagaagttgacgctgacccggttgaagcagaagcac

SEQ ID NO: 19193 - DNA, 343 bp, Glycine max
  Intron number 3 from transcript Glyma15g41990.1 (locus Gly ma15g41990) derived from phytozome v7.0 (chr-ID Gm15; pos 49289511 to 49289853)
tgaaaagggttgtggagtttggtcttgattgttgaagatatacttttgtaattgcataatattttatttttcaatttttaaaatatgatttagtaaataagttggtttcctatattttaggagtaagtcagttttaatggattagcctagtcaataagtggtttctatctttaaggagcaagttagttttaatattctgttttgctaatattttgttatctaattagtttatctttgctatttattgtatcgctgctgagaacaatttgaattagaacagaataattctatttcctccgcatacatagtgtctctcttctctcctctgtttttttataatttc

SEQ ID NO: 19194 - DNA, 819 bp, Glycine max
  Intron number 1 from transcript Glyma18g48580.1 (locus Gly ma18g48580) derived from phytozome v7.0 (chr-ID Gm18; pos 57974522 to 57975340 reverse strand)
caacaggttatttttctcttctatcctttgtttgtttaagatgatttaaaaagcatggaaataggagggaatgaattgaaaaaaaaaatggacacaaaatacaaatacaaataaaaatggagacagaaaaattaattgggttcaaggagaaacaagataggacaatatgatgggttcgtcgtgttcaaagatgtaagggatcttctctggctcaacgagttggtcgagtctattgaaccgtggacaccgaaggttggttctaacaacagtctcgtatggattaggttgataggcatttcgttgaacacttggagtgcaggttgcttcaaacgtatagtggcaacactttggagcctcatagtagtagatgacggtacggaaactagagtccgctcggatcttggtctaatcttcatgtacggatttcattagcaggcagcttagggcgagtataaacgggagggtttgtgcgatatgagtggtgcaggaatgaaacgatgtatgcaacataaaataaaagcatatatataagttttctaattaatcataataatctagtggtaagttgatctactaaataatcttcaaattctacatacaactattggatgtgtcatttttgtcatgttttccttaaagcttggatttaagaaaataataaatattggagcaagtaaaaaacaaatagatacaaagttacatatttaggagataagaaatgttttagacataactttactttactttctatcatgccatcaactgaagattccttgacctatagaaagctgattggagcaagatactataacaaagctt

SEQ ID NO: 19195 - DNA, 981 bp, Glycine max
  Intron number 1 from transcript Glyma20g19580.1 (locus Gly ma20g19580) derived from phytozome v7.0 (chr-ID Gm20; pos 27534655 to 27535635)
gagctcaactctcccaggcaagctggttgctccctgtagaagattcctgataggcccagggctaaagaacaccccctaaattgatcagttcacccccattttgagtttttttttggttatttccttccgaaacattgtgaaaccttatggatcacgtggcaattggctttaagcagctcaatgtgactggcgaaaatctgcatgtcgaaaaataatcgtccccagatgaaattagggtatgacacatctttcttttgggtctttcctaagatagtatgtatgtcctccacccgctgatagacttcatttcccgataagggtattgaggcaaatccaaattctggacttccattaaaagcttttttcaatcgacaatatgggtgatattctttgagagatctctaatgcctcgtgtagactgactacttttgatagttcagttgcataaagctagtttgtttttcacaaattgggcatgcataatgccctttaacattatatccactcaaattctcatataccagaaagtcattaattatacaaaatactagtgcatgcaacttgaaggtctgctggtagtaccactacagaaataataggttttgacatcttcatgttaacatcagttatgatgaaaatcgatgttaaaaaatgcacggtggtagttttgtaaataaaacgtcattgttaacattgaattttttaaaactgatgttaacagggcgattttaacatcggttattttaaaaatcgatgttgtgagtgcttagacaacattcgttattcaaaactcgatgttgtcttttaacaaaaattgggggggcaggaagcaaaagcccactggtgcgagtaacaaatcccaagaatcggttacattctttcagtaaaaacaaaaccctagcagtagcacacgcgttacctcaaaaacaaacataacccttcaaagtcatcatttattcgctcgtcatccgcatcttcacc

SEQ ID NO: 19196 - DNA, 896 bp, Glycine max
  Intron number 1 from transcript Glyma16g02880.1 (locus Gly ma16g02880) derived from phytozome v7.0 (chr-ID Gm16; pos 2467756 to 2468651)
ggaggaggatctgattcttatttaagtgaaaccaggtgtgttcaactgttcatcatagcatacatattttgctcatgatactgggtttagtttccttgcctttgtgattgtattgaatctattggttattgtataattcatatggaattactgtactgtgtagtacttgtttgggtttgggaattgtagaagtgtagcatgataaaatgtagggttcgagttaagcctgaaaagtttttttactcactgtgaccgccagtgtggccacatcagccacattttccccacaatgggaaacaaacctagtacatatgattcagtttgaaggcccaaattgaagccaggctttttgcctctgcatgttatagctttttttttttttttttttgctcagctctgcatgttatagcttgcaacctgcatcaggccatgtagcctgttttgccacttctcagagttgtgagccttgaaaagtagaacaaaccgaaagaaaggattgagagtgtttatatgttcggtgcatttttgtttattttgagattgaatggatactgtcttctttgtgtatctatttggttaatggatgggattatgcaactttacttactgagttgttgttgttccatgctttccatgtatgaatttggaaattggttgtgcatactctcatggtgggcacatgttaaaagccagttgtcttgtatttgtggaggaggataggaatgtaattaacatagagagaaaggtgagcctttttgcttgtacatttgtgctgttggtttaccttacgtgactttgacatatacttgaatattattatccatggtttagtatgttatgttgctgttgtattatggatgtctgattttttagatgtgatgccacagatttgacca

SEQ ID NO: 19197 - DNA, 352 bp, Glycine max
  Intron number 2 from transcript Glyma17g00670.2 (locus Gly ma17g00670) derived from phytozome v7.0 (chr-ID Gm17; pos 350727 to 351078)
ctgcaaaggtgaataccaattttctaatgggaggtgaaagggaaaaaagagggaaagaaaagtaaaccataggagagttaagaggattagattcccatccggcatgttgaaaagaaaacttttgtctctagcattgtccttaatcctatcttctttattagtttgtggctgacatcaataggaatgacaaaaaatttgcacgatgccttgtcttttactttcttttttattcctcctatttgtacatcacgttacatcacgagggttcaatttgatttgaaactacataatggttagttactgattacataaattctgatcttggtttttccattattctattaagccagca

SEQ ID NO: 19198 - DNA, 601 bp, Glycine max
  Intron number 1 from transcript Glyma15g12100.1 (locus Gly ma15g12100) derived from phytozome v7.0 (chr-ID Gm15; pos 8969197 to 8969797)
gccctctcctcaaaaactccgattgcttcctccaggtaacttcctcaacttcaatctgcctttcacttatgtttgggtacaagttggtaacgtgtttttctttttttggggatttcaatgcacatttctgaattccaagacacaaaatgaagaaggaagaatttgttgctttgagagtagaagtacttttgagtttctttatttgttatccaaacatgcactaaccaatctgggtaacttcaaagctcaaaaaaaaaaaaaaaaaaagaagcgaaggcggaagagtgtaccttaattttagcctaagatgtcgtaatttatggatttgtcacaatctttttgtttccctgaaaaacttgaaggaagagaagaatgtacgtaccttaattaatattaggatgaacacttttactctctctctctcttacatctttttgtgtaacatgcaacgttgttttcatttattttttaatttttaatataaggttttacgatattgggtcgtgatgggtatgggaaatgggaaactctggtggtctaactgtattatctctgtactgtgacagcctaatctaaataagtttgtatcactgggaaggcc

SEQ ID NO: 19199 - DNA, 386 bp, Glycine max
  Intron number 2 from transcript Glyma18g04360.1 (locus Gly ma18g04360) derived from phytozome v7.0 (chr-ID Gm18; pos 3106802 to 3107187 reverse strand)
tcgagttctcagcattcaatctcacaccgttcaggtttttctcttcagcattttttttacctcgattgcatcaaatattcgtttaacgtgtcgccgattgaatgtcgaaatgaagaataataaactgcaatgttggcaatattaaagtcgatacttatagagatgctcttaattatatacatcaaatgctttgataactgattaaatagggtgaaaagatgttaaggtttatgtgtttttatatgcatgttgttttggattgagaaaaatggaattcgtgatttttcttggcaatttgcagtaatctttgatgttattatcaattgcatgcagcttgctatgtaattaccttgactttgtggctgtttgctattattctcaggggt

SEQ ID NO: 19200 - DNA, 861 bp, Glycine max
  Intron number 1 from transcript Glyma16g07740.1 (locus Gly ma16g07740) derived from phytozome v7.0 (chr-ID Gm16; pos 6992968 to 6993828)
gatcgactccggcaagaaccgcgaccgcaagcgaggtccgaccaacgtcttctataactctctctctttgccacgctttgttattattttaagtaaataattgttttgtttttgtttttgtttttttacacataattgattggtcactccgccaaaaattagatgtttttatttttatactatttttgataaatcatttagatgtttttattaggctatacttaaatacatcatttatgtctgtaattaactattgccgattttaattactcataactaagtagctattactgatatggttattaattttgatcggagagagaatcatagcatatcggctatgttagttaatctaactttgtatgtattttatttttagtgtaaggtttgtgggttttgttaaggaatatgaatgtttatatccgtaattagtgtcgattttgattattcagacctaagtagctattaatgatggccaaatgatcttttgggggcaattttttttttcaaatttatcacttgggataaaatttaaattaatagccgggataaatttgaaaaaaaattgctggcaaatggtcgtttgtccattattgatacaaaaaattaattttgatcggagaaatgatcaaattgtgaatctcgtaatctttatcttctctcaatctcaatctcctaatctttttcttctctcaatctcaatcgcttaaacaccgttgaataatcatgtctagttcttctcaatctcgttttgccactcggatactgttgggttctccacaatctcgttctctcttgcgagcattgtttgattctcccaaaacagttggcgttaaggttcgtgaaataacacatcctggt

SEQ ID NO: 19201 - DNA, 592 bp, Glycine max
  Intron number 1 from transcript Glyma20g04730.1 (locus Gly ma20g04730) derived from phytozome v7.0 (chr-ID Gm20; pos 5051100 to 5051691 reverse strand)
ttggcgtcctaggccgcattgtgctcccaaaggtaaggttttcttattttcttcaattacatgtttggttatctttctctttatataccttccaagaaaagatgaaacattgaagtaaagatgccctattaatggctcatcttgatcagtgaaacttgatttgtgatccaggcagcccaataattattttttttcctaacatatctattttagcacaaaaatagaaggaaaagtaaagcaacaatggttatcttttcagtcataaacatatttgtgcctataatttgcagaaagacaaaccattgttgaaattgtatttttcagttttcaacatgaataattttaaattctttctataacatctttttattaattcttttactataattattaaatatttttaaaaaaatttaagatattaaatataattattctttgattgtatgacaaatcgaaatcagttttaatgttcaataccttcaattattaccttttgcttgtcaaaaagtgatatattttgcccatatccaagttaataatacatatatgttaaatagagagaggctgaggataagcttccgacactgtggaa

SEQ ID NO: 19202 - DNA, 909 bp, Glycine max
  Intron number 1 from transcript Glyma20g24440.1 (locus Gly ma20g24440) derived from phytozome v7.0 (chr-ID Gm20; pos 34109996 to 34110904 reverse strand)
caggtactctctcgccgcttttccactctctctgcattccccctttcctcaattctttctctgcttccctcacactgctccaattttgcatgcatttcatcgaaccctagtttttttgttttttgtttttttttgggggattcggattctgaggttgcgagtgtttttcgctcgcttgaattttgttttcgggtggcaattttgaatttcgaatccttttgctcgcgcgttcttttagctgaattccattatcttctcattcttcgttgttttacactcaagctcgttggttcaaacttcgaactgttattgcttcgttattttcagcaatgtgcgttttgttcagtaacttctgtgtgccgaggaaccacgccaacactcgtttactgtaattttagtttatctgtaattgcatagcattgttatgtattgtatgagcaaaataaggtttattttcatccggtttttttattgtatctttaagttaaagccgcttatattttatggttctgcagtttttgtacagttatgtggtttgttttgtatgtaaaaagtagtttgagtttctgcaaggtttgtcaacatttttgtgcatcttggtaaggcgtggtgtggcattaaccattgggtcactttttttgaggtgtacatggtgtcagtgatcttaagtgcgggttgaaattgtataaagttgtgtattgattatagttcgtggttattgacttattgcagatacatttcaagtatctgattactcgtacttgtttatggtttaatggcttgctgttaagagatcctttactgtttgagttgctaagagaaagtatggtggaagacgctggatatatgtttagttaacactgtcgtatggcaggaaatactagatttgatttaagtgcagctaaatca

SEQ ID NO: 19203 - DNA, 646 bp, Glycine max
  Intron number 2 from transcript Glyma14g38220.2 (locus Gly ma14g38220) derived from phytozome v7.0 (chr-ID Gm14; pos 47417831 to 47418476 reverse strand)
ccgtattcaccgctttcatccaggtgcactttttgtttgttgcgcaatggatcttcttttatttgatttttaagctcttattgcccaggagacaaaacccttgaaggataaattgcttgattgtttctaaaactctgtagatttgaatgataaattgattgattgtttagtagtgtagagttgttttagaaaaaaaaaattaagtctttaaaaagtggcagggtagcaaatactcttaggctttttctatgtgatgtcattggcactggccatttctgcatctgattaatggcagatccataattgaagacctgaagttgggtatttgattggcctctggatgtgatttccttgaaggcctgaacttatacacgctctcaagtcttaaatgtgtagtcacaaaaccctcctatgttgacctttagtttagagaggagggttgcaataagctacctcatgcctgagttgttttagcaatagatagtgtggattcaggaagtgcctcctgctccttgtaaacttgctttattggattggatattcttcctgtttccggttttttaatgatttcctcggtcaaggtggtttactgggcttatgatagttcaaacctatgttcttgtttgtgaacgaacaggttgtttac

SEQ ID NO: 19204 - DNA, 879 bp, Glycine max
  Intron number 1 from transcript Glyma18g30900.1 (locus Gly ma18g30900) derived from phytozome v7.0 (chr-ID Gm18; pos 35686527 to 35687405 reverse strand)
tggtgccgtcgaccccattaccattaagaaaatgagtttttttgtaattttattttgtggttttgggaaaagacaaaatttggatgtggctctttttttgttgatttggggtgtgaattgaaattttggttcctaacctggttgaattttgaggctggtttttattgggggggtttgtccaggtgaaattctaattgtgatgggaggataagaaccgcgtctatgtttgtccctcgggaaatgaatgtttttctttggtttaagaatgtgggttttttttattggtttttgagattgctggaaaaaaagagaggctttttttcaggttttttataatgtttttcagatttcagggtaaaaaaggctttttaaagttgtcatttggtttctgtgatttttgaaagtgggttatttgtgtttggttgaagacgagtgagtttttagttttggttggtcttttgtgatttcaggaaaataaattgttttggtcctgtttagtttgacttgtttgcattttcaattccaaagggagtttgattgtttactttttattttattttatgttgggtgttgaagaaattgtgttttgatatctgatttaaagttatttgatgaattgagaattttttaggaaaaaaatggtttgatttgtttgagaggagtctgaataaggtttcaattttaagtgaaattggatggtaaaacgcagaaaggctttctcttttgttcgataaagtttatgtaattaactgacaatcatgttcttcttggaggtttgtgtggaaggaatattgaattaatgattgcattcaattggtcttgagttgttttaacttttaaccagaatgttaacctgtgcttttattgaatggcagattc

SEQ ID NO: 19205 - DNA, 924 bp, Glycine max
  Intron number 2 from transcript Glyma16g00450.1 (locus Gly ma16g00450) derived from phytozome v7.0 (chr-ID Gm16; pos 157504 to 158427 reverse strand)
caaggtgatcccttgtcacaaagacaaattgaaaggtaagtttattcccttgagttaatttgatttatttctgtttacctactgcacaatgacacttagtctattgacatggatgggcattgtgccaatcttcctcttactgtctcaatgacatttccaaatgctttaatattacaacctgttctgttgcattttcggggtaatttcaactctttgcatcgttcttaaatggtttttaagagctgctgttttgaatttatcatgtccttcgaaactaatcaatttgtctggcctttatgcaatttgttttcatgaggtaaaatttcttttcaatatcattattattacaagattctactaggccatacatgtgcttgtagcatttaatataattacctcaggctagccattttttttcattaaacttatttacttgaagtattcatctaattgtgccttttaagacttctcatggttacttctattagcccagtgtcaatgacttgctataaatacctttaaaattgaccagttagttgttagattagatttacacaagtggttttcatttctctccattctttcttgttttgagtcatctcatatctgtgtagatgctaaataatgcattaactgttgcgaagattggatgccagattcatacatataattggccttacaagaggatctcctgatattgttgtttgacatttagtcttaagccgtatggttatactgtgcttggtgatgtttgaatcttccctttgatgattttaattgtggaatagaatgttttgatgttactgtgcatgttaaaaaaaattcccatttctaccttgaacttgtctatttagtggactacgtactgatgctttctgtttttcacttgtttcaggatagaatttctcaactaagttggcttcc

SEQ ID NO: 19206 - DNA, 586 bp, Glycine max
  Intron number 1 from transcript Glyma18g47200.1 (locus Gly ma18g47200) derived from phytozome v7.0 (chr-ID Gm18; pos 56887787 to 56888372 reverse strand)
gaagagttctcttacaccaacaaacaccaggttttaccaaattttctaacttttgcttaatgtttttttttaacactgtttggctgtgaaagtttgaatcttttttggttttgggttggtggggtttttttcaactttggtgtaatagtggggagatagagatgaagcatgataagctgatttggtttcattgggtttcacggctcaatttcagttttctttgggtttgattaggtgggagggggactaatgatgtgattggaacggtggaaagaagaccaaggaggagagaaaagttgaaatttgaattgaagagaaaatggaagtgaggaaaattttgaatttttatttctataagttagatttttttttcttcccattttctcgttaactaaacaaaataaaatacattgttatccttgttttctttcctatcttccaaacataccataagttttgatgtcaaatagtgttgaagaagaaatgggggtatgatcatttggtttgccttcaatttttgcaatgttgggttttatcttccttcatttcaggtgcctaaaattgagaagattgtggtgaactgtgg

SEQ ID NO: 19207 - DNA, 849 bp, Glycine max
  Intron number 3 from transcript Glyma17g26230.2 (locus Gly ma17g26230) derived from phytozome v7.0 (chr-ID Gm17; pos 27286633 to 27287481 reverse strand)
agcaggttattggtggtaagtgcttttactacttgcagcaaaaaatgatatgatttaatatatgcactcaagtaaactgtaccaaaaaaatatgcactcaagtaaattctgtgtatgcttttcaaagttttttttaaggcttgagttaactcaaatgataggaacttcttaccggagtttagacaattgtattctttttgttttgtcattttgttctttaaaatagtgactgagatgcatattctttcctgtcagtattttttaaaccgacttgttttcattttactgctaatttgggtgctgttgataataattgtaactgtagcattctactttccaaattggtaaataagtaatagaattggctcctgacctgctagggttaaggttaagggaatgtctgtcaagttcgctttgcctcatattcgtgtcatgttgacggtttgatcattctaaggaatcctaatggatatttactttgtttctctccacagaattttaatctccaaaagttacacattcgtttcttggtcctttgtagctaaacttaaaaactgatcatggtatgttgtttggtcgaggtcttttgacatgcaatattttaatcattaacagattcaatgttgcttgtttttacgaattgttgataacttgcattgtgcatttcttgtctatggggccttttaattaacatttgctctcttgatttatagtttgcttggtccatcagaaatgtcatttttgtaatccttatttgattaaatgttatttaccttttcatgggctgattggttttgtcatgcattccttgtaggcaaagaaggccctataacgcaggctctcttaaat

SEQ ID NO: 19208 - DNA, 779 bp, Glycine max
  Intron number 1 from transcript Glyma20g27800.1 (locus Gly ma20g27800) derived from phytozome v7.0 (chr-ID Gm20; pos 36849357 to 36850135 reverse strand)
acttcccagtagtccttccccttttgcttcaccaggttaggtagctattattgtttctcattttgcattttttttattcgtaggaatcaaagataaatgcaaagagtttagaacaactgatgcaccatgttctcaatcttaatagaaatgatccttggaaatccatgtgctcatctatatacctagagagatagaagagaaaaatgtgtacatgtgatacataattatgatgtaacgggtgtcaagaggtgtttagaatgtcgagggtgtccatagaatagaaatgattacttgattagtattgtcttaattttgttactatttcatagacaacgagagacccagacgcaccaatgattttgtcaaaacagtagggtcagatcatgagattatatcgatcactcatgtcatgctattccccacttatcatgttactatcgtccaatgactttatctggcaaaagatatatcttctacaacaactggaatgcattgagaacgtaccctgacaagtcaagttgaaaaagtatcccgctgtctgtctgccattcattttgcttgttactgtcgaaccaagatctattttctttcccttcatcattcaacagaaattgctcaaaatataattaatattagtaattccactagttatgagaaatatattgtttagctatactgcctgaatgtcatcttgtatttctggctgcagagtagtaatgacgtaaggtattgatattcatgcagggaaaagaaaacaaaagacactaacaataattgtg

SEQ ID NO: 19209 - DNA, 832 bp, Glycine max
  Intron number 2 from transcript Glyma20g22870.1 (locus Gly ma20g22870) derived from phytozome v7.0 (chr-ID Gm20; pos 32791416 to 32792247)
ttcagctactccgcctcacccggctggtttacacggtgggatgttttctcacatctttatttatgacaatgttgtcctagttctattattaccgagtcctgtattgacttcaatttcttagaatttagacttagggtctaactcaattccacaaaaccaacttgtacaatgaggattgcccaagttttataagcactagttaggtcttatctatattcgatgtggggtcgcgacccttaatagctgacaccttagcagctgcacactacaacgcttcactctgcctttaagcccctttgtaggttgtccttttcgagatattggcaacaccaactatgcaattaaggccagctaggcgtaaatggcaattaaggtggctttctaatgtgtagagttttgtttttattgggcggggaggggttaaaatgaatatgtaaaagattgaatgcaagcttgagaaaaaaattccccaattactcttggaatggaaagcattaaaaactgtctattgcacgggttggcatcaattgatattgatatggattttcttttatttaatagggcttcatggatcactttctataacctcaaaagtgctcttacatgcctggcattacaatccagtgaatacagtttattatagctgttatctctttgagttgatcagaatcaagcttgtctaaaaattgtttgatgcctatcttgtcctattattttattctgtgtcttttgccatctacattattgatgactgtgatgttgagtcatctaaggttctcttaacttgaagattatatattttcagctttctatgctagttgcttaactgcaa

SEQ ID NO: 19210 - DNA, 852 bp, Glycine max
  Intron number 2 from transcript Glyma17g12750.1 (locus Gly ma17g12750) derived from phytozome v7.0 (chr-ID Gm17; pos 9658422 to 9659273 reverse strand)
ttgtcgaatttgcctcgaaagcgattccgacccaggtgaaaactcctgcaaaagatttcaaatttatgcccaattttctcattttttgggtggaattgttaaattgcgaaatatgggcatttccctgtaaaattatataaggactttataaggtagtggttttggagagtgcaattagagtccttaaaatatgaaccagtaaaccagtgtatcttagcatcgtaattggtgacattgtcatcaaatactgtcgttttgctcccccccgccctcttgcgaatcttattagtagaattgtagtgtgctatcaatgagattggaaaatttagttcttctaagggtgtatttttacaacgtgattcttgaaatcattaacatttgagttgtttttggttaatgaaagggaacatttggtgttcaataaaataaactgggctaaggaaagaaggaaactattgtcatttatttaaaatgctttctgttgagtgcgttcatggtgcacttacctcccattccaatatgctatattttttcaacatcttgttgattaaacttaatagacaactcaacattttatatgttgaagtttctcattttcagcactaaatcaataatgtgattagaagaagaccgatgatcttattcgtcaagcaaaaaattggtaaaagataaactgatgattaagttttttatcatcatgacttgggcttatcctgtacccattacacttaacccattaactcatcagataaatgctacatgatgttagcaaacaacaatatggatgttattctttgggctgtggaagtctttaatcttcataaagctaattggtgtttaattttgtagagg

SEQ ID NO: 19211 - DNA, 871 bp, Glycine max
  Intron number 3 from transcript Glyma16g33230.1 (locus Gly ma16g33230) derived from phytozome v7.0 (chr-ID Gm16; pos 36216093 to 36216963)
cgctacaagcttctcggtggcctcgccgttcgcaggtaattatattactctgcaaattcattcatttgtataatatatcttaatatcttgatatcttaatttcagatgtcattaggcatgggttttaattttattataaattggtacactactgtttagtgtttagggttcaccatggtagattgatttaaaagctggattacttatttgatttgatttgaaagtttatttactggtaatttgcatagtgtggttctaaggtgtatacctagtcttgagaaattatggtatgttaagctttagatgccatgattatgtggagtctcagctcaaatgggcattaagcctccttggggattacttgattccaggattgagtcctcgcagtgccactttgactccactttagcctaactttgccctcctgcaccgtttctgtaaatggagaaaatgccatatgaagccattagaacatgatagtatcaaacctcagttttatgttgattgtatgcagtggggctaaaattatattattttgcttacttttgttgtttggcgacaaattgtaatatgtcaagggttttttcagttttgaccctctttgtgtaggatggtataattaatttggccttgtttaatggaaaatgtacccttagttgattttgttttagcaccttattttagacttgtatttctgtaaaagcatattttcatgttttacattactaatatgctttttggggatggaaggttttaaaattgttcttttctcttttttttttaaaatttttttatgaatacaattcttctgcattgctgtggcaaaattataatctctatatatcttaaactatttgtttcagggcttgct

SEQ ID NO: 19212 - DNA, 696 bp, Glycine max
  Intron number 1 from transcript Glyma14g05110.1 (locus Gly ma14g05110) derived from phytozome v7.0 (chr-ID Gm14; pos 3544028 to 3544723)
ttcaactcagaagtcagaacatcggagctcatcaagtatgttaatcacttaccacgcattcacgaattgggtcttgaccaaaccctaattagaaaactagtgtttttacatttgtaattgatttgtgtgctttggaatctgaagattttattatgtgtatttagtgtatgatatctacttctctgagtgaatgacaattaggacttaaaacagccggaagtgaacattgatgattttatgaacttcaattgttattcatttttctggtccatttccattccgttgttgtgggttttaaagtgtgtaggtactaggtaaggtaagcctcacccttcaaattttcaagaaaaaaaaagttggaaacttgtttctttttctagccatatatgatggaaacagacacagcacaacacacaagtaaaacaaacaaacccacatagggaagcataactacacgtgctactatagaatcaacggaaggttatgttatagtgtcagtttttccccctttgcagttaaaaattaactgagattactcatggtaatttaagagggaaatgtgttggttggttcctgttggaacttttattcaatgtgcatcattaaaattggaagtctttgaatttcttaaaacctttcttgcagatttgtgctagtttgcaagggaagttgattgattgtaaactgttaacaggc

SEQ ID NO: 19213 - DNA, 526 bp, Glycine max
  Intron number 2 from transcript Glyma18g06460.1 (locus Gly ma18g06460) derived from phytozome v7.0 (chr-ID Gm18; pos 5032640 to 5033165 reverse strand)
acgcttctctagacgaggaggatcattagggtttcttctctctcttttttcatttcataattttgtttcattccttttttcttattctaatgttagttttaatttgtggtgtcattttttgagtaaatggtctatttggtcttatgaaattgtgactgtcactttagtctttatatttaagaaaatgtcaaaaaagttcctaaaattataattggataaatgatgattttggtactcaaccgaatttcttatttggtcttaatgtgtaaaaagtgtgacattagttgtaatttttgtggaaccattttgtcattaagttgtaatgtttaaaagaccaatttaacattagttgtaaagttttggaaccaatttgttattaagttatatagcaggatgtaattgttgcactttttatatatttagggactaaatcagaatttttgttcttttaaggattaattcgtttcatctaagtctccattcgggtcctgaacatatactaatattccttctttttgcagtttat

SEQ ID NO: 19214 - DNA, 468 bp, Glycine max
  Intron number 1 from transcript Glyma20g02250.5 (locus Gly ma20g02250) derived from phytozome v7.0 (chr-ID Gm20; pos 1909762 to 1910229 reverse strand)
gcttcttcttcttcttcttcttcttcttcaaattggtacttggattctgtgtttgcttaattgaacctctgatccatgaatctgaacgatttcatccaaatcattaccatttgtttctttaatttgaaggaagatatttttctatatgttagctggatgattcagattccattttttttgacaaatatgaaaatggatatattaatttcgatttcgatcaggattttgactttcacgcgaatgattaatgattaaagtttggagagtacttttacggatttcaatgcataataatgaattctaatgcaccaaatgaagaaggaagaaattgttgctttagtttttaggctttccctgctttaattctaacatgcactgaaattttacttgattcagtgattaatctttgtgggtgattgaatttggctggttactgcagagggattcaattgagagggaaagggactg

SEQ ID NO: 19215 - DNA, 369 bp, Glycine max
  Intron number 1 from transcript Glyma18g01460.2 (locus Gly ma18g01460) derived from phytozome v7.0 (chr-ID Gm18; pos 785170 to 785538)
ctttgtgagttttcttttttatttttccctaccctttaaattttttttcaccaatttattaactttcccctttttttcttcttacaaatatatgtttttggttactaggaaaaaagtgggaaagaagggtcttctgataattgttgattatttcccttaattgttttgtgctcgattaattttataaaaaaaggagcatgatcagcttacaaagaatttggtactgataataggaatttgcttgtcacttatgaatttgattgtgattttttttattttgattttgattttgcccccattctgaatttggactgtgtgttgtgccctcttctagggctgctgcaattcccagagccaagggtgagactc

SEQ ID NO: 19216 - DNA, 403 bp, Glycine max
  Intron number 1 from transcript Glyma16g07490.1 (locus Gly ma16g07490) derived from phytozome v7.0 (chr-ID Gm16; pos 6752958 to 6753360)
aaggaaagtaagtcatcctttattttttttgttcttttaattttcttggttctgttcttgtcttggattcaatttttgtttttgaatccttctgtcatgagaattttcccctttctatatttgttaatatttattagaaagtttgttttgatttctaaagtcagctctctaccttggctttcttttcttagtttcccttttacatctgccattaaatctgtctagatttatgtacaatttctcattaactttttgtagagaatctgtttgtttagaaaaatagatattctgcatcaattattggattggaatagaggattacttgatgactttgtgccttgttgttgttggattttcttattttgcagatataaaaatcagaacgttgctgttaagattgtta

SEQ ID NO: 19217 - DNA, 1044 bp, Glycine max
  Intron number 2 from transcript Glyma16g33200.1 (locus Gly ma16g33200) derived from phytozome v7.0 (chr-ID Gm16; pos 36193770 to 36194813 reverse strand)
gattaatcgccttcgctctcttatagctctcaaaggtgtttcattcattgtttgcttgttgttctcatttgattcattctatcatttttttttcttgtgtcgcattgcaatttacataatgaataatgaatctgctgattgacaagttgttgcataagaccgcagagcccaaattgagtgctctagtaaagtatgggtttgtgggttccgtttcttatttaatgaacttcactcatgattctgcaatttctaataacttttaaccaataataaagggtgtgttagaagggcagtgtgttgctagcactcctcttgaagaatagcgtaaaaaacatgaaaggaattccatttaagtattatcctgcaccaatacctcactttagtccccaattttggaaatcacagttctttccactgacaaatgacttgaagttttagttaaaaatagggacttaaaagagtggaacatacaatgccaagtactagagtgagggtttttgcaacttttttgttgagtaactatcgtaattagtgacatgtcaatactttattggtgcttgcatgcactaggtttatgcaagaatttgccctagtctgaattaatatggctttactgatagttagggctgaaataagtgaagggctacttttggttcttttattgaattgcataccagaatcattgttttaaaaattgaatcagagatcgatctggctgtggctcaaggtcacgatttgattggttcaatcaactagttaaattggtggtggttgagccatttgaatgtatttagggatgatcaaactgagtatatagtggttcacagtctaactgattaaactggccagtttggtctgtgtttccaaacattgactataatgtgttaagggcaggggatttccccctgatgcatgttcatactatactttgcactgggatgaatggtcattttatgtataggaaaacagtgtttatgctgatagataacatgttattttcttgagctagttaggaaaacagtggatcttgaagcttattcacca

SEQ ID NO: 19218 - DNA, 807 bp, Glycine max
  Intron number 3 from transcript Glyma19g32480.1 (locus Gly ma19g32480) derived from phytozome v7.0 (chr-ID Gm19; pos 40216870 to 40217676 reverse strand)
ctgtgagtgccacttttttttttcttcatgtgttgttgctgatgattaggctttgattggataaatttctcaattagtatttaactatttataggaaaagaaaataacaagataaaattgactctttttttcttccataagttaaaattggaaaaattagatgagagaacttctacaaaaaacagctgaatttgactttaacttctgggaaaagctgaattcatttacctttttatttcttctccttgagtgtttgtagagaagtttttttttccaaataagactctaattctattgtgtgatttatgtagttgaccttatttagtaagacaaggctattgctcttgctggcgaatcaatgaaaacatgataaattgaattcatatttggaaatgtctagataccaagtatatccttacaaaaatggttctttcacacccaattagggtgcatacaccttgaagggaggggagaaatatgaaagaaagagagacaaagtgatatatgcaattaggaaacaaaattgagattgagacggatgcaaggtgagtgtaaaaattatattaaagaattagagttgagattcttatgttctataactgttattagaggaaagtatcctcttataatattcttgggtcttactaatgaatttttcaaagatgctaggttttctctactgaatgcttataattacttaaaaaatgttaaatgctgtaagggtagcattcaggatactttagccacatgtccttgacatctacaacaactcttcattttttttttaaaatcaggaccttgctggag

SEQ ID NO: 19219 - DNA, 986 bp, Glycine max
  Intron number 1 from transcript Glyma15g27510.2 (locus Gly ma15g27510) derived from phytozome v7.0 (chr-ID Gm15; pos 29738425 to 29739410 reverse strand)
ctaccctcttctcgttaacacacacagaagtgaaagtaacaccgaatcttccaccttttccttcttccattgttgtctcaaaactctctcttttcttcttctttgtttcttgtttgcttcaattttgtaagttttactcttcaccccgttgttttttgagttacggtgtggcattttgaatcctggcgatgcccatttcctgtttttgtaattttttttcgtgaaaagaattgagctttgggaaaatgagtgttttttatgatctgggtattgttcctttttgttggatctttggtgattgtgaaaatggtgtttttctctgttctcgattgcggtgcttgatttccacgtgagcatttcaactgctggctgggtgaaaaatagatctgtgttgtgtttgcaattctgggttcttaagtatgttaggatatgctcaatgtgtttggtaatgttgaagaaaaataattgttgcatgttgtagtgtttgtgaggaagtttagtttttctgtggcttgaattttgtgcattccatgttctgttgtgttttgtcttctctgtagatgttgaggattggaacttcttttttgcattttatttatgaaaaatatagcctttttttgtatcgttttttgtttgtatttacatattgacttactaaaataaaaataaaaataaaaacattttgttttgctttacccttttttttctcttggactcataatgagctttggagctataattccgttatggttattttctcttttgaactgatagtatgaaggtttgaaagttgaaagtacagaatcctgctaactccgccattgctttaatctcctcaaaagttctttaaaatttctgttatggttttagtatgcctttattttactatgagcttttgtaaaaaatgatattttaattattttctgtttttagttctaattgattttttttatttgtatttgattttattgtagaagttgcctgat

SEQ ID NO: 19220 - DNA, 1007 bp, Glycine max
  Intron number 1 from transcript Glyma15g12010.1 (locus Gly ma15g12010) derived from phytozome v7.0 (chr-ID Gm15; pos 8903785 to 8904791)
tgctttcacgtctcattcatcacaacatagtgcaggttcggttaatctacttgtcctaatggtagtttgtttggttatcatttagggggttttgtctatgtggatctgaaacttggaggagtaagcaagaaaagagcaaagtttgcgagttaatttatatactgtacatagttttgatttttcccataaagaggcactgctacttgccactttagggaaagaaaatgataaattttataaacgaacgactaaggtcttgtttatcttagtaatagtttaaaagacataaaaaagaggaatttaaataagtaggttggctcaataacatatacaatacacctaattgcttccaaagattgagttttctatctttcttattattttgtcatttttggatgagtactgcagtgatttatcttctttttttttttttttttatgttgaggtggggcagagtcccgaaaaaacaaattacacacaaactaaacgaggcaaagataaccccatagcatctctaattagagattgaaaatagaaagcaggaggtaaatggactaaatgatttatttttgtacttggcgttctggaaagaccatgaggtatcctattttgagtattagacaaatttgatttggcctttgccacaaagtaattccctagttttgaatgtcaacaaccacaatggaaatttcatatttttaaagtttatatcaatggaggataatttttttcttatgaattaacttttgagattgaattagatttatattataatatgataaagtgtatcttagtagttgttattggtctgggcctgttgggccatccattataggaccaactgcatattaaggttgaattacatctaaaccaaattttaagaaaagtctaacattcattcatgtgtggtaattgatattgtaacctttagctgcagaggtttctgaaatgcctctactaatggatgcataagcttaaatgacccttaatttacagtttattgcagc

SEQ ID NO: 19221 - DNA, 598 bp, Glycine max
  Intron number 1 from transcript Glyma14g08170.3 (locus Gly ma14g08170) derived from phytozome v7.0 (chr-ID Gm14; pos 6186553 to 6187150)
gtatcaaaaggtggacaacatcaacgatctgaaaggtactttggttttagaatttgattgcataatataaaacatgagtggtttgtgtttaagtggcatggcatcatatcatatcataatctgagattgtggatgaaatatttttcatggttagagtttatttgcggaaaaagagggattttaatttgtttgtggttgtgcaccatcttacaaatacacacattcattcagatttggctcctagtgacaaactatgacgtgtatgttagttaaagagatatataagctctttagtttcagacttcatcgccctctttcttcctctttttgttgtaactcaagggttgctgtttttttcctcgtgacatgatttgatttccaccttcactcaagttctctttcttctttcccttcctttcatttatttattttgcctatgtttctttaaattttaatttatagttttataccatgttatgttaatgtcatatgtgcgatttttcttatattttgtacaagatttgttgattcaattatctgagaattccaagtactttgttgattgtgatttgtgaagcaggtttcaattgggaatctg

SEQ ID NO: 19222 - DNA, 792 bp, Glycine max
  Intron number 3 from transcript Glyma15g19670.4 (locus Gly ma15g19670) derived from phytozome v7.0 (chr-ID Gm15; pos 17048736 to 17049527)
gaaaaattctcccagaaggaattggggaagttcaggtatcacaattataactgttctgcaactttttttgacatattatcaggtttgacagcatagaaatcagagtttagattgtgtataatactataacacttctttgatggaaactaaatcaagataattggtggtgaacttcaggtatttctaattagaacagtgtgatgtattcagggacatccaaatttatgtcgttttgatgaaattttatgtcctctagctgattatctggtgattttcatctctaatgttcttagaaatgtgaagggatttgatgttttttcatgggggtcttcctgagcaactgcacatatctaactacatttacattttttttcatcgatcacttattttttcacctaatcaaaagattctgttatcagaagataattctaatttttattccaaaataaaatggctgttctattcagttttttttaagtatattgcttatatttcagaattttctatattcactgcatcatcttggcttaggccatatatctggttatctgaggatggttgcttttcaaagttacttcattctttctattgggagcattccataaatgtttagtgtgtatataggctaactgcactctgaaagcatttgagtgttttttctaattatgcacataactaaattaaccacatacaccatgggaaagagaaaattattgtgtgaaagattttgcacataacatttttatatgatatagtttgtgatctttctatccatcgcaggaaattattgat

SEQ ID NO: 19223 - DNA, 712 bp, Glycine max
  Intron number 1 from transcript Glyma19g43170.1 (locus Gly ma19g43170) derived from phytozome v7.0 (chr-ID Gm19; pos 48908288 to 48908999 reverse strand)
agtcaaactgtcaatcatgtggcaaaagggaaaatattaaaaaatagcaaaattttatcaacgtgaaatgcacgtgaatcctttataaaacaaacgagtaacgttttagtatattaaattttaaaataaaaacgactaaaagacatgtaagttaagatatactaataaataatgaaaagaaaaatagagaaaaaaatagaattgtatttccttcatttttatttttaagacataataattttgaaatttttttatctctacttataagatttcattttaattgtcttatacattaaatattttttttactaaaaggtccttatttgttttaactcaataattgaatgcaattatgaatggtatctttctcttttctataaaatattttaaagaaagaaaagagttagtataagtaagcaacagaagagaagagaagccgagtcctagtaatgaataaaaaaagatggtgaaatgagtgagatgtgcgtaccttatccaagtggaattgcgattcctccacagataatgacaatggcttcagctctcaacccctttctcccaactccaccctactctcaaacctaaactccataacttccccactctctccctcttcaccaacaaacccctctccaaacctccaaaactcaccgtcaactccgtcgacgtctccaaagaagacacgcccgcgtcccttaccgcccggctacca

SEQ ID NO: 19224 - DNA, 825 bp, Glycine max
  Intron number 2 from transcript Glyma18g40180.1 (locus Gly ma18g40180) derived from phytozome v7.0 (chr-ID Gm18; pos 48724959 to 48725783)
aagatcctttgtcgtgtcgtcaacgtccatttactggtaattttctgattttctctgcgatcctaatttcttttcgtttttcttccaccttattttttgagggaaaaaaatgaataaatcttgtttggttgttgaaaaattggaaagatattcttcttgattttggagttaccaacttaccatgtaaaaatttggtcatatgttgttaattaattaacttctggtagtgttctccctccttttctccttcccttaaaattttcttattttgatttcataaataaacaataaaaatcttgtttggtttctgaaaaaatggttaaatgattatattcatcttggttttgtagttaccaacttaccatgtaaaaatttggtcatatgttgttaattaattaacttctggtagtgttctccctccttttctccttcccttaaaattttcttattttgatttcataaataaacaataaaaatcttgtttgctttctgaaaaaatggttaaatgattatctggcctcctgagttgggatttggctcctaatcttagtcattgatgagaaatcagctgttaatattccaatatatcaatgatttgttacacatgtgcacctaacatggactcttgattttctcaactgatattagttacataaccctctaaactgaatagttcactttagcgaagcaggatcctaatgtacagtatggtgttgagttattttatattaacaataatatattgttggagttttgcaaagaaggttgggtggaaaactaaaagttaccttgaatttggatatgcttaggctgaacaagaaacag

SEQ ID NO: 19225 - DNA, 986 bp, Glycine max
  Intron number 1 from transcript Glyma14g36930.2 (locus Gly ma14g36930) derived from phytozome v7.0 (chr-ID Gm14; pos 46264260 to 46265245 reverse strand)
cgatcttgtcctctctctgtatttcttgccgtgtaattttcttgccttctgatctctctctccttcctccctgttgcatctttcgtacaaatacatgccttcttttttgtttttttaatattaaaaaggtgtttttttttcttttacaaagttcatgtttttctgggggtgaagacttttctgggagattcagataaggaaaagttgagaattttgatttaggggtaattggatgtgattagatttgttgttgtttctgcttcatcttttgttctcttctttgggtttatttgatgatgtgtttgcagatgtttctgacattttgtttgttgagaattgatctgttattcgtaattaattcgcattaaattcgagttaaattttttttagtgaattttctactacggttctcttatgatggaaatgcattttttattaactgaaaatagaagtctggttggttcctttgtctgaaaaatgataattcagttgtataaaattatttttttttactcttattttccaaatctaaactcgtatttccctttggaaattcttctcaaagtattatcatgagctaatgtagtcataattatttataatttaatttaaatttatcttttatcattcttctttagatagaattgtgtgctgttttgtgtattttcttgttgctgtgacatagttttgtgagtttggttgtcgaacaatttgtttatttttttttcttcttttagttggctctctaatctacactgtttgatcttggctgcatgttttcaattcatactgtttcatcccagttcgataaattactagtcatggcatgacatctatacattgttcatagtttgcattagaattcccttttcatttttcttttctctagtcttcatattactaagtaggtataaattcttgtcaaaatgcttacttattatctctttgcagcagctgaatttgcagaactgaactaaagcttcctt

SEQ ID NO: 19226 - DNA, 702 bp, Glycine max
  Intron number 2 from transcript Glyma18g12270.1 (locus Gly ma18g12270) derived from phytozome v7.0 (chr-ID Gm18; pos 11323633 to 11324334 reverse strand)
aagacaatcgaaggagagggctcctgatacaaccggtaccccaaacaaatctccaccgtttgattttctaattttaaaatcggacggacacaatgcattctctttttttttttttgccgaaacttgcattgggtgcaaaagtagatttactttcgcacctagtcaacgtcttgttttggtattcaatatttgaatattgttaggtaaatatggttttgagacatttttgcccataataagtgaaacggaattgacatctttttctcctcttttttctttttcttttttttttccctgcctttctctcactgccaagaacttccccaagccaatgacgcatcaccttcatcgaccctttcaatccttttttctccttctaagatgtactcaaattaaaacagaaactaaacgttccttgaatgtacaaaatgaaatgcatctagttaccaaaaaaaacttcaaaaacatattcttttgtcaaatgcacacaaagtgtagacacaatgcacagaaaacattgagcacatttatatccaaccaaatccaagattaacgcaaaaaagattagaagttatgcaaaaaaatacacagaaaaatttaagtttaaataaataaataaaaagttaaattgaagatctaggagtaaaaatcccaaaaatttgttgaggccatcgatctttcggtgaagttcttcaactgggt

SEQ ID NO: 19227 - DNA, 986 bp, Glycine max
  Intron number 1 from transcript Glyma19g02820.1 (locus Gly ma19g02820) derived from phytozome v7.0 (chr-ID Gm19; pos 2776667 to 2777652 reverse strand)
tcctatcctattttttttcttcgtaatttgtctaggtttgtgtttttgtccttgttctgttatttgcgttcttgttcttgttcttgttcttgtcacgttcttgttcttgtttcttgtgtctttcaaactttgtgtcaaaaaaaaaaaaattgtttgagttcttgtttcttgttcttgtgcctatcatattgtattctgtcttttgttcataacttttgtttcagcctattcgaattctgtttggggtaaaaattgcctaattgctgaattgctaaattgtcaaatttgcctaatgatgattgcctattgaacgaattctaatagctggacgtctaaaaaaaaaaacaaaaaaaaatagagagaaaaaaaaaaagaaacgaaaaaaaaaagaaagaaagagaaagaaagaaagaaaaaaaaggaaacagttgcaaaaaaaaaaaaagttgcaaaaattttgaaaaaaaaaaaagtgggtgtttgatctttgaaaacgaaattgaggcatttagaggtgttttttttgaaagaaaatcgtggaacaaatccccttatctagattctcctctgaattctgagcgttttgatatatagtgggcctcaaacggacaactgtagcaaaagttatgagcatttgaagtttacttgtcctatctgttgtcctatctaatatcttatctgttatcctacctaatatcttatctattatcctatctaatatcttatctgttatcctacctaatatcttatctgttatcctatctataatatcttatttgttatcatatctgttacccaaattaaagctcacctgttatccaaatccaaatctaatatattattatccaaatcaagtccaagttgttatcccaaatcaaatttgtttgtgatcattatattgtctttccttttattttatattaccttgtgtgtctaatttggtccatccaggaacttaagaggaaacacgagtggtaaaaggcaag

SEQ ID NO: 19228 - DNA, 683 bp, Glycine max
  Intron number 2 from transcript Glyma14g16820.3 (locus Gly ma14g16820) derived from phytozome v7.0 (chr-ID Gm14; pos 18295182 to 18295864)
tgcctggctttctagcatttagagaggttccttttttctctatttatagccaataaatttgatttttctttttctattttttagggagccaagtgacatatgttatatctagacaaggttagaaataaatgcatcagaatctcgagtggttggttgaatggaataagataggttctcgaatctgacaggatacagattcaaacccccacttgtctttttgtgataaggtaaatgtaaattcctctttaaccgctctttgagcctggaaggttctctaaatttttgtttaccaggacaaaatgcattagaaggaaaaaagttgggtagtatctattgtggaaaagaagatagaatcttcacctaggtggtttgggcatgcatggggaagactagtagaatcttcattaaggagattaaatcggatggaaggtagcctggcatctagaggcaaaggtaggactaggaaaaattaaggagaatcgattacgaatgattcagaagttaataatttgtctatagacatgatttacagtagaacattaggtgttgtttgatctatgtagttgaccccaccttgtgaaaaaaggcttggttgttgttgtggtttctaaaatgtttgtttcaggcataattgattgctcctataattttaggccccagttcttctgcagcttctagagaaa

SEQ ID NO: 19229 - DNA, 812 bp, Glycine max
  Intron number 1 from transcript Glyma20g04990.1 (locus Gly ma20g04990) derived from phytozome v7.0 (chr-ID Gm20; pos 5547963 to 5548774)
atagaaaaagggtcagcaacaagaacagaagaaaagagattcatcacagtaacataggtcgttattgctgtgcatttttctcattcatttatcactgctcactgcccctctttctctgaaccattcagatttcagaaccccatcccccccccccaccccccccctttcccccttgaaccaaccctttccttttttcctatccccaaaggacagtaacaaaaaaaaaaaaaaaaatcaaaaaaaacaaaaacaaaccccccagtggtaaaaaaaagcccctctctcccactaaaaaaggccaaacctccttggtttctaccccgaaccacttggaaaaaccccccttcaacaaaaaaccctcacattgagaaaattttttcccttccaaaaatctccaaaaaaccaaaaacctttttttcagtcagagacaatcataaccaccttgttagttgtcatcactcaaataaacctgtatatatatatagtctaacattcatcttataaattaactgatttgaaattgttttgcatttatatttatgtatactatgtgacaccgaatatatatgtgaattaattaatacaaaattatttcatatttatatttatatatattatatgtgacactgaatgcatgaattaattaatatgaaacctttttagtataattggtagttgtgttgcaagtatatatatatatacacattcagagcaaattttattttgtgattatacagattttatctggttcgagcaaggttgtcttctaaaacctaggtcttcagttgtggctaccacaaggcggttccctt

SEQ ID NO: 19230 - DNA, 446 bp, Glycine max
  Intron number 3 from transcript Glyma19g31750.1 (locus Gly ma19g31750) derived from phytozome v7.0 (chr-ID Gm19; pos 39541231 to 39541676 reverse strand)
aaatacttgctcaggtttggcttttgaaatttagtttttggatatgaaaaacgttttctgttttcatttttggtatatattccttaatttctattattcaaatattcatgcagggggaagtaattatgctactattgattataagttatactactgtagtatacaatagcttatcaattgtataactgtaattcttttatcttaattaaagggttaacctatggattttctctatcttacaagtgctggataatgacaacaatatatatttagctatccgttgcttgccatttagcacatatatttactcctatctccttggttgctcttgtgtatcttctggtagtgttggtttaatgtatagtatttaactgttgacacttggttttgaatgtaactggcgtgttttcttcccccaccttttcaatttgaagcagtctctggat

SEQ ID NO: 19231 - DNA, 680 bp, Glycine max
  Intron number 2 from transcript Glyma19g31750.1 (locus Gly ma19g31750) derived from phytozome v7.0 (chr-ID Gm19; pos 39541947 to 39542626 reverse strand)
cccaaggtttctctttttcttccctaccactactgtttctcaagtcattatttaattaattaatcgtttagtaggttgaataagttatataatcaacttttcactctaaaaaaatagttgtaatcaacttattaattaacccgttcaatattttctatgcgcacatgttagttaaagtcgatatttttaaaaggtttgtttaatgaagaatgaaacagtttttaaattttatggaaatttattacttaatccactcaatatatatatatatatatatatatatatatatatatatatatatatatataatttatggttgaattaataaaatttaatatatacttagagttgctgaagaggtagtttcacccagagttgcatatggagtaaattgatccctcttcaatattttttttcttatttgattttctcctataaatgattatgatcaagaagtttatccaaacaaatcaaattgcttttgacatgtaatttatttatttacttgtctcagttgcgagtggtagtaattactggtcacagcatcctgaatgtgacttctactttgggtgtggccgtggtaattattgtttcactccctcgctcacactgcatttgggtcctacgtgtgttgtgtttactctggctttctgttgaacttgtagatttgatagaggagg

SEQ ID NO: 19232 - DNA, 465 bp, Glycine max
  Intron number 5 from transcript Glyma19g35710.3 (locus Gly ma19g35710) derived from phytozome v7.0 (chr-ID Gm19; pos 43194708 to 43195172 reverse strand)
caggacctggtgctccaattatcttcaattgtgtaagtatgcctgaatagtgaatagtaaagtaaacgtttcattgtagaatgtaggagccatgtagttcacatattcttgaaattgaataatcaaatttcttcagaatccaggattataaaggttaggaccaaagaacttgttggataaactaggttttctgaagaattcaatatggtcaagtaacaaaaagaaaatgccctctgctctgtttttttttgtttactcccccccaaacctttgatactaccttggtaacatatgtttgcatgttaattgttaagttgtggagttgtaatattgttgttatatttccaaaggacaaaaaaaaagatttttttttctttttcaaagattacatttgagcaatttgttaatgtaagttgactgaatatttcaggtgattgagattgggaaagggagcaaggtgaaata

SEQ ID NO: 19233 - DNA, 831 bp, Glycine max
  Intron number 1 from transcript Glyma16g08780.1 (locus Gly ma16g08780) derived from phytozome v7.0 (chr-ID Gm16; pos 8219494 to 8220324 reverse strand)
aagttttccttgttgttggaagcaaatcctgcttatcttataattattattattggattagcaagtaaatataagcagcaatcgagttaatagtggtcataacatgagataccatgtatgatggaaactaagagttaggagcagttttgacagaatgttaggaggagttacgatgtattaaatatgtgtgtaatagtggaaaggtttttttttttggtaatttggacagagaactcatctctgactctaggacagagaactcattctctttccttttaagttgttgcttcttcctgttatttcttgttttctctttttttatttatttccttaatcaagggaattgatcttcaaactctttcaactgttggccagttcccatcacaaagttacgtaactgtgcatacttttcctcaatgggattttttattagtttgagctatattgtggtcaagttaactatgtcttttcatgttttcatttcttgtatctagctttttaatgatgtatttcaagtgtagggaagcaccaatttagaatctatccagatctagagttgaccttaggtcttcctatgcatactaatttcataagtttctggtctctaagtgatcaaagatgggaaatggattgcagtacctattattcccaatgcatttgttatcaacctgggagatcaaattcaggtaccattgttgtgcttttcctgtagtttctctcctttttcaataaaacttatgcatccagagattaatttattttagatttatacaatgagaaagtataagttagtatatttatcaattttaatactgttagagaaaaggctag

SEQ ID NO: 19234 - DNA, 722 bp, Glycine max
  Intron number 2 from transcript Glyma15g14760.1 (locus Gly ma15g14760) derived from phytozome v7.0 (chr-ID Gm15; pos 11236887 to 11237608)
aaaattatctattacaggtttggtctgactgctggttattaatactgttttgaatatataaatatagcttgaaacattatgtttgggtaggaccatggaacagaagtgttttttcttccctttcttttatgtaacattgttggtcactcttagaatgtgggtttgggcctaactcaattccaaaagctatcttatagcgtgagggttggccttagcttatatactctatcttggcactatctctagccaatgtgggacatgggtttttcccaatacaccccctcatgtccaacactttttggtttggtgcaagtataatatggtgtgtggcccttttaatggatataggatagactctgataccaccttagaatatgagtttaggcctaactcaaccccaaaaactagttatgtgagggttgtcccccacttatatattctatctcggcactatctctaacccatgtggggacttggatatttcccaatatccaagctgtttggggtggtagttttagtatgaatgaaattgtttgattctatctgagtccatagtatgtagatgtaaagcactcttactgaaaggagaaaaaggggtgggagttggggtaggggatgaaaataaatgcccatataatgttgtctaaggtttatgattgaatcttcatttctttgtctctttggcagccgaacatttttatctataattggtggcgttgttg

SEQ ID NO: 19235 - DNA, 742 bp, Glycine max
  Intron number 2 from transcript Glyma20g20920.1 (locus Gly ma20g20920) derived from phytozome v7.0 (chr-ID Gm20; pos 29666689 to 29667430)
cttgtaatttctgctgtttttgttgttctgttgttaacccctatttttttgaggtttttgttattttttgtttttgttttggtgtggtttgagaattgttaggtttttgtttctgtagtgtgctgttgttgtgttgagtgaaacgagtgatgtggtcgttcgcgtcgggggcaaattggtttccaaatacgcatgggatttgtgtggcggtgtcgtgtagtgttttttgtggcgtgactacgagagagagaattttgtggtatgctttttgttagtgcattgatgatgagaaggggtgatgtgtcagaatacagagcggcctttttaagttgaaaactttcaatgggagtgtgggtgcccaaatttagtgttcttgtcttgatgattaagagcttgaaaatccttagtattttcatttttttcttgtttatgtccatgttatataagtttgccttctaatgataaactagatatttgggaaaacatttttatcttccttatcatctcactttttcttggatgatttttgtctataatgcactcttagcattctattaaaaacttaatttgttagagacttgataagccattctctatgctgatttagatttcttacattttattatgtccttaattgtttgaagggacttggccttatctgcatttgtttatgcatgtacaattaatagtatagctctcattttccctgaactaaaaatacttttccatggtcagcaaatcc

SEQ ID NO: 19236 - DNA, 580 bp, Glycine max
  Intron number 1 from transcript Glyma16g08960.1 (locus Gly ma16g08960) derived from phytozome v7.0 (chr-ID Gm16; pos 8472085 to 8472664)
acgagcaggtttctatattctctatcaccgcggaacaattttttgcatgatcgaattttagttcggagaactcaaaagtacttttactcccaaattaatggatttcgtcattcttcgttctgtgtattgaaattcagaaaaagtgattttcctaactttaatccaaacacggtctctgctcttctttagcatgttttgtaaaattccatttttattgaagatcagcatagattggcaaagttaagttattggagaaaaacaccaaaacacctttgtaactgtatctttgagtttgtgttattattatttggaaaagtactttcccaacttttatccaaacaccgtctctgctcttcttcagcatgttttgtgaatttcatttgtattgaagatcaacatagattgccgaagtaaaattattggaaagaaagcacgaaaaacacctacggaactgtatcttaagttttgagcttattattgttattgtagtttgatacattagtaaaatgatatttttcttttccatttatcttaccgattgttggtttggttcgacaggttctggtgcagcgtaaatcga

SEQ ID NO: 19237 - DNA, 784 bp, Glycine max
  Intron number 2 from transcript Glyma16g08960.1 (locus Gly ma16g08960) derived from phytozome v7.0 (chr-ID Gm16; pos 8472710 to 8473493)
ccctctctttttatgtactttaatctgttcagtgtgtcactttatttcatgaattagttatactttggagtaacatattattgagaagagtcaaaagaaaggctataacttgctttcactgatcaggaacattcaacataaacacctgattctgtgtgttgagaattgagattttttatttttatattttttattaaatcttgtactcttttagccttttttgattgtttattagctgctgacatatacattaggtttactcaacatcaaaatcaattatacttctgagttctgaggatatacatcaaaatcaaataatgatgcaaccattatttaatagtataaccatagtgtcataaggagaaaagggtaaaataatagatgtcccttggttcaaggatactgaaaactctgaggaagtgtttggtttgtggaaatgttttctattttcattttttgttcttagtaatatttacaaaagtgcaccaccttgtttcattttgttttttgttttctgttttcaaagatttgcaatttttttcgtttcctatacaaatcttttgtaattaccagggagaacaaaaagtagaaatattttcataaaccaaatgcaccctaacttcttccttaatatctctctgaactccataaataattttcttcttctatttgtgaagttccattcccaattctatttcctattttcttacttacgtctccaatcttttcctgccttcttgttaatcgttataggtttctcggctacttgaaattttttctgaag

SEQ ID NO: 19238 - DNA, 898 bp, Glycine max
  Intron number 3 from transcript Glyma16g04040.2 (locus Gly ma16g04040) derived from phytozome v7.0 (chr-ID Gm16; pos 3417026 to 3417923)
ggtatgtatgttgttattaaattatgtcgttcttcattttgtgctttatctgtttggtgttagtgagggactaagtgggtttgtagaacttttcaggctgaagagttcttctatttattttgattgggaatgggaatgggaaagttcattggcatttggggtcggtttggaagagcttattatttatagcttatttgcattcgtcttatcatataaacacttgagcaagtatttgaaagagcttatgaaaatagcttatgatatgccataagcgtatttcagtttatttcaataggttttccaggataacttatgaaaaccgctttattaacccaatttcccctttaattatagaaacaactttaactaattcaaaagcacttatggtaggggaagaaaataaatggtaaaatgcattgagctttttttgtaagttaaaattaacttgtgcatgctagcttttgcaatagttaaatgaaaaggttttctataaaaagaatggagcgcataagttgattttagcttatgctagaatcttaattcactttaccttcttatttgcctttaattaagttgtttacccaaacggaactttttctacttgaagttaaaggagcttatagttcatgcctgcaagttatttaggaaaggaaaatgctaagcacgctgattatgtgtaccatcccaataaataacactgtttatttgctgctcacacacatcaactgtgtttcacccagtgttgaatgctttcaatgcattcggtggaaaagcagtatatagtgtttcttacaaaagaaatagagatcatgtcacttgctagggattgttcttaattttgtgaatatatatttcttttgtagatatcctaatcttaaaagcataaaggagctaattt

SEQ ID NO: 19239 - DNA, 887 bp, Glycine max
  Intron number 1 from transcript Glyma15g07690.1 (locus Gly ma15g07690) derived from phytozome v7.0 (chr-ID Gm15; pos 5419025 to 5419911)
accaccatcacttcttcactctagtatccggtgtgagattaattaatatataaatgatagatttataccttctcggattttttttttcttttgctgagttcttggcataaattttggagggattctgatgtgacaaaatataaggggtgtttggttgaattgtttttttatttttattttcaatagaaatagaaaatagtgataaaaatgtgtttggttgaatttttgttttcattttcagtgaaaatattttctcaaacaaatcaaaaatgaaaaacaataaaattttattttcagttgaaatcagaacctcattttgattaaaatgaaaatacacaaggaatataattttaagcaatatttccttttgaaagcatgttcagtgtttttattttttgaaagcaaaaaacaagaaatcaaatcaaacatattttttcagaattttaatcttttgaaaatggaaacagttttaagaaaatgaaaacaggaaatgaaaatagaaaatgaaaatacaaaccaaacataccctaattaattcaacattctctctttagatattaattattttttggcgaaaaaaaattaagttgtgaaaaaataaaggataattttaaaagaataatataaataattgataaattaatatgattatttaaaggtgtgaatgagttaaagcgattttatttataggaacaaatgtagtatttataaatagagtttaaaggtcacgaagtaatttgtttggatacaggccgatatatattgaacttacttcattaaggggattgctcttgtagtatcacaattgttgttgacactatccaggtgggtgtcattttgttttatcctataattgttccttggaaatcgcagagggagttagatct

SEQ ID NO: 19240 - DNA, 399 bp, Glycine max
  Intron number 1 from transcript Glyma17g33060.1 (locus Gly ma17g33060) derived from phytozome v7.0 (chr-ID Gm17; pos 36683121 to 36683519)
ggctcttgggtctccgaaattcgccaccccatattgtaagtttttccactcccatgcaagttttcacacctcttcaaaaaattaaccacattcatttccagaaaaaaaaataatgttagtgtatatgcttgcaaatcgtaatgctcaacaactaataagaaaatgatcgcattttcttaattttaatttttttccacaatccagtaattctttaattactttttaaaatatttctgaaaagttatttttaatcaaactgaatgatgctctgtaattcatgtaaccaaagcttagcagatggagaaaaggtggttgtttttgctattgttgtttaattgaatcaaaccaaacatgaaataaaaattaatgatttgtttttttgtgcaggaagactaggat

SEQ ID NO: 19241 - DNA, 521 bp, Glycine max
  Intron number 1 from transcript Glyma18g44950.1 (locus Gly ma18g44950) derived from phytozome v7.0 (chr-ID Gm18; pos 54701313 to 54701833)
caagttttgacatttcaatcacccccaccttctcaagtaagattctctctcgctgaatcattttaaaaattttggatttttggataaggaattcgcttaagcaattgacaattgagatgtatgattctcttacaaccataagctttgatgttatagctttgtgttttagttatctgggaaagttaagtccaacaagcttgcccactttcaacttcctccaagttaatttcccaccagaaaaatcagcctcagttattgtatgatatgatgcttgctttaatttaattttgttttgtttttctatttgtacatttcattgatgtcacttgggaaaatgatatgatgagttaatgacatgacagagttatcactttgccttgtttaaggagattttagatcaataaaatattcaatttatgttctgaatgtatgatgtgaaggaatcttattccttgaaatgtttcaattcttcctttattcactatcaccttccatttggtggcttttcaggatatactgtg

SEQ ID NO: 19242 - DNA, 543 bp, Glycine max
  Intron number 1 from transcript Glyma19g00540.1 (locus Gly ma19g00540) derived from phytozome v7.0 (chr-ID Gm19; pos 319185 to 319727)
gcaacaccaaaccgttaattggttgctctgattaggttcgttgcttcatcatgtttttgtcttgtttgtttccacacgggttcttgagaaacttgtaaaaccgaacctttaactctctgaaagccttttcattttcttgaggcttaatgaagagtcctttaggtgttagacgcttatgatgctttcttttgggttgttaattaataaggcgtctaaatttgaagtcttttgttttttgttcggggatttttaaatggattctactcagttgaatggttttctgttgattgattgcgtccgaaatgggtctcttgcagattctctcatgttttctttattttattttttgaatttcattatacgtatcatgtatacgtcgattaatgtcctttatcttatttatttacagattcttttttcttaaatgtcaattttatagacatttttgtaggagattctgtaattaaagagctcgttgaatgagtacatattggtaattcactgtgctgagttggattttttaagcctgttcagatacccttc

SEQ ID NO: 19243 - DNA, 1060 bp, Glycine max
  Intron number 5 from transcript Glyma14g38290.1 (locus Gly ma14g38290) derived from phytozome v7.0 (chr-ID Gm14; pos 47449638 to 47450697)
cgtatataaaccgttccattattcttacgccagaggtgaactcttttttgcctatcatcacagtttgtttgttttttctgcttgtgagaatagaattgcctgcatgatgtttatgaatcaagctgtttgtttggtgcaacgaatcccgtctttaaccattttggagatggaattgtgtgtagtgtagaaacaagccgggaacaaagtagggaatgtgacatgtttgtgaaatggtttggatatggaaattgtgaactgttcatgtgaaatcatttattcaccactttctgatttttatttgagtgaaaatagtatataaggattcaaacttgattgaaaattaagagagtgtatgttttaccttcagttttcgtggtggtgattttgatttagattttacctttttaatgtacttggggaaaaacttataaagtcttgtgagccgggaacctaccttttattaagtacatttagtttttctctgtcctgattgtgcacttgaaagacccgaagaattaggttctagagtattgcattggcattttgttagtgatggtaattctgaaaagaataagctttggaatgatcaagaacaagtaaagatgaaattgcattgtcttttgtgggtatgatgcttgattgttcaacatgccaatgtttgattccggttgtgtatgaggtcatatgcatcctcagaaatgacaaataattctgtctaattttcttataccttatacctgtggaggcattgctcaaaagcttaatcctggtaagagagtgtttggtgtgctgaatgaataatgttcatggaatcaactttgctcggcatgttgatgttgatgttggttcccaaaaatgttgctataactgtttggttcaattaaaaaaaattgggaatttggattttttttccctttaaaaactatcttgcaatattttcttttgttgcaagatcctcatattcccatatctctatccatcacgttagtatcactaaacatccattctttgacatgccaatgtagggggatcggactgacaagagagatacaagtgcctt

SEQ ID NO: 19244 - DNA, 555 bp, Glycine max
  Intron number 2 from transcript Glyma15g03620.1 (locus Gly ma15g03620) derived from phytozome v7.0 (chr-ID Gm15; pos 2528251 to 2528805)
accaatatcaccactataaggtatcacccaaaaatccagatgatggtagagaatcgatcaaagaactaagcatgatccctttttaaaataattattaactaagcaacatatttagtatcgaccataaatcgtgatgggatttaattggcagatgacatatactgtaaggtgcggtaaatgaaacgaaaatttaatatatacctgtagacaattgtattaaaaaatatgacagtattatcataatcactagaatagtataatgtgatagaaaacttattattttaaatatattgtatataactaaaaattaatattatattatatattgctaagaaatattttttttaatatgggtcgtggacgggtcacttacctgttgaggactcgctaaattagaaaattaactaccagctcatttaaatgaactcaaaatagcttgatcaaaattaaggtagcttaaattgacaactctaatttttctcttctattcaatcattttttttctcacatatgtacaaaataaaatggtctattgtacatctatgtcacaggaag

SEQ ID NO: 19245 - DNA, 856 bp, Glycine max
  Intron number 1 from transcript Glyma18g51970.1 (locus Gly ma18g51970) derived from phytozome v7.0 (chr-ID Gm18; pos 60711961 to 60712816 reverse strand)
cttgtttgggaggttagcctgccctccccccctctcagcatctattaatgtcgtttcgggatattgtcttttacattgcatttgtatgattgtatgcacattatgtggtttgcagtaatagaaatgaaggaagtttaaaaggaatcaaagttgagtaggtattctgcttttgtcataagtttttttttttttaaatcatcgaatgggttagttatgtcttattgtttagcatatctttcagcttagaacaagtttacatgatttagtgcttaaatttttatttttttttgtgtgtatttggaataaatatgagctgatatgtggagccttgaagtaatgagtatgctattacctttgtctgacctttacctctgttcatttcttttccaaatactcttctcaatcttcttaggttgttagtagtgccttgtcatgctgccaatgcagtataaaatataaataacatcctccctccattcttttctaatagatcattgtgttctccatctcttcccacttcagcatagtttgaatgagatacatcaattttacaaaacaatagtttttgttataatgtcctacatcagccaagaacatggccaaaatactccttataacagttgaaaaaatcttctttccttgagttaacttttggggttgagttaaacctaacccattgcttatagtttctttattctctttctcttacaatttgagtcttcagatgtgtactcacagttttgttgtttcagtctgcactaacattaatgatctagatattaataatgtgtacaaaactttgtctattttccttgtgcagaacttttgttcaaaggaagacaccattttttgtggt

SEQ ID NO: 19246 - DNA, 724 bp, Glycine max
  Intron number 4 from transcript Glyma17g09840.1 (locus Gly ma17g09840) derived from phytozome v7.0 (chr-ID Gm17; pos 7344157 to 7344880 reverse strand)
tactttgcacccttaactgtcgtacgtgtaaggcctttagtttctataatatatattaataattagcttaattgcaattttgatcataaaatatcataattttatgggttttgtcataggcttctaaattgtgcaaatttgggttatctaaatattataatttgcaattttgatttctttcttcatctttcattaaatatataaatgtttttctaatgattaggtgactacttacatattaccttaaatgtatgatgacattatttaattacactttggtcattcatgattaaaatattatgaatataattaaatcatgataacatatgagtcaagcaacacatcaattattattttatcaagatattatcatccattatcacattagtaaaatctgataaatatatgtaacaaatgactaatagagagatcaaaatcacaaaattgcaatgtctaaaggaaattacaatgcctaatgaataaaaatgaaattaaagctaaccaaaattgtgtaattacaatgcctagctaatgaataaaaatgaaattaagcctatatatttagtagtgattttttgtttatggttttattttcagtttatataataatagttactacttttcctccctgtttgttttttcttcttcttatttttaactttaattttaaaccccacaaaaaagagcagcgacgagtaattcaaacgaagagtgtgaagtacat

SEQ ID NO: 19247 - DNA, 733 bp, Glycine max
  Intron number 1 from transcript Glyma17g04010.1 (locus Gly ma17g04010) derived from phytozome v7.0 (chr-ID Gm17; pos 2659052 to 2659784)
cactgttgtcttctgtattgtcgtattactccaaggtaatattcctttaataaaattaattcttatcatcatatgacatttttgagtcgggtattgttttgccttgttctgttacctttggattctgcaattttattggcacctatgcctattggttctattttcttagctaggacttttcatattttgagatcattacttcagtattatgtttgatgaattccagaaaaatcgtttttgtaaaacttacatgttgaatagaattctccgtgccagcatctaaaagtggagataattgaagttaatatttgttgaatttctattcataagtatactgatagttactatttttctgtgctaataggttggaatgtcaagctcttggataattttactatgactaggcaaaagcaaaaaagaaaaatagaaagtcttccattttaaaacatctgttaagtaataaactcagtcaagtatattcacacaattggtcttgattcagtatttatcatttgaagacatggtttcaagtaattctattgagacatatggatcaaacttttgaagactattgagttctttccttttgttcatattatgttctgttcactcagcatttggtgctattttttttagacttgcctcctttgaggttcaatctagtcatatggatctaaataaataacttattttttccaactagcaactgagagaatcattttccattcccttg

SEQ ID NO: 19248 - DNA, 818 bp, Glycine max
  Intron number 3 from transcript Glyma18g49400.1 (locus Gly ma18g49400) derived from phytozome v7.0 (chr-ID Gm18; pos 58791063 to 58791880)
gaagtgggagtgtcaagagataccgtaagtaaagttcttgtcttcgtcttctctttttatggtatgatataaagcaatgtagggtgtctttgttttatcctttcaatggcagttttaatccgtcggcacaatttccgatagatagttctctgggtagtaatgagttcttaaaagtacatttgaaacttgttcaacggaaatataaacaagcacgtaaatattatgagatttctcgaacttttttggacttgtaaatggtggtaacactgagattggaagaaggataatttttaactgcaagttttttattttaaatttaaaattgattttgaatatattttcatatcattatacattaaactagaatcaaaattaattttgccttcaaaaattaattcaaatacacaagctcttcccaaaagctcgcagagcagatcttggattgttgttttgttattatttttagttaagacaaattgtactaccattattttgtacttctcttgacaaaggtctgaactaaaaaaacggaaatatattactcctattttttttatataaattgaaggaatatgtagaactactatttttttattaactgtgaccctagtacactagtcttcacagtcaattttagtttgaccgtggtcaatttttttccccgcaaaagctgcttcttttggagtgttttgactgatgtgtgaaaagaggcgagtcaaatggctattgagtattgtattgaacataatgcttgatttgtttattaccaatgctatgaatatgtctcacctctcttttgggaatgtgatatgaccaga

SEQ ID NO: 19249 - DNA, 614 bp, Glycine max
  Intron number 1 from transcript Glyma16g22640.1 (locus Gly ma16g22640) derived from phytozome v7.0 (chr-ID Gm16; pos 26152137 to 26152750)
acgaggtcgttcccggcgttgttgaaagccttaaggtgcgttcttccactcccctcgctttctcacgctttttatatattatcaaatttgttttctatgtttttctattatttatttatttgtttttgaaattagcatgatattggtgccaaatatctaaagttttgcttgctgataactaatctccatcagtgagatctccccaccaaaccatgttccactaggactaggctcaaacctaatatcttgcttgatggaaccgagttggttttcctattattatttctttttaatcatattatttgtgtgaagtattcatggactttgtcaatgactaatttttgccagaaaattaggctagtccatttccacgcggcggagtaaactaaagaaaataatatatgcactaacagttgaaatttaatgggaagttttttttgcttgaagtttctatctagatttttttttcttttcttttccatgtgatctttgatgcatatatgtcatgaagttatcaacttgatactgtcctgatgcagtgtgggtttatgttttctgttgatcctcatattttactaggtaataacgaagttctgttcagagcgaattgctaa

SEQ ID NO: 19250 - DNA, 966 bp, Glycine max
  Intron number 4 from transcript Glyma19g31970.1 (locus Gly ma19g31970) derived from phytozome v7.0 (chr-ID Gm19; pos 39751341 to 39752306 reverse strand)
gtcgagccggatagtggcgttgggctatgaatatcatggatgacatgctgcgtgcagctgtgtgtactttatatttttctaccctagtcaatatttagtgagttcaacttgatgtgatcggttttttttttccttctattaatggtgttacattgtagttaagttgagcatgtctggtgaagggagagggagaaagagagagcatattgtatgagtgtttcattttcactactttgctatattgttttatggtcactagataagttttgtttgcaggatccagtttacgatgattcatgcctctttcaatccgtgttcttaatgatttaataataaagatctgtgtgcttgactgtattacattgtatactttgcaattttatgtttagatacatataaattaaatttgttccatttgatggtagaaaatagtatctttctctctcgtaatgctggaaagtgggaaccgtataggttttgttttggttagtgacttagtgttgatatgttctatgcatcatatggttacctgcatgctacactagctggtcctgaagtctcagtgcatgttagaactgagtgattaatcctggtgatgagatttttctgatcaatgtgatctagccagcttttcatttaattttctccagacactatgctgttgtaatctgggaatttaaaaaataagcccttcaattgtgtgcgagactgtgagtatagtgtaagggatcagtctcaattgcatccaaggggttagtaagggtagcttacagctgtcactataacagctgtcattagtcttacagctgtcactaggacagcagtgtatataatctcttctctgtgactttctctaagtgcctaataacagaaacactttgttggtatgctaactataagtgctgtttgtgacactgaaatatttttgcagattccaccaagtcggtcaacttataacaacttgat

SEQ ID NO: 19251 - DNA, 688 bp, Glycine max
  Intron number 2 from transcript Glyma20g00930.1 (locus Gly ma20g00930) derived from phytozome v7.0 (chr-ID Gm20; pos 654612 to 655299)
taccagggtgacgatcctcttctcccctggatacagtgagtataaatatatctctttccatccccaattatttcacttttgtttgcttccagaaaaaataataaaaatgggcaaattaatcttcccacatgtcataagtaaattgccccttctgaacccttaaaatatgcattcaatagcccaaatcccttaaatttaacaaaaagttattagaatgatctacagagcaatttctgcattagtatcagaacagtgcttgtagttataattatttaagatgcattgaaatgatgattaaaattaaaaaggtgacaaagttgttttattgtagttattaaaaataagtataataagaagttcttccaaaaaaaagtataataataagtataacactaacaatttgtttgcatggagagaaaattagaggagaaaaaaatttggaaatgtcaatcgagggagattttgaaattttgtttttttagtgattttccccccattttctcgttaatcaaatgcaaacataaaataaaatagtgttaagaatgtttcatttgatgtgttttatatatgatatgtgattatttagtcattaagcaactaagaacttactgttttactatttatttatctaattaattttattgatgttgaaggtgtatcaagtgggttcaggaggcctttcctcctg

SEQ ID NO: 19252 - DNA, 663 bp, Glycine max
  Intron number 2 from transcript Glyma17g33690.2 (locus Gly ma17g33690) derived from phytozome v7.0 (chr-ID Gm17; pos 37657707 to 37658369 reverse strand)
gcagaagattcacctgtcagtggagggggcctcaggtttgtgttgtatccatctttctttagatctagaattggttgaatgtgctgaagaattggtgtgtgtttttttaatggttacaattattgttgttggttaatggtgtattggtattcttacgaggtagttttgtgttgaatgattttgttggtttttttttttttttttatcgtcaaatgttagttttgatagaaaccattggtcaagaagcaaattcattggacttttttttttggttggggttggggggggggggggggtattttaaaattatttgaagagggcctcggttgatgtagaactggtcaatctttgttttgttgaatatcataatcaagttctgcttttttgttttattattgttatttttgcttctgtttgtcttattgtttataaattatattggataatgttataatttatactcttaccgctaccggaatgaatgactacccttggcagaattctttctactatgacaatgattggacatagatggtgatttatgtgtgtagaattcaaagattatagatgattttaattggtttttcttttatatttctgtctttttagttgattgaatgatattattttaacatgttgttttgaattgtaactgcagtcaga

SEQ ID NO: 19253 - DNA, 645 bp, Glycine max
  Intron number 3 from transcript Glyma20g25020.5 (locus Gly ma20g25020) derived from phytozome v7.0 (chr-ID Gm20; pos 34719602 to 34720246 reverse strand)
gcagcacttgcactttcttctttgaaggtttgccattaataccttaaatatgttttttttttctctcactctaatattacatttttttcctatttgagctctcttttttaaaggcttgtaaacttgtgatctagttctcttcattttcttttcccctttgtgtgtgatccctttgttagttttccattttttgagtgcctttaaaaaggttttcaattgcggccaccatgtcagtttcactgcaataacttgatattgtaagaaattacagatcaatgcggccaatgtggccgcaattatggttacaaagactccaaaaacctagatgttgcagcccaaattgcagttgtggactatctttttaaaactttggtcgtttagacaaatacatttggtcccttaagaaatattacgagtcttgtaattgacgaggactaaagcaaactatatttaggatgaggactaaattacaaattattaaaaatgggaaacaaaatggaaaaatcgtttcaagaagtagctaagtttccatttgtagtatgttgtgctatcaatttataacaaacctagaaatatattaaatgtagttaagggaagatttgaaattttgttcaggtattgccaaaagaatagctgcttctgggt

SEQ ID NO: 19254 - DNA, 647 bp, Glycine max
  Intron number 1 from transcript Glyma16g02790.1 (locus Gly ma16g02790) derived from phytozome v7.0 (chr-ID Gm16; pos 2387521 to 2388167 reverse strand)
tcaatctcggtatgaaggtttaaaaatactgtttttcttttcttattttatgtgtaatgtgtttgtttaaactattatgactggggatgtgaaaaattctataagaattgaagaacattagggactattttataatttatgaatacttgaagcaatcttggtatgaaagtatatattggtatcaaagcatgactgttgtgcggtcctttcactactagcttttatgttttagttagttttggttgtgttgagaaatgaataagtcttggtacagataacaatttgccttgcaattatattggaaatgtattggatgggtatggggggaggcaaattagtccatttgctgacatatattggaagcatatatgggatgttgttttccttgtacttatttctaggaaaatcctggcagatagatgctttaaataatagttcttgattcagttgttgtgaatttgattttgcccttctctatagtccatacagtttggttgcacctttctcaagcaattaattaatatatttttacattgaaaaggctaaataaaacaaccagaacttatttttttaacttcattatgtgttcttcaacctctatcttatctatttatgatggactttgattgtttcggttccagggaggg

SEQ ID NO: 19255 - DNA, 1033 bp, Glycine max
  Intron number 6 from transcript Glyma14g33800.1 (locus Gly ma14g33800) derived from phytozome v7.0 (chr-ID Gm14; pos 42038113 to 42039145 reverse strand)
ggatcatccgcaacagttaacccaggtttgtaattcataatttcagttttaagcttcctcaaaatgttcttcttttcctagttatttgtgtactacttttttcttgtgtttttagatgcagttgcagtttgttttatatttatgttcatgtttaagctactgtattagactcaaatttatacctccattgtatcatgtaatgatacttttatcaggtatttatgcgattattcttagtatgcctctgcatcaaatacagatttgcttcaagtcaatgcaatttttaccatgacacagaacaacatccggcagtcaatgaacatttttgtctattttaattcaagttaagattacttgagtaaagttttcaaccactggtggaagaagtttacagctataactttttttttttttctgaaccacatgttgagggaagatctctaaagattttggtagaagggtgtgagctgatcttgccccatgtttgtgtatgcctcatccattgcctcaattatggcccttccctcttatgggattattcttagtcttgaatttcacatttttttttccaaataagttctcaatatccttttttcagaagtcaaattggtggcatgtgcacaaagctaaagctaaagtatgaatatatcgcccttaggatgtattccttgatttggtgtccatgtaacagattgttagcagcttcatttcttaaactgcttagtagacacttctagtatccgaaattagcatattgcaattaatattctgtttctatcaacatttcttctaagtgatccaagtatgagaaaatcaagcatttcatgtggagctgcaagttgcttccatgatatgaatattctaatgttaacacttaacagacctcttttaatagaattatcaaatgtcatttattttgtgattacagaactattagttttgtcagtgtatgaagcattgagcttatagcatgtggcattatttaatatggtccatctttgtgaagcaaggataactctgtttgaacttgaat

SEQ ID NO: 19256 - DNA, 803 bp, Glycine max
  Intron number 1 from transcript Glyma14g33800.1 (locus Gly ma14g33800) derived from phytozome v7.0 (chr-ID Gm14; pos 42040040 to 42040842 reverse strand)
ataacaactttacattaataagttgacacatcaaagtaaagtttcttaaaccctgtagagaaaatacaattgtgttattatactcagaaaataatacttcgtttattttagaattaaattttcatatgttttcttcagttagtgctttgcttttcatagtttgttggcatacaggaaaacaatggtagtgtgtatatataaaatttctgggggattcatttcatttgggtctgtcttggactaatagtaatattagctgtgtatgtattggccaggttcagttcccatttcaacttacctaacttgaaagttgtcgtttatattggattctgtgttacaattataggatagaactactgatacaattattcaataagtcctctcttttcgtttttgcaattgatttttcggatagggttgcgtgaggagtaatcaagcttctgagttaatggagtgatactaaatcagctccttccttttgattgaagttcgtttatcatgttaaatttttcttataagtggcatgcatcaaacatggtttattttcattagtatttaaatagttatatcctttggacaatccttgaaataacagaacataaaccatgtgaaaacttctcaatcttgctgtttctgaggttgaggtttcattcaatttccagcaaacccagattacagttttccaatcaattgccagttatattaaacgagaccaagtctaaaatttcccattttaccttgcctacattgcattgaatctccaatttgagatatgaatttcctttttgcatgatttatagtat

SEQ ID NO: 19257 - DNA, 812 bp, Glycine max
  Intron number 1 from transcript Glyma19g40830.2 (locus Gly ma19g40830) derived from phytozome v7.0 (chr-ID Gm19; pos 47141367 to 47142178)
ccattctattttttcagatcatcatagcctagccggtaaattctctctcctctctctctctctctctctgtaatgtttcgttttacgattttctctcgattttttcccaactatgaaactcattgaattttgtattctcacagttattcttaattttctttattgaccttgtttgtgtcgtgcaaattcagtattacactgttgaatcaaaactgtgtcggaagattcttaactttccacgtacataacgaattcaacagtaccctcgttctatttctacgatgtgaatgttggtcggtgcaacaaccactgggatgctttgctttcaaacacacattagttccaaatatatattaatattaggaatctatgcggagtgtgcttttcctgattttagtaaagcactttagttctcgttttgcactttcttaatcaatttcacttttaactaagaaattgtgtttattgatagtgagctgcctgttagtaattttcatttccttccatttcatatttcatatttgctagggagtttcaaagggaaagctctaattgagatctgagttgaatacttgctaatcttttcaagtgtgcatgacaatgagagcatttttctttatagtgtcctttctttctcatttcaatccattatttttgtttcattccctgttatactaatctgtgtctttgaagagcaatgactgtgccaatgaagttaactgcaccagaataataatgaacagagataactggctatcctatgtctaaaactctttcatatgctggattgcattgagtttttcaggttagat

SEQ ID NO: 19258 - DNA, 537 bp, Glycine max
  Intron number 1 from transcript Glyma16g21510.1 (locus Gly ma16g21510) derived from phytozome v7.0 (chr-ID Gm16; pos 24410954 to 24411490)
taactctggagaaaagccttcacaaagtgggaacggtgtgtcaccattttcaaacatttcttttcttttcccttttgatttgtatgtgcaattattagcgctgtttccctgcttgtgcgtttcacaatgaagttaactgccccttcgctcctcttgtttagtccaatttactttaatttggtcttaatgcaatttttttcttcttaatttttgtccctattgcttccttttttttaaaatttttttttgtcccttttgctgaggctttggtctttgaatttgatccctgaacttccaagtttctgggattttgttttgattgatgtgcattgtcctttctgcctttgcagtttcagttttttttttttgcttctgtggaaaactcttgtatttgttgagattgtgtcataatgtttgtaatcatacaagttgcggggttgttttgattgcgtgatcagtgttttgattttcttgtttgctgacctgatgaattttttaccagtggctaagggaaaaacacaagaaggctttgcttga

SEQ ID NO: 19259 - DNA, 222 bp, Glycine max
  Intron number 2 from transcript Glyma16g21510.1 (locus Gly ma16g21510) derived from phytozome v7.0 (chr-ID Gm16; pos 24411479 to 24411700)
ggctttgcttgaggctttggaaaaggtcaaagctggtaggggttcttcattaaagccattagttgttatgaactcatgcttatctggtggagccaaatcagtttgactcttcttcttggctaaaatttattttattgtaatctatgtcaataataataaataatagttatattaattgtttcttgcacgttttatgttgttgattttgtttttgcagagttg

SEQ ID NO: 19260 - DNA, 474 bp, Glycine max
  Intron number 1 from transcript Glyma17g35170.1 (locus Gly ma17g35170) derived from phytozome v7.0 (chr-ID Gm17; pos 39178421 to 39178894)
tccttcacttaaagttttttcttctttgcgtgaggtacgatttctctcagtttcatccaccttagaaaaattaaattaatacatgttaaactttttttcccttcattttttttttttgggaggggtgtgtggtttagaagattggtcttattttggtggaggctaacaaaattccaaaatattttattttatcatcacatgaattatgatgatgaataaggattgaatatttttttttatgataaatattaactgttagtttattagtaggttaaactctataatttttttttcactttttactatcaagtcaacctttatgtttatcaaaagtataaagattaaaaatacttttttttctttattttatcgatcatctcatgatgaattgtgatgtttgaagtatatattgtatattctttgttgattttaaattgattttggttttgagaattggcatgtttgaattgaagg

SEQ ID NO: 19261 - DNA, 450 bp, Glycine max
  Intron number 2 from transcript Glyma16g29780.1 (locus Gly ma16g29780) derived from phytozome v7.0 (chr-ID Gm16; pos 33467770 to 33468219 reverse strand)
ttctccaaaaggaagctaccattcttggatctcaggtattttagtccctcacccctcctcatttttttagattatcagactactttcatggtttcacgttgtagcacgtggtcaattatgttatgtttatgtgagatgtgacacaatcttagaaaattggattcatgtataaggaaatatataataagatatcttttaggcatgacacatgtgcactctattatagtgtaaaaatatattaatcaaagatacgtaggagttatttcttgttacagtacattattagaatttggtcacctaacatcaagtcactagcctttcttttcgcctttttgcctaactgtgatttcttggcagttagttcagctgcatttgacatcataatctatagtttttcattttaatttattttatgttgatgttttttgaccatggacccacataaacagg

SEQ ID NO: 19262 - DNA, 423 bp, Glycine max
  Intron number 1 from transcript Glyma16g29780.1 (locus Gly ma16g29780) derived from phytozome v7.0 (chr-ID Gm16; pos 33468483 to 33468905 reverse strand)
aagccgtgtccaaaactcagtaactcctgtgtaatgtattttttcttttctttgtgtgtgttcattgagctttttaaacatgcaaacaatgttctgttctatttttcttagtatgtttcaatgtttttatcattttggtttttgtgcttgttcatagacccctcttttgctttattcatttgtataaattgattacctaccaaggttttaaaatagctagcggttaacgttctctagtaaatcgcataaaatgttggtaatgtgatcgatgcagctgcagttgcagtattggaaacctacaaaaatgcaataatttgagttttaggacagggaaacttgtcctttgttgtgttttggtgttcgatataaactatgatttcttctacaggttgtgggggttatctacacagttttgttattggg

SEQ ID NO: 19263 - DNA, 578 bp, Glycine max
  Intron number 2 from transcript Glyma18g36690.1 (locus Gly ma18g36690) derived from phytozome v7.0 (chr-ID Gm18; pos 43063017 to 43063594 reverse strand)
ctgaggtaaatgaatttgtcatagaatttcctttctatttgtgtgctgtttgcctgtttctcttttaactgctcagtggtatcgccttaaagtttagaggtgttaaatagatggagtattttggttatgctgttcatatcccattgaatgttgatttatctgccatagctgcagtttctattttaccttaattgaggaatattaatcatgcaaagttgcaactggaactttgtctggagtggcattttgtagctccttcctcaataacttacatgattttgctttctttgaattattcttcctcttttaaagagagatccagatatttgattattattaatgttcattgcagggattcagtaaatgcactattgttcgtccaaattgtcattctttgatatttgaaaccttttttttttttgcaacaacttctggcaaaaattaaaacatcttgtttaagtagttttctagacatgttttgtacaaaagaaaaatcttcagacatgcagtacattaaaggctggtgatgttttcatgctgcaggtttctgaaagccagaaagttcgacattgataaaa

SEQ ID NO: 19264 - DNA, 593 bp, Glycine max
  Intron number 2 from transcript Glyma17g28970.1 (locus Gly ma17g28970) derived from phytozome v7.0 (chr-ID Gm17; pos 30982997 to 30983589)
gaacaacagattccttcaggtaatgacatttcattgtatacactgcatggttaatttttttatccgtaggaattgaacacgatgccaggaaatttacaatacttacaccttgatttgcatagttcatttattccttcgcttgaaaaaaaaaaaaaaaaaacaagagaatctagggtctgaacttttcactcccaaaatgccatcaggaactaccaatttctcaattagtccttcttccatttaaacataattagttttttggtcaccatttgattggtgcgaagtatccattggcaattttttgtgagatttttcatctaaacataataagtttagtaatagtgttctcagaatatataggttaagagtgtaattctttatagaaaatgattactaatatatttttttcaaaattttcaacaaatctttatttactaattcattaactaatatacttagaacacttgataacagaattacttttttctttctacgtttttgaaccatttaataatactgacatgatgttaaccacacaacaaaatactgaaatactaattattggaagcaggtcaccattcactaggagaggt

SEQ ID NO: 19265 - DNA, 405 bp, Glycine max
  Intron number 2 from transcript Glyma14g08230.2 (locus Gly ma14g08230) derived from phytozome v7.0 (chr-ID Gm14; pos 6256154 to 6256558 reverse strand)
attctcttcctctgcaccacctcaaatcacattccgtaagttttttttttttttaataggcaaatattagtcattaagatgttaatttttttagcaggaaatcaaactcgccacttttcttcttttttcttctctgttaaccatccaaaacaccccttatctccttaatccgagttgtttgttctttctaaaacttcttactcccaacaccaaatcagattttcaccgataactctccttccaatgaaaatctcaaccatacattggatctaatacaatggctcaattcatctctacaaatattgattaatcttatggattgggatgaattgacttgccagacacagacttgcttacttgctaaagataatactcatgttttctgatcagattgtgcagaatatc

SEQ ID NO: 19266 - DNA, 834 bp, Glycine max
  Intron number 1 from transcript Glyma16g09930.1 (locus Gly ma16g09930) derived from phytozome v7.0 (chr-ID Gm16; pos 9834830 to 9835663)
acacacgacgacggcagtgttctggtgcgtttcattttttttgttttgtccatggcagactggcctctcaaacaaagaaggaagaaagtcttgtaggcatttgagaattgtctgctttcttttttcttgagggcgttttcttttttctgtttgacgcccgtttttgatgagggtagtttttttttcctttttctatttgacacccttttttatttttgacacccgttttttgtttttttttgtaatccattgtttttttaattttttatttatatttatacgtatatttttattatttttttgtccgccattttccgctacgccatccgtcatatttttatgacggatttttgacttttcgccatgaaccaccatccgccattaacaacattgtttgatatagaaattacatatgatatttataaacttcacctcacccaattaatcaaataaaagagaataaataataaataatactattatacaaatcaaatcacttcacttcacatcacatcacaaaatctgctttattctaagaaagaaaaatcaaactaattataagaataaatcttcagcttaattacaagaataaaataaaacaaatttttaggattacatttcaaggatccccctcaagctggtgaatggatgtctatcattcacaattttaaagttcggtcataaaagtgctctgtctaaagtcccttgatgaatataggctaagctctaattggaaaatgaccatgtgaaccttctggcagtggtttcagtttatcaggggtgcaaagaaaaaaaatgtaggctattgctaagtggctataatgaaggtagcct

SEQ ID NO: 19267 - DNA, 956 bp, Glycine max
  Intron number 1 from transcript Glyma17g35320.1 (locus Gly ma17g35320) derived from phytozome v7.0 (chr-ID Gm17; pos 39284158 to 39285113)
gcgcgtgccaaagctgctgaagccgcacagaaaaggttttacctttatccatttttcttctcttttttttttttaattcaatttcatgaatattctcaattcctgcaaaaattaaaatatacggatttgggttttttatttgtatggccacatggtatagttagatccttaatcgttgtacttttgtggattaaatgtgtatctgcttttgatttcccttttgctttatatctatgcagtcacactttttggtgttttatttattttatcccttcagaacattagtaaaccccaatttgaaataaatttaagaaaaagcgaattttggtaactattgtctaaacttcaattcagagctcgttaacatggtgtggcatggttcacacataaccttgttgtcccttaagcatgtgctcaagggtttgattcctggtccctgcgtacaaaaaacatttgttgggagaggtcagccccttaaatggatctccgtacctcgaaggattagtctttggctttcgaccgaggagttcacccaaaaagtgctcgttgttgcttctcatccttgattctcttacattgatatgccagtgttgctaagtaatccattccatataccagagacattttacaaatatcacaaatcacaatcattagggaaaattcaatttcaatgtccatgaggattatttcttcatgtcactgttaggtactactactaaatgttctgaaatgtttgtggaagtagcgataatcgaaaatgcatgcagggccctctacaaatacaattaacaaatagataacggaatgaagcatgaaacaaccagagacatttgaatgttgttataatggttttttattggttagtgaatgcataagtaaagtaactgtagactaacttgcaggtgttgattggaattgtaggcaagagcaatttgagaattctgcagcaggacgag

SEQ ID NO: 19268 - DNA, 487 bp, Glycine max
  Intron number 2 from transcript Glyma18g14990.1 (locus Gly ma18g14990) derived from phytozome v7.0 (chr-ID Gm18; pos 14986865 to 14987351)
ggaataagggagaacgaatttgagaggaagataaagtgtagaaatgtatcatgagtgtaaaaagtaacctaatatatctttatttatagccagaatactttaagcctattatttactctatttttctttattttattattttataaaaaagaactctattttattctttcattaaataaataaccaaataaaacatcaatttattttcacaaagcttgctctacaggaagcatctaatttgtctggttcacatttcaaattcaaacatgggtacctatctgtctttgattcttacatatatatgttgattttgttggttttttctttgttttcttttggagatatatttcaacataaattgtgaagaaaaagaaaagaaaaaatataccttcacaaagatatatagacatttgaatttgtgaatgaaactaggcatgggtttgatgcattttatttaactctatatgtatgttgtatttgggtaggt

SEQ ID NO: 19269 - DNA, 648 bp, Glycine max
  Intron number 2 from transcript Glyma19g01090.1 (locus Gly ma19g01090) derived from phytozome v7.0 (chr-ID Gm19; pos 769629 to 770276)
caccaacactctcttcaatcagttttctaacaacagttagtttctcttcccctctgcatgttcttttatgtgtttttgttaattagtgtgctagacaaatgtgtattgatattgtttccaacaagaacagtcaaacatcttgaagcataatcagaatttaataaaataatgtcaactaaagtcttagcatggatcacacgatgctattgagttcgattaaagacgtgatattatttactataagatgaaccctcttaataatttcctccaatgttcttcttgacttccctctccctctttcacaaggctaaaaactatgtaatttacttttttgattgaccttcttcatacatatccaaaccaccttaacagatcctttgtcatcttttcttcaatcgacatcacacatatatatctctttgtattcaataatttcctaaattttgtattctgtattctttttttttttgtgtcgtcacacacccgtcttaaccttctcattaagtgctaaaattgatggcatatttgaaagagaaccacttttatgaaagcagtagatggtgattcctaatgagtgatgacataagaatttgaaccagcgtgatgtttccagggacagaacaaccgttcaagaatagtcttccaagg

SEQ ID NO: 19270 - DNA, 955 bp, Glycine max
  Intron number 1 from transcript Glyma17g10010.1 (locus Gly ma17g10010) derived from phytozome v7.0 (chr-ID Gm17; pos 7467868 to 7468822 reverse strand)
cgttcttgaaattcttttcctttcactcattgcaggttagatgaagagaggaatcccaattagtttaaaactggaagtgattgcataaaaaaaaaaacagaaagtgacaaactagtgcttccaaatatacgattatcacaaacccactcaatctggggtccttttcagatgtgattcattcccatctcatttttttttttatttccagccaacaattccttttcttgttttttattctctctctctctttttttatctcaatcacaccaacgtgctgtcgtgctatatggctgctcctctagcaatcatcttcataatagctttagccatttagccaaatatcgacaactttcaacagccagtctaaaatccgttcttcttcgttcataatctttagaaattttcaatcagttgttgttgtttaaggtttagatctttggtgaatttaatcattggatatgtgataatatcgcttatgaggaatggagcaaaggaaaagataaggtttcttatacagcaaagcaaaggcagttgtgtattcttaggataaggatacggataaggataaggattcttaaactaagcaggtgaatcctagtgtctattttattaattcataaaccttgagtctaaaattttacttgaaaggaatcaaattccttcatatagtacttgagccaaccagatgttttgattaatgagtttaaaataaaaaaataaacaattaattacttcaatttgtgaaaaatttaaataaaagatctaatttaaatagtatatttagaaaaataacttaattgtagcagtaaaaaaagttaaagattaaatttaaaataaaaatgactaagagattaaaatcttacatgaaccacagtaaatagaataaaactacaatgaagttaattttatactctaccttaatggcatgtcccactttttcatttcctagctatat

SEQ ID NO: 19271 - DNA, 491 bp, Glycine max
  Intron number 1 from transcript Glyma18g19420.1 (locus Gly ma18g19420) derived from phytozome v7.0 (chr-ID Gm18; pos 21180522 to 21181012 reverse strand)
ctctctctacgctttctcgtttgagatccctcaaggtaatttcaaattccgccatcaccttctctcctctttctgttccatatatctacaacaacccattcgatttcccctaatttcatttccatcttcgatgctttgctttcgtcgcttttaattgcatgtgaaatgaatattgagcttttttcgctgttcaatttgggaactgcttcgtttgtttccttaggtgttttttttgtttcgcgatctgtttcgatttttgtgtgatgattctgtagatcgaaatgcgtgttgtttgtcttttggattgagatctggctgaatccacttgttgatttgattgttaattcacacatttaattaatattgatttgggatttattattttttgctgaatcgaatgatttggttgagatttttcttaggaagcaagttcaattctgttaatgttgagtgcaatttgtgaatgtagggatccactaactgaaggagca

SEQ ID NO: 19272 - DNA, 531 bp, Glycine max
  Intron number 3 from transcript Glyma19g05130.1 (locus Gly ma19g05130) derived from phytozome v7.0 (chr-ID Gm19; pos 5403909 to 5404439)
acatttttaagatctttatatcaccatagattatagtaagtacttgtacatacatgaacaattttagcaagagaaacgggtgtatatccattaggaatgttcaacaaaaaacttaatgcataattaaaataaaaggcagtaagaacttataataataattttaatgttacccacaacatatttattagaataaaagaatcctataatatacaattcaaatcctacaacttggttacctatggattcgtatcataagaagaatctttaatgactttaaatcttacaattgtgaataatacaaatcacatgattcaatggttcattatctttttttttttttttttacttttctttcgccaactcatgaaacaaattaaaaagtcaaataagtctaaacttatcctatttgattattccaccatgttatgtgtcactcattcaatgcataaaatctatttggctatttctttacttagtttctgttattataaaatagaggtttcacaaacttagataaaactaattaagtta

SEQ ID NO: 19273 - DNA, 932 bp, Glycine max
  Intron number 1 from transcript Glyma17g33630.1 (locus Gly ma17g33630) derived from phytozome v7.0 (chr-ID Gm17; pos 37541239 to 37542170 reverse strand)
cttacccatcagcttccccagcgcttcgcaaatccgtatgctatttccctttcttttctctatttatattccaattccaatttctcattataatttggaactaaaccctagttccttttcctctgtttcgtttagtttggttccaaagaattgatttttgatttgcttggattgataaatatggttgtgcatgtaataataatttataaaatagattgtttggtgaacttagctcatatggttattgtggcaatcattgattcaactgaaaattctgtaggtcatgtttacgaacttatgaacactttgaagtcttctagctgcattttattttttattttggaatgccaatacaaattggaatatcacaatatttagataaattgttgtatttgattgtagctacgtcaaggttttgaaaaacagtctgcgactgcaaggtttttagggtgtctgcaattgcgttgcggccttctcaattgcatttgtctgatattgtctgcaatatgatagattgtgactcacaatctatcattttgcagaaaatttgtgacaaaattgcaagcaagactgtaacccacaatttaaaaccttgttagaagttgactcgtactcatttttaaaacatggtttctctcttatgatttagaatttttatattgttaattttaaatcaatttatatggtgtattatagttgtgtagtgtcttcgtgattttaaaaatttctagtatgtgtggtattgcatttgtgtcatgtattgtatctgtgctttcttggtaggcttgtggcaggtgtgacctttgaataggtcaacctttcctttttctcaactttgatgtaaaagaaaatgttagttattgtttgctgaaaagctaaaagctaggaaattgactgtgttgttgctggtggtggcagttttatttggttat

SEQ ID NO: 19274 - DNA, 578 bp, Glycine max
  Intron number 3 from transcript Glyma18g53410.1 (locus Gly ma18g53410) derived from phytozome v7.0 (chr-ID Gm18; pos 61696106 to 61696683)
gacattgttctcaagagggacattgttcttaagagggtaagtgatgactctgttacaaattgtttagcttatgttttaaccaaggcgaataaataattatcaaatagaatataagtttatctttcttaaaaattgttttggcttcttagcaatgcatggaatatggatttttaatttgatatttgatatgttgattttatgtaggaatgcgtgtggtatttacgaatgttacaaattcagattgccacttttttattggaatgtttttgggcttaaaatcatgtagtacttttcaatttttagcaaggtttgacatgatggtcctcaactgcagttgcggctgcaacacgccaaggtttttggggtttctatgaccacaattatagctgtattccccgtgtttgtctgcaatattaagtatcgtgacataaccgcaactgaaatttaaaaccttgttttttagttattattgatggatctgctgacaattggtatggtcgtagtttttgctgcaatgaatgttgtccgactttgatatttgattgatcaatttttattttgctttcaataggagagtt

SEQ ID NO: 19275 - DNA, 904 bp, Glycine max
  Intron number 1 from transcript Glyma17g09350.1 (locus Gly ma17g09350) derived from phytozome v7.0 (chr-ID Gm17; pos 6898897 to 6899800)
cactcacctcctcagcactcgctctgctcattcaggtatttttctatcctttctctactgctccactcatttctggaacaagggtaggctgaatctttattcaaaattcaatcttttgctttcttactttgaatagatatgtataatacgttaccccatatctgtttgcttctttcaatttttttgctttcaatcatgctcttaatgaagaatgggcttctagagattctgtgtggtttcttccctatgccttctttgaaatttgttttgctcctgtgtttttctgaaatcccacagtgacttggttttatcttgttttgcaaattatatggattttttgtggtggaagtgcatagcataacaccaaaattaactattacactgctttccggagttgatttgctcagtagcataattgatgatgtcacttgccatggaaattgagaatgaaaattcgaaccttgttgatgatgtgttatctaacattgttttctggaattggaaaatgccctgaaaaagagtacttcaattgaaatgtttgttatatcaacatctgtagaaaatttcttttcatataatctgctttttgagtgaactgttttcgtttggagtttttacaacttgtacctaccaggaaaaacgtattgaaatggagcataaatcttgtttgcccctttaatagccctttctagttgtcacatttctttaatgtggtcaatgaaggctctagtaaatgttttagagatacaaacacttgtgatattttaagcttattatatgtatttccttttaattatatctttactaaaaatctataatgagcataggcttacacggatccttaatatcgcttttccaatccaaagcaggtcgcctgcccttgctatttggacaagacaaatca

SEQ ID NO: 19276 - DNA, 796 bp, Glycine max
  Intron number 1 from transcript Glyma15g06670.1 (locus Gly ma15g06670) derived from phytozome v7.0 (chr-ID Gm15; pos 4706168 to 4706963 reverse strand)
atagagttttctttgttgacaaatctggcaagaaggtaccctttttgttttacttttattgggccagttttgtttttctaatttgttattaaaggggcattgaaattttggttttttttggggggttttgctttcaactagaaaaatgcgattttgggtcttctaagtttcttcctttttgtatcattgctgtggaaagagaatggtgtgtgtggcctctgtatttgattaatggaaatgtggaattgaaatgtaatgattttcagttcctctgtgtttgcttgttatttgtttgatggaagtgttaaatagagtaatgtactatggtgtaatcgttgtgttttctttgatgcatcaatagcttgctaagttggtatagatagagttcaggctgatgttaactaattttgaatatttgttatacttcaaaaggtgattgtgaaatattctgtttcgtttcctctttgtgtgtgctttcccttttttgttatacatttcttctgcttttatgaaaggaatgtagggcaggtgctgagtgagctgttactttctgcatgttacaatgttttctggggagtcaggaattagatttgcttaatatgttggaagctaattactgtgcagttatgtagtaagactcagtttacattgagatattggccttttcaacaaggaaaaataaaagtaatgttcaatgaatgagtttcctgctatgtgggcttcctgttacgaataagatcctgtatatttgtaactaatgaaagtaatttgcacaatatgtaggtttctccctggc

SEQ ID NO: 19277 - DNA, 769 bp, Glycine max
  Intron number 1 from transcript Glyma19g02440.1 (locus Gly ma19g02440) derived from phytozome v7.0 (chr-ID Gm19; pos 2182676 to 2183444)
cagaagaggacttgtgtattgaaaagggtagtaaggtatatgcgaattctttgtagctcaaattctttcttcttttgaaactttattttgcttctcatcattgattttgaccttggtttctcatgaacatctttttacttctgtaccaacttaaaccacaggagtaattaactgacttttccacttcaaattaatcgttctttcagtttgctacttctcaagttgccttagcatctttcttccctttattaccatgtttataagtattggtataattaggtccatttaaacctttatttatataatttgctgataaatatacaaagaatgctgtcgagttaatgcaaacaataggaaaagtagcagattagtgatttatttttttatgtgtaaatgttagttgttagtttgttaattttgttaggaaagagaattaaacctgtaacctttttccccctttccttcttccttatccattcaacccaccttatatctctagcatattagtgaatttgattagaaatcacataataatattttgaatatgttaaatactttactactgttgtgttaatacttatgggaactactctgtagtttggctttggcataaaattattacaatctgacacacaaataagaattaagaagaaagtttttcttctaatttcaagcctattgttgtctttgaaaatttgtaggtgaccaataattttatgctatttttttttaaatataggaagataaacttgaatctgctaaagctgag

SEQ ID NO: 19278 - DNA, 873 bp, Glycine max
  Intron number 1 from transcript Glyma16g03100.1 (locus Gly ma16g03100) derived from phytozome v7.0 (chr-ID Gm16; pos 2697714 to 2698586 reverse strand)
gtcctgtttggcctgctcacaatttcatccttagagtacgtgttgcatttttcatccgtattttatgatacagaaattaatgcaccttttttttaattattttattattattaactgaaatttattaaaaattatgttgttgtgtaagttttatttcttactcaacaagttttgcatatgattttatttttttaataaattttaaccaaaaataaataatgtattagcaagagtgtcttagaaaatatgctaacatttttttttagtgatgatagctttgagtgcacttttcaaaaactgtatatttcatcaaaaggactacataattcttaagtacttagtgatgagatttagagaggataaataggcgtaagcaactttttctccaaaaagtagagttcgtgacttttaagttacaaagtaacattagttttagctaaggctcatctacaaaaatgatgtattttgctgtcttgataacaaaaaaaaaaaaatacttgcatttaattaacacctctaacaaactttatgaataaacttttcagaaatatcgatttaccattcacaattttattacgtgaagatcaatattttacaaccatctagcacatgaattatttggtgtgagattgttttttcttaattaatatagttttaagttttagatatataattatattaaaatatttacacagagagaactttaccatccatgattattctactaaactcaaacaattacctctcccgttaaatgtggtttaatttagaccaaagaaagaaaaacaacgacaacactttacattttgactatttgatatataagttgaattagtgcgctgactatctattttttttcttctgatcttcagt

SEQ ID NO: 19279 - DNA, 946 bp, Glycine max
  Intron number 2 from transcript Glyma18g40680.1 (locus Gly ma18g40680) derived from phytozome v7.0 (chr-ID Gm18; pos 49380340 to 49381285)
ttggatttaagtgggaccggatcagttcgtgacaacctcaaactcagaaacagagtatggctcaaagctaatctaatgttttatttatttactaagatatactttaaaatttgatattacttatataaaatgaataagtagtaacatactgtatttttttttttttgaaaagaatgtgcagtattttattttaaaaccaaaaagtatttatttattttgaaataaatagttaagttgcaacatgtatgggctcgagtccagtgagaattaacccatatacatgtgggcttatatatattggcaatttagtgcatgtttgattaaatgtttgtaccttccaaaattttattctggtcaacggatccaaaaattatcttctgcgttcatctgtttgatatttatgagaatgcgtgtcatcataacttcaactagaactcaaacatgtctttagtttgcatattgaatgagtttgatgtgtgggtttgtgatttttaactcatgacatgcatatattttttaaaataaacatttaatgttattaaaagtataattctgattagttgagacctttagtttgtaaccatttggggtttgagactatttgatgactattttttatggaaaacttgatcagggatctttagtgagtttttctctctcaaattttaatcaatttttttttataaaatttgaacttaagatcttgttcatgatatttgagtccgtaccactcatttgatatttttgccggttgttacagagtattatttatctttttatcatttttcagttgctttatatatttttttagatttatgtttaggctgccaactaatgtgaggctcacgagaccaattattatagatgcttgtttattctgtatcctttgttcttgttttagttttattttttgttttttaacctgcagatacaaagtgcaaaggac

SEQ ID NO: 19280 - DNA, 481 bp, Glycine max
  Intron number 2 from transcript Glyma17g03660.1 (locus Gly ma17g03660) derived from phytozome v7.0 (chr-ID Gm17; pos 2436571 to 2437051 reverse strand)
catttgtgctcccaggtaatttggaattaaagcattttttcttcttcctgaatacggtttagtacggggaatgaatgtgaaatttaacgtgccttgtttgaataaactcatccataaacacttgtagaagaaaatatttaaaatgcatttggtttctccataagctaaattcaacttctgcattcttgattctctatttagctacacttttatttggttggttataattataaaatgcttgggcgagatgtgaggtggagatcaagacattatttacaaataggcatcagttttgacgtgttacaccatattaagtgcagtagaaagtaatttgggttaggtatttaggagaaatctggaaaaaaagacttgctcctagatcctttaattcatgtaactaatcctacttagttggataaggctgtttttattttggctttgtaatgattgacgcttatcatctgcaggcacaaacatccac

SEQ ID NO: 19281 - DNA, 857 bp, Glycine max
  Intron number 1 from transcript Glyma14g37720.1 (locus Gly ma14g37720) derived from phytozome v7.0 (chr-ID Gm14; pos 47032573 to 47033429)
cctactatgttagtattcaccatccattattattcttcattatcataagctttcttcctctatcatatttactttaattacctatgttaatgcttattcaaatgcagttcttcaattcttttaaggccctataactattagtcttgattttagtatttgatatttgggaaggttttaaatatcagctgtgttacaatttcatccaatttgttgatataccgacaaattgtaaaaaaatacgacctatgtgatcatcgtacaattaaaaaaaatcttaatattgaggtttaaatcacagtcgtggactgttttttaaaacctagtttggggtgatttttttttagaatctttgctatatatagtgcttggaattcttttgggtacgtactcatagttttacttgattaatttagtaattaagagatagttttagctaaagtatttaagagggtatatttaattagatttggataactctctaacgttagttttgttagttactagaataatagatttaatttttactttctcattgctaatatgaatgatatatgattgtgtgttagatgggagaagtgccagtgttggaagaagagagagcaaggagggaagcaagtgttcttaggtacaaagagaagcgccagaacaggttgttctcaaagaagataagataccaagttcggaaattaaacgctgataaaagaccaagaatcaaggtcactcttttttttttaaaaaaaattcctgtttcttttcgtgccattgggtatggtcattttgttttgtaatgaaatcagctttttccgatatttttgtttgtagggtcgctttgtgaagagacactgaagttgctcgag

SEQ ID NO: 19282 - DNA, 841 bp, Glycine max
  Intron number 3 from transcript Glyma18g46840.1 (locus Gly ma18g46840) derived from phytozome v7.0 (chr-ID Gm18; pos 56536568 to 56537408)
attacagtaaataatttatggctggttttattgtgttgttattaattattctattctttaaatttttagaatgtttggataaacaatgtaatcaagtacttaatcgtaatctcttataaaatgatagttttttcataagtttggttgtaaagtttactgaagtaggttaaaaagaacttgtaaaaagttcacgagccagttttataagttcaaacattttaactatatatggtttttggtatggaggactagtataaaaaaggaaacaagaaacaaagttgaatttacttgtgggaaactgttaaaattcatgctaatttatggtttaatttctcttatgaggaatttagctgagatagatgttcaatgaagtattaaccatttgttaactcctacttgtaaaaaagactaatgatgctaattctaaacgtgaaaatgaaaattccaaccaagagaccataaatggaaataacttatggactggttgtagatgtgaagtgggaatgtgggatttcgttccttttcattataaagaaaaagattgcggggtatttcgttccttggtggttgcattttcaaccagttcctctttgctattattctggcttatatccattttcagtttctgtaggcggtgaatcattttcattgattaacatttgcgtgactatactaccatcttatgatttttagttttgtgtcaattacttgtctttaggatactgaagacatagttaaaatgtacaattaaatattaggtttatagtttgattacacatgagaggttagaaatgaactcattttttttcatgtcaggtacggccagtggtggaaactggat

SEQ ID NO: 19283 - DNA, 949 bp, Glycine max
  Intron number 2 from transcript Glyma14g35540.1 (locus Gly ma14g35540) derived from phytozome v7.0 (chr-ID Gm14; pos 44487105 to 44488053 reverse strand)
aggaattgatcaaatacaagcagcagaacgaattggtatcgttatgttttcatctttcttgttttattggcttatttcaactttctggtttgattgaaataattactggagtgttgtttaattatctaagacaatttctgatatatatgatttatgaaacaactgaccttaggcttatccaacttggtagtgtggaggggtttgattaagcattgatgtgttcagtgctgaaaagcctgtccctctgtgtgtatttgagttgattagttggaatttcattttctgatgtaaatatatcatttttaagttgaaaaccatccctggtttcttccttagattttgttagagagcatgattgaatgatttctgatgtgaagggcattgaaacttggaattggatgtgtcatatatgataggatggactctggaacttatttcattctcattgttatgcaattgtcaatttctttaaattcttatatttagatatgcttacccaggtttgaaatttgaatttgctagtgttctattgtctcttggttattaaactataggaaagaggcctggaattgcatctactatctactgctctattatctaacttatatttcaattggtatcatgaaaattgaaataatttggcttggctgttgcgtgtagtcacagtataccctattgaaataattcggcacattcactttgtatggctacaatttactgtgaatacactggtgctgctaattgctaagttgaaaaccatattattgaactttaatttctactaatacagaaatttccttgtttatagttcttttttcccctcattttcttaattgtcaaatggtaatagctttcagtctttcacaagttgcagtcctttggccatgaaagctaactactgatatttactttgcgttgaaggttgattcttcttctggaagtacacttg

SEQ ID NO: 19284 - DNA, 731 bp, Glycine max
  Intron number 2 from transcript Glyma14g34660.1 (locus Gly ma14g34660) derived from phytozome v7.0 (chr-ID Gm14; pos 43319910 to 43320640 reverse strand)
cgtcgtaaagagggaaaaacttctaacaaagagatgttagacaaaattgtaagcgtatggagtgattcaatgagccaaaggacaacaacttcaagagctagagaagagcgatataagggaaagacttcttaagctactagtccaataagtgatccttattcagtaaaggcatgtatgtaactgttggacaacatgcaaaatgttcccacttcagcatactttaagttgatggagaagtttacaagtgagcattggaggcaaatgtttatagtgatggatgcagaacgaaggaagcaattgatagaatctcttgttgagcattggaggcaaatgtttactcaaagtgtttatgtcatgtgtctaaacttgtttagatttattgtggtgtgtctgcacttgttatgggacaatgttaggttatattattcaaagtgtttatgtcatgtgtccaaactttatgtttttataattaggacgtcattgtgtacattatgcttggtataatggtaggttatattatgggacaatgtttttaattaatgttttacattatttatatgtgtaggtaagatatgccattgaattcatctgacgatagctcaagtagcataggttttgaattggatgattatgatgatttaatggatttagtgttagttatgaccatcttggaatatgaacatcattttattgataaaactccatgtaggacatctatgttgactagaaaa

SEQ ID NO: 19285 - DNA, 1018 bp, Glycine max
  Intron number 2 from transcript Glyma16g08500.1 (locus Gly ma16g08500) derived from phytozome v7.0 (chr-ID Gm16; pos 7914876 to 7915893)
agggaaaagctcaagccagtttaaacgataataaggtatttatttattgtagcttagtgctttttctagcatttgttcttccccccctttttttttgctgtgaattctgctgcttttaccataggtgataaattagaatagaatcattactagtgcaatctatttctggctttgtttgaatacattgtggatctaggtgaaactgaaagaaaataagtcatttaatgtcttgtttcagttgtctaagcaattggtgaagtgggtttcttaggatttggtgtcatacgagtgttttgctcaatgctcataccccacaagaatgaaaacttgtgttaatggtgaagaatgcttgcaaaatattcgttaaaagttaaaattctcttttcaacttatagaaggtggccaggcatgttgtgggtcctacacgggatttcacccaataataagagtgttgaaaagagtttgtcaatgagaatgtcgcttgaattcctcctaaatgatgtggctttatcttttttgtgaaagacttatttcttaagtgaggtgagcacaatcttaaagcaggcctttgatcatagtgtgattctgagagtaaagatcagagttttaccatttttgctttgaggaattaacttttgggaggctatccttcagaaccttgcttattgagtggaatcatcatctatcctgcttgcacgttggctaatattttagcatttaaaaagtcgactatcatttttatcatactataggagctaggttagtaagatggaaataaacttaccttgagctacatgccaaacgttggtcatggtgaactaatttgattggactggaagtaaatgtatctataattggagctaataatagctagtgaacaaaattgggagggttgattcaaacagaaaattttgtgttctttagtcgtgtgataaattgtatctaattgttatcatttattatctactgtattttgcttgtaggcatcaaagtcctacagtaaaacagaaatttcatt

SEQ ID NO: 19286 - DNA, 735 bp, Glycine max
  Intron number 1 from transcript Glyma19g41370.1 (locus Gly ma19g41370) derived from phytozome v7.0 (chr-ID Gm19; pos 47646177 to 47646911 reverse strand)
tggaggcactgccaccatagtgaacaccaatccgagtaagatcttattagttaaatatccctattcttttagagtttgacttatatatactgttagtctaaagattatactatttttttggcgtcctcattttaagttttggttctaatagagaggactgtaagttttagtccctgtacaaggataaaagttaacttttgtagtttagggtttagggtcatcattactaatatcagaaaatactttttggtggtgtaaaattgctacaaattttttgtggtaataaagtgccaaaaaaaaaaaactgtcagggactcaaattttgtagttttctcgtatagagaataaatcttaaaacggagacaattataaggacgaaaggaatagtttaacctaatctaaaacaactttaggcagatattcaattagaatttaatttgttacagtcaaatcttattggatgattgtgtaaagatattttctactaaaattatcagtctgtgtatatggaagagtatttttttggaagaaaacaatccttttaaatgaattttagtagcttgagggattaacctctacttctggctttttagtcaagatatctgtcgggaccgggttaaaaagaatttatatataaatatatattatgcttcacaaaattgaagaccatttctaaagaactcttttaaattgtgactaggctcgggttcttgcatctacccatcatcttcaggg

SEQ ID NO: 19287 - DNA, 754 bp, Glycine max
  Intron number 1 from transcript Glyma14g33490.1 (locus Gly ma14g33490) derived from phytozome v7.0 (chr-ID Gm14; pos 41461972 to 41462725 reverse strand)
aagaaggtatctttctttgtactcacgcggctttcaatttttttacgttgaatatgagcagttgattttagacatacatatatatatatatatatatatatatatatatatatatatatatatatatatatatatatatatatatatatatgaatattatacattaaaaatgttttaataacctcgatctaatttttttgtgtgtgtgaaggttaaccttcattttttcgaagtattgacctctgttacaaagaaagataaattagaaaccttttacaaaagttcagataaataagctgacactaatttaagcaagaaatttaactcattttatcatttgatttatttattttctttaagtacttcttaaaagaattgtttaaatagaacctaaattaatttgataaaaatatgactactaattaatttagtttttagaattattaaaacattttggcattatcaagcatttgttattttatttgaaagaataaaatgatagattattatgtgactaattaaaataactacggtttgttgatttaaagaatcaaaataatatttatttataattttaaacactgtgctcataatttaggagatgatttagtgaattattccaactttgcatgtgtagtctgtcatatgacatgtttcttcctacgaaattttcatggacacaaactataattacattctattttggtgtgtccctgcaggttggtggtacaagcaggagtataagatcaacgag

SEQ ID NO: 19288 - DNA, 828 bp, Glycine max
  Intron number 4 from transcript Glyma20g01750.1 (locus Gly ma20g01750) derived from phytozome v7.0 (chr-ID Gm20; pos 1274043 to 1274870 reverse strand)
tgtaggaatcaaaaattgatatcaaagaatttataacaattttctatttaacaaatgaactagattcttggttgattattacatttcaattggggttaatatatatttattatgatgtcaacattttttatgagtgaactgtcactctaattcttgaaaaaattggaagatgttgtcacgttagttttgtaatcaaagaaaataaaaaataaaaattgtaaaagtgcaaatcaacaatcatgttaattcaaaattcaaaaaaatgtttgacttaaataataatattaacatatgtttaaggatcaaaatcatatttcctaattaaatttacgaacttgtttgatattttagagatttatttacattttttaatttcaagaagactaatgcaacaacacgtttcaattttagagattaaagaaattctttttattattattattattattatattttaattagatataaagtaaacattactattatctttattcatgggtttatgaatttgacaccccacatattatcatacaaaagaaaaataagttaattacaaaatatcaccttatatataaatatctttaatcaattcagatatttcatgtcaattaaagatacgatcaaattagtatatataaatataaataaaggataacttttatcttttagattaattttatagaattgagtgggattcaaattcagattttaagcaatggagagttacatttagttttctttttatcatttgttacatttaattaatttgaagttgtgtgcataatagttgtaggtgtctctatattttatcgtgcaagtactaggatc

SEQ ID NO: 19289 - DNA, 599 bp, Glycine max
  Intron number 1 from transcript Glyma20g01750.1 (locus Gly ma20g01750) derived from phytozome v7.0 (chr-ID Gm20; pos 1275098 to 1275696 reverse strand)
ttatacaaaagatacataggtatcattctctgcataactaatttcaaatagatgtcatttaatttatgttgctatgttgcataaagttaataattataaccaaaagatgttgacacaaataattcaataagtaaacctgaacataaagtcaaaactaaagatagtatttttacttcaaaatacatagatcacgtgaaaagaaaattagttaaatatcaaataagatatctcaactatattttgaggtaaagactaaagagagttaataattatacaaaatgtacatacatacatacatgtcattctcacatagccaatttcaaataatgtataaatttcatttagtttatgttacaaagagttaatagttacacaaaaatgtacatacatagatgtcattctctacacaactaatttcaaataaatgtctttcaatgtgtaacatgacatcctaacaaatttcaaataaatgtctttcagtgtgtaacatgacatcctaacaaattgtgagtagtgacgagggaaacaactaattaagaatcaaatgtttatgtgggtaacaagtaattgcagagttgatagggatatatttcttagta

SEQ ID NO: 19290 - DNA, 547 bp, Glycine max
  Intron number 2 from transcript Glyma20g38620.2 (locus Gly ma20g38620) derived from phytozome v7.0 (chr-ID Gm20; pos 46173005 to 46173551 reverse strand)
agaccttagctcctgcggagccacatctgttcgaggtaatccatgaagcatgaatgattctctctcttaattaagtagtatagatgcttaaattcatgaatctagcagtgttgtttattgcagtatgagcttcaaaatttgatgtactaactattgttaatcattcttcatcttttaaaattgttatccatttgttactgagagccgagagcctgctacaataatgttttgatattttaaatgggtcataacccataagcattttcttgagaggtttttgagcctgttctatgaaacacttatctttaagagagaaaaacaaaaatgtatactaaatggtgaattctcttatgatagagtgtaggtgtaagttgatacctatttaatttttattgtttctgcacctgaatttttctgttttggatattttttcctgaatgctttcggctttctcatccctgtattcctcaatgcacacatggctcaatggtgtatactttgatcacgtaaagcataactcacaatctctttcttttgtagaatcggc

SEQ ID NO: 19291 - DNA, 693 bp, Glycine max
  Intron number 3 from transcript Glyma19g42330.1 (locus Gly ma19g42330) derived from phytozome v7.0 (chr-ID Gm19; pos 48349630 to 48350322)
ttttggctccaggtggcagagttggtattgatcccgtgagttttcatcgcccatttattattgcgtgtttagaaacatatagtagagtcacatactaggtgaaaactctaactaccgtattagcttctagttaaacatgaaaaatcacgtcagctgcgtgcaaccaaacacgccattaatttatgttgcaagctgattccctaacttcctattttttgattccttggccagtcagggcactagttaggatgacccaaagataaatgattgcaatagactctccaatacactcttttgaatccactcttttcaattgattgaaatttatgggaaatcacaagattttgtgggtccccccatcttaattaatgaacctaccttataatctggtagtttccaataaattttaaccaataataaagaattccctgaaatattattttctatttttattacaagagaagtgttagcaactcattcttttgaacacactttctactgttaactaaatttattggaaataacaattttgttgggtctcacttttcatttaatgtctctctctcttgattttttagttttcaacaaattacaaattgttctttttttgagtctgcctaccttttttggtctctgtgcctgatacaatgttctcttccatattgttaaggaggcagtttctttttacttcgg

SEQ ID NO: 19292 - DNA, 583 bp, Glycine max
  Intron number 2 from transcript Glyma18g41940.1 (locus Gly ma18g41940) derived from phytozome v7.0 (chr-ID Gm18; pos 50940938 to 50941520)
accccacagtaagtcttccatggtttattaatttcatttcagttaatcaaaggattgacaacggctcaaataaaatgaacctagaaaatctagtttcaaaggcaaggagtggtttgactaaaaaaactgaaaagttacttgatttttgcttccacgtgatttattatcttggtttaaaaatgtgactaacaaggtttaagaaaaaaggtggctgtgaatcaagtagaatacatcttactttagataaaaggaaattgccattcttctaattttccttttaatctctataagatgctaagataatataatcagaagttacccaaaaaataattattgaaggttgaatcaactatcaaacatgtcaaacataaagatcttggattgaattcttactagttgttcataactctaattcagacttgtaaagtattaccttgatcatggaacgagcttccaccctcctccttatacactatcttaaaaaggaagagttgaaaaaaaaattgcaaaaaggattgttagtgaaattcagtgcttaatgtgatgcatatgctaatttgcagcttgacacaacagaacaaag

SEQ ID NO: 19293 - DNA, 950 bp, Glycine max
  Intron number 1 from transcript Glyma19g35370.1 (locus Gly ma19g35370) derived from phytozome v7.0 (chr-ID Gm19; pos 42904418 to 42905367 reverse strand)
tcttcttcctcctcctcgcacaattccaacagcaggtcgcgcgatttgtttcgctttctttttttcgttttcttttcggaacgaaaattgattttaataatccttttgccttttgtcaatcttggtttcaatttatcgtttcgcgagacggacgggaattttggattgtttgttgtgtgatttcggggcgattttcaatttcgcctaattctgtttttgtttgtttcttctattgtggtttatatgtttggatcgctttttgattaggatagtggaatgataataatgttgttgtcttttgaaggagctgaaattgagcttgatgcatgtgtttactgtttccgagggtcgatttttccgggatgcatgatttttaggttgaatcctgttttgttgtgaaagtgatgtttgatgtcgattaacatcaatttgcggttgctggattgaaaattgacaatatttttgtcatgaggtttgtttgaggcgtgtgaagttagctaggcgctgagatgagatcatggtattgggagattataatacatttatgttgcctagtcaatatgggggaatgttgattgggtttgttgatcatggatacttggcagtgtggtacttgctggaaaatttgtgcatgatttggatggatggtcatggagcatgggagtttgttgtcaaaattttgtagtttctgaccttgaatgtcatacatcttaacactatgtttgagtttgacattgtaattggtcatgctactataataagctaagaatccataagtttgtcaatacttgaatcatcttcaaatttgttttcaccgaggcagaaatacactcttccccttttcaagttgaatttgaagttgcacgtttttttctgtagaatatctctcttatctaatgtgttgaatttggccagtggtagcaacgtatttaatttgcttgcaaggaggg

SEQ ID NO: 19294 - DNA, 721 bp, Glycine max
  Intron number 2 from transcript Glyma16g20780.1 (locus Gly ma16g20780) derived from phytozome v7.0 (chr-ID Gm16; pos 23459521 to 23460241 reverse strand)
caccaggtatatatattttctttcaattgttttttctttgttacatcttttaagttactcatgttagatatcacaatcacttgactgattgaattctgaattccattgtagttgtaaaatctgtgatgctgcctacttagaagcattgtgaattaactttgatgaagcatgagtgtcttttaaaagtacatataaacatattccaccatcaaacagtagtgaaaagggatatatatttactgttgatttgaagtgtctcctaaatttaacttactttttaatcaagggtagatacattctttttttcttactttaatatatgcttagtccaactaaggagacaaatccataatgcaattgcatacaaaagatagggattgtttggctacaaaaacaaattcatgcgatgagaaagattgactttgatagtggtaattagaattgtgtgtgtcccttagagacattgttgtcttcttgtttgcattatccacaatacactctcttaagtaacttttcttttttcaagtaatgtatgatttggctttttttactgtagttgaaacttttttgtgcttgttgaagttctcttcttgtttatccttatttcttagtagtttgatttatgcattggctattggaaaattttgtgctgctagttatgagaattgttgtccttggaagtttttttaaccaagttctctgtttttgccaccaggttctc

SEQ ID NO: 19295 - DNA, 965 bp, Glycine max
  Intron number 2 from transcript Glyma15g38060.1 (locus Gly ma15g38060) derived from phytozome v7.0 (chr-ID Gm15; pos 44142728 to 44143692 reverse strand)
aattcgtgcgttttaaggtacattttcctttctgttttattctgtatttgaaatgttggttactatgttctccagtgttaaaagtcaatttcctttgttatgtggtcgttgataatgaggccagatattgattttttttttcttatacaatttatttgatttcaaagataaattgttgttataagaatacatgatgctaacttaaacgcatatatgagcatgtatagaatgttataatctgttattattaattgtttcaatacttatccttttctggatgttgctatttgattatatagtaaaagcaaaaggtgtttgaggataacactcagtctgttggttaatttaaactttaaaaaatattaatttttttatatagattatactaaaaaattaattataattttgaaaagtaggtatatatataattacgttattttccatggtaaaagtaaattctcaaagtaatccgaaatattttttttcaaaatttaaacaaagtcactattttttttaaagaattatatatttatgaacaaacctaaaacaaattaacactaaatcaattttgtgacgaattcaataaaaaaatgttaaatgtaacagcaaatattcacatttttctttaaaaattactgtaccaaaaatatttattcatttatgtatagttattatagttaattaataagcaactcatggaagtattactctttatctttattattattattattattattattattattattattattattattattattattctctttttcattattaaagaagaagtataatgatttagaaaaaaagaattgtaatggcactttctggcaattatcacttggctttattaattgttaatactctcaacaacaagattcaactaataaaatacaaagaactaaagttggaataattaatgacctgtggtcccttatgtgattgatttaatcaga

SEQ ID NO: 19296 - DNA, 781 bp, Glycine max
  Intron number 1 from transcript Glyma14g29780.1 (locus Gly ma14g29780) derived from phytozome v7.0 (chr-ID Gm14; pos 36394340 to 36395120)
cagagtgctctgcttgttgaactcaataaacacaggtctgtcttggaatttggaaatttggaaatgttgttgcttgattaatggtcaagaatagaatgtgcaggtggtggattgtgtttgttgagttggttcttgagcaattcttgtattaggtaaaagttaaactaatataattcaagatgcattgaagtagtgatgaatttttgagctttgaactcaataagcacaggtgtgttttggaatttggaaatgttgtttgatgaatggtcaataatagaatgtgcaggtggtgtattttgtttgttgagttggttcttgagcaattcttgcatcagtatggtgacactaggtaaaagtaaaaatagtataattaaacatgcattgaagtaatgataaagttttaagcttttgttggtcgtgcatgtgctcgtgcaagagttgttatgggttctttaggtttaactttttctgctgtcatttttttatttgatggtcttggatgttaaatgatggtgtaggatggatgaaaagttgtgaattgtagttagatacatggacttgagtgttattggagagtgtagctcatgtaatgctttacagaaaagaaaaaaagaagaagaaagatgtgacattagggaaaatttggttaggtagacaatgaaactacataggtttttgacctggaagtttttgtgtcaaagtttgttggcatatattgatttatttattatatgtattttttctagtcctgaatctgtcatcaagtggtttgaacaaaggg

SEQ ID NO: 19297 - DNA, 495 bp, Glycine max
  Intron number 1 from transcript Glyma14g39640.1 (locus Gly ma14g39640) derived from phytozome v7.0 (chr-ID Gm14; pos 48696472 to 48696966 reverse strand)
tgcttcttttggtcacattctctaacgtagcagaggtacataacaagaaatactctttggctttgcacattaatcataatcatgcattgcctctctattagtagcatatgtttgggtgtaagcttctctagaagcacttctaaaagaagaaaataagaagaaaaaaataaaatgagattctccattagttaaaataagtttttcattaactaatttgtagatgttatctcatcttttaaagaagctatattggtgagcttctaaaaattaactcatgaagagtttatttttgcttatgaaaaagctcatcttatcttttttcttcttattttcttcttttagaagtgcttctaaagaagtttatccaaacaagcccgtaatatataaatttaacatcaaaatagaagtccaattgttctaactattgctcaattttgtttgtgtaataatatttgaacaggcttatacacgcagtggaacacttcgtccttcagg

SEQ ID NO: 19298 - DNA, 409 bp, Glycine max
  Intron number 1 from transcript Glyma18g13570.1 (locus Gly ma18g13570) derived from phytozome v7.0 (chr-ID Gm18; pos 13064107 to 13064515 reverse strand)
ggatcttccaagtaagatctgcttccactataagctccacttgtaagtacacaatatggtggaaaataataagtattttggtatccttctgctgctaaatttttgttaatggtttcttaatttataagattgtttcaaataattaaggagttgagtgtcatttgatgaagataaattgattttgttgaatgaaacgatgagatatggcgcttaacacaattaagctaaatgaaagtgcatgtaatggttgattcaacttcttttataagaaatataccatactttgaattttcaaggcaaataaatatatatagttaattcattatttctaaatatgttaattaatttttcttttttgtggtaatgcatgaagaggtgaattcttttggggacaaagagtggtattttt

SEQ ID NO: 19299 - DNA, 495 bp, Glycine max
  Intron number 2 from transcript Glyma14g40500.1 (locus Gly ma14g40500) derived from phytozome v7.0 (chr-ID Gm14; pos 49434077 to 49434571 reverse strand)
gtggacgccacgtgttagggtaaatattctttcgctgtctgtttctttctgcacttctcatatgatgttgaatgtgaagaacctttcttccttcttatttttttttcggattcgccaatcaaatcatatttgtctgtttcaatttttatctctttgaatcacacttttccttatcatagtgattcattttctattagtgtcaaagttgtatcctaaatgtatgaatgatctcacttccccataaaaaaaatgatatgccatgtataataaaaaaaaattgtgactccaaatcaaaataacatgaattttgtgtgttaaaaagcttgtatccacataacatttgaaataaggtatttgcgatgcgatatgatttagtttttaaataaaaaattgttgaaattaaatataaaaaaatataatcgatttgattgaattttgaacattcttatctcctattaatattaatattattgcagggtcattccaactactctt

SEQ ID NO: 19300 - DNA, 1043 bp, Glycine max
  Intron number 1 from transcript Glyma20g39010.1 (locus Gly ma20g39010) derived from phytozome v7.0 (chr-ID Gm20; pos 46479894 to 46480936)
aacaagaggaatacaagagggaggcttatagagtggttcgaggtttgttttttctctcctcatttttatttagtttactatccttttccaaagagagatggttgtttgtggctgagaatttgagaatatcatctctttttctcggttcgcgtcatttgattcgttagtatacttttattgacaaacaataaaattattacaagatgatgaaagagtaatgcggggaaagggggtcataacaagtacatacctatattctatttgctgttctttgaaatgcatttttaatgctaatttgttgacaacaaccatcatgtgtttcattaactatcacggttgttcctagtgtttccagtctctgaattaataatgattctattcatgtgcttttttgtaggtatacatacgtgtttaataatttctatagtgttttgccatcatttttttcaagttgcaactcacccacttgatttccagcaattaccaacagtagattgggcgggaatgacatcatggagaatgatataattcaagtcagttcttttcccctcttttttttttctctctctttccatgatttacttaattatcaaattatatatagcagttattattattttggggaaattagtatgtatgttggttaagcttgatatttgcttttctttgagtagtgcctttatggtaaactctgcagcaactactactactacttaaaagttaaagtactatgtgatactgaacctgtgtcaattttaacattccctgcatttttcctaattcccatgtaaaaatatctcttttccattaatattaactagcataaagttctccaaagtgcaagtgataatatgtatgtagaacattgtcgaattgatgttgatgaacactaaaaattaaaacgcgaactgatggtttctaattcttttattaatgcttgcttaaaataaaatcttttctatactaaaagggaattaatttgtttctcttctcataacacttgaaatttttgttgtctgtacacatgaacagttacgtcgact

SEQ ID NO: 19301 - DNA, 494 bp, Glycine max
  Intron number 1 from transcript Glyma14g38010.1 (locus Gly ma14g38010) derived from phytozome v7.0 (chr-ID Gm14; pos 47233790 to 47234283 reverse strand)
ttcttgactcgccggttctccttaattcttccaacgtgagtttcacctccttctcttctcttctcttctgttattgtatttgttgtatgtggttggttttgaacaatggaaaaatgaaagagttttgtagtttttaggtagcaatcctgttccaaccggataggatggatgacagagttttgtggtttagttttttttttttttttttaacacccttttcaaattaggtaattgaccatgacttgagttgacttgataatttcatcttgtaagagagatttgttcaatgatttgaatgttgaaacaagggaattacttttggagtttgaacatgctttgcttgagatttttttgggtactttgttctgtcttgtatataggtttgtggttcatgtatcatatcaccgactttctttttgttgttgttgaattaatgggtttgtgtctctaaatatacagattctgccatctccaacaactggagcatttgttgc

SEQ ID NO: 19302 - DNA, 767 bp, Glycine max
  Intron number 2 from transcript Glyma18g48740.1 (locus Gly ma18g48740) derived from phytozome v7.0 (chr-ID Gm18; pos 58182261 to 58183027)
ataacttagccaagaacaaaagccaagccaaggtggtagaaatggccttggaggcaaatgaggttgagcaatgggtgaatgaattgaatgattgcactctattctggtgctcctagtgttgttgtgttttttttttaaaaattttgtttgtgtagttccaagttctttgtttttttgctgtgccaacaatgcagttcctaaataagtttgtaataatgatttttgcccaccacggaagaaattcaagtgctgattttaatttgttaacattaattatgagatagctataattaatgaaactaagaatgttgacatatttccaaagaacaatttctttggctatctgatggtattagttgaaaaacatagttaagcatggtataatttaattgagttatgatcacttcaaatttggtcgaagaaaatattattacaaaattttattcaaaatataaatattaacagttgctcaatatatatatgaaattaaaaatcatgagataaatggaaattatgatttgttttctcctcgagatacataattttcaagttgaacaatttatttccaagtagaagaccttctgagttagtactactgtatatagttttaaatgtttgtttgaaagaaatggagattaatcattaattttcttccatatattgagttttaaaaagtgaagcaacaattgatgtgttggtaagctcctgattactagcttgttcgaattttatctgttttctatgctaactataattaaagttaggtt

SEQ ID NO: 19303 - DNA, 940 bp, Glycine max
  Intron number 2 from transcript Glyma19g35650.1 (locus Gly ma19g35650) derived from phytozome v7.0 (chr-ID Gm19; pos 43156780 to 43157719 reverse strand)
tagctgccaacttgaaaccaaattggtaattactatctgtctgtatgtatctatcttgttttttaatttttatatatataaagtgtgctttttggttcttgaagatttggtcaaacttagtcttggtgtacgtttggattggtggtgaagtgaactcaccgtgatttttggaagcaataaatagttgcttttgtgttgaactcactctgattttatctgtttgtttgcttctaaaaatcatggcgacttcaactcactaccaatccaaaaacacatctaatctctgtattttaaaatcgatatatttggtccttgcattttttaaatctggtcaattttagtccgagatgccatgtggcggtcacgtgactgtcatgtgtctacgattggccatgtcaacaaactaggcaaataaagtgaggagagggactaatttctccaagttgtagaaatgtaaggattaaatcatcgaagagtatgtaaaattagttcgttgaagtcaggattatacatattacagtgcaacatatgccggccctactgttttatttatggagagtaaactgaactctcaaaatctgacccatatgttgtacttagttccattcttcaaaatttaaatgatcattattttccataatggattggtccctatattttaacttaagtcgctaagggatcaaaattcaaatgattgacaactctgtgaagttgggaaccaaaatctaccttaaaccttttcttttaaggttgaccatcatttaggttgttgctcatacatgttcgtgttcatagatctgctcttctatccgagttccatttctgttttacttaatgactatgtatactttcataatactaatttattatgcatatccttgaccattgagcgattcttcttgcaggtatacattggttcctgcatctgtgtatcttgggt

SEQ ID NO: 19304 - DNA, 601 bp, Glycine max
  Intron number 1 from transcript Glyma19g01650.2 (locus Gly ma19g01650) derived from phytozome v7.0 (chr-ID Gm19; pos 1260444 to 1261044 reverse strand)
cagccaccggaatcccttcgttgttcgagcccaaggtacacttcattccaatgctgtgctttgtctctctttttttcccgctacccaatttcttccgatccgattttcaacgccccagttaggtcttagtgttgctccccaattcttctcttctcttgtttttgtaagtttcatcattgtgtcatccaggtgtttgtggaaatgctcttaagtcctgaaattcggatttttttttttctgaatttaccacaattaattttgtaactcgggaattgggttttggggttgaggctcgtgtttgtcaaatttgaaagctttttggcttttgactgaacttgaatctgctgcacatgcattgcatgtgtgtagagtgtagaccgtggaggtgtttataaaagtaataaattaattctcttcattttctttttctttttcttttttaaaaaaaccgtggtttatttgtttaactttcatttttaattgaagatcagttttctgtttgtaatggttgtgctttcaatttgatggtttgttaaaattgcagttcaatggtaatatttttcttgtttcagcggaaccttcagataaatccgttgaaatt

SEQ ID NO: 19305 - DNA, 505 bp, Glycine max
  Intron number 4 from transcript Glyma16g00400.1 (locus Gly ma16g00400) derived from phytozome v7.0 (chr-ID Gm16; pos 129084 to 129588)
taaagctttatacctaccaggtatgtaatttcttgcttctcagttggatctcgaaattcatattcatataataatagcaagaggcaatccccacagtatttaaatttatgaataacctacccgtatcaaggtgttgataataatatattaattagcccatgaaatgccaactcatctcttgtaatccctgcttaattgtttttgtttaattttcgtattaacttcctcagctttagctttatctgatgtgacgaatttgagttccagtttctcacatatggaattctatctcaaaagaattgtcaaaacagtaaaaaaaataatcataatggatattgcgtttgtatatgagcagtagacttgtagaaggaaaggaaagtaaagtattgtgtgatttacacattttaaatccctattaatttctagtccattgattatttatttcttcttttttctgattttggctgcagatttgcagggcccttgcttatatacataactgcat

SEQ ID NO: 19306 - DNA, 1040 bp, Glycine max
  Intron number 1 from transcript Glyma16g07350.1 (locus Gly ma16g07350) derived from phytozome v7.0 (chr-ID Gm16; pos 6588491 to 6589530 reverse strand)
gctgagggtttcgagtaacgtttatttttcacgaggtataatcttcgattcgatcaatgtctttcgtgttctgtttcttctgtgtgccgattagagtcattaatttgttcagcgtatgttgaatttatgatgtttcatcggttttatttgcatgtttgttgttgtatggttagattattgtgctcgttgttggttgatgtaactctgtgtgtgtgtttggattcttttgattattttaattgattcctggatgagtatttccgattgcttgggttttaaggttttaattttgttcattgattgagctatgttgatctaatggataatcggtggaatctgagctatgttaactgagttatttttggtttatgttttgcctgggtaattctggacctgtgaaatttgttgaggattatatgctgtgactaacttttggttctttaaactattttttgttaagtgaattctttttctatgattatggaaagacatgcctccaatttgttgttattcgtttggtgaaatgtttttttctgtaagagttttgatgatctattttgtccttgaatttactttgcatggtgtacaggggcacattagtctttttaacagaatttaccttttttacatcaatgtatttcgtatttttagaagtttgtacaaaaaatgtttttttaacctttttgttgttttgttgaaaaaaatctttttttttattgttttctgtttttatttttcttatattatttcctatactaaattttaaaataggaaacagtaaataaagagattgaaattgaaattaaaagttggaaaatgatttctcaaaccaaatcgtcccttagtgacttatgtgttaacataattgctgaattgcactgtatgaaattcatgttaatgttagaatcttttgctgtgtctaaactatatgatgtacatttgtaatgaattatttgaaaattaacttactgggtgtaattccttattttgtgttgtctgactcatgaacctatgaattctgtttcacagtttaagatatc

SEQ ID NO: 19307 - DNA, 492 bp, Glycine max
  Intron number 1 from transcript Glyma14g39420.2 (locus Gly ma14g39420) derived from phytozome v7.0 (chr-ID Gm14; pos 48513383 to 48513874 reverse strand)
gacatcaccgataaagtgatcgccgagtacatgttagtgtctctatctcccttcgtttttcctctgttttctctgcacgcgaaaacaagcattgcaatgttgcatgcttctatcagttccaatgtgcatgggtatatgtaatatgtgtgatggaacgattcttttaatgggtgtgttttatttttgttcatcttccgtttgatcgatcacagcgctctcttatcttatagtctctgtactactctgtttcccctgtttttctgttttatggtttttagcttgcgtgtggttgtttgtttttcattcagtgcagagtccaatgtgcattttgatttttgattccacgctggctttaactacttgctctgcttcatgtctaattcaactatatgcttacttatttgctaacttagttttcaattgttttctccacacttaatcaacacttactactttttattttcattttatgatagggtaggtggatctggc

SEQ ID NO: 19308 - DNA, 829 bp, Glycine max
  Intron number 1 from transcript Glyma18g46900.1 (locus Gly ma18g46900) derived from phytozome v7.0 (chr-ID Gm18; pos 56547131 to 56547959)
gccaaccccagtatcttgataaactgcaggtgctctttcttgctggaaattttcaattttttcatctggggtgcttttttgcaatgttaggcgaagtgggtattgtccaaaaaaaattgagaaattgtttggttagctatatgaggttgaaatagacagaatacccttttggacaggggcgtggagctttaaagtgtaactaaatcctgaccgaagaatagtttcataactcatccaagttaccgaagcatgtggagataccttgggtaccattgaggaacctgagaccctaattatggttgatactaaatcaacaaaaaagacagtggattggttgaagagatggaaaaggaaataatttatgcactgaaaatgtaaaatgtcaatcaatcactatgtaaaatgtcattaaatcacaccactatgattaactaccttagagtcatgtactaattgattgaaagtgtaaaactgttaaagttacattgatgatgcatggtgattaaactaaaaaaaaaagtactaatttaatttgaatacactagtagtgtaaaaaaaatgttttttacaccctcattaaatagttgatttctgagtttggtaaaattgttgattaataatactttgaaaattatatatggtaatttttgattgattgatattgtaaattttttttacaccgacaatttacgaaaactaaactaaagaaaattaaaattttagtggaatgcattatatttcttgttttttttttgtcgtatgttgcttagttagtgaactttataatgtctaaggtggagagagaaagaggaatcacagttaaagccca

SEQ ID NO: 19309 - DNA, 803 bp, Glycine max
  Intron number 2 from transcript Glyma19g00640.1 (locus Gly ma19g00640) derived from phytozome v7.0 (chr-ID Gm19; pos 411569 to 412371 reverse strand)
aggtatttgctacactcatccacaaaatcttccaggtgagggttcttctgaccttttcaaatacgtgaacatttatcatttattccacaaatcgttgtgtagtggattttgtttttgatcggccaaagagtaatggaccagtaaggtgaagttcatgtgccaagcatcttaaggatgctactcaaacacttccttacctatggaagtgaataacagacaatggtcccttgtggagtaggttgtgaagttcatgtgaacaaaatccatataagataataacaatgtaaaatcagtgcgccttctgcaccttagccgaatgcgttgctaattgatacctgactaagataaaaaggaaaataaaaaggtaacaaaaaatttgattcaagcacattcaatcatcaagtataggtttaattaaatctcaatcagcatctaacaaatattcttgggcttaggaggcctattacttcccttttaaactaaaagtaacaaaggcttagaaaaatttaattgatttccatatctagaatctctagatatcagatcatgatggaacaaataaaaagaaaagatatccgatcatgatgtttcccttgtttctctttaggatagggatcaggggaagcttggattttatgattgtcaaacttagcaaatttagtggttccaggccagtaatgattatcttctaattcactttacatatattcattggttctgactctgaccaaatgttaaatgtgattttctggagcatattctctgataaaattatactcgttttgctttaggtgctaagacgg

SEQ ID NO: 19310 - DNA, 629 bp, Glycine max
  Intron number 3 from transcript Glyma18g06240.1 (locus Gly ma18g06240) derived from phytozome v7.0 (chr-ID Gm18; pos 4824514 to 4825142)
atattctaggcctgtatttttatttcagtatgaattcaacaagattgatatatttttcttctacaaatattattccatatgtatatatagacttagccagctcaaaataggtatttgaaaccgaaacaaaaaattgaacattgatataaatttcttttgtttatattaacaaattaatttttaattaaatataatgacatttaaaagatataagttgaaccgaatgattaagaaagaaagaaaaggtggtgtatttgatctcttactaacaaaaaattaataattaacatctaacaatttacctatataaaaacctaaatataatgacacgataattcttttccaaagggacattaaaatttttttcagtaataatgcaatgaaacatctactaacattaaaatttatttcagtaaattaaacacctaaaaataattttaattgaaagtttctcaacaacattctctatgaaaataactttcataatattatttatccaagggacagtgctttaaatttaagtacctttacttaatatcaattataaaaaatcacaaaacaaaatcaattctacagctcgtccaaacacactagattgtaataaagtaacttttacaccaataattgaa

SEQ ID NO: 19311 - DNA, 846 bp, Glycine max
  Intron number 3 from transcript Glyma15g04500.2 (locus Gly ma15g04500) derived from phytozome v7.0 (chr-ID Gm15; pos 3150254 to 3151099)
tgccatctcccctgcgcttttccaaattttttcaggtgaagcattgcatcttcttattttgattaccattttccatgcaacataatttacgttgcttgcttgattccaatttcatggtcattcagacatttcagttatttaatgttatgttttttagtacaagtacaccaatgactgtgacgtaatagtagatttagaaaatgtttactttgtggattggccattcgtctgcattgttattttacataaaggtaaagttaaacattttggttttaagatttggatgtctgtgctaaatgtgatcataataatattatgaatatcttcttgttgattacaaattttttcttaaattgcactgcaactcagtaccctttactgttgcttggaacacaaacaccagaagaaacttaaattaattgaaaatgctgtcaaatgtggagtgattcttgtactcgattatatattatagtttgaccacaagcactcatctaaatgttgacaacaaacccaatgttttatactgtgaatcttctaataagatacaaggggagaggatcaacaaaaggttgaaatttactgttttaaatttaattatttatctattatactgatctgttaaactgtaaaaggttttttctgtatttctattcttttgcatagtgctacctttggttctgcattatgtgtatgagaacatctgtgtgtcttacatccattggtcaaaatttgtttagttgtttgtgaatgtggcttttgcagaagcaactattttgcatgagcctcttttttcttgtcttgatgccttgtttaccagtattctttcattcttgataatagtccaac

SEQ ID NO: 19312 - DNA, 450 bp, Glycine max
  Intron number 2 from transcript Glyma14g21190.1 (locus Gly ma14g21190) derived from phytozome v7.0 (chr-ID Gm14; pos 24492962 to 24493411)
ctcttgggtctttcaagactggtgctattctcttggtaagtatttttttttctttaattatggttatggtgcttaaagcctttttgttttaactttacgatagagcgacaatttttctctcattaccccaatgaagctgttctgcattctgtcattcatttaaattactttgtttttaacaatttttctttcttggataaaagtaccatgaattagttgacttgcctttctccctatctttgcatgtgttcctgatttgtttttgtgcttccagttcttaatactctaagttcgaaggatatatgttttactgggcaaatatagttaggtcttggctacaataagattcatatttgttttgtaatttgtttttcattcattttttcatcttcatggtctttgctttgaatcttttccaatctcatgttttgcaggctggactctttgttt

SEQ ID NO: 19313 - DNA, 501 bp, Glycine max
  Intron number 3 from transcript Glyma16g29510.1 (locus Gly ma16g29510) derived from phytozome v7.0 (chr-ID Gm16; pos 33318456 to 33318956 reverse strand)
ataattcataagcaagatcaagagaatctaactcggttgattgaataatgtgcttgagttgttgtgaattccctagtacgtaactgagttcaatttctacagataaaagaaaaaaatcataagcaagaacgaagccttgtgctgtgtatttctcagaggatattgcaggaaagcttgcttagagaatagaaaccaactggtttcactagtataaagtgaagggagtacactttaatgatatacgatatataactattaattaaaaaatggccaattaagatttgagctaattttagaatttgtcatacatgtatttgatttcattaccattttaaaatgttacataggtatgtagtttgtgagtgtatttgcatgtcttcattttaaagaagacaaattcaatagggaagctgtagaaattgtaattgttagttgcctgttgtttttttaaaagaaacacaaaatctaacgatactctataaaaactgtagcttgggatcg

SEQ ID NO: 19314 - DNA, 721 bp, Glycine max
  Intron number 1 from transcript Glyma17g37790.2 (locus Gly ma17g37790) derived from phytozome v7.0 (chr-ID Gm17; pos 41516228 to 41516948)
aattatccactcctagtcgaaaagaaggcaaagaggtgctttccctccactgatttttgtttctaaagctgaattaatttgttagagtggtaacaaaatattattctcctgaaacgtagagtaaacacatttttttaagatcttgtgtgtgaataaaagtcaacaaatttattacacataataacttgcaattggatgaccatgtaaaaaacctttacaaaacattctaattaaattcttttttaaatttgtaaggggccttcttactataacaatgttgtgttaggaaaaataattatatgagataatcataaacacgtttgcaaatgtataaaggatcaattatgaatgagttggaagattaattacatttatgcattccacttttgttttgactgaaagatatgttagccaaattatttattaaggcagagtacctgttttcatccagtaaactaataattgaggttagaggccttaataagaacttgttctgattttacatattgattattttgaaacatgaactgatagaaaactttttttttactgataattgtgaaattataagcagaataaaatgaatctattgctgcttttatttgagttcaatgaaaggcatctctcattctgttatggagcctttgcattggaaatttgattaatgatgtctcttcttttcacagagctcccagagaggctccttttggggaagagctgg

SEQ ID NO: 19315 - DNA, 232 bp, Glycine max
  Intron number 2 from transcript Glyma15g11120.1 (locus Gly ma15g11120) derived from phytozome v7.0 (chr-ID Gm15; pos 8139602 to 8139833)
gaacaaagttaagaaaatcttgcagaagattggtatgttaagcatctatcagaaaaatctcatgttatatctcatttcactcttgaaagctttattattattttttttgttccttgaagaaaaaaacaaaatctcatatctctatagccatatctttgagataaatagtgtgtttggttatttatttgagtccattttttcattttcacaggggtgtttaccaccgagatag

SEQ ID NO: 19316 - DNA, 541 bp, Glycine max
  Intron number 1 from transcript Glyma19g31300.2 (locus Gly ma19g31300) derived from phytozome v7.0 (chr-ID Gm19; pos 39075907 to 39076447 reverse strand)
cactttttttattttttctccattgaaggtcaacttcaaatccctaatctctcaattacaactgcaactacttttccctccaatttcgcttcaccacacatgcatggattctttgattttcatcttctctcgcgttttctgattctgatcttagggttccttatcccccaactttattgcttcctcacgcgtctttatctttttttcttttcgttgatccaaccttttccactaaagcttcgattttttgctttttattttttttttatcttttttgtagtttgtttgtattgtttcgttagggaattaggaatcttcgattttcaagcgccgcttatatcctttgtttgctgttaattattatggttctgttgtgtgtatgtggctgaagtttcgtgagaattttacttctttttctgttgtggtagttttgttttgcagtgaaacaaaagcagtgcagtgaatggttgttactaatgtattttcctgtgttgttatgttttcagatagttgttaacagagtgatttgggagcttttgat

SEQ ID NO: 19317 - DNA, 1030 bp, Glycine max
  Intron number 1 from transcript Glyma18g06150.1 (locus Gly ma18g06150) derived from phytozome v7.0 (chr-ID Gm18; pos 4733988 to 4735017)
gcattggtattagtaggtggtttatcttcctctctttgcacaaacataggtgttgtttgactattctttatttgttgttatgctaatattttccttaggaactttaaaatgcattatgcaatcatacttgtgagtggaagaactttgccaatgattgtaatttgtatgttttaataaatggtagttaatatatttttaattctgaataataaaatactactagtaattgagcatccttatctatgatgtttaagatgtgcaaatgatgatttctgtgagctaagttttagagctgtactgagattatgacttacgtttattttgtctagtacttctgacactactaggcacaatatgaaaattggttatatgacatgagtcatatgaacaaattatagtgaaataaagttctctttagtcagtaagctatgaaggtttatgttatttatgtgacctttttgcctttctcacgtgtacaaatagtatgattagaattccactggaacacttcaactttttctgcagtctgttcagttttgattttaccctcctgtgtgcatatgatctagcatttctcaattgagaaaatatcagtattaagtatattacatattcaactgaattacatttgcatacttgcacaaaaactgcaatactatttttaagggacttgtaggtcccaatgaactgattttataaattatcggatgaggttgaaggtttaggacacatgcttaacatcttctttgtgtattttctgtattttcaatttagaatttaacaaaaagatacaaagaggagctgttcatttacaggacagacccgaaggatgattgtcctctgctgaacatttaagtttagtttaaagtttgaatgaatcctgtgactgtctttctgtactgtctgtaatacatcaaatgcttgtgttttatcttgaatgtgatgatttttactgtttacatgaataccttgagaacttcttccctttgattccctaagttaatttcaggaagtaaagaggagaagaaaa

SEQ ID NO: 19318 - DNA, 1019 bp, Glycine max
  Intron number 1 from transcript Glyma18g47140.1 (locus Gly ma18g47140) derived from phytozome v7.0 (chr-ID Gm18; pos 56836441 to 56837459 reverse strand)
gtattgtttggtaaggaagaaacttttttgtggggttgagcttttgttttggctgaattcatttgttttctgtgttgtttttgttgtttgtgagggtgttttgaggataaagggttgctctttttttagctatgtatgtattgcttgcatcttgggagaaatttttgtatgggtcctgaccaattttcatgtgatatgtaaccaagtttttcattttaccagaaagaattaataaaaacttggtatgtgttacttagaaatttttcaggaccataaacatgtagtggttccggaccatacaataatttcgcatcttttgggggtttggaactcttggctttgaaagcaaggaagtggttgctggtggtggtcaaaggcctttttgttgattttggatttgatgtttgaatgttaggggaagttcagaatataggtgattgtttatttgaagtagatgtttgacatgtatctgttatttatgtgaataggggattgaagtgattttgaaaatttgtattttttcttcaatgcttttaatatgggattgatgtgattcctgagctgaatgtgagttattgtgctaagatgattgagtttcttgagtttaaaaatatattctttgtgatcattgtttgggattgattgattggagtagagtaattgaaagagaatcaagttttagtcttgtgggtctatttaatcatgtattcatatctagtttcatgcgtttcggattctgcctcatattatcttgttatagagtttaatttacatttggctgaagctacctgattgtgatagccaggctattagaatttggtgtacttattggcactgtaaataacacaatcctcatgatgttcagactcattaaactgaagataatttgtatcttgtggatggtttattaaatttggtgtgttaggcaatgacctatactcattaatatggttttagttctgttatcaacaatgtgagggacaatgttgttttttcattttctttcagtgctgctgtaa

SEQ ID NO: 19319 - DNA, 959 bp, Glycine max
  Intron number 2 from transcript Glyma17g30750.2 (locus Gly ma17g30750) derived from phytozome v7.0 (chr-ID Gm17; pos 33637254 to 33638212 reverse strand)
cgagggattctgattgattggcttgtggaggttagtctcatggcagttttttacatctatactacttgacatcttaagcttttcctattgtcacttgttgcaaatctatctgtttaatgcagttcaacttcctcaatgtatgtaatgtttggtcattgtataattttgaaagttgcacttctttgattcttcctctagtttattgctgagaaacttttgaaataatcaacctgacaatacaatgctatgtatttttcttcagagttaaatttttcattactctccaaccatgttattttattcagttaatgtcaaattttgatgagttgagggtgagccttggtacaatgataagattgttgttgcctcatgagtcattacctagagatcaagaattcaactcctagaagcaagctctcaatgtatgggcgtaaggttgtgtatatgtacccttcatagatcccactaggtggaaaactcagtcattggatgacgaccctttaattaaatttttatgagttcatctcagaaaaaaggattatttaatattctcttgtgtttgccatgtggggattacaaaacttaattttaatttctaaaccaagtttccttttcttctcttttgaatctggtgttacatttcggtacttgacttccatgtcatcatctcaaccactgtcaccatgcctctcctattatgcacaaaatatcttgttactgctttcttgtggacagatttcaataggaacaattgaataattgatactgagaagagctggattttcagaacttatccgtgataaaggcacattattagaaataaaaaacaattctttaattacttttagctgagtagcatcagttgcttcaatctttggcttctaaatgggttatagctgaagctttgttatattctcttttcaggtttctgaggaatataagctacttccagatactct

SEQ ID NO: 19320 - DNA, 373 bp, Glycine max
  Intron number 1 from transcript Glyma17g30750.2 (locus Gly ma17g30750) derived from phytozome v7.0 (chr-ID Gm17; pos 33638249 to 33638621 reverse strand)
cccctgatatatacaatagtatatttgtcagggaggttagtgttgtagaaatgtcatctaatatatggattattgctcctatactattattgattacttgactggcgacattgtagtagcttctctttaacattgttatgatttttgtttttcttctattttctcagtgactcactgctttataacattctttcaaagtattaaaagcagagagcatatttattcagtaacaatgtaatattgttgaataaattaaatttaaaaatagaactatatagaacttaggataaaatggataagtttcactacaaaagtttgataataaattttggttaaatctttccagtttgaaaggagaccgtcaagtgattac

SEQ ID NO: 19321 - DNA, 892 bp, Glycine max
  Intron number 2 from transcript Glyma20g26400.2 (locus Gly ma20g26400) derived from phytozome v7.0 (chr-ID Gm20; pos 35867722 to 35868613)
gcttattcgtcacctcctcattttaattactcttcccattcatcacaatgcaataaatgctttaactacactacaattatgttgcttgcgtcagtcacctccaacttttttgttttcaattgaacccgttccgtttctcaattggctttgactcatggatttcaccgtctattataagtttccactgtatttgatgtctatgaactttacgtatgttgttgtagctactacagtccactgcgccttatttgcacggtttttgggctgtgtttgggatagtgtaaagcttttctcctttataccaaactcgaaacgaataaaccctcaattttatctcaaactttaccctctctcctacatggtccttttaaggtacaaaaaaaaaaaatcatgctgagtagtatttttcccttccaatatttttctattggagcttctctgattccttttactgaacataatgatgcgaatcgagctttaatgagttctaatatgcaacggcaagcagttccgctttctcagtccgaaaaatgcattgttggaactggattggaatgccaagtagctttagattcaggggtttccgctatagaccccctgaatgccaattaaaaataccaatttaggaactaaattgatcgatattcaatactcgagggatttcttatattattaccttaaggactacttaggagagagggtaatgcttggaagaccaaattagaggtttattccactcaatacatttgtatcatgttttaacctttgacttttttaggggaaggagaattctttaactcttgttagtgtgaaattcatttttaagttttaagccgattgattgaatctcaaccttgatttgttgatgccgtttgatgcgatcaggcaggtg

SEQ ID NO: 19322 - DNA, 462 bp, Glycine max
  Intron number 1 from transcript Glyma17g11910.2 (locus Gly ma17g11910) derived from phytozome v7.0 (chr-ID Gm17; pos 8953820 to 8954281)
ttcaattttattcgattcgcttgctggaaaattctgtgagcccacctttttttgtcaacaatgccttccttttatttctagttttagttttaaaataattgtaggccgtgtttggttcttatgtcttagttcttcttcattttcgttgtttaatttagaagcttgttcggttattgtctgtctgtgtacgttattcagagcttgggggagttattttgttgtcggtgaggcttgtttccttagttggattggatctgagctcagtaatataacaactgcgttatcgagttgtatttaaagagatatattcattacttacacttgattaattattgttctctctctttttgtaaaaataaaataaaatagacaagatgtttataaagagaactgtgtttgatgtcagattagttggaaatgggatcttatgtttttgaattttgtagttgagtgagggagagg

SEQ ID NO: 19323 - DNA, 544 bp, Glycine max
  Intron number 1 from transcript Glyma17g03710.1 (locus Gly ma17g03710) derived from phytozome v7.0 (chr-ID Gm17; pos 2471311 to 2471854)
catatattggatcttaactgtcgcataatatactggtcagtaattagtttcagtgcttcacatttttttattaatttgttttgtttttaatttcaatatattttttcctattctgtaatgaagatatagttaatgaggatgcctaacatatgaatgtctttacttttatagaaactttcacatttaacttttctaagatgagttatataagttaattttagcttatgagagaaagtgaattcattgtctttttttttttctatgaatacttatggaaaagtttcttcttataaatatttatggagaagtttcttcctataaatatttatagaaaagtttctccaaacaggaccttatgattagccccttgctgaaaaatggatgtgctgactgtgtttgaggtttgatatatgttgactgttgagtatgtaatgttgtatggtgatgaatgcatgaattcagggaatctacattaaaagcttgtttttgaataaaaatataatcggagagtaattttgcaggaaccgtagtgcggaaaatctat

SEQ ID NO: 19324 - DNA, 821 bp, Glycine max
  Intron number 3 from transcript Glyma14g38840.1 (locus Gly ma14g38840) derived from phytozome v7.0 (chr-ID Gm14; pos 48021647 to 48022467 reverse strand)
gaataaggcaattgcagggattattactgaaagaggtatctgataagataaggatgtaaatattttttttttgaagggtgtttaaagtaacttttcctcttaaaattaagtgtagtttattaaatgaatttctgtaaggaatcaaaacatgaatgtgcaatatcttttatgctaatatgtccctatggaattcttagttaatgcaaagtagtgaatttaaatgttctatgttatagaatcaaaggaagagtgggaaaaactgcttgcttatgctctttcatctcttgctctctatccttgccatctatgatgccaaaattctatataatcttagggaaatagtttcggtaagatagttcaattctactacatgttctgcacaataagctcaagcaacatatgcataattgcataactgaacaagcaaaatgagattgcaagcttgacactgtaggcatttggcatcttgtaaatacaagaaagacaacaacgagatgggtgatattaatccaatggtgcatttggcatttgagaatctttatcaagtgctgtaaatacccgcatgtcctttgacgagaatgatatgatttatgttgaaaaagcaaaattggctaactagctaatgatcctgaaaaagacgcatattgtagtggatgaaaattgtgtgggtttgtatcaatatattataggatgcagttaaatggtctaaatatctacagcactgtatgttgattatgtttgtccctgggtcattgatgttaactatttggtcatctttttatccagattacttaagaaagatcatcgtgcagggaagatca

SEQ ID NO: 19325 - DNA, 919 bp, Glycine max
  Intron number 1 from transcript Glyma14g38840.1 (locus Gly ma14g38840) derived from phytozome v7.0 (chr-ID Gm14; pos 48022859 to 48023777 reverse strand)
ctctctctttcacaaccttcactttactctctctggtattctcctttttcctctgatctatgtacccttcttttgtttgagctttgtaaatgatggatctgaatactagtttttttttttttttttttttttgagttctggttgatatgttgttgttctgagcaatcatgaataaagtctaagggtccacgtctcacctatgtaaatttaattcaaaaggggtaccttgaaatgaaatgaaggcttctttcatggatttaattttagttaacgcttctttgatgctgatgtgtgtagggttgtgttgtgattaactgtgttgattgatttggtttctgggggaccagtttggtttttgataagcttttatatgtatacatccaatccatgatgagcctttggtgatctaagaaacaaatctgaatagagaggagaggtgagagtgtggttcaattttccctgttcattttctttttttggattggatctgtagattttgcttttgtttcattgctttttttattttttaaaaaaaatattttgacatattttcagcttctggtacttgtgacttgtaaggtgatggattctctttctctcccatgtctcagttttcaagtttgtgattctttttttcttctttgaattaatgaagtttagtaaatcaaatggtttcaatgatttgatccaattgtttgttagctggaatagagagttatttggttctccttttgaacttggaagatgcaatcctgaatccaattgaaacaaatatatgcaagtacatggatcctgtcaaattctttgcagagtgaaatgctcatcactgtttttccccttgaatctgtgacattgatagacttgagactgattaaattgcaaattctaatatgtgctatctggttacaagacagctaaa

SEQ ID NO: 19326 - DNA, 876 bp, Glycine max
  Intron number 3 from transcript Glyma16g01400.2 (locus Gly ma16g01400) derived from phytozome v7.0 (chr-ID Gm16; pos 995343 to 996218 reverse strand)
acgacgagaacgtaagtcacttacttcacttcataccatcttctacagttaccatacccttctctcatgttcacccctctgtttcattacattgaagagaaacagcaaccttagtttgacctccttttttttcacaataaccaatttggttgagcatctatctttttcagttttgttgttctatgtgttttaaggctaaatcttgttttttcattcattcatttatgtttcaatggggatccgaaatttagcacattcagttaatcagaatagtagcttatgaattgaaagtgtaaatgatttatagttgtgtatggtaatttgatttttggagtgcatagaaattaaattctaattagaatatgtgaatgaagattagaagagtcatttgattttgttaaaccatgtttaaaacatgcatctgagatttgaacagtcaggttttcatccaagggcaatgattcatgaatcatgactgtgtgaatgcatgagtgtagcaaatccagctcaatgtactgttgtcatgcagtcttgtcacgtttctgttttctgcaccctccatatttttttttcatagttcatgtgaaaagaggtatcttcttggggattaataagaatccaatctgtcctacaaatgcttggctctattcattgggattgccacaaaggcacaagctttcttataagtcaaatcaatttgtgtgtacaaattcacatgggcatgttgcttaaagaattcaataagaggggaataattcatggaatcgtggttggttgggggggtggaattggatcttgtttccaccacagggaggagtgttcttgatccaataattttgatgacctaatcatacaatgaatttccttttgcagggc

SEQ ID NO: 19327 - DNA, 867 bp, Glycine max
  Intron number 1 from transcript Glyma20g06680.2 (locus Gly ma20g06680) derived from phytozome v7.0 (chr-ID Gm20; pos 9025930 to 9026796 reverse strand)
gtccctaaagttcaaggtaatgattactacttagagtatgtgtggataaatttttctataaatatttttaaaaggaaaagttaagaaaaataaatgaaataaatttcttcgtaacttcaaattaatttatacatatgctaagttgctaacttataaaaattttctcatactagcttatataaaaattacttgttaacttattaagaaacttattttattttttttaacgtgggtcttttttaataatcttttaataaaaattcataaaaaaatgaattaaacttctctcacaaaaacttatataccccagttcctttcttcatcaggagaagttagatgaatcttttttttttataaaaattaattaaatgtataagtttattttaaattatgaatcaaatcattttatcatcttattttcttctcctatgaatatatatggataaatttacctaaacaaattatctattaatttaatatttgacattataaaaaaaatctaatcctcaattagtcaatttaaaatttatggattaatttaatctctccaattgacacaactgatcaatttgttctttagtgctattaaatcaatcattttaatcctttaaaatctataagtattgttcaatttagtattgaggttagagaatacattaacttaagtgcattgatgtgagatactaaattaattaactaataataaccaacctagtataccatttatccaggggttattggccaaatgaataataataataataataattcaagaactagcttcctttttactcatgttttaagcattaatgattattaaacacccttttaggcccgaagcacagttctggtttccctagatcatac

SEQ ID NO: 19328 - DNA, 609 bp, Glycine max
  Intron number 2 from transcript Glyma16g03260.1 (locus Gly ma16g03260) derived from phytozome v7.0 (chr-ID Gm16; pos 2786307 to 2786915 reverse strand)
gttgaagaacctcattctggtatttgaattgaatgccttaaaaatgttatgctaagagtgtgttttggtttttattttcacaaattatagttttcaaagtgtaactgaataaggttgtccaggctccagacactcggacagttggtcgagggtggtgtaagccaagagtagagtttggaattgagggagcgcttgaactagatgaaaccggaaaaatatctcctagctgtttttggttttttaaatacattttttggaatcaattttcaaaacttaatagattttggatgagaaagtgactgctaagtagtgtaaaattgtttcagaaaatggtttttaaagccaaaaatgagaagaaaatggttttccaattgcatagttttttgagaaccctacatttttctcattgaaatgttccaatctaactgtaaattgataaatgatttaatgtgtgatttaatagagaaatttgggtgttaccagagagtatggtattctccctttctgagtaacggatatggatatccattggttccttcttttcttaagtatgaaggtagcagttctgctctatgaatactattgagtttgttgtggttaatgtaggtg

SEQ ID NO: 19329 - DNA, 999 bp, Glycine max
  Intron number 3 from transcript Glyma16g33550.1 (locus Gly ma16g33550) derived from phytozome v7.0 (chr-ID Gm16; pos 36431894 to 36432892)
gtggagtctttcgtgaacaagtatttctttgtttctttttatgttgaagctttatttccaacttccaagacatttgctttcctgcattatgattcatcctggcattttggtgtaccaattattcagggatgctagcatcacagaatacctgcccttttcagactatttttcacacgcagttagaattaaaatagtttgtctattatattgtattgtattttttctcctttttttcgtcttttttagtaattagtatatgctttatattgagtattcagatatatcgagtattcagaagatatatacgaaattcaaatttgtattggagacctaatcttttggtccagaagacattgtgcaaggatttcaaaagcaaataatccagcttcatgttcaaaacaagaaaatgtcaacaaaattattgcatcctaacaaattataaggggtaatagaacaaattatggctagcaggaattaaaaaaaggaagatgtttttaatgtttcttgtggccatgcttgaactaagtacttgttttttattgatctgtcctgcttattgctaatcttttgtctatggttgacaatgaaataatgtgtttacataaattctttaagttgtcctatgatatcttagttcatactggagtaacctatatctgcacttatctcacttttgtgttaatttgattccttgaggtgcaacaagggggtccttgaagacagaaagcagaatacataaaaccttcatatttttataattgtctctgttcagtggtgaaaaatgggttttgctagtgtactaaaaagatcgagaaatttattttggtattcttagaaggtcccttcttttattcttgaaatagtgccaacgttagaaacattcaccgtttatggatctggttaactattcaatgatatggactcctgttattgtagaactgtgtcttattacttgttagtgaatatatattgtttctctctgcaggtatagagcagaga

SEQ ID NO: 19330 - DNA, 384 bp, Glycine max
  Intron number 4 from transcript Glyma18g46390.1 (locus Gly ma18g46390) derived from phytozome v7.0 (chr-ID Gm18; pos 56141300 to 56141683)
accttataaagatatcagagcaacttggcagcacaggttagctatttcattactttgagatgctgtaatgttaaaaacaagcaggaaaccactttgagaaaattgattttagtgtttcttttcattacttgattaattccatcatatatttattctttccttattcttcttgtgttctgatgtccaaaaagggctgaagtctggaattatgtgtgcttatataagcttataataattgttacaaagtttccctttacattatctgctttcttcttcttacattatctgatttgtggttgagttattaacattaaagaagaaaacaaagaaaaaaccaaaaggatttatcttttgattgccccaatttgtctgttgcagttacca

SEQ ID NO: 19331 - DNA, 626 bp, Glycine max
  Intron number 2 from transcript Glyma18g40610.1 (locus Gly ma18g40610) derived from phytozome v7.0 (chr-ID Gm18; pos 49285647 to 49286272 reverse strand)
ctggtttttggaagcttgaccaacattttccttaagttctttggctagtagttgttaatagttttctaattgagagaatgatatacttaaccatttaaaatgatgactcctgttcactttgatagtttaattatattgttgcttctatatatctgcgttgcagttctttaaaagggatgcggattaattggattatcagctgaaatttgtctacaagcttctttttatcttatatatagaatactatacctgtcgtgtcttatagaaaagatcaaaataaacttctgaaaaggttcctataaatataaccagaggtaatatgatatcaaagcttcttttcacctactcaattgtttgttgagaaacacaatctagaacctcaaggtcaaaatccctttgatcaaattggaaattaatcccattactcagtgaccattctagcaaacaatgaactgttgttattaagataataaataaaatcaatgtcaaccatcccatctagtgtgttacttattactagtaataggcttattagtatgttgaatgaaattatgtttgctctttagaattaaagatctagcatatatgacacaaatctatttgttttaggacgttgacctgggaaa

SEQ ID NO: 19332 - DNA, 459 bp, Glycine max
  Intron number 1 from transcript Glyma18g02710.1 (locus Gly ma18g02710) derived from phytozome v7.0 (chr-ID Gm18; pos 1736080 to 1736538 reverse strand)
aactcataagtttggctagattcaagaaacaaaaggtatgcatgcttaaacctaaattttgtctaataaaaaatgagtaaatgacgaatttaatctttaaatttgtatctatatgtcattttagtttctgaaactaaaaaaaccttaaataaaacccgaaactaattagttttctcatttttcttcctaaacttttattattattattattattattattattattattattatgacttaagtactgggaaccaaaacgagaaaaaagacgccaatttgaaggactcgaattaaatcataaaaaaatcaaaatttatttgactcttccataactttggggattaaaataacactgaaatataaactcaagcactaattcatttaaaaaaacattgaaaatgcattgtatgtacaatacatcaaatcaaatctaatttatgttattattacgttttgtag

SEQ ID NO: 19333 - DNA, 907 bp, Glycine max
  Intron number 1 from transcript Glyma14g39210.1 (locus Gly ma14g39210) derived from phytozome v7.0 (chr-ID Gm14; pos 48323300 to 48324206)
ccaacaaggtgggaccctttcacaaccccaggtcagattttaaatctatctcactctcactttcaacaattcatgtttatgcttcagattttagaacatttcaatcccaacaatttaaaaaaaagtattttttgttgttgttgttgtgttatgatggggttacaattttgaggatgagatttcctctggattttgggtgccttgcatctttcatcccttagtgttgttctgatttatgtgtaatgaagattcaatgacctcttcatcttgtgctgtggatttggattttggaacctgttcaagactttgatcagtgaaatctagttgtttgagtgatgaaagggattaattcttcactgtggatgaggaagaaataaatgtggctcagaaactgtgatatttgttatgaatactttctatttcactgtaggaaactcaaaaaacaagagattttagtttcctttgtttcaatgtcaaattcagaaattgtaggctatgttcaatggaaatttagaatgaattcaagcgatcaggctggcagagttgacctttaaattattttaatataagacttaataccttcataatcaagtaatgttctaatgcatcccctctggatttttacctctaccattccatttccttttattcaagtttgattattctatggcctagaaagaaagtgcaatattttttactgaaagactactaaatccattaatcttaatgcctgtatataagaatgtatattcgaatagtctaatgcgagtattaatttctaaagcatagttatcataggcataaatttcatcctcacaataaaatgactttattaattctttgtgctttcccgtttttcttccttaccacagtgagacataccgatatttcgatcttcccttttgct

SEQ ID NO: 19334 - DNA, 557 bp, Glycine max
  Intron number 2 from transcript Glyma14g21580.1 (locus Gly ma14g21580) derived from phytozome v7.0 (chr-ID Gm14; pos 25268064 to 25268620 reverse strand)
aattttctacttttcctccaggttgttggtgtattgtgggtaatatcttacatctgtagtttgttcaactttttgactttgatatatattggtgttcttcttcgcttgtctctccctgtgttgtatgacaagtaccagaataatttcaattttcatggctagagttcgtttctccatgtctagcactatccaattttttccaacaaggtctttgatgatttttgcttctgtcatgagtgactaagccttggttattgttggttcacaaagtgtttgtgaaaagttctcatagaagacagattttgtgtttcttctattttgtcgatgtaagcttctgtctatggtgattaagcattgtttaagctttcgccatgaatggttaagcattggattgttgtttggcttctgctcttgatggttaagccctcttgcttctgccaagtggttaaactttgaggtataatttctacttggtggttaagccttgatagtttcctggattaatgttttgagcttttgccaaatggccttattgattttgcttgatggaagttttg

SEQ ID NO: 19335 - DNA, 546 bp, Glycine max
  Intron number 2 from transcript Glyma15g04360.1 (locus Gly ma15g04360) derived from phytozome v7.0 (chr-ID Gm15; pos 3048554 to 3049099 reverse strand)
ctagtggccgtactactggttagtctttcttgtactggctatgataaacaagcaatgctctgcaaggtttaattttccatcgggaatatgaccagatattgaatgtagaaaaataaaagggtctattaaggacatgtttgattctcttctcactttttggttttaaaaaatgttttctacaacaatttcattctattcaacaatcaatttctcaccccaaaaaaacaagtgttttaaagaccataaaacagaaatagctagaagatgtttttattttgttcaacctctccctcaattgcacattctgctctatgccttgcacacccctccaccagttttctaagcaacctagtttagttggattttgaaaactaaatacagtttttgaaactcaattccaaaaactttggttttctccctaccaatttatatctttttaatctgacttgaagtaattgagctagcctggttgaggttgtctagcttggctggttgcccttatgcttgttacattaatttatgtaggtattgttctggactctggag

SEQ ID NO: 19336 - DNA, 616 bp, Glycine max
  Intron number 2 from transcript Glyma17g16600.1 (locus Gly ma17g16600) derived from phytozome v7.0 (chr-ID Gm17; pos 13336189 to 13336804)
aacaccgccagctccttatacaccaccagctagtatcatatctgcctttctctcttctctattgcttaccaagaaatctttccatcatttcattattgctttatggtaccaaaggggtttagctcatttgattgagtatggtgtatgagttcttgtaaatcccttagtacctgtcttcgattcttaagaataaaaaagaatctcattgctttgtggtgatggaatgattggagatttgaattcttagttcttttctatcatttggacaaaattcttaaattgaatgtaaaaccgacatgattataaataataaaaaaaacaattccactttccgattggctaaaaggagaaatggtgaattggagatgaaatttttgagtgagattcctttgagactctgatttgggtggaatgtgtggatttgagatagctggtgatatggttttgaaattggccaatttctcatccgggtctggcttaacattgaaaattgagcctatttttaagatagattgaatgctagaacctttagcatgttatggtcatttatttgatacttaaaattatttcatgactgctaggtgtacagagtcaacttgtctgttctgggtgtaga

SEQ ID NO: 19337 - DNA, 648 bp, Glycine max
  Intron number 1 from transcript Glyma14g06590.1 (locus Gly ma14g06590) derived from phytozome v7.0 (chr-ID Gm14; pos 4827040 to 4827687 reverse strand)
cttggaacttgatctccgtattcagcactccgaaggttttcgccatttgcgtcctcgttggagttcgttcaagctgattcggaatccgaggtaggtgttttttttcttcttctttgaagtggaattcgtttcgttttccgtttgttactgatttggcttcaaatgctgatgcggttttgaactggaatggatcgagcaggaggagagtgattgcttgtagtgttactgagccacataatggtagcgacgagaaggtactttcttcaggaatcagcttgctctctctttaactgacattaagcttcacaagttggagtttgatatgatgaagacttttgacttgagttgaaccttgcaaaattgttcgaaattccttgcatgataatattttgcaagcttccaagagacgaagtaaaattaaataaagaattaatgccttttggtcctagagtcaaggagcttggttttcttcgtacaagattaataggtttgagtcttgtgaatggaaaaaatatggactagggagctttgaggggttctgaccaaaaatcaaatcaaatgaataaaatttcttgccttaaaaaacaattgttatgttgaaatcgtcatcaagcgggggtcaaaaaggcaaaagttgtcagttggaat

SEQ ID NO: 19338 - DNA, 465 bp, Glycine max
  Intron number 3 from transcript Glyma19g36970.1 (locus Gly ma19g36970) derived from phytozome v7.0 (chr-ID Gm19; pos 44236471 to 44236935 reverse strand)
cactggcctgccgaacataccatcaacggccgcaggttaatttcccttcatcacaaccacttcatcatcttcttaatttctttcttctcaaatataaataatcgaaatgtttcattttaaactcaatttcttttttaactttttatgaaaagaaattcgtttatccaagaatatataattaactaaccatgactcatttaggtggtacatgtttgattctccttaaattagtttgtttgctgataaaaaaaataattcaggttcaaatatataaaattgtcttccatatatagaatatacatgtcatctacaatatatatatatatatataattaactaccctcagtacatgatcttggatcgagctgcgctgcagactaaagtgcgtagtactgtatagttgatgatccatattgtcatcgatcaaaagttctaattttcgtttttaatgatcattatataggt

SEQ ID NO: 19339 - DNA, 459 bp, Glycine max
  Intron number 1 from transcript Glyma15g18930.1 (locus Gly ma15g18930) derived from phytozome v7.0 (chr-ID Gm15; pos 15831889 to 15832347 reverse strand)
cctttgcaaagcgtaggttcagggataggtccaaggtacgttaccttcaatccattttctttatataaaacttcgatgcattttttggtgttgttcttgaattagattttgaaattttactttggtgattggcgtaataaaatgaaatttatattctaacagaagaatagtataaaaagcacgtacaaaaattgtatttatagtatctttggaaactagaaggaaggaaggaattttgattgagatgcagaaattataattatttgcttttgaaaatcacatccaaaatgtggaaccagacacgttgttaattggtgtaataatttttgccttttttggtttttcaatttaatttccatgaatggctgcatctgttttttaatttcatgacatgggtttgtttttgttttggctgaaaatgaaggaggcattgtccaaacaagccgttaagttagccaa

SEQ ID NO: 19340 - DNA, 237 bp, Glycine max
  Intron number 1 from transcript Glyma20g39400.3 (locus Gly ma20g39400) derived from phytozome v7.0 (chr-ID Gm20; pos 46711822 to 46712058 reverse strand)
ttcgagaggtgttgtttataatttcatttgattttgaaaaatgtttcttagacaacccttgagagagaaaggaagagatgagaaatgagtgattgatgatgtagcgtgataagaagagagaaaagataattgttggttgagtgtaagaaacttttgtacgtggattcatcatcaattagttaattatgctatgctatggcaggtaattttgtacagatcaggattggtaacagctgc

SEQ ID NO: 19341 - DNA, 730 bp, Glycine max
  Intron number 2 from transcript Glyma19g27230.2 (locus Gly ma19g27230) derived from phytozome v7.0 (chr-ID Gm19; pos 34497476 to 34498205 reverse strand)
aagaatcttccctgcttctctcctctctgtatccagtaagttgttccaaactttgactctctttttattaataaccaatttgttctcttcttccttcattcctcatcttgtatcgttgtatgtgtgtgtgttttcttttctcctcccatgatttgggtattttaattttaatattcttgaataaagcatatttgaattgaatccaccagaattaactgtcttttctgccccacacatgtagatgctgcaactgtttttttttttatttcttttttttattattaaccttctatttggccagccatttacaatatctttgagaatatattgcaaaattatgtttgagacaaaagtaattttaccaacggattaggactcttgcttttgcattgatcttattttcatccattgaattcgcattggaacacgtgctacaacatttccatctacaaaccaaacatcacttaatggtcatgatgaaaactgtgttcagatgagggttttttcattcccaactcactttatttgagttgaattccatcacttttatactgtaaaaaaaatgtgccaactatgctcatgtgaagtcccatcctttctcccattcattattacctcatcaagtccatatcatcattaatgctagtgagtgagtcaatgtcttcatattatcactgtttgccagtgtcatggacttaagttgtgaaaatgaatggttggtttgtgtagg

SEQ ID NO: 19342 - DNA, 655 bp, Glycine max
  Intron number 1 from transcript Glyma18g09930.1 (locus Gly ma18g09930) derived from phytozome v7.0 (chr-ID Gm18; pos 8779692 to 8780346)
acaagaaaactcataccggtgggtatccgcccgaatccatcctgactttaatggataatacccgagttaaccggatataggttcgggttcgggtttgagttcgggttttccccgataatcaaaggttgggtacggatacgggtatgagattactagatctgtcccgaacccgaacccctcccgccacttaaaatctttaaaacttttgcataatttaatcaaaagacatagaatttttattactcgttaattttattttagaatttttacataatttaatattattttcttaacgatttttataaacacatgcgctatgataaatttatagatatataagtggttaaaaataaatgtttaacaatcaatttattttttctaaaatcaaatttttaatatttttttacaaaaaaaaaattatttttctattttgaattgggtatgggacggagtcagggatacccgatacccgacaggtacccaatgggtacggggatgggataataaactttaacccgtcgggtatcgggtacgggtatggggatatgttagggagtcgggataagggattgtggagacaatatccgtactcgccccaccccattgtcatgtctacttattgtttctcgtcttctacgctttacagtatacaacc

SEQ ID NO: 19343 - DNA, 540 bp, Glycine max
  Intron number 1 from transcript Glyma14g12130.1 (locus Gly ma14g12130) derived from phytozome v7.0 (chr-ID Gm14; pos 10882667 to 10883206)
tctttgaatttgaccagaaaaaggtattatttgattatcattttacatttttactggggacagagtgcaactaaagaaataaggtaaatagaacagattaacttattccaatagtaataattttatctgtgatatagtgtgtcagagaaagtatttgggataccttttgtgatatgatttgcatctttaacagagtccatgtagtatcagtatatattaaatattagtagaatttattttgaattgttaaatataatttagatgtgtgttcaaatttatctcatccataaattttatattagaatgtgtatcatagtatgaaaaattcattgtggtagattgtcaaacgggcacataatcattgaagtgaaagaaatagatacattggattataaaatgtttattttcatttatcacaaataaatcgaaccatatataagttcattgaagaagcaaagcacagagattatgagtagtttgattgcattttgatattaagataattgatttctacaattttcatcatgcttacagcaatca

SEQ ID NO: 19344 - DNA, 890 bp, Glycine max
  Intron number 1 from transcript Glyma19g29180.2 (locus Gly ma19g29180) derived from phytozome v7.0 (chr-ID Gm19; pos 36752033 to 36752922 reverse strand)
agagaaccagtctcctactctctctcacccacaaggtacgagactctctcaccgcctttctctccctctccctcgttcctatgttctcttaagtttcacgatccctcccacaattctcattttccgtttctctgctttcttctttcttctttctacacttcaatttcactccgtaattctcctcagatccacacttaaacgtaatgctcaacatctttgaatgattgtgtcggtgctagatctgttgctatttgttgtcgtaatgcgtagatctactctggatctgaattgattttgctcttatttcgctcttttttttttcctgtaactctattcaaatctagtatttcttgaaatgaaaatcattcttctactaaatcgtgtgaacttctcttgatttgctaacactgctttgtattagttgtttatgctctgtgtgtgtgttttaacgtgcttctgctgaatggattagaaatgacttgtgtgacctttcattcaacatagggaatgagaatctcgctttggggtcttccatgacgccggtgttattgccaatttgtcattatctcctaatattgttgcatgtgttattattggttgaaatttattggaatcttatttaataactgagtttcacttataattttgtatttttttaaatgaattttaaactaatggtggagtgtgttagtaggagttagatagagagtgcgttgctagtactcatgcatatgatagattattgctatgatctttgaatattgttacatgtgttattacggagattattgccatgatctatggattttgttgcatgtgttattcgttttatttatggagagtggacaagtgagagctaatttggagttttgatctgttgcgacagaaaa

SEQ ID NO: 19345 - DNA, 797 bp, Glycine max
  Intron number 2 from transcript Glyma14g40360.1 (locus Gly ma14g40360) derived from phytozome v7.0 (chr-ID Gm14; pos 49319596 to 49320392 reverse strand)
acttatccaatcctagtcgaaaagaaggaaaagaggtactttccctctactgatttttgtttctaaagctgagttaatttggttgggtggtaacaaaatacatattactctcctgaaacgtagagtaaacacatttttttctaagatcttgtgtgtaaattgaagtcgagcaaatttattatacataataacctgtgattgggtaactgtgtaaaatatttttacagaacattctaaccaaattcttttttaaatttgtaagggactttcttactgtaacaatgttttgttaggaaaataattatgggttaatgataagcatgtttgcaaatgtataaaggatcaattatgaatgagttggaagatcggtaaaactgaagattaattacatatatgctttctactgaagatatgttagccaaattatttatgaaggtggagaacctgtttgcatcctgtaaactaatcattgaggttagagaccttaataagaacttgctctgatgttacatattgatcattttgaactgatagagaactttttggtggaattgtcacaagtcaaccctttacagttaatacgaaatagttatggttgcagttttttttactgataattgtcaaattataagcagaataaaaccaatcaattgctgcttttatttgagctcaatgaaagacatctctcattctgttatggagcctttgcattggaaatttgatggtatgcaatttgattaatgatgtctctccttttcataggacttccagagaggctccttttggggaagagctag

SEQ ID NO: 19346 - DNA, 352 bp, Glycine max
  Intron number 1 from transcript Glyma18g51070.1 (locus Gly ma18g51070) derived from phytozome v7.0 (chr-ID Gm18; pos 60037036 to 60037387)
tttggctcaagccaaagttgtgctccctcccaaaagtaagtccttggcttgtcttaataatgattatttgtagtcctcttttgagtactatgatttatttttttaaaagaaaattgtcatatgaataatgatttgtagagttatctgatttgatgctggttgttttttctccaacagttttcgttatttcagttttctgctctttttcttttcttttttttccccctcattgaagattgaactttccccccccctacctttgattttcttcttttttgctaacattttatgattgctcatgagtgtctcttttgaatttgataacttttgtcatcagggatttataggaata

SEQ ID NO: 19347 - DNA, 898 bp, Glycine max
  Intron number 2 from transcript Glyma16g21620.1 (locus Gly ma16g21620) derived from phytozome v7.0 (chr-ID Gm16; pos 24763257 to 24764154)
ctcaacttcgattcgcttgctgtcgttttcaataagtattgttctcttcttctctgtttctccaacgctttttagtttggtggaaggacagttttttttttttaacgcgctttttttaatttctttttcaagtttctttcaaaacgtttctttttttaagagagttaagttgcgattgcgatgttttacgtcggtattgccaaaaccacgggctaatagctctggtgtgaataatgaatatgaccaccaatgattgcgatgtggttgaggaagtttccgaaaccatgttttagggaaagaaaatagtaagtaaagggatattagtcttaaaatcttaggcctttcaactttcgtgagaaaccttttttgttacgagttttgttatcgaggtttcactatgtagtgtgaagattaggaaatgatagtaagtgatggaatgttatttgtttttttttttttttttttttactttttacgtttttttttttttttttgcaatttgactgaaaatgttttatgggcaagctgtgttggtttaaagttggttgagtgagtgtttggtaacaaattgagaatccacgttcactgtaaaatcacagtaaaatcaacataaaagcaactatttgttatttctagaagccacgttgagtgcaaatcaacgggttgtcaaacacatgaattttagccgtgtcttgatgattttgacaggaatatgctacatttttattttttattttttgttgattgtaggatttcttgtaattacatgtgtggaaatgttatggctttgtgtttttgagaattattgctagtcataattaatatggtttcttaatgtgctatcgtttaatggacatgcgcaggtcaagcagatttgccaggttgcagaacattcagt

SEQ ID NO: 19348 - DNA, 819 bp, Glycine max
  Intron number 2 from transcript Glyma16g33220.2 (locus Gly ma16g33220) derived from phytozome v7.0 (chr-ID Gm16; pos 36204984 to 36205802)
ttgtaggcaaaatttgcctttgaaggaatcaagtaagtcttgtatgtggattttgtggtattgattttcaatatccgctttatggtttgagcttctattaagaaactgagatacgagctgatcacataggagtatccagtactctctcagatttcatgcctgccatgaaaaaggttgtttggtgttgtagagtaacctttgactagtcttctcttcagttctttaaaatattgcaatgcgataatgttgggattggccagggattggccaagtgcatagaaatttgtcaacaagaatttactattaattgtgccatacacgtctctctctctcttgagtcaactattggtaaaagagaataactttttgttttgaatttaaattagtatccgctgttgaagttgctgctttgctttattctgtctctttaagaacttgggttgggggagggggtgtgtgtgtggattctttattctgtgttacacttcttttttcttttgagaattgccagcattgttctcttgtggaaactatttataaattataactgaagttatataaaacatctcctacttcatttgctttattcttgctgtatatatctcttaatttggtctttttaagttaagacggcttttttaatcaaacaatttattttggttttgacgggtttccttatcaaatttaatttttatagaatatatgttgttgtgttgtctcttgctttgccttttgaattgcatttcgtctgttgattgagttcctttctttttcgctttaacagaatcctgagctaacttgtattggttctgtattcaa

SEQ ID NO: 19349 - DNA, 1047 bp, Glycine max
  Intron number 1 from transcript Glyma15g39740.1 (locus Gly ma15g39740) derived from phytozome v7.0 (chr-ID Gm15; pos 46567101 to 46568147 reverse strand)
tctctggttgaagctacaagaactggcttcaggaggtaataagtttctttcattttagcaattttttacatgaatttctgagttattttcttttcaagttcagtaatagtgtaacagtaagtcagtaacactctcaggtactgggtctcttttttgttcatcatcatcattatcattagtatgtattgtcacctcagcatgtctattaccactcttatttaattgaatttcataatttttccttaaattattagatggagtatcacagaaaaagaagggtatttaaattaaaattatttgaataggagtggcaatagacattcaccagttataaaaagacaaatttgtttttgtaatactttaatcaaaattagagtttcatctatgtttacattttatgcaaatgtttattatgtcagattgttgagatgcgactccgattgtaattaaaaatagcataaaaaatatcttaagaaatgtataagttttctccttataaaagctcatgtcttgccctgtatgttataataaatgcatttgttaaccagtgtccttgccctgtatgttataataaatgcattagttaaccagtgtccttagagtacgggtttaggagttaaaaagagaaaatatttatagcagagatcataggagcgcgtaaaaaaattcatgagtagagtaattttgcacatcctaataaaaatctctccttttagttccttaacctaaccaatgtcctaagggcacttgttagcatttgccttgaattatatatgtatgtttggaaaagtttagcctgagccatatttcattctcaaataaaacttgtcacataattattttgtaagaaaaacatttaactatggatggtttatttttattcagtaaactaagttccttagttgatcatctacatagcaaaaagttttcaacaagtgcttctggtgttgggttattctatccaaagatttaactgagcttgagtaccccctttggttgtttggacatgcagtctatttgattatatccaaggcaagaacaactaca

SEQ ID NO: 19350 - DNA, 941 bp, Glycine max
  Intron number 1 from transcript Glyma18g52940.1 (locus Gly ma18g52940) derived from phytozome v7.0 (chr-ID Gm18; pos 61371719 to 61372659 reverse strand)
tgctctctcattacgctctttcctccgatctcaggtttgattttttcttcatctctcttcatcttattattcatctcgatctttttgcttcttcgtatcttgtttttgtttcatcatcttaataataattttagtgattcacattgttgtgctcttttgtttgatgcttttctcatcaaactttgcatcacgcgtattgatctaagttttgtggggggtttgaatgcaaaccaccatacacgttatggctattccttgtccgatgctattgttaaggactttaggctgctcgacatgtgttttctaggttttctattactattctgttatgttttttgtgctattacgataacgcccctgctttatttaatttgtgatgcgttatggcttgtgtcctgatttagcataagatacccacccatagactgatatatgaaatctttgggaataacaatttatgagcttggttttccattgttcctgatatatgactgggtcttttttttttattgtttcattataatattgtgtttaggacttgccttgagtttcaatcttgtaattttaactattattttttctggatttgaattgtaggtgttgtttaagcttcctgtgttggcttggtatccttgcaagttcttctgtagcagattccaaggtgaaggtgtcacgttaaagtttctttcatgtttgaacaggctactatccatttgggagcaactgagctgcttggattgtatttttcttcttctagaaaaaattacagaccctcaccacccagacttagttgtatgaacggttggccaccttccattatccttgaaggagattgttcaaggatacaggttaccttagaggctgaaatcacagctgcgtataatttgaattccagcatttgctgcctctgaatatctctggaactttgtaagtcaacaaac

SEQ ID NO: 19351 - DNA, 619 bp, Glycine max
  Intron number 1 from transcript Glyma16g02070.2 (locus Gly ma16g02070) derived from phytozome v7.0 (chr-ID Gm16; pos 1596831 to 1597449 reverse strand)
ttcaaacaagaccctctctgccggtaataataactataactattctcctttccaattctgttacactctgcctttggaacttcaaatgtgtctctcatagtaatcttgtggttcgacaggggcttttaggtttaacagaataaccaatcaaatctttccaataacgaacgcacttttacgtttagctaattttcgcatttggttttcatagatttagctcaggggtttgtgtgttgctgaacaaaccttgtgcgccaaacatggaagaaaaaaatgtttgtttagaagtggatttcgtcattttcacactaacggtgatttctgacgaattggatttttttataattgttttcagtggtgctgttccttacgaaagtaagtggcacgaattgcactgagcatgggtacaaaagcttcttttaaaaaaaaaaaaaaattgcagagaatgtaaaacaaaatttgacaagtcctaaacttgacattacaggaaattgccaacaggcagcagatatggtcacaattgcagtatttcaagtatttctaatttcccccattctctgtatctgtcaagtatgtaataacagttatttttgttcctattcttcagttcaaagttgat

SEQ ID NO: 19352 - DNA, 956 bp, Glycine max
  Intron number 3 from transcript Glyma16g29030.1 (locus Gly ma16g29030) derived from phytozome v7.0 (chr-ID Gm16; pos 32934752 to 32935707 reverse strand)
cattggaaggtccagagttagaaactctcagggtatgtgattagcttctaatattctatcaattcaaatctagttgtgagatataatataactaaaataattaataacatagatcatgcaatttttggaaataaaaaaattagcctccatttccaaaagatccaaaatctttttctgattactgtcttgtgtcttaatcttaaatgaaacttagtctaacatgcaagtatatttatttagacatgagtgaatcactctgatccatgacttaccagaacatagctagaaaaactgcttatgggttaagcactcccgacgctcgctattttcattttcaagactcgttatcaattggtattagaactggttgtcaatgtctcgaaaaagactacttacagatggattcaccataaaggctatagagtgcatctgataagacatcggcgctcaggggtgctgccatgataaggtattatgatagagtgcatctgatggtattaggtattatgaagtacttttgtctcacattgggcagtataagttgtttggtggagtacttaagtagctcggttcttattactttcagtttttaaggtgttttccaaatcaaatttcttgcatgtaagaactttttggaggctttataatggttttgtggtaaaaagagaagggaaggagaaaaaagtggtgggtttgattctccggccccactaacaaaaaactaataattaacaactaagatttgcaaaaactaagaaccttttgtggacatatttcatttgcatgaaatcaacaataccataatttactaattgaatatccaaattttacggaatttccctttcttttccctaaaatttcctaagtttgattgtttgtgcatattgaagattataacattttgttttcctactctaacaggcttcagaagagacagtgcttcctcaggacaagca

SEQ ID NO: 19353 - DNA, 975 bp, Glycine max
  Intron number 1 from transcript Glyma20g11600.1 (locus Gly ma20g11600) derived from phytozome v7.0 (chr-ID Gm20; pos 16340214 to 16341188 reverse strand)
agcttgatccaagtaagttcaatttctttaggttattttgttatgttttttaaaatgtctttaaattttttcaagaagaaagtatttattttattaaaaaaatatattttttaatattaatatgtttaaagtatttcttaacatatatcctaaaaaaatgtttatttatttataatatgattttatcaaatatcggcacgtataataattttcccacaataatgtgatgtgctactgttgtccctcgacggaacaaccaccagtttatcggtcagataacgaattaaataatttatttatttatttttttaacaaagagacagcctaaagcttagagtagaactcatcatcccaattatgttaacaccatgagaactaaaaaccagcctaagtatgattaaagaaacagaaaaaacaatcacagaggacataaagataaaacagtcaagaaaaacataaattggataaatcaaaatttattattatgatataatatacatacaacaatttataaataatttttgtgtgtatttttctctatatcattatgacatgtaataaataatgtgtagaagagaagtagacacaaaataactattgtatgaatattattgagcaaataatatttctttcaaaattatatatataaaaaaatgagtgttcatgtagataatttaaattgatctaccatcccaatctatttaagactattatttaaatagtgtattttgacttttaaagtaattggtcaaattcttgaaataatgtgccgagatagttatatgataatgtaatatttttttagtaattaattctacaaaatcagatagtatattttttttatcaacaaatgaattgtattttatcttagaaaaataaactttacaattctctatcacgtgcttttactttccttaccctttgttttctatgaatgaagaaacaaacttagagagaaaaacaataaaaggtaat

SEQ ID NO: 19354 - DNA, 659 bp, Glycine max
  Intron number 3 from transcript Glyma17g11440.1 (locus Gly ma17g11440) derived from phytozome v7.0 (chr-ID Gm17; pos 8588356 to 8589014 reverse strand)
atcagctcctgtctgcctatcgtatcctgtctcttgattttaactattttgtgttccttttacttgtctggcagggtgctatatctttagcttttgtagtaattccttaattttgataaaatttcttatgtttgtttgtaaaactatatatgatccttgctgtaatagtgtaatcatctgttttgtgatcaaacattttattaagagcttagattttgaggcaaaaggctccagcacagaatatcttcctggtgacttttgagttgacacaatgccgtaacagtaaaatttctattgagtggtggcttttgggttttgtgccaaaatgcttgaaccttcataaaaaagtatatggaagttaaaatatgttcccatgttatagttttttttttgttcaccgaatgtattaatatcaatctctgttgttaattttatgaacaaaacagtgaagctttcttgttgatgatttaagtttgcaaatgtaggccttctatcaatgcttaaaattaaaatttgattaaactcaaacgccatggtttgttatggcaaagaagttttgttcctgctattcttatagcaattgtactttattcttgtaactatatccctattttacaatatcctatcttcaaaatgggtatcctccctaacacaagtag

SEQ ID NO: 19355 - DNA, 436 bp, Glycine max
  Intron number 2 from transcript Glyma17g11440.1 (locus Gly ma17g11440) derived from phytozome v7.0 (chr-ID Gm17; pos 8589112 to 8589547 reverse strand)
attctcaaacttacaccctcagagtggataaacaggtaattctttgacaggttataatctttcttcacttgttatttgtcgagaagattttttgtttctgtatgtataacttgcttcttgctctgcctttctgtagaaacatgctaaccggtaaaactgattaagggtctgttcgatttttcaaaagaaaaaaaatctttcattaaaattattaaaaagaatatagtaaataaggtttttcaaaaaagcaaaagactaaagaaaatagttacttcattgtttttctcaaaagctagaaagagtagcttctgaggaagttcctagtaaaaattacctctttaaaagcactttttttcctgcaacactgcaaaattacctagcaacttaaagatttaacgaatttcttctttcctacaactttttccctgttctgcag

SEQ ID NO: 19356 - DNA, 599 bp, Glycine max
  Intron number 2 from transcript Glyma19g44920.1 (locus Gly ma19g44920) derived from phytozome v7.0 (chr-ID Gm19; pos 50221886 to 50222484)
gaatcagtgtaactgtatccttttgtgtgcccttaggttttgcgttaacgaattgtgagtgaatgttcgaaataatttaatttctttgttttgggttatgttttctagtgttagtttagatttaattcaattgaagaaccgagtaattggtattaaatcaaaactaaaaaaaagtttctgtgaagtaatttttattgaaaatgtggttccaatttaacctgtattttcttgttgagattcatttgtaaacaaattaaatactgagcaatgtggggttgcatttatttgtttcaggctttcggattatattttctattgatggattacatattgaatcaagtgtagtgctgggtaattgtggttaaaaaaagatgaaacgtgcatatttggtggaagtgggtgggatgattttgataacattttgtttgtaaaagtgggtctaagctaatacgtgttttttaactgggtttttttggttttcctgggagagaaatagtgggttttaaggtttagaataaatgaatttgtttggatatggcgagttgctccttaaattgtaaataggccgacaagatcagcaccttgttggaaactgcaaa

SEQ ID NO: 19357 - DNA, 837 bp, Glycine max
  Intron number 3 from transcript Glyma20g28500.1 (locus Gly ma20g28500) derived from phytozome v7.0 (chr-ID Gm20; pos 37440564 to 37441400)
tacaggtaaatttgcttattctttatctttatcgcattcatctatgataacaataaactgttgagttcttggttcttgagataggaatttgattggcatgttcaatttgagatgtgaattgacaacaaattgtgctcatttcttgtttaagacaacatgcatcttccaaaaaccattttatccgacttaggtagaattattataagcaataaatttttccaatgtgtgtctgatcttattctgctctgagtaggattagttgatagaggctacctatggtaaaaaaaaaaaaaaaggaaattttgctcatttgtgtactgcaaagttgctttaatatctgatcatcaaagggtacagctttcatatatttttgcaggaaatcaaatatgatgtcataatgaataaggcttgccatatctggctaatttcatttttgtcttctttgtatctagtttttggtcttaattctcaatggttaataactattcccacccctgctcctaaaacaacaaagattgggaaattgtgaattgaaatattgtaagctaataaaactctattcgttttctgattttagtcaaacataaatggttgttttgttataatatagaaaatatgatatgtgattcttcaattgtagttaacgatgttctaccatttttactttaggatttaaaaaaaaatggttacgaatctgaaagtatgttatgctaatttgcatgtgttttagattagaagtattatccctgaggctgaaagggtgtcaataaacccaaaaagatcttaaatctagttgcatggtgttgtgttgcaggggtgagagagcattttgcagca

SEQ ID NO: 19358 - DNA, 764 bp, Glycine max
  Intron number 1 from transcript Glyma19g36250.1 (locus Gly ma19g36250) derived from phytozome v7.0 (chr-ID Gm19; pos 43595238 to 43596001 reverse strand)
gggtaatgcaacattactttttcgacaattattattgttcttcttattttcctgaactaattattattgcaaaattctcctgaaattgctatgtctgattccaaactttgatatttttgttaacattggagattcttaccgcccttgatccttttgttgctcaattttgattaccattggataatttgcatttatggtctgtttttgttttattaaggagcttatatcatgtggtgtgtgttgtttagttattgctgctttgtgtggatccatgtccagcaaatcttctcatggctttttccgatatgaaaactttttttttctagtatcagacttgtgtagggattgtgctgtgtgttttggttcatttcttgacactacgttctaatggtgtttgctctaccaactactttgttgacgatgttccaaaatcattttttgagttttggtattgcattcactagaacattaattgaattttgtctgttcattttgcctagtgggataggactattgtcatggtgttttaagatcaatagaatgtggtttatttgtttccatcaacaatagtggtttatccttttagaaatgatattcatagaatgtcgagtgggatataggactatttgttgttaaatgtcattattcctttatgcatgcagattgcaaactaatataggactatttgtttttaaattttcatatgaacccatggagttagaaaattaaatctttgtcttttctgacttctttcaggaagacac

SEQ ID NO: 19359 - DNA, 423 bp, Glycine max
  Intron number 2 from transcript Glyma15g04830.1 (locus Gly ma15g04830) derived from phytozome v7.0 (chr-ID Gm15; pos 3386762 to 3387184)
acaaacagatcgatagaaccttcgcatttgacaaggttctctgcttcttgcttcttttttttttttaaaaaagaagaaattgtttggagttttgaatacttgaattgttgcgggatggtaaaattgaggaaaacattattccgatgaactgaagactcgagttaggagagagaaaattcattaaatgtgcgatcagatttccagagataacaacgttcgggaattaaattttgaatatgaagttctttaattattatcacattattatgtacctactctcgtaatcatgatattgataaggaagaccttacacgtttttcttttatccttgttatcggaataaaattatcctgtgtgattatgctgattttggtttgttttggcgtaggtgtttggtcctaactctcaacagaaagaactgta

SEQ ID NO: 19360 - DNA, 715 bp, Glycine max
  Intron number 3 from transcript Glyma19g01940.1 (locus Gly ma19g01940) derived from phytozome v7.0 (chr-ID Gm19; pos 1593802 to 1594516 reverse strand)
atagcctcgtaattcaagattgtcttagtgaaaaggtgaaaaaaaaactcataacttgtccttttctaattaaagctattgcaattttgatatgaaataaagtattttacttccatatcataaattccttgaattatacatgattcattaaaagtaatgtaggattttaatacatatatatgacatatgaggagagataatcttagtcataaacctatacatatagatgatgattagaattgtttcagtatatcttttaataagtgtacatgtttacaaaattgattttaaaacaaattaatttcggttaaaagtgtttttcaagcaaaataatttatatttagatgtttttatcttgaaagcaaaattactataaaacttaaataaaaatttcaacccaagacaaaaactactactttttgtagtcaaattgatgttgtaaggcaatcgatttcacctaacaaaatccaaacatctatatttttatataaaaaaaaaaaacaagtttaactattgcagtgaaaatcaattctcatcatttccactattagaccaaactcgctcattagtcttaatcataactattcacagatttactcattttgtctcatgctctattatgccacgcatacccacataaagtattactgtttttaattctatttgcggcattaacagtttcttccaatttaaaagccaggtcccaaactttttg

SEQ ID NO: 19361 - DNA, 120 bp, Glycine max
  Intron number 1 from transcript Glyma19g01940.1 (locus Gly ma19g01940) derived from phytozome v7.0 (chr-ID Gm19; pos 1594862 to 1594981 reverse strand)
aggtttcgatttttttttgtttttgtttttcttctctctctctctctctctagttcaacacatgaagataataggagtagcttaataatttgatttgggtttactattttgtgatgcaga

SEQ ID NO: 19362 - DNA, 980 bp, Glycine max
  Intron number 1 from transcript Glyma15g27730.1 (locus Gly ma15g27730) derived from phytozome v7.0 (chr-ID Gm15; pos 30313332 to 30314311 reverse strand)
gcttctgcaaaaaccacacccaagtttgggaaaaggtaatgtctcttttccctctattttttggttttggtgttggtcctaatcaattaggaagagtcgaaaaaacctgaataaaccaaacagcagcaaccagatgctgtttgcttttttattgctgcacttgcgtttcaattgtctgcataatttctatactggttgtgtttttggtacttggttgctgttgttttgttataatttgtgtgctgggaattgaatcttcctaattggtattggaccaacatttggaatcggaattgggttttgttcagttttccctctgtctagtcatatttgtgtgtcccataagcttaagatagcattcaaataacttcaatatgaattttatagtggatggttggattagtgtttctaaaatttaagttcgggttaaactgagttggcaaaagtaaccaagttttgtttttacataattgagtttttagaatgtgcaagcatattgcttttacagaactgagttattatgcaaaattccagtgtgcaaatgtatttttgggagtaaccaaacatgtcaaaactgaatttagtctgcaaaagtacattcaacacttaaaaatactttttgaacgtttaaccaaacattaattagtactattgtgtttggtattccattctcatgttatcggatcagtttcctgcatctaagtaatagatactcactgatcaaaaaaaggaaaagctactctatgtaatttctcatattcacttaaaggtttaaatgcagaatcaaatagaggcgtaatgattgactttcaaataaaacatagcaaatgtgcaaagtattgatgtcaatttgttttttggttaggcacattggtattttgtgaacaagtctaacggtggattagattcatatggtttaactaaatttttctttttttgacgcagcaacagcaatccgggaagtacaaaattgttgctgt

SEQ ID NO: 19363 - DNA, 557 bp, Glycine max
  Intron number 2 from transcript Glyma16g03340.1 (locus Gly ma16g03340) derived from phytozome v7.0 (chr-ID Gm16; pos 2845458 to 2846014 reverse strand)
aaattcaggtaccccgtttatggtttgttctcgatttttatgctggaaagtagtacttttgaatttaggcaaaggaaaatgattagggaaccggctaaatgaacaatgtctctctatgatatgtgcactagtgtgggattgaatatggtgctttatttctggaagagatgagattgagaacacaaacaaatagagatgttgaattataggtcaaatattaactcttggggtgcgggtgtgtgtgtttactttactattggtttcaacttttaaatgcctcattggataagtaaagacacttctacgagatattcattcaacttctacgtagaacttctactagaaccttgctagacaagtgtttgaaaattgaagcatttatgggtttagaaatgtagactgatgtccataagaatctagtgacttgtcaaagtgaggccaaaaaatcattaagaagatgtttgcctccaaatcattttcaatattttttaattatttatattatgtttattttagctcaaatattttcaatgtcccacaggtcttttcacttgcag

SEQ ID NO: 19364 - DNA, 951 bp, Glycine max
  Intron number 1 from transcript Glyma16g22260.1 (locus Gly ma16g22260) derived from phytozome v7.0 (chr-ID Gm16; pos 25685631 to 25686581)
tgtgcagcaccagccccaaactcctgctcaatcctgtaagatccatctcatttcatatcactttatatttatttatgcttgcttttgattattttttttacttcctttactagtgctaattggtgtgagttaagattatgtaaccaggttgtggctatgtgcttggtatttttattatacttgctttactagtatcgattcatgttagtggagaagtacgcattttctaacagattaacagccaaaagtattatgattacatttggaatggaattttgtgtgagctaggaagttttgtgttgtcttgggggagaggaattgaggaaacttctttgataccctgatagcattcagcaacagaggcccagacgcattagcagaaaacccacagattgggaggaatacgttcactagaatgttactttcaggcaattacagcaccaataaagcattctgttatatctgttatagtggaattgcattatccctactttctgttttagtggaatacgtagtggtacaggtgtcaagcaaggattgggtctgttagcatttttctgttccatgtctatgagtttagactagtatggaaagaagagaaaagaagtaaaaagttggtgagcgtgtagcgaatagaagcatgacatgtgggattaagggcatataaatacagagactggggttttggcgctatttggcactcataagacatcctaggcagcagcagtatctatctattcacttctttgttgtacttccaactcactcatctcatgtactaccattttctctttctgcaaatttcaaaatccatgcttgatatacggtgccataaactaaatgtttgaaatgcttttgtttttgttttgttttttttttttgtatcgctttcgctcttctttgtgtgttgtgacaggggaggtaaattaaattagggtttgtgtttgtgtg

SEQ ID NO: 19365 - DNA, 451 bp, Glycine max
  Intron number 1 from transcript Glyma15g23350.1 (locus Gly ma15g23350) derived from phytozome v7.0 (chr-ID Gm15; pos 22536849 to 22537299)
tttcatcgctaggttggacattaagcttgaagcttgtaatcaacgaaacgaaatgtcgaaacacaaccatcaaaatgaagccaacttcaatttcatgcaaagcatggttcaatcagacagtgttgctccaaacccaagccaactcaatttcatgcaggaaatctctcaaaatcaattttctcttgctcctatgaggccacttaatgatggtaaccaggtagcatcttacctacttaatcttgacataggttctagttctcaatcccaaatgcttaactttgatccaaatcttatgcaactaattgccaagaatcaaggggtgatggatattactaatcaagttgttgtgcctctggcttgtgcaaatcaaattaatgctttaggaaattttacaaatcaacatgatgtgcctgtagatttgactaatcatcaacttggtgagtgtttggac

SEQ ID NO: 19366 - DNA, 1032 bp, Glycine max
  Intron number 1 from transcript Glyma19g39250.1 (locus Gly ma19g39250) derived from phytozome v7.0 (chr-ID Gm19; pos 46000020 to 46001051)
cctagctcgcgttctgctttcgtcttttacatcaggtgcgaaaattcacagctgatctttcttctctacctctaattaattattttccatgtattgttctcgcttcactgcttcctggttgccattgtcatttcaaattcctatgataaacgttttcgtttaattcgagtttgggtatctggtgaggtgtatcgatatctcttattactgagtttacgacttcatggcggaattattgttttgtacgtgacgttgaatttgtggtgtatgtggtcatcttttgttcttgatttgggtcccatagctttagctgaattttgtatttttgaggttagtgtttgtggtttgtttggtaacccgagtgttctaacaaatgctatgttggatttgtaaaattagcatacttttttgtcacttattattataatgttccttaatcttcatttgcatttttgatcttgggaattcatgtactgctcaacatcatcaagtatttggtgggtattattttgaactaacattcatttagtcctgctccaacaaaagagtctggtgtatgttgtatcctatgaaaatgtatatctgctgaagtacattaatttctttataagaagactaatctgttattgatattattgctggactggttttcagttttccttgtatgtgtagcatgtaattttttttttacctaatccccgggaactagttttatgtcttcaattttcattcgctgttgggatgtattctgttgaaatttgaaagttgaagagctatgatttaaggttttggtccttttggatttggtatgttattcctgatttaactgtcacggtgaccgattagctgtgaaactgtgaatgcttttgttatttcctgtactttggatgtctttaattcaaggtttttagtcttgtggatttcgaaggtgatacatatttacctgtcacgaggaccgattagctgtgatgcattaaacccaattgttttccacattcatctcataataactgttgattgtgttttagcagg

SEQ ID NO: 19367 - DNA, 612 bp, Glycine max
  Intron number 5 from transcript Glyma15g09590.2 (locus Gly ma15g09590) derived from phytozome v7.0 (chr-ID Gm15; pos 6868833 to 6869444 reverse strand)
agtctggccaaaaggcacttgctcttgttagaactgtatgtttgcctaccctttgatatccttttcattcagaatcgtaggtttggggtattactggattctcctccacattcatcagcactgccattaatattttatctccctgtgtattcaaaattgaacttagtctgtcagttacatgttagtttggattagttagattcaattattttgttactatctttaactgttacttactttttatatatagcatactgttattatcggttaatagattgagcacattcatttcactccaatacaaagagtgatttatctcttttttctcatctttcttctggtttctggagttttctcaactttccctcaattcctccacggattcttgatttcttataagttatcagattatggaggtgcagatgaatgtggagaagctggtaatatcgggtatgaaatgagtcatttattaaatactatgagttgattgtaaaaaagtatcaagaaaataatttaatgaacaagggaagggttcttttaatcctaaagtcttatgttgattttgattttgagcattgtgaaacttgaaatgacaggtttataaactcccta

SEQ ID NO: 19368 - DNA, 980 bp, Glycine max
  Intron number 1 from transcript Glyma20g30720.1 (locus Gly ma20g30720) derived from phytozome v7.0 (chr-ID Gm20; pos 39427906 to 39428885 reverse strand)
agttaggtgctgcatctgctgctgcttacgccttggtaatcttctttaccattattattaatttgctttatatatatataatatattttcactaagttaacatgaaaatgattgtaaattaatgtatgtatgcactaaagcatttatttgttcttaattaaccttttcatttcgacggaaaattaaataaaatttatttaagaattgttttcataaaaaattaaattctcataatattcaaacatttaattttaatttcagcatattaattatttttttcaattcatttggttatggatatatacgtttagttttatggtcttgtggttctgaaatttcaaaaaactaaaggttgattacaaggacaaaaatttagatgcagttttatagatgtttgatgtttgatagtagtattatttttcattttgatatgtttttgaaatatcatatttttcattttaatacgtctttttattttaaaatcattttataatttttgtattagtaagttgaattagacaaagaatttaccgtttctctcatttctaatttaaatataagataattcaaatttaatggcaatataaagtatttttacactatcaattgattacaatgttatggataataattttgtcattttttctaaaaaatatagtatttagaatgatttatgattaattcacattatatatatatatatatatatatatatatatatatatatatatatatatatatatattaaactcatttacatatgacaagggcatgctagacttctgtgtgtatttctcttttgatactcattaaataattaaatttatttaaatatttgtgaatagagaggtaacaattttattataacaaattatcatcacacatataagttgtcattttcaattttcaccgtatgtttgaaaggaaacaacttaaaataattgaaattttgttttgttgcaattggtttgatatatagc

SEQ ID NO: 19369 - DNA, 398 bp, Glycine max
  Intron number 1 from transcript Glyma17g10280.1 (locus Gly ma17g10280) derived from phytozome v7.0 (chr-ID Gm17; pos 7701632 to 7702029 reverse strand)
cgtggcaggttcttccttcaatccgttctctgctccactcgattcgtttcgtttccgatttctctctctctcctcccgctcgccgatttgattttcactgaatgactacataattatgttgtttgtcgatgctatcttttttctccggtgcttgatttgacgattgccgttggttctggagctgtgtacttcgctgagagagttatctagctgtgttttttttgtgaatgtttctatttccgtgtcttctggatttcaaggagacttagggctttttgttttttcttttgaattgtgtgagctctgtaattcggtgcagaaacaaaatttcaaacgtgcttgcgtactgtacatgtgtttattactttgttttctgcaggtggctgataatttacttc

SEQ ID NO: 19370 - DNA, 661 bp, Glycine max
  Intron number 1 from transcript Glyma19g44300.1 (locus Gly ma19g44300) derived from phytozome v7.0 (chr-ID Gm19; pos 49763101 to 49763761 reverse strand)
aagtccctcgtcgctggtggagtcgccggaggagtgtccgttccacttctcaattgcttctttttcttttcttttcttttcaatcttagtttttcaggaaatttcgatgctaatgttaataattaaattttgatgcttcgttgtctgggagcaatgaagcactagttattctgtttcgccaaatctctcttaatggaatatgatctactaaacatacgtgctactgttcacctgggaagttgcaaaagtaggtttctgttaatctccctgtacttggattagatcaattgttaaaaccacaccaattttggggttctggaagaagcttcatttgagagccaaattattgaaatctgtttccactggtggaatgaattcagtgtcttcctttatgcctttaaaactcaccaattttgttttattaatttatgtatgtctgccttactagcattgtgttactgtccaatatgagaatcggcttaatttggactccattgctacagttatatgctcatgccaacctaatccaattttcctggaaactatttcttactgataatttcaatgtccctttttgcattatgtcaggttttaattgatttgaacctttttttgtatatatgcagatcacgaactgcagttgctccactggaacggttga

SEQ ID NO: 19371 - DNA, 436 bp, Glycine max
  Intron number 1 from transcript Glyma20g31760.1 (locus Gly ma20g31760) derived from phytozome v7.0 (chr-ID Gm20; pos 40353275 to 40353710)
gatccagaagagccgaactacctcccgctcaggaggtacgtaaaatctgcgatccatcaactttgcatcttcgttttccagattcatctaaacaaaacgattttcttcttttttaattaaaaaaaatcgcccgaacgatattctaattttctgtattgcattggctgaaaatgaatgtgttttgacctatcagtgatggtgcttcttagtttattccttcggaaaattagtgttttgatttgtttttatttatgaggattttgtttttcttggtgagctctgaggtttctatttcaaaaatatgcaaatttttgtgatatgaactcttagtagaggtgcatctgctttattatatgtattttctttttttgtaaaatagcatgattgttgtgtttggaagtgcagaatattgaaaaattggagaaagttgtaaacg

SEQ ID NO: 19372 - DNA, 627 bp, Glycine max
  Intron number 1 from transcript Glyma20g27950.2 (locus Gly ma20g27950) derived from phytozome v7.0 (chr-ID Gm20; pos 36941062 to 36941688)
ttctctctgtgtatttccctacctctcccttcaaggttagtcgatttcttctgtttttcttcttcgttctttccatgaattgtgtatgttctttgatcaatacgatgttgatttgattgtgttttgtttggtttcatcgatcttcaattttcataatcagattcagcttttattatctttacaacaacgtccttaatttgatgattctttaatcgtagatttgctctaattagagctttttcatgtcagatccctttacaacaagccttaattgttgattcattaatcgtagattagggcttttttcattgattacttcagatccgttaaacgtaaccatagatcagggctttttcatgaattacttcagatccgttaaacaacagccttattttttatacttctgtggtttttcaagaaattgttcagatccgttgacaaaaagccttattcgttgattctatatcgtttttcgagagatattgctcagatctgttagcaactgccttgtttgttgattctattgccgtggattagggttttttttcacgagattgcttcagatccgtacttaagattacgtaatggattttgattctgatttatctgtgattgttgactcgacag

SEQ ID NO: 19373 - DNA, 697 bp, Glycine max
  Intron number 1 from transcript Glyma18g07460.1 (locus Gly ma18g07460) derived from phytozome v7.0 (chr-ID Gm18; pos 6150169 to 6150865)
aagccaagaaggtttgtatcctttcttttttaattgtcttgtcatttccaataaatttcaactaataagagactatgttcaaaagagtgtgttcctaacatttttcatagtgataataatttattactgttaattttctgcaagtcaaattttttaggctgtatatacccttagtccattttccccaattggttccttattctttttactcacaacgtggtgtggtcctccattttcctataacatttctcgtcatgtttactgtaatcaattgttctcttatctgagaagagagtgaaactgtatagaaatgtaatttgccccattgagggaatgtgaaactgtagtgactaaatactaatatatagttccaagatttcctcaataaaacttgcttgatgtgtaatttctgtttatccaaaagcaaaataaagactaagggtgtgtatttgtttatctaaaatttgcttggtgatttaaatgtggttaaatagaccaaggaaggtaataggtataatggaacaaatatttattcaccacatttgatttaaaagatacatttacaagtgaatatagtttttaaataagtatgaatattgaattgttgactgtgattaaacagaatgatcagcattgtttcacagtcaagtaagtgtttacaggtagactcaagcttggcatcagacaaggcacttga

SEQ ID NO: 19374 - DNA, 744 bp, Glycine max
  Intron number 3 from transcript Glyma20g23410.1 (locus Gly ma20g23410) derived from phytozome v7.0 (chr-ID Gm20; pos 33297846 to 33298589 reverse strand)
ttgctatattttgtgctcaggctggtgcaagacgggtaagttcttgcacttcacattgacaacattcatttagttgacatgtgtgagtgattacttactcttttatttctgtaagacccatgctacttcgtattaacagagacatgtatcacatgttaaatgcattagtgttcataggaattactctctaggaaatagcacttattcttagcctaggaaatagtatccacttagtctctctcactctctctctatatatatatgtgtcttgctaaccatttctcttagatcattagtggttaagaaactaaaaaggaaaagtatttattgtataaattataggagagcataaaaaaaaaaaatatgagcagcacaattttttatctcccaataaaaacatttctactttaaattccttagctaatcccctgagggtatttgattagcattttcatatatatatatatatatatatatatatatatatatatatatatatatatatatatatatatagggatcttctacgtaaagactactgcggaaaaaacaattccatcccattccctctaaattcaacacatcccttttatcaattaaataacctggagctgtccattcttcttgtatcaacacatcctatttatttttaaattctctggatgattttgatttaatacttcttaaaaattgcaattgttgtcctgcgtgcatgacattgtgaagttttgtcatgccaggtgt

SEQ ID NO: 19375 - DNA, 236 bp, Glycine max
  Intron number 2 from transcript Glyma15g18600.2 (locus Gly ma15g18600) derived from phytozome v7.0 (chr-ID Gm15; pos 15487004 to 15487239 reverse strand)
ctctcaaggtttgtcaatccctgaaatatgaatttttacttttttttttcttgctgtttctctcatgtaaaaaattgaagaatgattggattcttttgtgtgtgttgctggaaagcaagttttttggttttgtttctgtatttgggtaattgtttaatgtataattatgtaatttgtgggtgttttgaattttgtgtgcagagcaagattcagagtctggctggggcgcattctga

SEQ ID NO: 19376 - DNA, 385 bp, Glycine max
  Intron number 2 from transcript Glyma15g39360.1 (locus Gly ma15g39360) derived from phytozome v7.0 (chr-ID Gm15; pos 45992528 to 45992912 reverse strand)
ctatttggtcaaatatgctaatgaaatgtgaaggcatttttttccttggtaaattctaccgtgccgcctttagttgaagggttttcaataccttcatgaacaaaccaataatataatgtcatgtgtactaattttttaattttaatattttattaaatatgatttaaaaaattaacatgtttacaaaatgatcctaaattaatttgcaaaatttaaaactaatttgcatttcatccaatctcgttgctcatgcattcttcgtcaccaccttttctccctctctgctgccaccttcactaccgatctcgtcttggtctcgactgccgccaaaatcaaagagacatgacggctctagcggcgccccaagaccgctctagtggcttct

SEQ ID NO: 19377 - DNA, 605 bp, Glycine max
  Intron number 1 from transcript Glyma17g29790.1 (locus Gly ma17g29790) derived from phytozome v7.0 (chr-ID Gm17; pos 32661335 to 32661939)
gaaggttctagagcacatagagagaaaaaacccaggtggggggtttcttcagttcttctttcatttttggctctctttttttctttttttgaattttttgggcccttttttgagacattatttatatttatccctttttcttattattggtggcactggtttgttttttgattgaggttctaatgtttttttgtttcttgtactatgtggggtttttctgttgtagaatgatgctatgtttttttttttttttttacattttattttctgtactgcgtatgcataagaatgattaagaatgtttgtagcaatttttcaatggtctattgccccctccctaaaaaaaacacttttttttcaccttttgcatttggggtttgatgcattgaagtgaatgttatttgctgtcaatgtaaattatgcctttgctgttcatttatgtgacatgcaatcaaaatattaatctttttctgacatgaaagtggatgcgttagattatatcggcttaaattgtctgtgggtattcttgattgattatttttcagattgtgttctgttatttatgtgagaaaatctgtggttttttcagtttgtgttttgagata

SEQ ID NO: 19378 - DNA, 1022 bp, Glycine max
  Intron number 2 from transcript Glyma19g37530.1 (locus Gly ma19g37530) derived from phytozome v7.0 (chr-ID Gm19; pos 44645411 to 44646432)
aatctgactgggaggttttattcaggtccttcatttgccctttcactcccttgcttagggtttttaactatttcgttttgtgtgccttgattccttgactacgtgttgtcattatttgtgattttgattctgtttgtgtgttgtgagttgttgtttgttgcaactgtaaaagtatcgcagggggagagctatgtgtaataactgatgaagatcccacattgacttgtgatatgcccaaaatttgcaatcctcacttcatgagttagcatttggggttaagttgggttcaaactcaaattttaagatggtattaaaccttgtacaagtcgttgttgttggacatgttggcctagttgttatcaggctgttgttgaccttcagtcctagaaactttagtgtgtaggattgggttagccgttatgttcaagatgtcctgtactcggcataaggtctgtgtgttggatatcttacatggattagtgatatggccaaaatcttatctcatgacttagttggctagcttttgggtttgagttaaactcaaacccaaatccatgaataacaatatgaaagccattttttgatattttttcagtttttgatttcttgtgtaaggaatgttaatgttcatttggttttcagggcactagattggagataaccctattggtttagcattaggtctttatcataaccatttttcttggaccttcttttagctgtgtcagagccttgagctttatatgatgaaaaatgcattttgaccaggttccttctgctggatttagctcctctaaagtgtattgtataattcatactatgtgatttcacaaagctgttgtgaattgtgtgatgactggaacagaacataatcatatgtagaaaattaattctctatataacatgcttcttttgaaatttctgttgaccccattcccaaataggaactttattttgatgaaatttataacttcatgattcatctaggtcgacccatcattgttgatttctctcctgttacg

SEQ ID NO: 19379 - DNA, 490 bp, Glycine max
  Intron number 1 from transcript Glyma20g35750.2 (locus Gly ma20g35750) derived from phytozome v7.0 (chr-ID Gm20; pos 43952885 to 43953374)
gtgacctcttccgctttgatcttcttctgtccagggtaaccaatgtaccctaatacccattttctgtttctgaattttgaatgtaaatttattatctttttgttgtcgtagtgttgggaaatgaggtggaggagttgaaccttttgcatgtgcatgaagcttgatgcttattcgtatattagaactagatagccaatacaagtttgttacttgagttgtagcttgttggattggtcacttgttctatgttgcttgcaaaaatcaaaggggtattttgcagcttagtaagacagaatactagtaattgctttcttttcatttgaaactgaaccccttcattatcaggattctcatcgtcaactttaacgtttgagtgcttagtgttagttatcattcctacaatttgttctaatatgaatcatggttcctttcttttgtttgatgccgatattaagctggttacttgggtcaaagatttctggcatctctg

SEQ ID NO: 19380 - DNA, 475 bp, Glycine max
  Intron number 1 from transcript Glyma19g38390.1 (locus Gly ma19g38390) derived from phytozome v7.0 (chr-ID Gm19; pos 45313067 to 45313541)
caagggtgctcagacgctccactctccaagaggtaatctaaactctaaaccactgctcaaacttcaaattaattattcgttttcgtcatattataatcgttcatgtaacaaaaaaaatatttattctaatataattgttattttgattttttaatataagattaattattttttatatattaatgataaattataaaatttgaagataaattgatgataatgtgaagataattttataattattatcttttatttttttgttattattttttttaatctgtgcagaacaatctaatctaagatcattattagggagaacaatctaatctaagataattattagggagtattgttttttacctcttaatatatgctcccgaaacaaggctatctttgtctcgtcttggagaacttacccagttacccatccaaacatgcaggttagaagacaaagtagcactaatcaccgggggag

SEQ ID NO: 19381 - DNA, 377 bp, Glycine max
  Intron number 1 from transcript Glyma17g14250.1 (locus Gly ma17g14250) derived from phytozome v7.0 (chr-ID Gm17; pos 11015810 to 11016186)
ttcgtttgaagatcgttcgcaagctcaaggacaacgtatgtgttcctcctaattccccttttctcaattcccattcttctaattttagggtttgtatcaaatgaattgatagaaaaaaaaaatactcaatgacactttacataactgtccattactttcataatgatatcaaagaattcaatttgattatgatttgtaattgtcagtaacactgtaacagtgtggcgaatttttggagcttcgtttaattgcccgtgctgtttatgaccttgagttcttgttaattcaataactagcataaggttgcgtgacagttatactgaattcaataatttatgacaggaagagttgcgacaacatattacctcaattgtgaa

SEQ ID NO: 19382 - DNA, 994 bp, Glycine max
  Intron number 2 from transcript Glyma15g06180.2 (locus Gly ma15g06180) derived from phytozome v7.0 (chr-ID Gm15; pos 4370144 to 4371137)
ttcgaagatctcaacgttacaaacacgctttggaggtttcaccctttccattagagtataataacacaggattgtagtttaacaactttttagctccacgagttctgcaaagtttattatagttctgtgatggtgaattagggataattttcacaaatggctaagatcaggtagaagaacaaaaatatctgtagaaggccacccagcagattatgcaaatgcaagcttttagatctttttctgttttaacaaattagagcatgttactgaatttccacgagtggttattatcatgattaagagtaaattatactgacatcgccgtgggtttttcgaaattcacactgataccctcttcttttttcgggcaataacccctcttaattgtttgaaatacattaccttgatatccctgttactccagaaaacacattaactttgtactcatgtaaagggttttttttttgtaaagttaaaacttaaaaaggaaaaagtttcgtgtgactttcgaagaagtcacaagggatgtgagcaaaatttgctctatattattaatagtttttgtaaggttcagaagaagaaagaaagatcttaaggtagttcggtttgcttatttctgtagtgcctataactgttggaatgagggtcctttgatgttttcaatactgagttaggcctttgggaaattaggccatctcaacactatagaagtttcgtgaagttaatatatttgaataatgttattcggatgtttgaatatattctgcatggttttatatatattagtttttgcctccaacaaactacaaatctctatcaattcggaatacttccattggctcctcggttatatcacagttttgtttattttctagtgataaggttgcatccaacttggaccactttattatgatttatgaatactgctctctttttctgttggatctatagctttgcaatttgtgactattgataattgcagatatcagagtgg

SEQ ID NO: 19383 - DNA, 967 bp, Glycine max
  Intron number 1 from transcript Glyma18g10140.1 (locus Gly ma18g10140) derived from phytozome v7.0 (chr-ID Gm18; pos 8946979 to 8947945 reverse strand)
cgtttggttttacatcaaaaccaataatcttcaggttccccctgttccattaatttttttgtgtgatgcttttgttagtattaaattcaattttatcttgtttggaagttgggtttcaccttgcttttgaaattttgtaaaatttatttcaaggttacttgggaattgggatgacagaatgatacaaattgtttgtttaatggattattgaagagggagagtgtgagatatggcttttgagctaagtggtttgttaaacaattcaatgagttttgctttaaaataaattgtgctttctctcttttgtggagtggtagtgatgaggtaggaaatagaaatagtgaatgattggaataaagttatcaatctattgtttggatattttttgaagatggaatgaaaaaaaaaataggtgtgatcctgtactcccgaatataaagtgaaggaaaagaagggtgtttgattgaagggaatggaatgcattctatcatgttccatcccatttcatcctattttaaacaattgaacctagcattatttcatttcattctttaacatcaatccaaacatatccctatatttggctaaggtatgcttccttgcagctttaatggtacattagtacctagcaaaatattgtgcacttgtatatgggttgaggcaagagaggaaatctcaagtttgtgttctgtgttttgtttgagctatacacactatcagcatactattccaaaacagagatctctttctgatgcttttcaactgttatatgatcttttataatacttaaatccatgtagttatataaatgttaagttataatttgtaaaatgcatatatccagttgttgagttggctatgatgttttatgggttgggtatatttattttgatatattgatatgcagctaccatgggctgattaagatgagttgcttctttaattgagcaggatcagaacaacaaga

SEQ ID NO: 19384 - DNA, 986 bp, Glycine max
  Intron number 1 from transcript Glyma15g42920.2 (locus Gly ma15g42920) derived from phytozome v7.0 (chr-ID Gm15; pos 50338480 to 50339465)
gcttcaaggttttttgggatgttgtgtttttgcaactcgccaaaacgcataattgcataagttatttcatggtatttctcttgcattgaatttcagttacacaacaatagaatgtgaatctgattctttgctagccttgtagttgattttgggtggtgctacaacacatcattcgcatgttcctattataaacaagatttgtgtcttcaagcaaaaatcgtgtcataggtaacatttgatcatatgtatatgtacaggccaatcaatatgtagattgactttttaagaagggttgacaaccgatcttaccatcatctttgtcattttatcttgtttctttaaagagactttgttattagttgatgatccctgaaattcttccttgaggctatagctttcttgtttgctgtttttctcccaatgataaaaaaaaaaaatcaaatcttatctaaaatctaaattatacattttctttttcttcaaatcaacattacatcgtactatatcctttgtcaaacgcttatgaattctaaacttaccttagcaattgtcattaggcataaaatgattatgtatccataattatttaaaaaaataaaattttgaagaaaaatacgaaagaattaaacttatttaattttaaaataagaaaaatctgaatttactcgaaaattatttgagaaattaaaatttcagagtctaaattagatggatgaaaagtgaaattataggtagtattagtaacatcttatcatcaaagctactttaattataatacaactattgatgaatgaatcaacgaagatctccaacggtcaaaagcatatgcttagagcgatccaatgtcggttcctaacgttccatttctcatttctcatttctctctgatccataacggtcacatttgcattcttcactatcacgtgcacacacatcatcactctcacttagcgctttcttggtttgcactcactcactcatctctt

SEQ ID NO: 19385 - DNA, 941 bp, Glycine max
  Intron number 3 from transcript Glyma19g02890.1 (locus Gly ma19g02890) derived from phytozome v7.0 (chr-ID Gm19; pos 2969656 to 2970596)
ccctcttaggaaacaggtttggtatttttctttgttgagtagtaggatattgatatatcattatatggttctatttttcactttgaaatcaaattcttttgcatcttagttttcctttgagcaatgtaccagataatttcaaaactcaagacccattatggattttttcttctgttttgaaaatgtgaaagtgatatttttgttttccttccacaaatattttccaatttttttggaaatttataacaaaacatgtgaaaataatgataattatgtcactgcatttcttacctcagcttgatattttattcccatactcactctacactaactatgaatcattcattttccgtgtgagagctataatttctcttctgctcctgtgcccttgctgtccagcagaatgtcttaaatgcaatgacctctcaatttcttcacccaactattccaaccctcccccaacaaaaaatttcagaaactgtgtgctctgtggcctgtgccatttccttaaattttctccctgacatacaagtttattcgagacgaatcttaattgcaaaatgattatatatatcatatatcttctgccacaatcaaaagcaaaaatgcaatatatatatttgttaatagaaaaaaaaaaaagcaatgccgcatagaattaatgtgattatctaatgttctcaacatggttcacatacacaagcttctcattctctctcataagttaagtcacgttttttttttatataatacattaacattaaaattatcaattaaaaacaacattaaataatctgttttagtagttgatggattactctagggtttaatataattttttaacattgcttttttttttttttgtggtgtgtctgcacactatgcttgtgttgtctttgtactcaggtggtcggcaatagccacacacttgccaaagagaa

SEQ ID NO: 19386 - DNA, 718 bp, Glycine max
  Intron number 2 from transcript Glyma19g37810.1 (locus Gly ma19g37810) derived from phytozome v7.0 (chr-ID Gm19; pos 44915122 to 44915839 reverse strand)
gctcccaggtaaatcattattttgagttatttattctagctagtcttcactttagagaattttatttcttcttttgagagaaaaaaaatcacagcatactcttggtttaattattaatttttaggcattgtattatttacaccatgtccagtttagactctttcctttctcccctaaattttgattaaacattattcataaataaaaataatcattaaaagtcataaaaacgtaagtaaattcaatatattttagaataaaacagaaggctcattgtgctcacattttcaatagtatcatcttctttttagtaggcttacttagatttaggtgggttaggtatacaattattctgggaagaaaattcaccttcacttttaggtccaacaattgtcaaattctaacaatagcccaaggaaataaaccaaagtatattaaacaaaagtcatattataaataattaaattttactaataagtgtccttaacattgattaataaactaaaataaaaaaaaatttatcctaaaaattattaaaaaaacgaaaaaaaatcataaataaaaaattttacatatcttaataatttgttaatcaatgtcataagaaaacttgttagcatttacataaataattttgcaacttaatcgtggcattcttaatttgcatgtatatatgtatgtagggtttaccatctttcgtggcctcagttgttaatca

SEQ ID NO: 19387 - DNA, 707 bp, Glycine max
  Intron number 1 from transcript Glyma19g02590.1 (locus Gly ma19g02590) derived from phytozome v7.0 (chr-ID Gm19; pos 2406587 to 2407293 reverse strand)
tgatatcttaaattaccaaaagctgtttgccataggtcagtagttctaacctttcagctgttttcactcaatgctttactttgcttttttctttccttcatttgttaaatgagtttgtggttgattgataaacaatttcattcaacttataattatcatcaatacctaaatggataaatcgttataattgaaggtgagaatccactaaatttgattagttggacactgggaatgcatgaattttccaaacatctatagcagtagagttcattatgatactctagtttattattttttttttatcttccaaacatcataagatatagtattcatatagagagccattcatttaatcaattttataccctctatggtaaaatttccatctttcatgacttaagttgtcagtattaaaacaagcaaaatagtatttacttaaaacagaattaatgcttttaaaaaatggcatttttagttaaatattatcatctatttcataattaaaaaatagcatcttctataaactactactactattcaaaccaagtcagcaaacatgttcttatataaatttatgattttgaatctaattggccattgcattatgcttagtttggtggttaagaatccaatcaaaatatcgttttttctaactgtcacggcatattataggtgccctgaagaccaaggaccttgtgctatcattt

SEQ ID NO: 19388 - DNA, 638 bp, Glycine max
  Intron number 2 from transcript Glyma17g02540.2 (locus Gly ma17g02540) derived from phytozome v7.0 (chr-ID Gm17; pos 1640977 to 1641614 reverse strand)
ccatatcaagtgatatcaaggttaaacgtctgcagcttagcactcaaactcattcatatgcagttatttaatttttttttgtttgtttagccctgctctcttgaagtgagctaagataacaaaattgaatatctgatctgattgtcttcatcaggacacatggttacttttgaactcttcctttcatggtagttaagatattaaccagcattgccatttgtgtgatggaaaatgaaataatcatgggaccggtttgtttaattgcttcatatttggtttgaactttatagaaaggtgaatggtttttttttccgtctcgacaaacagaaaaggttggatttatttagttgttttgtgtaatttggcttgggtaatatatgcttgaaactgttggctacttcccttgtaaatacatttatttgattgactttgcaaatggatcataaacttaattctcaaggtatttatgaggcccatcttgtggacctagttttcattctggtgccttagtgattgtaatgaagctaatacgtgtcattgttagcactgaaactttgttagtgtaggtaatttgacccaatatttggtttcatgcacaatggtgtttcttctgacttgatgttgtctgttatagggca

SEQ ID NO: 19389 - DNA, 835 bp, Glycine max
  Intron number 1 from transcript Glyma17g14290.2 (locus Gly ma17g14290) derived from phytozome v7.0 (chr-ID Gm17; pos 11050945 to 11051779)
cccgtcttggcaacaggttttttattcttcacaagcttggctacatgcattgccttctctttgtgaacaattctttcgtgaacacagtttttataagtatgaaaaaatggattttttgttatttatttattttgtacatcttgtacttttaagtgtctgtgcctgtatacaatgtattcacacaagaattaccatgggtttgtttgtcctatgttcaacaattaatgatccctgcttgttagtttggcttttccaaaattatattggaaggagcttagtccttaaaatactgtgacttcaagttaaaaccattaataatgttgaagaaggtaacggcattaaaaaccatgcttgaaacaaaggctacttgaggctgaagcaattgaatacttgtctggtttactaatagatatactaacatatatttataaatttcaagatagtaggagcttcttatctgttctcaaattctcgtctactgtttactttgcgtatgttaatttttcatacatgcataccaaatggtatgtataatttgaaagggaagaacttcattgacctgcgtaattatgttcaagctaaaatgttactccacatcatcggaactgatatttgttgaagaataataaaaattgccgttagttactagatagataatgataattcagttgaagatgttagaattaactaaagcaattacttgtttgatatgattggtacatgtctttgtgatcaagaaagacattcacatcaatctttgtgtataatggatttcaatatatggttgattgctgtctcaggtggtccaagattgctgccaggttacccggaagaa

SEQ ID NO: 19390 - DNA, 425 bp, Glycine max
  Intron number 2 from transcript Glyma20g34000.1 (locus Gly ma20g34000) derived from phytozome v7.0 (chr-ID Gm20; pos 42438088 to 42438512 reverse strand)
caggttcattttcgttttttctactttttcttttctatatatattctgtttattatgtttataaatgatatataggcatatttggatagaacctaagaagattaaatgaattgagcttcacttataagctaaaataaatttgttcacttaacttttgcagaagttttctcatctaacttctccaaaatttgaagtgcttaagttgattttagcttacgagagaaactcgattcatttgatcttatttacttctcatatgagtgtgcttagggagaagtttattcaaataagaccttaattatctactagtacgaagatttgtttgttgcaatctgcacgtggataattggtgccatgtaaatcttacttggtgcattgttgaaatatcaggaagcattgttgaaattggggttttactctggcga

SEQ ID NO: 19391 - DNA, 442 bp, Glycine max
  Intron number 1 from transcript Glyma15g31520.1 (locus Gly ma15g31520) derived from phytozome v7.0 (chr-ID Gm15; pos 34878616 to 34879057 reverse strand)
caacgagacagtcaaacactggacttataccataggtaattaaacttctaataactatattaatatgcaaattaaaatgggtagactatttttttctcttaagtttggatatatttttagtctctatagggccattttattacaaattagagaataatgattctgatatatgataatttagttttttttttacaaaatttgaaaaaaagcataaactaatttatatttgcttacaatcataaaaattgctgtttttttaagaaagagaagtagctgattctatgaaaaattattcaaaatgacctataattcaatcaaatttatattcttttccatttttataaaattaaccttatatgattattaattcatttattcatttttgtatcattatgatacaatgatcttattattgttctcgattgcttgtgaaacaacacag

SEQ ID NO: 19392 - DNA, 836 bp, Glycine max
  Intron number 1 from transcript Glyma19g32550.1 (locus Gly ma19g32550) derived from phytozome v7.0 (chr-ID Gm19; pos 40300511 to 40301346 reverse strand)
tctaacattactctcaaccaacctgcttattggtggttcgtacaactaacgattagtattacattttcatttaatcgtatgaatttttttttacccaagtatgtttgaactttgatgtttctgaacacgtaaatgatggaattagattattctgtaaagaaagtaatttttttattgataaatattagtttgttaatttggtaagaaagttagtagaagagattcaaacccaatatttctcctccctttattcataaaccctccctcaagaattaatagtcctaaaggtttgaacaagattgcctccagtagaagatgcatgtgatctatatctatctatatatataaactactaatttcagcaatgttttgtactgaggttatgtattgcccaataaattagttcaagagttaattgaaattccaattttatttgagcggaaggttgatctggtaagccaactccacgttgggtaaaaaaagacttaattctctatctgcaaaaatatactaaattctccttgtttaatttgaaaataatttattccctgattattccaattggactggaatttggagaagggaaaccactccctcttttttctttcaattctcttcatttaaaattttccaaaagaatgcctgccatttttctaacttctgcttcctcctccttattcctcatccaaacgtaacatatagcataatggtagaaatgtgtaacatttcacttggtaaaatttactctgcaacttcttaaataaagtacttcccacagcctaactaacagactatctaccaacttgcagcttgcacttggtgcggagtaacaacat

SEQ ID NO: 19393 - DNA, 770 bp, Glycine max
  Intron number 1 from transcript Glyma16g00560.2 (locus Gly ma16g00560) derived from phytozome v7.0 (chr-ID Gm16; pos 218988 to 219757)
tttgaagaaggccggtgctagtggaatcagggccggtatcgttcattcttcgccaccgtcgatcacttttttgtttttactttgtattcagttcattttccgtgtttgctttaatttttctagggatctggacgttttttcttttacttctcttggccacgagtttttcaactgtctcaaatctctcaagtttacactcgatgcgttgctttgccggcctttttttttctctgttatatcttctcgtcgcattccacaagacaaatagttgtagaataagcatattaggtctcggcatgaggcggaagggaacatttttgtgttctcgattctcatccttaagattttcaccgaactgtttttttggcaattttaactatccttttcttgtgctccttggtatggaatgatgagagatctatacagtttgtgtgacttgagatcttgctttaaatgttagaaatttggtggataaactgtctgctagtttaattttttctttttgtagcaactcatcagtagggaaatcttttctttgatttattataaattagatggatgcttaactctaatgattcggcctctgattggcttgtttacttatatgggtctcttttctttaatttattttatttaatctacaaaatagttgttgcctaatgttaatagtttttattttttgattcattgtctccctgattgatcatgtgcaatagtgactaaccatccaaaattatatctgacaggaagtggaggttattcttacttgt

SEQ ID NO: 19394 - DNA, 585 bp, Glycine max
  Intron number 2 from transcript Glyma16g00560.2 (locus Gly ma16g00560) derived from phytozome v7.0 (chr-ID Gm16; pos 219784 to 220368)
ataacaagtgagttatacacgattctgtttggttttggaatgactaatgaattgaatgtatcgtggatttttccttttccaagtgcatcccttgtgctcctgcctctttttttttatataaatattttatttagtttatggttattttacaagtgcagaaagtaatgtagttactatacttctgtagactatagattgagttctatgttgaaccttaacaaatccaaagaggggcattcatgtgtatgttctccccttcattcctgtataatccatctttctgctacttatatccaaatttatgcattgcacaaaatcaaaataaaaaataagaaaaaggtttctaaagcttataccatcctaaccttttcttttctttcctttttgcttcacacattttccaagggaatacttcagcatggacacaaaaaagggcgtataaagatgctaacaaactttccacatacaatttattgatatgagttgcgtataatatttaagtggattaaaatttctattcttatttctaacacatttgcaatttcaacagtgattgttggagagattgccaattttgcagcttat

SEQ ID NO: 19395 - DNA, 884 bp, Glycine max
  Intron number 1 from transcript Glyma17g17200.1 (locus Gly ma17g17200) derived from phytozome v7.0 (chr-ID Gm17; pos 14023572 to 14024455)
cacagtggtgaaggtacgttatatttaattgtgtagctacattccaaattgtatataataaaggaaattacatatcagtcatatgagttaggcttattattcattatagttgaactttcttaattgtgtggagtccaccgttttcgcccacaaattttaaaccagtccttgtagctctttatgcatgataatgataaatcactgagcattaggagatttggaagaaaacagtacacgttccttaaatagatatatacatatccaatatggaaatatatatctctcaacctaagccaatatatattagaatgcactatagtaagagcttaactatttgacttttcattatgatcgagaagccaaaagcaaataaaattgtggtaccagcttgtgcttgccctaaccgccattacaaacagtaaattaattttacatatgttaaaaaataactcttgctcgatcccagacagttgaatcaatcattatttttttgctagaagccaaatactaatagaatagtaaacaatgaagaggtgaaaacaattaccaaataaaaaaagctttgaatttatttataagcttaaatatttgtaaaggggactgaaaaatcatagaattttattctaagttcttaataaaaaaatttattattttgaattattgatatattaaaaattttatttgaagttctttatcatcaattaaatgatatgttaccttacaaattaagctttttaatattattaagggttatgataatgatgtcattttatcacttaattgacgacagattcaaaaaaaacatattgaattttagttttaagtatattaattttaataagttgttcgatggtataaattacagattgatagcgccaacaggc

SEQ ID NO: 19396 - DNA, 865 bp, Glycine max
  Intron number 2 from transcript Glyma17g17200.1 (locus Gly ma17g17200) derived from phytozome v7.0 (chr-ID Gm17; pos 14024551 to 14025415)
ggtcagtatcccttaatatacagtctagactttcatttgtaatttaattgcatgccataatcctacacaacctttaatcttttcctaatttgaactgaggtactattagaaatacgtttttgcaatttttttaaagaaatgtttttgcaattctattatttgaaagaaataaagtatcagaaagctaaaaaaaacatgggtaaatacattaggagtaaaccatcaattaccacacgatattataagaaaaattgtaagtaccaaaaccaaaagttatatcatcatttttactttctttgtttgtgttccttgaaatttcaaacaaggaagaaacctcttttttatataataataataataataataataataataataataataataataataataataataataataataatctttaacaactacagaagtggttttttttatgcagactacaaaagtaatttgatttcaccatacaccagctgaattgttaatattacaaataattgaacaaatttaacctttaactttcgataactattacatgaaagtagtgtttatatgacgcaatttaattaatttaagtatactaatgatagaaatcaaattagtgaagattgtaatgttattgaatttgctcttataacataaaaagtcaaattgactcgtgtttaattgaaagattaaattaatattttaacttaatgttattataaacacttggaaaagattaacgaaacaacccgaactaattatttctcaacagttaacaataatctataagattaattgaatttgcaagtaactagcttctcgatgggtcactgttgactccacgttgcagtgttccacgtgacggaccagg

SEQ ID NO: 19397 - DNA, 883 bp, Glycine max
  Intron number 2 from transcript Glyma18g02080.1 (locus Gly ma18g02080) derived from phytozome v7.0 (chr-ID Gm18; pos 1237031 to 1237913 reverse strand)
ctcaccgacgaagaagctcagacgctagccaagaggtacgatacaacattcatttcttacttactctctgttagattcacaactcagatcagatctactagtgcttttcttttctcgatttcttcgatctgatttaacttgtttcttttcttccatcgatctgttttttttttttttttttaatttgtaatttcggtaaactcgttagtttcttcggcgtcttctgagaggtgatgcttatttgcttgagagaaatgtgatgttcagtatctagctcgttttaatttatttagttattttaaatttgtgcttgagcttgaaatggaatgcttctttcgtaccttaagcctgattaattgattgtggtaatcttattagtggttccacttttttgttgttagcctatgtttatgcgtgatttggtgcgttaattaacctttaattaggctttgtttggataattttcttcttaagcacatataaagaaaacaaaaggtgagcttaacaaaaaaaaagaagttaaaatgtactcaacttttcttataaactaaaatcatcttatgcagcttatctttcagagaagttacatgaaagagtttctataaaaaagttaagtatataagttgattttagcttatatgaaaagtttagttcattttaccttgttatttcttctcctatgagtgtatatagagaagtttattcaaacaggaccttaatagaaagtggttttcatatacatgtgctgcagtgtgtatttcttcaggacctactctttattttatgattaattagggctaggagatgttgcattcataccaatttacttttttaaataaaaaaatgttgaacatatccttccatttttcactctcagcaaacc

SEQ ID NO: 19398 - DNA, 654 bp, Glycine max
  Intron number 1 from transcript Glyma18g09990.1 (locus Gly ma18g09990) derived from phytozome v7.0 (chr-ID Gm18; pos 8811256 to 8811909)
acaagaaaactcataccggtgggtatccgcccgaatccatcctgactttaatggataatacccgagttaaccggatataggttcgggttcgggtttgagttcgggttttccccgataatcaaaggttgggtacggatacgggtatgagattactagatctgtcccgaacccgaacccctcccgccacttaaaatctttaaaacttttgcataatttaatcaaaagacatagaatttttattactcgttaattttattttagaatttttacataatttaatattattttcttaacgatttttataaacacatgcgctatgataaatttatagatatataagtggttaaaaataaatgtttaacaatcaatttattttttctaaaatcaaatttttaatatttttttacaaaaaaaaattatttttctattttgaattgggtatgggacggagtcagggatacccgatacccgacaggtacccaatgggtacggggatgggataataaactttaacccgtcgggtatcgggtacgggtatggggatatgttagggagttgggataagggattgtggagacaatatccgtactcgccccaccccattgccatgtctacttattgtttctcgtcttctacgctttacagtatacaacc

SEQ ID NO: 19399 - DNA, 686 bp, Glycine max
  Intron number 2 from transcript Glyma20g38200.1 (locus Gly ma20g38200) derived from phytozome v7.0 (chr-ID Gm20; pos 45850147 to 45850832)
gggtggtttcaatttttctattgtcactttgtgaacccacccaattgggtagacgcatccaattcagttattattagtattatgcctacaattggaagatgttaagaagacggaagagaactataatagcaaattagtatttgttgattattttgcctattcaaatatgagtttaatgacggatcaaaaaatgagtttaatatgtatcctttatatgacttattatagaagttaataaacttaccatggttatttgtgattggatgataacataaaatacctttatagtttatacggtatcatatgttgcctaatgtctttagatattcctttagtagtaaatattatttatttgtggttaccatctatggttcgatctggagtttaacatctatagctgccaatctgtgtatctttgcacgttaattgagggacctcctacagttctacgaatttgaattgttcataaattatatgaatgtcagttatttacactttacatacacctaagttagttagttatatatccttttgggacgtagactataagcttttgatgtaataaattatgattatgatgtcaagcggtgcagttccaatccaacatttcaactaatgtctaggtagttgttacatttgtacatttcacagttcaagtggcgtctagtgaagaaggcatcacaact

SEQ ID NO: 19400 - DNA, 558 bp, Glycine max
  Intron number 1 from transcript Glyma14g11710.3 (locus Gly ma14g11710) derived from phytozome v7.0 (chr-ID Gm14; pos 10254379 to 10254936)
tcccctccgctcccatcaaaggcgccacacaacaggttcgttcgtttttagttagggtttgtgaattttgttatcaggttatggttactcttcgatgcaatgctcaacgtagtagccgtcatacatattttgatgaaacactttctaaaaaatatatatattgccagttggaaattctatgaaaattgaatagtgtttttcagtgaataatattataatgatttatttgaagatttggtaggttgaagattagtgattgaatttgaagtttgtgattgccagtagaaatgcagtttatacagattttgatgacacttttttttataaaaaagatgcgttgccaattagaaatgctgtaaaaactaaaaatattgaaatagtgttttgtttgaataatagtatatgatttacttgaagatacgtgtttgcatgcttgtttattttattttggttggttgaagattagtgattgaatttggagtttgtgatttttttgttgagtgggtttggtttgttcttgtaggtggaaattcaagtgaggaagttgtattgtgtcag

SEQ ID NO: 19401 - DNA, 799 bp, Glycine max
  Intron number 1 from transcript Glyma18g50940.1 (locus Gly ma18g50940) derived from phytozome v7.0 (chr-ID Gm18; pos 59939307 to 59940105)
gaatttagtgcctctcctctctgtttacccttccaggtattcttcttactttatttttctcaacgcaaaaactggttggttcttaattatgtttcacttttcttcttgattctggctcaaagcttgcttttttgtcttctcttgttagtcaaacttagtcttctttttaatttgttgttttctgaattgttgttgggttgtttctgaatctgatctcgagattagtgtggggcaaaagtttttctgatatttcccagcatcttcttttttgtattgcaaattaataacttgttctacaaagattgagattttagggggtgaaattagatgctaggtgcatacagttctttaggtacttgtgtggttgttcgccaattagaattgaagttttacctcactaatttgtattgatctataatgcaaacttttactgtatgaatctgactgaaaaacaggactaaaaacacttgagaaattgtatctttgttttgtctgagattttattgtctttgtattttacccaatcaaattacgaaaagggaacttttgaaagatctcacatttattagttcagacataatctatgaacaagagtgtacctgtatgaaattcgggatcatagttcaaaaggaaaaatagaactgtctagggacattaggagaaaatatgactgatgagttttttttttcttattcttaaaaataattggtagattaagattattcttcctccttgtcatatatatcttactttatgtttacttgttatgttgtaaagatattgcagatacagcaagatc

SEQ ID NO: 19402 - DNA, 319 bp, Glycine max
  Intron number 1 from transcript Glyma17g04540.2 (locus Gly ma17g04540) derived from phytozome v7.0 (chr-ID Gm17; pos 3015242 to 3015560 reverse strand)
agaacaccatcgtcgatatcaacatcaccaatcaggttcttcttacttcttggtttggttccctcatgatgatttcagtgacatataaaaacaacaacaactactatgtagtcattattttgttttgatcagaaaactcaagtcctccactcagcatctatctgtttttctttgttctttttgtttttttttttttaatttaaatgcacatgcagtctcttacttatatttatgtttacaaggtctaaacctcatagatgtaataattctggtgaaaattgcagataattagggaaatagcgaccttaaagctcctacg

SEQ ID NO: 19403 - DNA, 921 bp, Glycine max
  Intron number 1 from transcript Glyma17g29640.1 (locus Gly ma17g29640) derived from phytozome v7.0 (chr-ID Gm17; pos 32343145 to 32344065)
ctcaaggtactaataagcctattgttcatcgtcattgtctggctgataacattgttgtgactgtgagcagatgaaattcttttggctttttatttttcttaaaaagtcacttttttttaataatcacttttagaaggctttcatgcatttgtttgagtttttcaaaataatcataagctgaaaaaaatctaaaatcttactaaaatcagaagctattatgaaatagcttctaataaaaatcaacttttttaaaagtgttttttatgattgtaaacaaacataaattagcttctttttttaaaaaaaatctctaaaacataatcactacattacattattatacattagaatcacttttttttaattattaacaaacgaacccattattcgtattctatagctaaaatttattttagaatattatatttaaatcattgcattgggaacttcacagcttgcagttttttctgcactgtagatgatgtcgatccatttatccatttgtcgcacttggaatatattgattttttattttttatatttcaattaaatggaatacttggcatttgactaaatattgagcattaattactaaaggaccgcccttataaaaataaagggtcttgaggctgtgcagagttaatcttgatcatttaatgttatatggatgatcaaaatttgctattctcacatctgacactttcccgatgcacttccaatatgtgtgtagttattgtttcctttattcccttctctcatggaacattaatttttatcggtttaacaattgttcttctgtaggtgtattaaactttatgcgtcctctttctttacttggacatgttcattgacttattggtgttaaactttctcctgatgtatatagactttgcaagagacagcaagatttgaagttgataa

SEQ ID NO: 19404 - DNA, 701 bp, Glycine max
  Intron number 3 from transcript Glyma15g07340.1 (locus Gly ma15g07340) derived from phytozome v7.0 (chr-ID Gm15; pos 5151696 to 5152396)
gaattttggttgaggttagcttcattgccattacacttgttgcactatttgttatcatcatcttgatcgtcatcgtcatgttcgtggttattaatacaaaacaatgatcataatagtgatcagatcacactccttttcacccttcacttttgtaatgcaaaatattgaggaatagttaattctgtgttccgtccaacacttgttatttgcatgatggcagtgatggtttttcctaatcttgttagaaacgcaaaaaaaaataaaaaaaaatgagagaaataaagaacaggtttgagtctttgagagatgttcttaatgtatgaatgagcaatattcgtttctactacttctacacctatgaatttgaggtatccttccaagatatgctaatactgaactggtttattggatcatgcccatggactaattgataaatattcagtcaataccttgattctgttctttcccgagaaacttgttggtctcttgggattaggttgttgtgggcaataccaatgaagctcagaagatctgaatgcaagttatgacatctgtgggaaatcaaatagtaatgtggttcacttttaagttttgccatgtaacctgtgcattctaaaatacttttgcactggttcacttttgatgtctccattaattgtttttcttaatctgacaaatattgcacatttagtaggttgtaa

SEQ ID NO: 19405 - DNA, 184 bp, Glycine max
  Intron number 3 from transcript Glyma19g39610.1 (locus Gly ma19g39610) derived from phytozome v7.0 (chr-ID Gm19; pos 46240338 to 46240521 reverse strand)
aatacattaataccaccgtatggaaatctcccctgttaatgttttttttttgctttacttttttgactttttcatcagctcttgcttgatttacttttctgatatataacttattgagtttgataccctgtttctgttttcatcttctttcatttttaggttttgccatctctaagagagaagc

SEQ ID NO: 19406 - DNA, 431 bp, Glycine max
  Intron number 1 from transcript Glyma19g39610.1 (locus Gly ma19g39610) derived from phytozome v7.0 (chr-ID Gm19; pos 46240842 to 46241272 reverse strand)
aaactttctctgtgtctcttcaacgcaacagctaggttttgtattgctgttttccgttaaataatttcattgttgcgattttgttttccttttctattgactcgacgatcgctttgttttggggtttagggtttattatttgccatctgcacagtattattactgaaaacgtgtgttacgtgtggaacattgtcagaaattatattgattctttcactgccctgttagggtttagtgctgattcttccactggtttattgaaatctttatggtcgtggtgtgtttagggttttatttgaaatctgcattcgcatgacagggatgagatttgtgatgtttctacgtgctagaagattggttttgatttttttttttgtgcgtgcgtggaattatagtatagcctgaatgttgttgatatttttgcaggcaca

SEQ ID NO: 19407 - DNA, 496 bp, Glycine max
  Intron number 1 from transcript Glyma16g30510.1 (locus Gly ma16g30510) derived from phytozome v7.0 (chr-ID Gm16; pos 34112401 to 34112896 reverse strand)
aaggtaattaatgcagtgacctatggttcaagttgaagaagtcagaccttaacatcatggctggactttgtgaagtgtccaaaggttcaagatgaaaaaatgaaaaaccttgagattgacttgatggtgtaagctatgatttagaagacaattttcttttacattatttttagttttgaatattgaaaatttgataatttaatattaaatttgatgaaataaaagacttgattttttcttaaaaaaatgttggacttttgtacgtaacaaaagtttaacggaaggattgattaaataataattaaaatttgataatttaaagaggccagcgtaaaaaaagaatggaagaatattttagtatttggcacaataataaaaaaggtaaaaaataatgaaagtgaagaaaaaaaaacaggcagggcagcagtataaataatagaagtttgatgatttatatgcagaaccaacaactacacttgttttctatatattcttg

SEQ ID NO: 19408 - DNA, 701 bp, Glycine max
  Intron number 1 from transcript Glyma17g13770.1 (locus Gly ma17g13770) derived from phytozome v7.0 (chr-ID Gm17; pos 10556133 to 10556833 reverse strand)
ctctcaaacagtgcaacgccgtctctgaaggtaactaaacactctctcgcactgttattctctgcgcgcttccatgttactaccaaaagctttgcttgcatgttttaggttctattgaagttgtatgctttagggattcaattggtcatgataattactatcttttcttatttttggttgatgcttcttttgttttttaccgcgttttctttgcttgctaacatgcgtgatatcgattaagcatttagtaaggtcttgtttggatgaactttttcataagttcttaaagtaggatgatttgtttgagcttaaaaaacaattttaaaataagtgttttttttaataagcagatatgatttgcttctcaagataaagaggaaacagtttttttttttttaaagtagaagcagtttaaacaaacacactaagaaaatagaaaactgcttattttattaaaataagtgctttttttttcaagaaataaatttaaacaaactcacccaaaataagaatgtaaaatgaactagcttctccaacagctgaagtaataagctgatttttttaacttataagagaaactaaatttattttaccttttttatatggagaagcttatccaaacaggaattaagtcatagttgtgtgtcttgtatatgttgttcattttctttttttatttttatgttcaggcatattaactg

SEQ ID NO: 19409 - DNA, 719 bp, Glycine max
  Intron number 1 from transcript Glyma18g07340.1 (locus Gly ma18g07340) derived from phytozome v7.0 (chr-ID Gm18; pos 6038199 to 6038917)
attcccctggcagttttttcttactttatctccatgtgggttttcgccatttagttcaagtttgaatctttgtggatgatcacgccgtgggcactgtgtgagatagttatcctgtgcacaagtgagaaccccattttgttttttctttcttctgttggttgagtttttgtctgttttttgctgctgttttggttttgtaatcatggtttttgttggtttggtgctaatgctggtctttcatgtgttgtttgtttcttttgtgctgaattgccggtttcatttcatcatggtttttgttcttggctgtggtgacggttttattggaacttgaaaattgcatgacgcatcacatgtttatgtttgcaatccttttttcgatatgaaatgaaattgtgtaggaaaatgaaaggactctcctaattgatgaacttgattgttgattgtttgttgttggaaaaaatttcaagtactccccctatactcaaaactgttaaaattttatttaatttgtatttataatttataatattgtattcaatgtgaaacatgaatttgaacaccactctcaaagttttcattcccttgtagtgtagtagttattttgctcagcatgtattttatagtttgtatgttttcgttaaatttgcatcaagtaactgctccatcttttctgacttgttttttatttgtctcattttccttattgccaggttaaggat

SEQ ID NO: 19410 - DNA, 924 bp, Glycine max
  Intron number 1 from transcript Glyma18g41450.1 (locus Gly ma18g41450) derived from phytozome v7.0 (chr-ID Gm18; pos 50322443 to 50323366)
agtaagtcgtaggatatctcatcaattttaaatttaaagttataaaaaaatttacgacttaataatttgacaagttgtaataatttttaaataatttaagaactcgtaaagtagaaaagaaaaaaaataaaagtcataaaatgattttagttccgttcttcctaagttttggccagtgtaaaataaaacccataaagaaagcaaaataattacatatatttgcaaaagtttgacatttttttttctattggtaaattacaatgacaatctcattgggtacgctcctcgtgcaacttgctcctcattaattcttttatttgtttaattacattaacagtctcactgactatgcccgtgctacttgctcaataattgaacactaaagaatgacaagggaaagtgaaagtcttcctcttgaacgacacagttgactttcttctcatctcaatctcaacacctaacaatagcagaaactagagttagactaagatggagaaattgcaagaaattgcagtgtccttggctgttgattatttgcttccacccttaaagaaagcagtgaattcagtcatggaggttccaaaagatgctgcagacatgaaagacaaacttgatgggattcaagccatgattcatgatgtggacaagatggcagcaactgaagaaggcaactcacgtgatggtctcaaagcaaaggtgaagctgctggtggaaacatctttttgcatggaagatatcgttgatgaatacattatccatgaggaaaggcagcttggtgatgttcctggatgtgcatctttaccttgtaaggctattgatttcgtcaaaactagggcctctcgtcttcaatttgcatacatgaaccaggacgtgaaatcagaatttccagggatcaaggagaggaacaaaagtgaggattgctcc

SEQ ID NO: 19411 - DNA, 1019 bp, Glycine max
  Intron number 3 from transcript Glyma16g34060.2 (locus Gly ma16g34060) derived from phytozome v7.0 (chr-ID Gm16; pos 36746640 to 36747658 reverse strand)
gctacatttcagcaagtgaggtatatgtataaacttttattctttctattcaatttttttttttttaaattttaacttggtttctctgactgcaatcaacaatcaaagtattcatgagatttctgacaaagtaaggttacttcaaacttgaacaaaaagcaagtagggtcaagatgttgcaaagtgcatcttcccttttttttcattcatgactgaatcaataacagaataattcatgaaaaatatttgtataacctttttttcaattcacacacatatatatattgtccttttcatggaattacaaatttaaatttattttataaattgctacagcccttctaaaattattgatgtttaaggttactgtaaatagattaaaaagtatttattaataagtatataatattcatatatttagattaaagtaaccttatttaatatatgatattgttaaagcgctttttaaataggttagaagtgtagtattcttttgtaaagatcaaatctagatattttaaataaagaataatgaaaaaaggtagaaatataaagaatattaataatttaaaataaaaaaatcaataattttaaaacaaaaagtaatgaaaattatataaaatttcccgtgtattatttttaataataaaaccttttccataattgtatattaaaaatggaatgaagttgtatggtgagaggctaggatatcatgtacatatttatatatgtcacatgtcggcatactttgaataatagttgtttgcctgtttggttttaaaaacaatgcattgggttttgacattttaaaataagatcaggaagaaaatcttgtttttcagttttcactcgatcatttttaatttatcagtgttaacttctttttttctatagaatttattagtattaactaagaactgcatatatgctcaaagacatacgtacacatgccctcacatattaaaatccttccgtgctatgcagttgaggcaagttctgatcaaactgggtcaaaacac

SEQ ID NO: 19412 - DNA, 713 bp, Glycine max
  Intron number 1 from transcript Glyma18g52090.1 (locus Gly ma18g52090) derived from phytozome v7.0 (chr-ID Gm18; pos 60813868 to 60814580)
tggtaagtaacaaaatcccggagctttcagtggaaacttgagttgcttttggtgtttgtttgtattctttcaatttggtgtttaaaaaaaaaacattattatttgatgacaatctttaagctcctacttgttttagcagtgcagtgtatatagtagagaaaagcttaacttctttgtgcttctgtatggcagttctcttctagtagaagtaaattgaaattgaataaacttttttttgaagaaaaataaactttattattaagaggttttcataatatatttgtgtcgggcgttttcttcaattgcattccaggaactaattggcagattgatgggaccttaagagccactttacatgaactattcagttatggcctgcatctgcagatatatccgtgacacattcaattatttatttgtttctgtgcctagtagtactgtgtgtggcttgctgtacaggcttgattatgacttttaagtcattcttacgagtcttttataattgggaattcttttataatcatccgagttcttgttttcccactttttgatatgggtattgattgtgatttctcctgatataatttacccataatataatgggtgcagaggcaaaaattaatctttttgtgctgttagtttttgtacatgtgggtaattgtcggtcaccatgcttccatctgaatttggtcatcattttcaggtgcaagcac

SEQ ID NO: 19413 - DNA, 863 bp, Glycine max
  Intron number 6 from transcript Glyma16g05870.1 (locus Gly ma16g05870) derived from phytozome v7.0 (chr-ID Gm16; pos 5276576 to 5277438 reverse strand)
gaaagggttggtattgtcttccagtttcccgagaggtgcgaatattaactaattgcagttcttttgtgtttttggtgaaatggttgtgccctcagagttttattcaatttctgttgattattttgaggatcaagaaggatcaaagagggacttggttttgctttcaagacaggtttctgtcagcctttgttatgagatagatgtgtttttcttttttcaagcttcttgttggtgtttagcacatggactttctcttgaattttttgccatatttgtggagggattgcagaacctttcgtttatgtatgttctttattgtttttctactttcgatgtccttctctagtctgttgtggagaatttcttatcgtccatatgtctctactttctttcttgtctttctaaatgggttgcccaatgcatgtagctccaaccattgtgggacttggggagggtcagatttgcataatctcacccctatatatgttaggaagttccacattacctgcctcagttcttgggatgtatcttatatatttgttgggcaacttcacctagtgccaattggttttagctgaaatctaacacggtatcaaagcctataacccatcttagttcttgcctattctagtaggctcgcctattctggcaggcatctgtggagggggttgtgttaagaaatctcacaccgcctgcctcagtttttaaggtgcaacttatgtatctattggataacttcactcagtaccaatcggttttaagctaaaatctaataatggacaaaggctttttctgtaactagaagaaccatgaatccatgacccctagatcacaaggcagcaacattactaacttactggctc

SEQ ID NO: 19414 - DNA, 791 bp, Glycine max
  Intron number 1 from transcript Glyma19g33580.1 (locus Gly ma19g33580) derived from phytozome v7.0 (chr-ID Gm19; pos 41173162 to 41173952 reverse strand)
aaggtaacatcaacaagttgagattttgctggttttagcaatattaatggatgcaatggtgttatattgggaaaagggtttgttgattatattcatattaagtattaacaaagggattgtgactatgtgaccttggtatgatcactcttgggtatgtttggcaatgcagggaatgggtgtgaatttttcatttttgctaaatgttctctaattttcacttgtatattttattttttataatgaaaggaatagaattagagattcttgtgttacttttaataattcttattcataattgatcaatctttggaggaaggaggttggagtaggggagggttaatatttcatttcttaatctagggaattaaaatttgtttaagtaaatgaataatggtgatttgaaggttacaaatagtctatcatttcatttgtctgaatcgtaaatttcttaaactaggagatgctcacctataataaagaaattcccctccaaaactcttcatcttaactcacccttggttttgacagtgttaagaagtgtatacaaacatgtaatggatcacaattaaactcatagtaacatcctccatgaagtagtacttgccccccacccttaattttgaactcaagacatgtttacacgattgtaatacttgtagtatgtttgattacttatgacattctggctgagtagtctaggttattgtgcatgcataatttttaactgcttatattttaattttcttttcaagacagggctaccaaacattctttccttctccagtagcaaa

SEQ ID NO: 19415 - DNA, 455 bp, Glycine max
  Intron number 3 from transcript Glyma20g20300.1 (locus Gly ma20g20300) derived from phytozome v7.0 (chr-ID Gm20; pos 28793314 to 28793768 reverse strand)
cacaaatacaatactatcaaattaatactaatccagtatgtgtcgtatgacatttcttttgtaattatatatcggaaaaagttaaactttcaacacacattccaattaaatttggagtttttcttattaacaaaaatattaattattaatttgttaattttttttaatagaaaaaatgaaacccatagatatttttttttctttctcaatcaccaatcaaaccaattttatatcttctaattaattaaatctggagtatatatattgatcatgaaagtaagggagaactataacaaaaaaaaaaagagaaaaaaaattgataaatataacagatgacaatgtgatgagaaataaatgatagctaacagaaaaaggactgaatgcattacattgaaatccacactataccactggcatttgtttatagtagctttatgtttaaatcaacagaaaaa

SEQ ID NO: 19416 - DNA, 962 bp, Glycine max
  Intron number 4 from transcript Glyma18g47180.1 (locus Gly ma18g47180) derived from phytozome v7.0 (chr-ID Gm18; pos 56871494 to 56872455 reverse strand)
aaataccctgttccaggagctaataaagctgtgtaagtcaattctttctccgcatcatgctccatcaataaatgtagaattactgtaccatatgattctaattctattgtttcttggcttaattaagtttttcataccagaaaaataggtcgttttcacattactatttaacattcattctttttcaactaatacttgaaaaacaagccttatttcttttaagatagagtaaattacactaaccacctttgaggttttgtgaaattacacaaacaccccaatgcctttttaggctttacaataacctccctttaggggagtccggtggaatgtttttcaaacaatcaagggggttagtgtaatgtataactcaaaaattaaggagggttagtgtaggagtagaaaaaagcagaggatgtttgtgtaatgtcatgaaacctcagggtagactggacagttagtgtaatttactctttaattaacttattatgaaagtcactgtatggaacttatgattccctacaaaattgttctagttaagctactttctgatgtgaactcaaccaagtagcaatccacaaggaagggccaagtaaaaatcagtcatgaaatggaatgcctcaatacattataaatctcattttgtgtagtatgatgatgcagctttctaagatattctctgttgattttttcctttttaaaatcaatgaccttcatgtcacttttgaggttttattatttactgttctttttatgccattttttaaacagtttccattgactatgtgtagtgtacctgtcggttcactgagtagcgatgactagtttgagttcttttgtgcttggttgttttttcaaatcacatacaaatactctcaatctatcaaccatgaatgcataaccatatattcccttttccccatgtaaacagaggggcagcattattggtagaagcagcagaa

SEQ ID NO: 19417 - DNA, 268 bp, Glycine max
  Intron number 2 from transcript Glyma19g08930.2 (locus Gly ma19g08930) derived from phytozome v7.0 (chr-ID Gm19; pos 10418410 to 10418677 reverse strand)
aaaagctctacacttgcacgtatgctgtgttgtgttttttcttttcttttctttttttagtttgcttcctgcactttgaatgcttttagacccataaatttagaccatttatgctttttaatcgttattgcttcaacgctttgggttttgttacttttttttttatatataaatttgtgtttttgtatcattttgattgttgagtcttgacaaaagttaagggttcttttcagtggggaggaggcgctagattatttcaaggaagaac

SEQ ID NO: 19418 - DNA, 480 bp, Glycine max
  Intron number 1 from transcript Glyma20g02250.4 (locus Gly ma20g02250) derived from phytozome v7.0 (chr-ID Gm20; pos 1909799 to 1910278 reverse strand)
ccctttaatcttcgtcaacgttacttttccacctcgtacggtaacacacgcttcttcttcttcttcttcttcttcttcaaattggtacttggattctgtgtttgcttaattgaacctctgatccatgaatctgaacgatttcatccaaatcattaccatttgtttctttaatttgaaggaagatatttttctatatgttagctggatgattcagattccattttttttgacaaatatgaaaatggatatattaatttcgatttcgatcaggattttgactttcacgcgaatgattaatgattaaagtttggagagtacttttacggatttcaatgcataataatgaattctaatgcaccaaatgaagaaggaagaaattgttgctttagtttttaggctttccctgctttaattctaacatgcactgaaattttacttgattcagtgattaatctttgtgggtgattgaatttggctggt

SEQ ID NO: 19419 - DNA, 928 bp, Glycine max
  Intron number 1 from transcript Glyma19g44230.2 (locus Gly ma19g44230) derived from phytozome v7.0 (chr-ID Gm19; pos 49717867 to 49718794)
cctacagaaagaccctccaacctcttgcagtgccggtacaattttcctcttctttttgtcccctttttgctctgtatctatcccaaacccttattaagcttcatatgttgctcgatctatgagtttttggaatttacacgtatttgggttgttgtgtatttccccccctccttgtttcgtaggtttgtttgggttttgttatacgtgtttctagatgctgatttacctacgttaatgtaatgaattttcaatctttgaggaagtacgatgagatatttgttgtaagcttcacctcccaggttgtgacctcaaaagattatcgtcaatatgatgttttgtgagacttttctggtagtcagaagaagcttttcatggttaagagtgataaccaacgattcataagtttgccgtttcgtaactttgttactaattgtctcaattttctttattttttaaaaactaattcctctgtgttctttccactgaagttgaaatcctgcatttaaagtgctgtgactgtttaggaattagaatctctctagtctctattgccttcttttgttagagattttctctaagtctgtgttatggatttgtaacaactatcatggactgaagatagagacactattgtgattatctctgtctttggttgcagaatccattggaagataactcttactttaagattatatttggctgatattattatctttctagatgtttattgtgtatctgagttgcatgaatgtatccattaaacaagcagatataagttgagtctgtatatatttgaatattttatttaaactccattcttttgtctgttacacattatacattattttttgatactatatttgaaatcaatgttaagtttgttattttctaatgattattacatttcataggtcccgtagcagaagat

SEQ ID NO: 19420 - DNA, 543 bp, Glycine max
  Intron number 1 from transcript Glyma20g17400.1 (locus Gly ma20g17400) derived from phytozome v7.0 (chr-ID Gm20; pos 24448601 to 24449143 reverse strand)
atctctaccaggctataaacatctatcttaaggtgaattttccatgacatacatgcaatgtcttaaaacaatgtctacacttttgtttaactttcatggtaactttactgaatacataacaaatgctcatgaaacacaagatacatcagcaccttttgaggacctttagatgccaacttatacacactgttcacatcaaaatactaaagtgactaaattagcattaggcatttttgaatataagaaatttaggccatatttgaataaacttctcgataagtacttacaagagaagaaaagaagaagggaaaatgaattaagtttctcccatatatttaactactaaaaaaagctaattttaaattatgtataaattatttttaactaacaagaaaagcttattgaaaattatccacacagaactttagtggtcagcttttatatttttggtaatttagttcttattgtggtgtattcgtgatttgacttatgttcattgcatacaaaggtgcatcctgacctgatcaaagcagacaaaaagcg

SEQ ID NO: 19421 - DNA, 476 bp, Glycine max
  Intron number 1 from transcript Glyma15g43180.1 (locus Gly ma15g43180) derived from phytozome v7.0 (chr-ID Gm15; pos 50711417 to 50711892 reverse strand)
agcttttgctgctcttcagcctagagtacctgaaggtaatgctcacatctcagaccctttcatttatatgcatagaaatgtgacgaaaagaaaaaaacttgatctgtttcatgagttgagttaattcccactttgcctatgtttacttcaaactcttgttctgcattgtccactcttactctgatttgcctgctgcaatggttctttaggttgctttcttttacaatttttgtgggtaaactttagatctgtccattatgttgagatttagcttctttgagtaaaaagtaaaagcacattaccaaagttaatgagatgttttacctaattcaaatgagaagtgaatatactatctcattttacatatatgggatctgattatgtgcacttaataaaactgattctgaagtagtttttttttctttttcttgtgtgtgttttgtttgtaatttttaactgcgcagcttaccttcaaa

SEQ ID NO: 19422 - DNA, 293 bp, Glycine max
  Intron number 1 from transcript Glyma19g24220.1 (locus Gly ma19g24220) derived from phytozome v7.0 (chr-ID Gm19; pos 29600958 to 29601250 reverse strand)
gtggcagcttcaaacaggcaaggtcctctttcttcttgttcagatttagtcaaagttgttttgtttttatggttagttctttagttctgggttaaattatttcagcatgttaaagaaatattggattattgtggtctaaagctgaaaactgggaaaatattattgtgcttggtttgagttgttttaatgttcttgaacatttgaggcattaatttctttgggagtatgttggtttagttgttatagattgattcttgagtggttaatgtagttatatacttatattatatagt

SEQ ID NO: 19423 - DNA, 961 bp, Glycine max
  Intron number 1 from transcript Glyma14g04500.1 (locus Gly ma14g04500) derived from phytozome v7.0 (chr-ID Gm14; pos 3082081 to 3083041 reverse strand)
catctctctttcctcatatcatctcatcacattttgtaagtttcatacttaccctctctttaaattttgatatgcctcctatggaaatgagatagttaacattctcatctcaataaactaaattaatgtgaataaacagataaattagtagagttcttttattttttttatagactgaattttatactctgtagcataaatttttacatgtaaaagttaatttgtttgtgccttttgtaagtgaaatttctgccacagtcagcagctttggggaaccccaagttgattccgggatacgaatccccctgacccatgaacatcctttcagtaaacttgagtattagacaccttaatggaaaattatgacatgaaatagagtatcataaaatgaagaaggataagatgtgaaattgtaatctccactataaggagtgtgaaataaggtcaagtgacccttcacttattgcatagattaaaatgtgtcatgattaatgagaagtagaaagggagacacatgtaaaaacttatattttatagtatttttgaaagacatgaaaatatgaacatggataaaggacttatcgtgtgtctggattggtgttatgtcagtgtgatccgcgtccttttgaagcaaacttttgtagcttccacattaacttggcatacttgacgtgaatttggttttggatgtggttggaaaatgcaaatccaacatgctataaagttgtcaatttaaatgctaacatgggttctagttctactgcttgcaaaattggtacttgtcattggatttggtcaacttgaataaaaaacttgattttaaagtgcttgataaatgatgtgaattgaggcaatgctatgaagtcattcattgaaatattctcattctgtgataattttcttaaattcctcttcttccctggccacttcacttttcaataattgcagcctggagctgtgt

SEQ ID NO: 19424 - DNA, 642 bp, Glycine max
  Intron number 1 from transcript Glyma18g08900.2 (locus Gly ma18g08900) derived from phytozome v7.0 (chr-ID Gm18; pos 7631536 to 7632177)
actctgacgccaccacctttgaggtttgtgtgtgtgtgagagagagttttggtatttcttcattgggggatagattgtgtttctggaatgtactaattcagcatgtgtgtgctattatgtgtcaaacaatagtcattgtgtttgtacaaaatgtaagatttgtggagataaggtgaagtggatactggaaattatgacaatggtattctttctgccttttgcaatgtatcttgtttgttaggaggtttaggaagtataatggcactgggttctatgttgttaagttttagtttggcttgtgttttcctaactttttgttttgtagagtggagagaaaatgggggagggtagaaaagtttgaaattttaaattgaagagaaaatgaaaagagagaaaagtttgaatttttgtttctagaagtcaatttttctttccactttccctttaactgaacaaaagaaactacattgttatctttgttttctttcctctcgtccaacatatcattaatgttttgagctcaatagcgaagtgggggtttagatgtcaggtggcatgatgcaattaccaattagtatccttgttaatgcaatgttttgatgctttaggttggtgacttggggactcctagcacttcggcaa

SEQ ID NO: 19425 - DNA, 489 bp, Glycine max
  Intron number 1 from transcript Glyma15g08400.5 (locus Gly ma15g08400) derived from phytozome v7.0 (chr-ID Gm15; pos 5944899 to 5945387 reverse strand)
gtaagagttaaattaaagtagtactccataatttcaactaattttgaagtaataatagagacatttatatttttttcactttatacatttgaccatactgaggtatttaaatatgtaaaactggggataatacatacttttttaattgacagcaaatataagattaatttggtgataaaagggtgaggaaagagagagataagtggtgaaattgaatcttccgttaacaaaaacttaccactaacatttgcctattgacaaatttactttaataatttatttatttttttcttcaaataaacagcaaatgattatttaagcagtgaaagtcacagaagaagcactggatgtaaataggcccaaggaagtccaatatagcagcaacccaaaaagagaatccaaacccatagctcctgagcaaaattaaaaacaaacaaaaaaaattgtaaaaaagaaaaagcaaaacctcagtaaggcaaaaccccttgg

SEQ ID NO: 19426 - DNA, 697 bp, Glycine max
  Intron number 1 from transcript Glyma20g39020.2 (locus Gly ma20g39020) derived from phytozome v7.0 (chr-ID Gm20; pos 46487047 to 46487743)
ttgagacgcgtcactcccaaacaccgtttttgtgagtgagttcaaagcaaacaaatactaaaaccatataaggttctctcgctcttgttaataattccaaattacaaacaacaacgcagtcctctctctctctctccctctgctaatttaaactccgttttccatttccttttataggaaggaggaaggaacgaagctgaatctgaatctgaatcggaatcgctttgtctttgaaattcgcactctctctctctctctctctctctctctctctctctcgtgtctctatattgagccacttcgaatccgtcgcctcagctgcagatcacatcgagtttcacccgaatgctctttctggactcgatttaggtttgtctttccttcctcaaatccgaattccgcgctttacgcgctctcatgttgtgtcggtgaagccttaatttcgtatttgcgtttccttctttgcaagatctcagttctgcgtcatcctattttgtttgatttcgtgcttcttctttcgttaccgtagggatctctgctttcttttggaattcgcgtttaatggtgttgtcttaggctgttttggaatagcaagatctgtcattattttattattctgagattatgtatagagggtttttttaatgttgattccgttgcagatcgagttcttcataccctgatagtgtgggaggat

SEQ ID NO: 19427 - DNA, 624 bp, Glycine max
  Intron number 1 from transcript Glyma20g32660.1 (locus Gly ma20g32660) derived from phytozome v7.0 (chr-ID Gm20; pos 41286700 to 41287323)
gaaagtaactgattgatccctgcatgatagaattagaaactacaattgtatcacacatcaaagagaattaaggtatgtctcttctttgtttttgtttttatctttttgtacaaatatatgctactactattttaatttttatattcattcattatatttttcttattatatcattcattatgtttattatatactaccactactagtagtatatattttctttcttatttcctatttctgtcttttatgtcaaagtaatatactaatgattgatacgggtgtgaaaaaaagacccattttttcaacacatgttgtccctctaaatacccttttcatttttattccttgtgcaagtgtaaagcaaacttctccgaactctttattcttccaaacttcctttatcttactcataccagacaaaacaaaaaacaacagagcatacaaaaccaaaaaaacaaacccccacctcagctatattctgacatttgaatatcaaatttcctttctttgattattattattataatttttctctccagcaaaatattcttatataaatagccttggagtttgtattatccttcaatagagttagtttcatatataaaacaggaagcaacaact

SEQ ID NO: 19428 - DNA, 810 bp, Glycine max
  Intron number 1 from transcript Glyma18g49310.1 (locus Gly ma18g49310) derived from phytozome v7.0 (chr-ID Gm18; pos 58676806 to 58677615 reverse strand)
tcctctgcttcagtttgccgacaagaactgtcaggtaaagcacttcgccagttttgatcttcaaacacttttttctggttctcactatagttttcttcaacctcttttgttttgccacattgatgttgtttttgaattgttttgtttgatttttttgttctgtctctctcttgtgggtcataacaattggtttttctaatgatttttattgatgctatcaatttggctaaagggtgatccttcatatccaaattccaaacccagtttgagattttagaatttgattgagttggattcgttttcattggttgttggagtgtgaagaaattctgtcttcagttaatggacactcttcattctcaaatgtgatcaatacgatgtttccttgcatgtcaagagtttataattgatatgtttcctgaaatattaaataaaacaatataaatgatataggcatgtgatctgtgacatagttctgtttgttaaaattgaggctgatatctgttggggaccactaaatatttggaatttacaatctcttgtggatgaagtgaatgcaactaaatgatagataatgttttctataatttcactgttctggttatcttctttgtttgtttttaacaatgcatggccttattactggagaaatgaaagggaaaggaaaggctattcccaccatcagtttgtgaagttgcatgaatgatccttatagggtcactctttttctctaataagttgtcaagtttttttcacttgctttgatttctgcaggtttgctgactctggttctattttttccaatttggg

SEQ ID NO: 19429 - DNA, 753 bp, Glycine max
  Intron number 3 from transcript Glyma20g30110.2 (locus Gly ma20g30110) derived from phytozome v7.0 (chr-ID Gm20; pos 38835525 to 38836277)
actgataagcttttggagaaactgtaagttcatttttgttcactcccatatcatgtgaacttataaacatattattgaacccattcagacgtatagttttattggagtaaaaagattgaatatatgccttgagaaattatatttcatatttacgtttttcattatgcctttggaacaatttttatttcaatgttgttctgagactcctcaaatctatttgtgcttcatctatttcatttgaatttgaactggattggtgtagctggtatgggattggtttacctgaattcaattataaacaaagtagcaattttataaacaagttgttggatggattttcttaaccattaatgttataagtagtaaaatatacatgatcaaacaaaatatgatagaacatcaattgataaattagtaaaatagaatactgaacacagtatatcagttttcaccaaaatataataaaagttggtgtactaattgcaatggccctctggtgcttttggttttttcttgatgaccataggtttgctgtgtaattttcaagttggtataaaatatttgaatggatgtaaccccatttcgagaagtgtaagttagccttacagtcttaaatagaaagatcgtataagttagccttacagtctcaaatagaaagattgtattgattcagggaccggtttttatttcttcttgggatgaactattattttctttcacatctttttcttgtttttggatgacagctacaac

SEQ ID NO: 19430 - DNA, 522 bp, Glycine max
  Intron number 1 from transcript Glyma14g23300.1 (locus Gly ma14g23300) derived from phytozome v7.0 (chr-ID Gm14; pos 27738545 to 27739066)
gccccttttgcatttgtccttgaaaggtgtctctctccttctcaagtatttgcatgactctataacatgtttggaaacatcttcaaaataacggaatcatatgtttgagatataaaaattatagctattaacttctgaaaatcatattttaatgatgaaaatcacctctctaaaacgtgaaaccaaacacaatatctagttgtatttgaattcatgttgtaacaagttggaacgtaaattcatagtgagacaaggattttcgttcaacatgcttagaaagtgagattgacctaaaacaaacatacattttatcttgtaaacattgtctattttctcatttaataaatattatgcacaaaattttcacatttatcccccttctagcacacaacttacatgtacacagtaaaacttttcttgttttatgccttttgtagctattttattaactttccattcattaaattgagacgataagtgtgcgttttgatgcttcttttttacagaaaaatacggccaaag

SEQ ID NO: 19431 - DNA, 1007 bp, Glycine max
  Intron number 1 from transcript Glyma15g10030.1 (locus Gly ma15g10030) derived from phytozome v7.0 (chr-ID Gm15; pos 7243211 to 7244217 reverse strand)
acccgccaagaagctcctcatcaagctccacaaaggtccgctcttcctattcaactaacccttccccctctttaaaagagcgtttttctttctctctctccgattcgccaatatcccttcctttcctcttcttcaattcttcgttcttgctgcttaaattaggttttagcatttcaattccttttattgatctgtaattaatttgttcccaaactgcttcgcatgattcttcgtctccatttcttttctgcatcgaattgagcttcctttctagcttattattgttatttctggagtctagagtgccaaaaattagtaacctaagtgagtttcagtttcgaaccccaagcggagctaaaagcagttcctataggctttgcttggatgagcttctcaatgaacactaataggagaagaaaataggaaaacgaggatgaattgagctttttctgtatgctaaaattaagttatgtacttcagcttttggagaatttagatacgacagcttttatgaattctgtatgtattttgtattttccttggcaaattctgttttgtagatgctactgagtgtgagtcttgtgaacctttcggttgtggaaagctctgttattatgagaaatgatgtccttctggttttgagcttatttgttgttggcatgatagcatattggcatttccaagataatgactataggttgggttacaaacttacagttagctcttttatatacgatcttatttaattttgagagatcctttatcacttccctctctagattctgtgtctgaaactttaagtgccttatgtgtgtcttatttttatgttgaatgtgcctgttaaacatggctgtactgtgagtttgttttccttatttagcatatatttctagcttcattcttttttgttgaaaatccatggacaatttgacatggaagtatatataatcaatatctgtttttcttttgtagctaaaccaacattgcccacaaattttgaggaggat

SEQ ID NO: 19432 - DNA, 807 bp, Glycine max
  Intron number 2 from transcript Glyma17g09740.1 (locus Gly ma17g09740) derived from phytozome v7.0 (chr-ID Gm17; pos 7244475 to 7245281 reverse strand)
caattgttgggtgtactggttcaattggaactcaggtattggtgcaaatggaatttccctttaacatgataatctgtagtgtagtaataatgtaatgaaatgacaattattcttattagaaactgttggcccaaaagctagattgaattaggaggattggtgtcactgtcagtgtcttataaggagtattcgagttatattcctaaccaatgtaggacatcttaacgtgcccccgtgcccaagattgaaaatttggatcgtgtagtttgcagaactgaacatatgtggttagtcaaacttcaagacaccaactttttaaaagggaaatttaagaactgaattttattttctgataatgagtacaaggtgactacacttatgtatagagagactaatcctaatatttacagggtactacaatcttgctgtcatagttacagttatgaaagagaaataaatttatgcaaataaaaactaagtaatggaatgagaaaagaatattatgtgctccaacataatctgaagctgatgttggctggacttgcaagatgctgtttgattgcaaacatttgctggaaatagtttgcctttttagtgtttttgtactggtactcttataaatgtttcatatgcatatatgatttttttggggggttatagattaatgtatgactagaaattgttgattgtttatcccttgtagatgtagcttgacttgccttgtctcttatcctttgatgtagtgcaccttttcccctgtatgcttttgtagacactagatattgtggcagagaatccagataagtt

SEQ ID NO: 19433 - DNA, 769 bp, Glycine max
  Intron number 1 from transcript Glyma19g01860.1 (locus Gly ma19g01860) derived from phytozome v7.0 (chr-ID Gm19; pos 1488342 to 1489110)
tgtcgttgccaagcgcctcggcattcgcaaaactggtaactcttcttatcattttctttctttctttttatgttagtgtgattgtaagtttagttgggattttcaatgtgttgatgcattttggatctgtctctgttcgttagtaatggagatcaatgtgttttagatgtccttttggtctaaattagtctatatttgatgaattgtctctctaatcctcataagtcatcttatatttcaaatttatttagaaagtataaagattaagactaattttgatagaaaattgagagatttaaaacacatttttacctttcttaaaaaaacacacattttacctttagttgttttagtgatggcttcataatctattctgaaggttttgattaagcatttttatgtgatttaattttaaaattggggaaaaaggggttggagcgaaattaattagcaagtctcctaaacatatggtacaccaatgtgattttagtggcaaactttaagatgtttttcaagaacgatacattaaaaagtctaactgggttggttgaatagtattgtgcatgaattgttgcagtaaaaatcctattgataaaaaaagtcacaaaattaaggtgttttggggtctttgtgattgcatgggaatattcagcaaatgttaaaagattacatgatggaactacaaccgcgactgtaattgaaaaccttgttaattagattaataatgtttgtgaaataaataaaattgcagggttactgaagctaagta

SEQ ID NO: 19434 - DNA, 615 bp, Glycine max
  Intron number 3 from transcript Glyma18g49570.1 (locus Gly ma18g49570) derived from phytozome v7.0 (chr-ID Gm18; pos 58947485 to 58948099 reverse strand)
tatagggctgggattgtgcctgtagtttacagaaggtaactaactttattctcatttttctttgccatatgggctatgtttggataaaaagttgagaacatgtttttaggaattccaatacacattcccaagagtaaaagtacttttgagatggtatccaaacatgcacatattcgtcaaggtcttaaaaaatattttactaccgtgattttgatcgtaacatcaatgttttcttactcacttcgactgtaattgcaacggccgctatgacagtaatttaaaaggataaaatatgttttcagttattgcactttctttagttcccaaacattaactttgattaaattagtctatgaactttacaaaagcattggtttttgtctctcttcactgtgaaaaatcgccctgagttaaatcactacttttgtaaaatttaaggaccaaattaatcaaagttaaagtagggattcatctaaaatataaggactaaaaacatattttactcatctaaaaccttgatgtgcatcttactactcttttggccatgaagctaacatttgtttgttcatggattgtgaagggtgaggtgcaggagaaaaggtggaatcaggttca

SEQ ID NO: 19435 - DNA, 764 bp, Glycine max
  Intron number 3 from transcript Glyma17g23720.1 (locus Gly ma17g23720) derived from phytozome v7.0 (chr-ID Gm17; pos 23886563 to 23887326)
ttattcaaggtttgatgccctcctctagttctcttgccttaagcttttcacatgattctcatagcctagttgaaagaatagtatttaaagatgtctcagttccataagcatatctggtagcctgttactgattgtaagcagtgttctattaaaaaaagaaaatgggacttgtgactggtaaggttcagctggagttgcagtaacaagccgaactttcaagtttgaagggcacatcaagttggtttttgtcataaaaaatgaacgatactgcaactattacaacttacatgttgattgtctttagtttcagtcttcacttggtacaacaaacctgagatgtgagcctacacagaattgaagcaatatatatatatgaaacaatgctaaattcagagtttatttgtgttctctttattctctactggacatctggttttaataaaagctctatgttttagttataagattttgatattccctttaaattaatggatatcttgttgattcttctgaaaagttattttagatgaagatgaatttttggatacttggattttattgcaatagctaaaaatagttgatatatttttggtggcattgttgattcatgattcatttctgcatcatcttcagttatttcatggttgtggactttttgaataagcatgatgattggctttacccttgctttgaattgaatgttttcaatgtattttttctgtaatgcagttgttatactggtcccaacccgagaattggcattg

SEQ ID NO: 19436 - DNA, 917 bp, Glycine max
  Intron number 2 from transcript Glyma16g27430.2 (locus Gly ma16g27430) derived from phytozome v7.0 (chr-ID Gm16; pos 31476442 to 31477358)
aagacttggtaagctatcaatttatataatttggatcattcctatatgcttgtgtttgagatttagctcctctaaagtaaaatgaggagatgtgtaaaatgagcaagtaagaaagaatatatacaatgttgatttaaagtgagttaattttagtcaaatgaatgatagatacatccttacttattttattcatctcaatttataatatccaaatccttttgtgcaacatatgagttcatttttgttagaagtagatcaatagattccacactataactaaatgatgatccttgtcaaaagttgaggtggtagattcattgagcacagaattggagactatgtcatggttcctttcattgatagcaaatgtgcatgctatttaatgttatattttccctggatcaatttttactatctctttgagattactaatatcgagattgggaaaagattagacttctctgcacaacactttgatgaaagtaacttcctgaagtataatcccattagctgtccttacccctttccctcctccattcttcttgataaaaactgttgaacttcctgtggtacaaactgaatataatttttcttctgaattttccttgagtttagttgtttatgtaaactattggttatgtacatctagttgtaatttcttagggctctttgttgacaaaagaaaatggaagctcctctcttatccagtattaagaatctacttgtccaattatttgtcaagatattttactttgatgctgaactgccacctggatttggtttatgttatgttggattgcatgaaataattttaatattaatattatcctcatcattgatacttttcttgtcatcatgtgtatgttgcctgatttataggttttatgtctattttgcatggtttttgtaggtttgtg

SEQ ID NO: 19437 - DNA, 888 bp, Glycine max
  Intron number 2 from transcript Glyma20g10240.1 (locus Gly ma20g10240) derived from phytozome v7.0 (chr-ID Gm20; pos 14290577 to 14291464)
tctgccacagcgacatcacacttcggaaccttcaggtttattattattattagttgaaacttgaagaaagaggagtgatagtatcagttacattttaaaggcttgtgaaagaaaatgaaaataattatatatattgtaggataatttaaaaataaaaaatatgtatatcaaagagaataattgtcttattaatagttatagattattagtttaaagaaagatacttcatgttctatatgtatttttaaaagaaaaagaaaaaacaattaaagaaagtaatggcaataacaaccacattttgaaggtttatgaagaaaataaaaataattatatatattgaaagatcatttaaaaacaaaaaatatgtatatcaaacgaaataattatttttattgatagttaaagattattattggaaaacatgcaccaaaagtgtccgtcctctaatttttttaataatttttatcttttgacaatttgattaatttgataagagagtttgacaaagaatagtggatgtagtggatagtttagagagtaattaaagggtaaaataatgaatcaacaagtgaccggtcagaatgatattagacttaatactttaagcatgtggtatgagtttagaattgttattgagaacaactaaaaagagtaaaagtaaaatagtaggtaatctagagagtagttagaagataaagtagtctattaaaaagtggaaatcataaaagaatatttcctttattatatatttttgggcatcaatcttttattattcttacttttgttttcatgtgattttatagtaataacttttgaatggcttttaaagatgtcttttttctatgttttgaaggaccctcctgccattttcccaaggattctaggtca

SEQ ID NO: 19438 - DNA, 688 bp, Glycine max
  Intron number 1 from transcript Glyma16g08320.1 (locus Gly ma16g08320) derived from phytozome v7.0 (chr-ID Gm16; pos 7593164 to 7593851)
ccggtgccgttcattcaggtctgttttagtgattgatctgagagaaaatgtgctgatttgaatgaacttttacataattacttatataggagaagaaagtaggaagttaaaattgaatattaggtctttcccataagctacaattaacttatgcatttcatcttgtggacaagttaaatgagatattttcttgcaacagttaagtaagtgtgtaagtgcatgtttgaatccaaaagtactacttttactctggaagctacaattttttcccttcttcatttggtgcattggaattcacgaaagtattttccaaactttaattcaaacataagtgcacccaaacataagttcatgtttggattaaaattgggagaacccaaaagtacttttagtctggaagcagcactttttttttttcttgtttctcggtgtattggaattggttattatgcattagaatctgcaaaagtactttcaaaattttaatccaaatgtagagttgattaaagcctgtgggaggaactcagttcatcatcttacctttgtattttcttctccttcaagtgcttatggagaagtttatccaaacagggtctaagttgctgaaaacacctgtgttgttgaattgccttctgatttgagacaatgtgcagattaagttgctgaaaatacttgcgttgttggggag

SEQ ID NO: 19439 - DNA, 790 bp, Glycine max
  Intron number 1 from transcript Glyma20g01190.1 (locus Gly ma20g01190) derived from phytozome v7.0 (chr-ID Gm20; pos 821573 to 822362)
ccgccgctgttgcagccgaagagatctctcgcaatgtgcgtttccaaacgacataaatatgtgcagttttgtttataatttggttttgatccagtgaatgcattcatttcaatctctgaattagttgtttatttgttggtatatatgtgtttttccctttttattattgttttaattttttgcaataattttatcatgaaattgggcttatcggaattctgaaatatgctgcactaggtgttttcggtcaatatatttgttttttttgcaatatagtacacttcgtcagtgtgagattttctagtaatacaaagcatgtagattttttttttttgaaggagactatataagggttatgcctggttggagtgaaaatggataatgtgggaaagagattaatgctttatttttccaataaaatctatcttgattgcttgtaatagataatattgaatgaaaaagtagaggcattagttatttagctatggaggattattgggaagaatgattgaagaagactagataagggttatttttggttggagtcaaaaagggtatgtgggaaagagattgatgctttattacttctaatagatcatatcttaattgcttaaaatagacaatattgaatgaaaaagtagaggcattaatatcttgaaaattattttgatttggagggttgtgaacttgtgaggcagaatcattaggagggtatcgaattatttgttgtgaaatgatggtgttttgaaatgcaggctgctgtagttgcagagacagcatcaaagagcat

SEQ ID NO: 19440 - DNA, 424 bp, Glycine max
  Intron number 2 from transcript Glyma20g35270.1 (locus Gly ma20g35270) derived from phytozome v7.0 (chr-ID Gm20; pos 43517827 to 43518250 reverse strand)
accctccttaaggatcctgccaagccaccggctaagtaagtcattttctcacttttcttttataattaaaggcctttgcatgcttctgttcatcttttctttcttggacctagcttcaatagtttgtttgattccatatctcatacaagatttttcacgagaagttaatagttataactttcatattccaaacgtattttttttaattaatttctcaacgagtttctaagcactacttagtgcttatgatctatttttcttatagtttagctattcaatgttagaatatacggtttggataaggtgtaaattaatttgcaacattttgtaccgaaaaaagggagatatattagaaagtgaagtgaagattgatggggacaatatttcagggctcaagtggttggttggccaccagtgaggtcat

SEQ ID NO: 19441 - DNA, 595 bp, Glycine max
  Intron number 1 from transcript Glyma19g34970.2 (locus Gly ma19g34970) derived from phytozome v7.0 (chr-ID Gm19; pos 42575013 to 42575607)
aggttggtttctttcaaaatcctttgtcttgtccatttcgatgatacactgaatagttactttaaatgccatttgattttttgttaggttatttgtttttgtttttttattggcaaatgttagttttgtaaatagaggggatcgaaccggtgagcttcccttctcccttaaccatctaaatcaccttatatctccattcacttttatttgtggatagttgagagctctgagtgtcaattcaactattggttattcaacggattggttcttcttatcatgtgtgtgccatcagggaaaaattattaggtagtcttggaccatcaagtaccaatggtctcagcataagaatcatgtgtgacatatatgcaagtttttcaatttacgagaaagaattaataacactcaattgtgtgacaaatggagattacttgggaccaagaccacctaataatttctcgctaacagggccatggttactttcagatcatggctgacgtgtgtagttgtttgataatctaattattggagattttgacttgatgcaatctgctacatgactgaaatctgcaggaagcaagagctttgttaggaaaag

SEQ ID NO: 19442 - DNA, 498 bp, Glycine max
  Intron number 1 from transcript Glyma15g03160.2 (locus Gly ma15g03160) derived from phytozome v7.0 (chr-ID Gm15; pos 2195247 to 2195744 reverse strand)
ccgaagagccggcatcatcaaagcccttaccaccggtaacgtagcataacgtaactaatgtgcttttcaatttccatgcaccatcaaatcaaataaaaatgcttttcttcgcaaatacctatggctattctttcttttcttttccataattgatgatgggttaacaaattatgaaaccagaacaataaattattataaatctaaaatcatgacacgcgttagcggtttctttctttctgtcattttcgttatcaaatgacatcttaacctgccaccaattactattcagttgcggcattcgggaaacattattgaatgtatcgaatcctttgtttcgcctttctccacctgggagcaatttctacctgagaaatttttatattctttttctattttgtttttaaatttctatgcacacacacacatatacatgtgcaggttttggaattttttctgtctcgtttaattaacttgtttggcttgttcgtgctgttgcag

SEQ ID NO: 19443 - DNA, 695 bp, Glycine max
  Intron number 1 from transcript Glyma16g34490.1 (locus Gly ma16g34490) derived from phytozome v7.0 (chr-ID Gm16; pos 37135694 to 37136388)
gaacgccatagccgagaagctccgaggaagatcaggtgaaacgatcatcatgtcatattattattttcttattttgcttgcaacaaccttttatccattcaaatcaaataactattttattagaaaatattgtggtaacgatcgagctaatatgaaaaggttagcaccacctaactcctttaactttgttgtagtcactgtgataatagttaaattctattaattatatttatttaataattgctttatagtgtcaaatttctttggaactacacatatggggggtatgaataaaattttgggataaatgatgtttctctctaacataagaaaagcttttgattttgctctacttgataaatccattagggttacaggaaaggcagtactctgaagaaaaatatagcaactaattatgtactaaactaataatttaagtggctaatataatagcaaacattgaagattttactaactcgttaattagcttttctatggtttgattaaaagatcgatccatagaaatataaagatttcttatactactatataaaaatctaatatcaaatattaaagcataacaagtgaataaagtaccatgaatttgtaagtttgtgaagtttaactgtgataacatatataattaagctaaattaacaagaactgtgttgtgcagggaaaagctgtaggttgag

SEQ ID NO: 19444 - DNA, 807 bp, Glycine max
  Intron number 1 from transcript Glyma18g50740.1 (locus Gly ma18g50740) derived from phytozome v7.0 (chr-ID Gm18; pos 59771970 to 59772776 reverse strand)
agtctttcggccagaccgagatcaactgggacaagtattctttcttcttattttttttaaatttttttttaattttctgaatggtgctactgatttatcatttttgttcttgtttgctgtatttcgaggacagacccgtcatttgaaaaccataaattggtatactgtggcccctaaagttttttttctttgagtaatttgattaggggtgggggagttatggattctggtttctttgtattttgtgaattgaatgaaaatcataaaagggtaagctaatcttcttcaaaacttgaaaaaaaaaatcttgtgaagttcccaatttgatgggaactgctgaagagtgaaagactatttgttaataatacatacaagctgccatcagtgcaaaactgcatatgggaaattcattgtgttccattctttacttcactgctaccggtttttttcatattcatattgtgatttactctataaaacggctatgttgagttcatatgtataagattcaaggtgattgcattctactgtttgaatcaatgaattgcttccattttcctattaagtttggtatgattctagatatggcctttgtaaatttgtgtgttctatcttctatctggggatgcaaattcttcatgaagatttgtccttcttccatcttggccttgttttgatttattaataacatatctttcagatattgtgacctttttgagctcatggtattattatgaactttacacctacaggcttttatcctaatgaagttcacccaattctgcaggcttgataaaactaggttct

SEQ ID NO: 19445 - DNA, 738 bp, Glycine max
  Intron number 2 from transcript Glyma16g22920.1 (locus Gly ma16g22920) derived from phytozome v7.0 (chr-ID Gm16; pos 26564927 to 26565664)
cacgcacttgtacgattacaagtcagggttcgtgcgaggcagctcctaggtagctttgataaggaacgacctactaatttacaaagtcaaaatgtatagtcttctccgtgtccaaatttattctttttttgtccaaagttattcttactttaatttatatgtaaacattcacaagaagagagttcaataatttggggatttcaatactgttaattttttaatcaatcaaattatatgtcatcttctttttaattattttaaactaatccttgattattatttttaaaaattttaaaattttaatttttttaaattaaaaatatgattaaagataactttaaaagtctaaatcctaatttttttagttacttttaatatttttaataaaacacatgtttaagaaacaataataagatatttttaaacataaatcccaaaatattttttataaaaaatattgaaaataacaaaatattttaaggttcatatttctaaagttatctttaatcatattttttaatttaaaaaagttacaatttaaaaaaaaatcaaggactaatttaaaaaacaaaaataattaataagaatataacatgtaatttgattagttaaaaaattaataatatcaaaattgcccaaattatcgagggcccgatagaaactctcttacaagaatcaatggcttgattgaggttggttttgttttgccgatgagtgcttggtaggtcaagaacgtgg

SEQ ID NO: 19446 - DNA, 634 bp, Glycine max
  Intron number 2 from transcript Glyma20g05620.1 (locus Gly ma20g05620) derived from phytozome v7.0 (chr-ID Gm20; pos 6648625 to 6649258)
gaagagaaaaggtattattactttacaagaaaagttacatgaaaccgaaaatgataccatagacagttaatgtgaccaactcaatagccaaaataaataaatatataattataaataaatatacggatgttaatgtgttgttacaaatataagaaaagttatatgaaaaattgtgttaaaagtatgtgtataaggtgtgtccctccggattttcattgtctttttctctcactgattttatttggtatattaaaagaaaagatatagctcggaaattttttaacttgtagccgggttccccttctttctttttttcaattttttcttttcagaagtgcatgtcaggttgctagtatattaatatgtagctgtgaatgaaatgaaaggaattcatgttgtccacttctattgaattgaaaaaacatataatgatcctttcatgtgtattgtaaatatatgtgatctgtcctcgtaaatgctttcttcctcctatattttgaagtcattattgaatttgcttccactgtgtttcactcaatgatcttttgatttacctcaacccatcatggaaggacaagtattgagataatacttatctgcagggttggatttggggaccagaaaattaacagtc

SEQ ID NO: 19447 - DNA, 809 bp, Glycine max
  Intron number 1 from transcript Glyma18g04160.1 (locus Gly ma18g04160) derived from phytozome v7.0 (chr-ID Gm18; pos 2897181 to 2897989)
atcggattcagctgttgttcctcctcctcaatttcggtaaccacctctctctgtaattctccacgcaattccattttcatcacctgaaatgttccgccaatgtatgttgtgaatttgttatctctatttttataatagttatgatgattaagcgtttctttgttgtttcttttcgatttaacgtgatttcgggattgagctagggttttttgtttgactttgttggaggatatgcgtttggctgacaccttgatttgtgtatctccattggattagaatcttgcaaattgtgtaatcttctgtaatgcttcaagtgatttgcatcaaggttctggtgtttggtgtgttcctaaggaaaatggattttggttagtgacagctaagtttttgattctgttgtcaatttatgttatctgttattggagctggatggatggcttcattttgtcaaggaaaaaaaagccacttagaaattataattgatgaattctgttgttcttttacttaagtctaaaacagggaccaatttatttttctagctgttgtgtcaaacatttgggatccatatatttttgcgaatgctccatgcactgaatgaacagaataacggaaatatattttatgatcatgttctatgtgagagtgaaacaacttgaaatgttcatggattactttgattgtattagttgttgtgctttagctaattatttgtcgttaaggtagacacagatttaatcctttattactcctttgtggtaatgttatttttatgaagattttttatgagtgataatattttacagtattgg

SEQ ID NO: 19448 - DNA, 738 bp, Glycine max
  Intron number 1 from transcript Glyma17g34240.1 (locus Gly ma17g34240) derived from phytozome v7.0 (chr-ID Gm17; pos 38097081 to 38097818 reverse strand)
tttaaatctaatccacgatctcaataattctgagtgtttttttgctcgttttttcagtaaagtttatttttttattaatcccccctttttttatttgtaatattcaaatataaaattttacttaaaaaatcttatatcaatttcactcaattcccattttgatcttttttccgtgtttcctaatagaatttttttaattacatttttttgcataaaagtcaaatttaaaattttacttaaacatctaataagaaaataatttttttatagttttttaatgtgtttgtgtaaattatttttatttaaaataaataatttttttcaagaaataaatcttcttggttacttaattttttttaagtttaaataaattcacccaatttcagttttactcaaaataaaaaatattttgatatttataagtgtcagtataaaaaataaaaatattaattcgtacctttataattatattgcgacatgtgaaattatgttatttaagatttttttttatcttctcttataatttttataaatataattttttttaaatttttaacaattactgttaggacgttggtctgtaagatcctagaaaaggtaaaattagcagcaaaataaattatatgcaatttttaaaaaaatcgctgaaatttcaatttaagtattaatgacaaaagactttgtcgttagattttgtcactattagtttaatttttttctttatagtgtgttacagga

SEQ ID NO: 19449 - DNA, 773 bp, Glycine max
  Intron number 1 from transcript Glyma14g05110.3 (locus Gly ma14g05110) derived from phytozome v7.0 (chr-ID Gm14; pos 3543951 to 3544723)
aacttcatcttcaaccctgcgcttcttttgaactggtaaaaacttcgatcattttttgctctttagtcggtgttcatttcaactcagaagtcagaacatcggagctcatcaagtatgttaatcacttaccacgcattcacgaattgggtcttgaccaaaccctaattagaaaactagtgtttttacatttgtaattgatttgtgtgctttggaatctgaagattttattatgtgtatttagtgtatgatatctacttctctgagtgaatgacaattaggacttaaaacagccggaagtgaacattgatgattttatgaacttcaattgttattcatttttctggtccatttccattccgttgttgtgggttttaaagtgtgtaggtactaggtaaggtaagcctcacccttcaaattttcaagaaaaaaaaagttggaaacttgtttctttttctagccatatatgatggaaacagacacagcacaacacacaagtaaaacaaacaaacccacatagggaagcataactacacgtgctactatagaatcaacggaaggttatgttatagtgtcagtttttccccctttgcagttaaaaattaactgagattactcatggtaatttaagagggaaatgtgttggttggttcctgttggaacttttattcaatgtgcatcattaaaattggaagtctttgaatttcttaaaacctttcttgcagatttgtgctagtttgcaagggaagttgattgattgtaaactgttaacaggc

SEQ ID NO: 19450 - DNA, 790 bp, Glycine max
  Intron number 1 from transcript Glyma20g06220.1 (locus Gly ma20g06220) derived from phytozome v7.0 (chr-ID Gm20; pos 7975213 to 7976002 reverse strand)
aacaaggtaatttattttttgtttctgctttctggtacttttttgttttcttttctattctatgaaggttgggaaacattatactatagaaatatgtatatgggcattattttctgaactcaaaatttgtgataaatgttgatagggaacattgttaattaagcgccccaaagaaaaaaaaaaaaaagaggaggaaatcaaagaaaattagtaaaatgggatttcattgaaatgagaaaaatacaacataatgtgagtctgatacataatctatttaagtatttatagatcttatttgtaattgacaactaattaactagccagtttagctatctagccaattgactatttttaactaactaaataacctttaacaaatgattgatattgaaagctttgtttgtgatatacgtggatgccaccaaatttgtttcttacttttctggttctgattctgtttctatctggatttctgcatttttattttctttgttgtgtttttatggaagttgattttcttttacctttcatttttagaaatctgaaattcagaatacaagtattgaggaaacatcttttacttcaattttgtgagaaagatatattatttcctttaaaagtttctgttgaaatgatttcccatatacttgctcactataccatactgttgagattgttagataatgaaaggggtaaatgtcgaatgaatgttattatgtattggatattggaaataacttagtgtttttggatattggaaataacttagtgttttctacttgatccagcg

SEQ ID NO: 19451 - DNA, 857 bp, Glycine max
  Intron number 1 from transcript Glyma14g13290.1 (locus Gly ma14g13290) derived from phytozome v7.0 (chr-ID Gm14; pos 12621703 to 12622559)
acatcaaacggttcagattgggacccactctgcatgtctgtgacttcaccatgccatatccacgtcgtgtaattcttcttaatcccatcacacaatagatggtcccgtatgtcatcgagtaattgttgtcttccattcaaacagttgatgcaagaacaataatattttccttcttcattcggtcgacctctttctgaagcaaattgcaagaactgttcgatgccatcctcatattctgggctcatgcgactttcattcatccaacttcgatccatctaagcaattccatgcatgaaaatctcactttttttatttataggtgtggccctatcccatttaggaaaactgtcttttatgttagcttcaaacgttagggttaccattatttacaaaaatttgaccaaatttcggcagcatttcgcattggtctccaagtacacgacatgacatcggtcaaatgaatttcccgataatcaagtatgcactcagagaacaatatgaaatgcattggaccaaaatttaatcaaattaatgaaaataataataaccttcacgaatgaatctaacataaaaataccaatctccccaaactgtccaagcggacaattcaagactaaatacaatgactaatgcaaactgtccgcaagagtcattgcattcagtctcaaacgggaatctaaggttcactcagcatgaacaacagttgtttatatagcaaattacactgatcacatacaagaacatacaaaaggttaaattcaattacagacaaatatagacatcaacagttgattatgaaactaatttaaaatgttgggtttgaagggtgcttatgttttgttattgtagttgggtat

SEQ ID NO: 19452 - DNA, 665 bp, Glycine max
  Intron number 1 from transcript Glyma20g33860.1 (locus Gly ma20g33860) derived from phytozome v7.0 (chr-ID Gm20; pos 42336299 to 42336963)
ttgtgccatcatcctttggctcttttcaaatccaggtgaattaattatatagaataacatgaattaaagtactcatttatttcttaaaacaaaatatatatatatatgagtttcaaaagttggtttttcttgaatgatattatttcatttttgataatgaagttatccaagtatatacgtttcttgaccaaataatgtctctagagcttttgtattaaatatcaaaacgaaaaatggtcaataaaaaaaattatacatttggctaagtctttcgattaaatatagctgtcacttgagtacgattattagatttcttctgttgataaatgacatgatatgtaaattctactatagctcattattgaggttgacactctttcccgaccttacaagggagtgtgcatgtcttcttgtaataaacttttcacctcggcaaacaaaaataaaataaaaagctgaattaaacctgccaacgcatgaaataagatattatttgtcataattgaattatttttaaaataaaaaataaaacttttctctacattataatattgtattattttttattttattatattttaagaaaatcaaatgtcgtgtactttgtctttctctttgaattatttgactgattagttttattttttctggttttcgtataatag

SEQ ID NO: 19453 - DNA, 737 bp, Glycine max
  Intron number 1 from transcript Glyma18g30690.1 (locus Gly ma18g30690) derived from phytozome v7.0 (chr-ID Gm18; pos 35300866 to 35301602)
aaggaaagctagtaagctaaagcatttcaattttttatacattttttcttgaattagaggtttatgtttttatcacatgcatcgtatctaatgtgaatttgggtcgcgcttaaaaaaatgatagcatgcagacctttgattatggaccttggtatataaacatgctcctgtgatcaccatttcttttctgttttcttatatattttttataatttttttaataacaataataatctggctatttagcatgtgctgagaacaatactaccgatatcgatggtaaattttgtaatttttttaataacaaattttatttgtgtcgtactttctctatctcttcactcattcgccaaagttggttatacaacatgagtagatatatatattaacaactaactgactgtacaggattaaattaattaggattaagaattactatatagataatttgttttgtaagcttcaagtatttagtattattgatttggttcttttcgttttctgaatgtttttttcctttttggttgctgatggcctttagattagtggctcagagcttccttaaggagcttttatgttagattcaatatttataatgagccacccttattcctcatgtcatatttagttgccttccttccctcgtcttcttgtataaatttgagggatgttagtttaaattaatgcaagataacacctttcttagctttaacatacacatctgatgttgttgacag

SEQ ID NO: 19454 - DNA, 479 bp, Glycine max
  Intron number 2 from transcript Glyma17g05230.1 (locus Gly ma17g05230) derived from phytozome v7.0 (chr-ID Gm17; pos 3577501 to 3577979 reverse strand)
atcttaaacccttgaacgatagagtcttgataaaggtgtgttactctttagagctttgtttattttgatgctggatgttaggagaattgcattggatagtttgtcaatcacagaagagttttttaaccataaatttgttagaataaggtgaaaacgagcttatttgataagctacaccaaaaagcgtattggaataagccaaaaagagcttatgagagtcataagatattttcgtaagcttaaataagttccccataaactcttccagtttccccccttgatcatttaatactcaagatgtattgttgttctgccctttttgtaacttgttcttgtttgctttaaagctgtagcatatactgactataatttctgcttattttacatggctgtgacaatgaattaatgatggtgtctactgatttgttcaaatatttactccaggttgcagaagctgaggaaaaaactgctggaggttt

SEQ ID NO: 19455 - DNA, 1045 bp, Glycine max
  Intron number 2 from transcript Glyma15g13970.1 (locus Gly ma15g13970) derived from phytozome v7.0 (chr-ID Gm15; pos 10538089 to 10539133 reverse strand)
ctgtttcaggactctcaagctcgctacgcccacgtgtaaatttctgctttctctttttaattggtgtttttgttattgtggttgttctgtttgttgctgtttgctgcagatgaacggttgaattgttgagtaattgttggtgtaattgtctggttttgctttgaatttcacaatttaacttagggtttaggttctgtaagcttggagccttggatgaataatgttgagtaatatttgtcagtgtaaggattgttttatttgtttactttgataaatttctccataagtatttagagaagaaaataagaaggaaaaataaaataagcttttcctaaagctaaaattaacttatgcataagttaaatcaacttttgaaaaaactaaatgagagagatctacgataaattagcttataatgggggaactttatttcattttatctttttttcccccttgtataattgtttatggagaagtttattcaagtagagctgaactgtcattgtgttggtggggccatggggggattcaagtggggttaggtcttgtgtcttgctagttgctggtgagtggtggtgttcagcttctgctatcaatttggttttcagtccctttctctaaatggaatgtggtcactttattgatatttttttgagatttgtattgaagatgttaaaagaactaatgtaaagaaaattgagttttgtttggggatgacattttaaaagtgggttataagaagaattgattttatttgaataataaaataaaatcatcttgaattttatgttttgttggttccttcacctaaaacaatttttactcccacctgaaaagctaaaataatttagttcttaatcaattctactcacggctggattgattttaagaactccaaaaattacctagacaactattgttagtttacgaataaattcttttgggccttaaacaaataggacattagttggaagttcattttaacaattttttttttcttgttttgattacagttggtgaccttaaccacctgatatctgccacc

SEQ ID NO: 19456 - DNA, 289 bp, Glycine max
  Intron number 4 from transcript Glyma18g00920.2 (locus Gly ma18g00920) derived from phytozome v7.0 (chr-ID Gm18; pos 437122 to 437410 reverse strand)
ggaagtacgttctgtttcttcgtttctgtcaggtcattgaattttcttcaatctgatatgttatgcttcatctttcacttttttttggaattaatgaaagaaaagggtataggtgaaaaatgaataatttattggaagttgcaactttctttttgtattggtaatgattgatttaatgttacataactcttgcttctgtagttttctgttatactatctttgtttttgctttgctcatgttgcagttaatatttacttttttgatttggtattcttacaggtgggatat

SEQ ID NO: 19457 - DNA, 381 bp, Glycine max
  Intron number 2 from transcript Glyma18g00920.2 (locus Gly ma18g00920) derived from phytozome v7.0 (chr-ID Gm18; pos 438051 to 438431 reverse strand)
aaattcctcagccaccaagcgtgctaggactggtgcgtcatgctttcgttttatgttgttgtttgttttctttgattttcactttctgatgtttatggatactttccaacattgttgttgatacttgaaattatcgtgcgtgctattttacattctgcaatcaggccatgcactggtgggtgcattcgctagcttccacactcacctttatgctactaatttgtaattcaaattcttacttggtgtttgtggatgatctggagttgaacctaaagttagatgcattttaattggtttttgtctgtaggtagtcgtagggaagatgattggacatgccccagctgtggtaatgttaatttctctttcaggacaacttgtaac

SEQ ID NO: 19458 - DNA, 865 bp, Glycine max
  Intron number 2 from transcript Glyma15g18050.1 (locus Gly ma15g18050) derived from phytozome v7.0 (chr-ID Gm15; pos 14487694 to 14488558)
ctcttggccgtgttggtgctcctattgttactacggttagttatattaacccttcacatgttttctgttgattgccttcatgaaatttactggggaatgggactgatatctgtgattgcctctattttgtcaagttttactgcttgttgccgaataatgtgtgcgtgtgtgattgcctgttttttgcaaaagaatatgtatgtgtgcctctgttttgtgtgtgtctatatatatatatatagaagagggatcaagttactccaagagtaaatagttactttccatccccacattcattttattgaaatttaagggttaagattagtaactcattagaaccattggattttaagaaaatgaatggtgagtaacttcttaaacttactcttggaataacttaatccctcttcatatatatatatatatatgctagtgtgtgtgatttcatctattttgtcaagttatacttgtaattgggagatttctcatgtttgtccagaaaacttataatttgttatgagataatgaacgtttgttgaaagattcctgtgggacgtaggaaagaggttctaaaccacattaaatttgtgtcttttgctatttatatttgtgttgttattctgtatcatatacctttgatcttcattgtgtgtgaaggggattccaccccaacaattatgtgggtgtttaaaatttgtcatagcttatactgtctattgacttcatgtgcagtcagctaaaagaaaatttgtttgctcattcttcagtctatatattttgtttatttatgtcttctgttgaattgttgatagtcatggtacccttcattcccccaataatttcttcttattaggtaatacaaaca

SEQ ID NO: 19459 - DNA, 698 bp, Glycine max
  Intron number 1 from transcript Glyma14g12790.1 (locus Gly ma14g12790) derived from phytozome v7.0 (chr-ID Gm14; pos 11723542 to 11724239 reverse strand)
gaaggaggcagttccaacaagaggtataacacatgttagagtccatggttcagaggggagaaaagtggaaaaagtaataaaattgaaagtgaattttactcaaatgagaaaatcagtttttcaacatagatatgtatgcaattggttgatggaataaaaatctttatactgaccatgaaaattaatctctttttagtaacttgctcacttagaattcttttctaagctaccctatacatgaagctagtttgtaacttcacatattctaacaattatgctttacaaacaaaattccaagtgccttagaagaataacatgtataaatataattactgacttttctttcgcaaaacagtgattgtctttcattacttttgtaagaaacttctgaattcggcaagattatgcttagaattaaattagaatgtattgatagtattacgtttttatacaagagtagaatttatgtgcacggtcagtgtaaaagtcatttttacaatgttattcaatcatgctttagcatgtatagtaaaattattgacttttgtaatatttaaaactcatatccgaggatactttttaattgatggatagaataaaaatatttacacttatagtgtatgaaaatcaaactcttgtgtttatgcaatcttcacaaaaatatatttttccttctcgcatgtgtaggttgagatatt

SEQ ID NO: 19460 - DNA, 883 bp, Glycine max
  Intron number 2 from transcript Glyma16g04620.1 (locus Gly ma16g04620) derived from phytozome v7.0 (chr-ID Gm16; pos 3901154 to 3902036 reverse strand)
ggatttaaacaactttgccgaagatttaaagcaaggtaaaataatcatgtaatttgcattctgatttattgtgtcatgtatttacaattttcaaaattacacaacaaaattagtataatattcaactcttacttttatattgattatggttaaaaagtttgccagtaaaaggatcaggtgtaagagtgcagtaacttataaaaggaagcagttatgtcttcacccgttatcaatgggataatgcctctgtactaaaagcaataagtttatctaatattttcccagaagtatatatacatattttgcttttgattgataacaattagaagtatattttaatttgaggtagaagactgtggaatagtggataattggggtgtttatggacctgtataaatatcatgttatatattagaaataaattgcaaaaacataagggaatattgttttggaatttaggggtattttttttctaaatcatttttgcactgtatggtgtgtatctagttggaaagaaatgccataatttaattggtcaattgtagcctcttgactcttgagttcatttgagatccagaagttcacttagctcctttgtggtattctgcaaatgatctttttagggggtgtccttggtagatctgtagatagagagactggcatgctgggtttaaatgttttgttttcttaaaaaaattctttcactcttggtatatagtttttgaggatttcatgacctcttgcatttatatctatgctttcttctaaattattttttatcaaaacaaaattgtttttgtggtacattatcaagtaatgagctttcttaacttattttgttctttgctgcattttattttgtcagagggtaaaatagcaccag

SEQ ID NO: 19461 - DNA, 300 bp, Glycine max
  Intron number 1 from transcript Glyma15g10830.1 (locus Gly ma15g10830) derived from phytozome v7.0 (chr-ID Gm15; pos 7883855 to 7884154)
cttcaaggtaaattttgtttttgaaaccctagcttcttgatttatttcctgctgcgttgactttcggtgtttttttatgatttcgctcaaaacttcaatttacttcaaacgattgttttttattagttacacctctagattattatatttatatcttgtcaaattgtatgctcaccgagaaaatggggaaaatgtgcctgaagagttaggatagggatgattacatttttaagtaaggtcatagctgtgttgaagtttgtatcttatgccaagtatgtatatttcagttattacaggaat

SEQ ID NO: 19462 - DNA, 877 bp, Glycine max
  Intron number 1 from transcript Glyma20g30870.1 (locus Gly ma20g30870) derived from phytozome v7.0 (chr-ID Gm20; pos 39553087 to 39553963)
aagttcgttaatcattgcgcatttttgcagcacaggtttcaccctcacaaaccatttctcgcttctgcgatgacctttgacttctctttattgattattctatgccatattcttcttttcggaggcaaatctagccctaacattgttatcgctggctcaatttttctgattcctaggttttagggttttagtgtaagccatttgaattctttagtaccaccaacatttcaagataattcatgataccagcattagagttgtgaatttgtgattcaatagagtgagtatgtgactcttaggtttgaaattggatgcaaatttgtatactatgtgtcggtctaccaagagaaacttgtactgacaatatgttattttcagtggattcacactcttgcgatttcgttgttgtgaattttagctttaaactagtttataaggaacatatcttctggggtttcttgaatggagaaaaagttatttctaacccatgtctttgatggtgaaaaagagctaactgtgcttgttcttacttcttatcctttttgaaggaaattttgaacaaagattaatttttgacaacttccttgaagaatgtaggaaaaaaaaaaagaacttcgtcctcccatggtgattagtaaattgagaacaaaaagccatgttcttatttttctacgtcggcattttgcaagattatgatgcttatttctattttttattttttattgaagtctggtttaatttgttagttgattgctgtgtgtgagtataaagctatcagagatgagtcccgaacatattaatttatgtgctttgctctctctctaaaattatgtatattttctatttttacaggttaccaatacaaccagttgctcag

SEQ ID NO: 19463 - DNA, 978 bp, Glycine max
  Intron number 1 from transcript Glyma18g53360.1 (locus Gly ma18g53360) derived from phytozome v7.0 (chr-ID Gm18; pos 61618437 to 61619414)
gcttgtgttgctgccttcaccgttgtaatcctcgtggtatactattacttctctctctctcaaacccaattttgtgtttcttgttttcggaaaggaaaagataccctgttaaggaattagaattgtagtatgctcttttggtttttctggaaacaaagagagagaatattttaaaatttactaaattgaagtaatgatatgagaattagaggctttggatgataagtagtagtagtagtttatgataagtaatgatcactcctctttctctctctaatgtaattactaattacacatgtttgtagttgtaggtaattgtgttattgcaatccaacgatatcatttactattatacattgagcatgaaaaccatagcaatcctactacatagtggtaggaaagagttatcgagagaaagccaattacttttaaatgttgctaaatcatgaaaggggttgtaacttttagtatttgagaatttggagtgccacaaatgattttaccatgtaaagttttttgattgaagtttttttgagagagaatcatatggatggatagcaagagaaataaagattatttgtcattttcacccgacttatttcccaagttagttgtgacttgagactggatcaaagtccggtagctctatttggatgagctaatcggtaaactaatacgtggttgtgtaagctgagcaacttggtggacttgacattagacaatggaccttttcaaaagtaggtccatagtttattatagtatattatacacttatgctacaccatatttggattgttagtggttaaccagggaagtttgcagatatttattttaatttaataaccatacataaatatgctacatcatatgtcatgtagattttttagggtataatgtcatgtatatatttattttggtctcagtggctgttcaactgatcttcttgtgtgcaattgctttgttgtggtggttatagct

SEQ ID NO: 19464 - DNA, 932 bp, Glycine max
  Intron number 1 from transcript Glyma18g49060.1 (locus Gly ma18g49060) derived from phytozome v7.0 (chr-ID Gm18; pos 58451922 to 58452853)
tggataactccataagtggcactagtgctaacagtggtaattttcattccttattgatatgcctctcttctttagttcgaggaaattatttcaatttgaaattgattttgggtgaaaactgaaaagagagaattttatctttaccctttggtttaatccatccctttatctctccaattttaagaaacagtatagattgtgagttaattaaagtaatataaagttttattgtacttttactccttgagtaattggaggactacctagtttatttacatacaattgagtttcaaaactataatctgttgtgcattacctttggagagctacataatttttctgtaaacagtagcagtagtactatcttcattgatcttgcccaaaaggccgaggaagttatctatgtagttgttatgacaattatttcaacttgaggttctcaaattgtaatggtggggtgagatttcggtgaaggtaataatttcataggttcaactactaaaccagaaagttaaagggaaaatgattttagttgattcatctaacagaaaaagatatcatggttgaaacttagaattgacattgagaggtcattattgaatcttatatgtagtaataatgaaagtttatttatttatttttaatttttgaattgccttgaacaaaatcattaattttttacaccaaaaaatataatgattttgtccacggacaaaatcattattgtacgaccattttagcaccactctgtgtgatagtatttagttactatacaatgttactgatcctgtaataagttgcataaagtgtcgcacatcaggatcataccatgaaataatgttattttaattcttaaatcatgaagaagtgataatttaatttctgattttttaaacagtggaaaaaacatctgcatctgagaaaagcaagaa

SEQ ID NO: 19465 - DNA, 409 bp, Glycine max
  Intron number 1 from transcript Glyma17g10740.2 (locus Gly ma17g10740) derived from phytozome v7.0 (chr-ID Gm17; pos 8071426 to 8071834 reverse strand)
atcctattcctttcgattcctcttcccccagtttggtaagcaaaaaaccactttccctctttctgcacacaatttatcttccctcttttttctattcggtcgttttctgtttgatccttggaatttctcgatgctctgttttggctgctatgaagtgtggaaattaaaattgggaacttggtttgttgtttttttttacccctttctctgattggattgcgataaagggaattgatttaatcaggaaacatggattttactttttcattgaccgtaaaaagaaatttccatttcttggggtgttcgaattacttctcctttcgttgtaagaataaaaagtacattattgaagtagttttgtttttctactttaggaaattttgttgctggaagaattgcttaagggcat

SEQ ID NO: 19466 - DNA, 452 bp, Glycine max
  Intron number 1 from transcript Glyma15g24770.1 (locus Gly ma15g24770) derived from phytozome v7.0 (chr-ID Gm15; pos 25944273 to 25944724 reverse strand)
ccagtatcgttcgttgcttttaattagtttttggttaagtaaaaatttgtttgtgcccaacttaggaccatgtttgtaggcttggcttgtaaagatttattcttgtgttgaattgacctgtaattcccagtcactttaatgctttggatgcattgtgcatcatggatactgtgtttggtggcttgtatatcttgaccttaccttcaaattccaattcaaaatttgggttttttttttttgcaagatttgcaaattcttacttcttcaaaggtttaattcttggtttattacactttagagctattaatggaccaatctctgtaggttttggttatggggtgaattgatctgctttgatagtttatgatgcctttgactatgccaaatctcatgtctgatttgtggttgttgttgcagttactacaactaatcaggcagttgaagcgctgaaa

SEQ ID NO: 19467 - DNA, 913 bp, Glycine max
  Intron number 1 from transcript Glyma14g10480.1 (locus Gly ma14g10480) derived from phytozome v7.0 (chr-ID Gm14; pos 8681236 to 8682148)
gcactggtggaaattggattgcattgcccaaaaaagctggtttttctctcttccctttattagcatatatgcatttacaacactttcttggacacccattttcatttatattatatatgaatatttgccgatcttttttcctgattatttttttttgctccagttgaaggataaccaaacacaccgtgaaaataaaaggaaggatttcgtgagatgagaaaataatgaatctagcctagattgttctaagacttttcttggatacccgtctccagcaagcatgattgtttatttactttgttttatttggaaattttgtgttattgatacatgcattttacttgaatttcaatgataattttcatttgcttgctactttaatttttttggatttctcttagttgagattcaaagactatataatatctcatgatattgaaatagaaatcttctaagaaaatgttattccgaacctagaatcatatgtttaatcaacataattatctgaaaatcaaccataccacactatatatattcatgctactttaatttgagttaaacacattgacaaatgctgctgttttatctatatctatttccatttccataatttgtacaatttccatgcccactagtccactagtagacaccatttttccgcatatgccaggcgttatttttgaatccggggtcaaaattcataaataccttgtgaagctttcaagacatgaaacaaggagtgggagtttcaccctagctattatactctcttaattaatttctcaattattcaactattagctttgattttttctttctctctctttttttttctcttatcaaaatatcacgtcatggtagtatatattattatgcaggccttagacggtgtggcaagagttgccggctacgg

SEQ ID NO: 19468 - DNA, 560 bp, Glycine max
  Intron number 1 from transcript Glyma20g27070.2 (locus Gly ma20g27070) derived from phytozome v7.0 (chr-ID Gm20; pos 36324630 to 36325189)
ggaggccttcggcaattggttacgcaggtgaacttactagctaccaccatttttctctttcttttccttcttctttggatgcatgctcaatattatctgtcagaaaatttaagattcatacttctattgttttgtcatgctcagtcgcatatttttgttgccaatgatcgatctcatcaaactcaacaaaaaaacaaaaaaaaatcatgtaccggaacgtgttactccatgagtcctatagtaaatatgaaagcataaataagagattggtgacatgatgactcatgagttagttatttacttattttcagtacaatacatactgcatatataacattaagttgggattatgacttgctaggattctcttaatctattatatcatgtagctcttccttttgaactgaaatgcttcttcatatatgtgtgtgtgtgtgtgtgtgtgtatgttctattgatatttcattgaacaggattaattgaatgaccttcatagtggaatttgtaaacatttgtttctcttactcttgtccaatgatagcctctttttcaagcaagaa

SEQ ID NO: 19469 - DNA, 1011 bp, Glycine max
  Intron number 2 from transcript Glyma15g12760.1 (locus Gly ma15g12760) derived from phytozome v7.0 (chr-ID Gm15; pos 9429493 to 9430503 reverse strand)
caaccagggaagcattttcctgagcaggcagtaaagtatgttttaaaacttagtttcagttcagtcatactgatatataatactcgctgtatttctccttttgaatttccccctgaacattattacttgtgtgaaaactggatccaatttcagatacaatgctttgctggtttgttatagtctacagggaaagaaactagatttgagtctgcttctcaggatgtacaactgcagcatttatattcatattttattttttgaattttgccttgggaaatcccttgaattttaatgtaggcagttgcagtggaatcatgcttgtgctcccgtacttgttgctctaattactgcactatattgaaacaacttaatttctaatgcttagattacttaatccttgtatgcggattaagaaaaacgatgactatacttatgtaaagaacattaaattttaagtttagaatcctcctgtgccatgcatgcatgaaaagtataggtggaggttgtgatatgagttcctttgcatgtgggtttgcatgcaatgttttgcttttcatatgtttatgatgcctttggttgttttgttcaagtcctatatgaagtcaaatattaattgcagacaatttcagatatcaaattgtgggttttatgtctgctttgattttaacaaatgtccaaacaagtacataacctcaactagagtaaaatgaatctttgaaagcttgtttgtggaaagataaattaagtggaaattttaatcgtcattaatattaaaacaactctagggaatttgtttagtttcctttacagggattttctcagtgcaggtgtatgccttaacctctgatttttgataaaattgtcagctgaaattagatgtttgatgtttcttaagcctcttagacatgatttcttttcttgctttgcatttttgggttttttgcctggtttggcaattatgttatgatttgatggtatccactgctaatttccttgtaacttgcagatttt

SEQ ID NO: 19470 - DNA, 672 bp, Glycine max
  Intron number 1 from transcript Glyma15g12760.1 (locus Gly ma15g12760) derived from phytozome v7.0 (chr-ID Gm15; pos 9431473 to 9432144 reverse strand)
attctctcaggatcactctcttgcacctgcttctggtaattttccgccaccaccccaatacctttttttatctctccaaaaatctccaatttttgctggcaagtttgactcatactttactcttctcttggtcttcgaagtccacccttatgtgtttttgtgtttttgggttgattcttgacttgttggtgttccagctctgttgagctttactaatcggatcatgctatgcatgcgactttgctagggatataaaatatatatgctttttatttgcttcatgggtcttaggtttttgtcaactttctgttcatgaataatttggcatgtggtttaccactctggtggagtctaaggtctttggttggttaagtatcttgtttgtgttttggttatgtgatgatggacttttgttgtatcagtgggagggactgttttggttttacttattgatggatctatttatctgttgttgaatgtgagacaattttattgtgatgttatttattgatgtttgaagtgtttgcttagtggattggttgatgaatttctgtcaacatgttattcttaaactgagaatgtttttttttcccattttgtggggagatggctgactacttgtttgtgatgttgatgcctttcataggttgtttgctttttttggggagttaa

SEQ ID NO: 19471 - DNA, 706 bp, Glycine max
  Intron number 2 from transcript Glyma20g39090.2 (locus Gly ma20g39090) derived from phytozome v7.0 (chr-ID Gm20; pos 46536420 to 46537125 reverse strand)
caggtaaaaataaaacaaaaaactatttgtagaattaatggctgtgactttattcagtttgaagtttgaactgaaaaaacacttttgagtggttatttggtccttcagcttaaatatcagtcggcttaatctcctcattcattattctctctgcaagctaaatgcatgacttttttatgactagttgaacttggggaccaggtaattgtaagctcaaggcccaggttaaataaactagctgctacaaacataaacaaacagcccaaataactgacaaattaaggaaattttcacaagacaatgttacctaaaaacttattttggacaaataattgccttttttttgtttgccagtttcttaagagagctttcaaaaaaactatttccccaaaaaaagatgttaccactcatgggctaaaatccccttcatagacaatgttagttcctgactttgagaacctaatagaaattactaactaaccctaggagtggaaaaatggtgttgactaagttaactcggcctgaccacatactaaacataagaatcccagattgtaaggcaaccagatgttacagtttgacccaacatccaaactagtgaaatttttttaaaaatctttgaatcttctggattgtaatgctgtcttcattgtattgtattgtattgactatctatcccttctttttaatggtgttttatatcagc

SEQ ID NO: 19472 - DNA, 948 bp, Glycine max
  Intron number 3 from transcript Glyma14g40170.1 (locus Gly ma14g40170) derived from phytozome v7.0 (chr-ID Gm14; pos 49143412 to 49144359 reverse strand)
gggggctactctcaaatttttgtcgcagattacaggttggtgttggttccttcatcatttcttaatttcccccatcatcctcagttttatagaatgaaaagaaagtgaattaaaatagagtatatataaaaatatgaaatttacgttatattttattatttatttatttgtctttttttcaatttttttttctttgcaaacgaactctcccggcccttagagatgacatcactgtattctttttgtggagtttttcttctttaatttagtgtccatgtattatttttgtaaaatattaaaaattatataatgattttgtaaaaattaaaatcttaatagccaaaacggtgcacgtgaaacaagatggcacaggcgagtaaatgaaagaagacaacgtctctttcaaagccacgttgcttttaaagggatagcaggatgttgaagacagcagaccacgttgcttttaaaggggtagcaggatgttgaagacagcagagcctaaattatcaattgcggttttatgattggttgcaattgttagatctcatttttataagtacttttattaataaattttgaattgcttaaagtaaattcttgacttccattgaataattttacttgtttatgcaataaatatttgtagtttattttttaaaaatatttttattagtaccaatttatcttagacttagagtagttattatccataaatgaaattgatacttggaagaagacattatcttgaaactcacgttgcttttaaaggcatcgcagtggtcgttgaagacaaccaacccccactacactaatgcttggtagtattaaaataagtagttttgttgataaattaataattatttaaagtcaggttttgaactttgtctataaaaaattcttttttgagagaataatttatatttgattaagaaaaaatgatgtgtagat

SEQ ID NO: 19473 - DNA, 832 bp, Glycine max
  Intron number 1 from transcript Glyma17g36590.1 (locus Gly ma17g36590) derived from phytozome v7.0 (chr-ID Gm17; pos 40556265 to 40557096 reverse strand)
attctgttattgctggcctcgcctttggagtcgtactcaaacaatttgctttctttaactcaattgtttgaaatcatgtcatgaagaaatttgatgctttgattcaattcatcactttaatttttatgcattgtcagtataaacggttaatcattcagaaatcatcactgacatgactactaagattgtcattgtaaaattcaatagccgtatcatacataatgctttgtagttgaatgataatgtaaaaactttgatattacccatgcaaaagaggcagaggttttgagaaatcaacatgaaatcattcacatttttatttgatagcttaaacaaactgttggactgttgttggataatgtactcattcatgtccatggcatatatatgtaaagttgatgcattgatgtctatggcatgtttttgttgaagaggtaaaaataaatgggcagaacatagtgggaaggaatgggatccctgcagttcatattttaagtgcagaggatctgcattgctagtgagaagcaaagttatatttttcattctgcaatgctaaattgtatttccaaagttaaaattggttttagcaccaaggttagattttaagtacaagaaaggttttagcacaagtggtcttcataaaactggtttaattataaattaagaaaatactattttttttatttattaataagtgtaaaagctattctgagtttattttatatcgttttaaatattaattatacagaaaagtgaaaaaaaagtaataatttggaagagttgattaagatgtgaaattgatggattatgtttttgttgagatcagttggga

SEQ ID NO: 19474 - DNA, 548 bp, Glycine max
  Intron number 3 from transcript Glyma16g24580.1 (locus Gly ma16g24580) derived from phytozome v7.0 (chr-ID Gm16; pos 28554998 to 28555545 reverse strand)
gggtttatatttcttcttgtaagtactaacttctatcagtgagaatgagaatgagaatgagaatttaattgaagtctacttttaacctatctttttcatatctgatgcttactaggagagagtgatattatatagaatggctgactctttgatgtttgcatcctggtttctgtgcatatatgcatcctgtccagtaaaattttaacttgtttaatgagtttgaaaatcttctctcactcctactcactcaccctcatgcacacaggagaaaatacatatcgaaattctttttcttagtcaggaccaaatcaatatgttaatatctcctagtctccagtacatagtagtttcatttaacaccaaacaactacttcaaaatcactcttctttatcatgtcaaaggatctcccccccctccatatttatttattttttccttccagacttgactgattaattattactgttagagtagttactggtccagctgcttgcttttgtagaagaccaaactcatcataccgaacttttttttttcaattgcagct

SEQ ID NO: 19475 - DNA, 491 bp, Glycine max
  Intron number 3 from transcript Glyma16g01930.2 (locus Gly ma16g01930) derived from phytozome v7.0 (chr-ID Gm16; pos 1436556 to 1437046)
ctgaagtagtctctgaaagggtaaagaaatattgtccaaagtccaaataatattggggagcagatctccatttgtttctgaaccgtcatattggtttattaagttaaaattgcaatgtgcattgtggcgatgtaaatttttgctacattttttcaatgtttagtgattttctactatatagtctgaaagggaactctagtgaaatatttggtttgagttggttttgatgctttgttgtgagtcatgattgattcacggaacattactgagttagtgaatgcttggacaaagggaatatttgggataggaaataaaatgtcgataaagcaatctctttctataccaatttttacccttccttgcatctcttccctaaaataaactttaggtcttcaaaactactcttttcttgggtttgtgatatttttttattttattttgagcacttcaagaattgaattcgtctgtttgtcttctgaaatgatcacagg

SEQ ID NO: 19476 - DNA, 876 bp, Glycine max
  Intron number 1 from transcript Glyma17g00660.1 (locus Gly ma17g00660) derived from phytozome v7.0 (chr-ID Gm17; pos 345753 to 346628 reverse strand)
gaaggtaatactaataattatcatacttactcatccttatgctatttcaaatcaaacagagcttccagaattgaaattctagcaccgcaagaagaaggtcgagaaggaaataacttaattaaatcctttgggtcagtttagataaacttcttaataagcccttgtagcatgtaagagaagaaaataataaacataatgcatctcagctttttggagaagtcggatgagagaacttttatagaagtcgaagtgcacaagttgattttaacttatgaaagaagtgaagttcaattcattttattttcttctcctataagtaattgttgagaagtttatccaaacttgccttattcgataaacatttattaaatgagaatttattcaaaagcttgactgcttgactgtgaagcttacaggaagcttattgaaataaagctagaaagatattataagtcaaaaccacttctataaacccatgtaagcgcttctaaatgcccctctagatctgcagtgggattttgtttttcaaattttctcttgatcctgtttccagatgtactagaatctcctgcttgccttgcgtttgaatgtgaaattcaaacagtgattaatgaattggtatctaaaatgatattattttctgcacacatgggccttgaattgcaatgatgtcaggcatgtaactttaaagtattttaatgagagaagcaaggtcatctccatttacagtgcttcccaattttgctgcagtataagtgaatcttcttgcataggaattgacactaccaacagagacctgcttcatctttatgaacactgtgcatctttcatttccttttattctttgctcattttaggttgcagctttaaaggagg

SEQ ID NO: 19477 - DNA, 855 bp, Glycine max
  Intron number 2 from transcript Glyma16g01940.2 (locus Gly ma16g01940) derived from phytozome v7.0 (chr-ID Gm16; pos 1444401 to 1445255)
aaaaccaggttcgtttcttttattcaataaattttaacactgcttgaaaataatctttctactaaattataggctttgatgttagagggccatatatgttgtactagtttgtactttttaggctttgatattagaggtttttttttttttttaatgatacaagaatgagaggaataaatctagacatataatgatacttggattataaaggtttaatatcatgtgaccatttaaaaaaagttatgtgattatttttaaatctcatatgacttgtatgttttaattgtggccaatatttattctttttacactcatatcaaaaaggtcatctcactagatatgtctccttatttgcaatcctattggttgttctgagttctgactttagcagattgctgttattggatactttgtttgaatctcatttattttttttgccgtctcatattgctgttcatggcccaattttctacatttagggtcttgcttgatgaatgatgacaaagggggcatgaaagaaatatttagcttataaacgtgactgatgaccttcctataacctctttttaagcttatttcaatgaattttacatgggagcttatcaaaacaagttctttttagtttatcaatgagctcctcgacaaagcttatggataatctcatgtgatttattggataagtgtttaattaaatcttttatctaagcactctcaaaattcatcatcagtgttcatcaaagactgtcaatttcttctgtataaattagtctgaatttccttgttcttttatttgtgtgaattgcatcaaataaatgctgattatactcaaaaaattatgcagaggacttttgtttt

SEQ ID NO: 19478 - DNA, 888 bp, Glycine max
  Intron number 3 from transcript Glyma18g12530.1 (locus Gly ma18g12530) derived from phytozome v7.0 (chr-ID Gm18; pos 11677019 to 11677906 reverse strand)
ttacaagatcctagcgtacgcgcatgtattataacataaaattcaatatactcataacaaaaaaaaaagttaaatacatatataatcaatattaaggtaaaatgtatttttaatttcttcaagatttggtcagaagattttaatccctacattttaaaaatggttagtttgatcttcgtatttctaaaacattcttagtgagtttcattcctggtcatatacttgattttgtcctgactagggacaaagttcaccacatttcgggaaatgaaagattaattaaaataatcattttttaaatataggaattaaaattaattttaattgagggacttaaatacatttgactcttaagggacatttgctaggagaaaagttttttcatttatgagaatatgatttctaggaatcatgaattctagaaataatgtgttcttgagaatgaataaaatttgtttagttgcttattgagaattttttgataagttttttaagaataaaagagttacgtatatttttaccgattattttaattatttaatatattatataatttaataaaaaaataccatgatatttttcttatagtgaaagaaaaattgaactcggaaaagtaagatttctacctccccgtgtgaaatttttcatgcaaagctgattaaaaaaattcatggaaaacatagtttctcaacatatgattggcagaaaataaaaaatttctcttctaccaaatgcttccttaaatgtgtttataatctcttctaatttttcaaaagttcttaatagaaaaaaattatttatctaaataagtagaattaaacatgatatcaatgtatgattgtaactaaacaattattatatatgtttaggtttccaatttggccatac

SEQ ID NO: 19479 - DNA, 941 bp, Glycine max
  Intron number 3 from transcript Glyma16g03490.1 (locus Gly ma16g03490) derived from phytozome v7.0 (chr-ID Gm16; pos 2932777 to 2933717 reverse strand)
caaggtatatatgcacaaaagtaggtctatagtttaaatgttttggttattaaagggagagatcattagttgctgttataatagtatattaaaaaaatattatgtataaatatgtggaagttttgagaagagagttgaaaagatgaaaagtaaaattacaacaaaagccgtatcccatgaaaagtaaaattaagagtgaaaataaaagaaactcaagaacctggcagggcagtgaaagaaattggatggttttgatagaactagttcacattctaaaggaaagaatggatttttgaagacacttccctggatattcgagagaccagaactctcctctcaaatggcaagatgccttgacaaactaacagatgttaacaaacaaataactaactaactaacaccttgagtaacaatattagctactaaaaataggcatctacatgagtgaatatgcacataattgtagtaattttgaagttgcagtttgacattttttttaatccaattgaaacaatggcagaacatcttaaaaagattcgacatggcaaaaaattttgttaagttgcaatacttaaagtttaaagcatgattcacatggatcagtaatggtatagttaacataaaatacccattccgcctaaaacatttctgatctgctagctatagtcatgataaaagaaactattacaaaacagtcctatggcagtctagtcatcaatatttaaaacagaggctagtaaaaattactcctccaaattttgcatgtcacaaccaaaatgggagtacatgactgatgcgtaactcaaataatgttacaaatccttctgtttaagagttgtcacaattgacatctggtaaaatacagattcggtcctttttttcaatctagtctcatgaaaattatgttgcttacagggggaaaggtgattatcagattgact

SEQ ID NO: 19480 - DNA, 617 bp, Glycine max
  Intron number 3 from transcript Glyma14g12050.2 (locus Gly ma14g12050) derived from phytozome v7.0 (chr-ID Gm14; pos 10696289 to 10696905 reverse strand)
gcaacccatcagtgccctacagagtgtcggaaagagtatgcgaaattcgtgcttatcatctcatttttagcgtatatttgttgaaggatcttgccatgttcactggttaaggaattaaaagaggtttttcttatttattagaaataatatgagaaggcatctttacgcaccctaataataaaactttccccttttacttccttaaccggtgccctaagcatttccttttgttgaattgaatgattgatcttattagacgtatcccactcccttctggtatgtctttgttctgcatgttccccttattttaagatcatcaattatgctagtgtttgagggcatggaaggagtattttgtagcatcttctgcaattcattctcttctggaatgggtgatgcttttaacttcctttgttccaattcctttgacgtaaggtgttctagttgcacattagtaaatatgcttttcatagtatttttggtttttaggtttataagtatctttttggcttgaaactcaatacggaacggagaacttcagcttggtctgggattgttaatgtattctattggtttttgcagtgtttgagccctacaaagacaataaggtggagctt

SEQ ID NO: 19481 - DNA, 602 bp, Glycine max
  Intron number 1 from transcript Glyma17g35330.1 (locus Gly ma17g35330) derived from phytozome v7.0 (chr-ID Gm17; pos 39290096 to 39290697 reverse strand)
aggtagtaggaattagtgtcttactttgtgaaattattttctgttaacataaactactgtttgatttgaggttaaattagtttatcttgccctctaatctattttttagattcaatttagttctttaatttttttagtttaatttagtcttctaattttttaaatcgattcaatttagtcttttagtctaataagaaatcacattttgcagcggttcaaaaccttcacaaaatacatatttttccaataaaatgaatcgaatttaaaaattagaggattgaaaaaaaaaactggaggaccaaattgaatgagttttataaattagagaatcaaattaaatccaaaataaattaaaggactaaattaaacctaaataataaattagaggacaaaaaattaatttaaacttgattttaatatctcttttttggtgaatttaaggaagctccggattttttttttcatcggaaaatgttagttacttagttgttagtttatgttacttttattttctgttaacataaaactactgtttgattttaatttctctttattggtgaattgaaggaagctcgggctttgttggggaggcttgaatatca

SEQ ID NO: 19482 - DNA, 419 bp, Glycine max
  Intron number 3 from transcript Glyma17g04280.1 (locus Gly ma17g04280) derived from phytozome v7.0 (chr-ID Gm17; pos 2860028 to 2860446 reverse strand)
ctcttctcagacctttccaggtacttgtgcttgtgagattttggaatctgtaattagatgcagtttggcttattgtggttctataatatttttagttctgttaattgtttttatgaaactttatatgtgctcaatgttgaatggctttggagagttcaaattgttaaaactatcagtgaagatgataatggtgggctttggttgctttttaataagtatatgcttctgagtttttgaattttttgttactcaatgcagtttgccataatgttctcatataatagcttttatctgtattttattttagaaaactttgtatgtgatgagtgctgaatggctttggttgctttgacttacgttcaaattcattccttcattttgcagtattttttgaatcctaaagttgctaaggaaccggt

SEQ ID NO: 19483 - DNA, 535 bp, Glycine max
  Intron number 1 from transcript Glyma15g04290.2 (locus Gly ma15g04290) derived from phytozome v7.0 (chr-ID Gm15; pos 3011936 to 3012470 reverse strand)
cgtatgtttcaatcactatcttctccacttacctttctttttttgtttctgtgaatttgttttaatctcgatgaatgaaatctcggtagttctactctacatgatcaacttcgaaaattgttctaattaacaaggattggctctgaaactatcgaaagattgtagaatccttataactatcagatcgaaagagtttaatgtctgtttgcgaattatttgatgcatgatacttttttttttctcccgatctagcacgtgcatagcagtagtgtcactcttcggactaagatccttatactcgttagggatttgtacgaaggaaacacgcactttgaatattttgtgatgatcttgaaagtgtttgtgtttgtgtgaatgctttatatgtaatatgatgatggcatttccttttgtttttcgtggatctggtttggccatatcgtggaaacaactaattgttaaatcaactcgtgttctgaaatccctaagtgattcgtcagcgtaaagtgatgctttgatttgattttgttgcaga

SEQ ID NO: 19484 - DNA, 750 bp, Glycine max
  Intron number 1 from transcript Glyma15g18340.2 (locus Gly ma15g18340) derived from phytozome v7.0 (chr-ID Gm15; pos 15071200 to 15071949 reverse strand)
cctctccgagtactccaaggtttcactttctcaatttgtttctgcaccattaatgtcactgtgatattatcacacactactaatggatcaaatttgtttttgttgcagcaaattgcaaattcatgcatcatattatacatgagcataatttatttttatcatcaaagctagaatgcttcaggattatttagtagaatttaattgattcaatttgcaaacgacatgcagtcacatgacacggtaaagagcttaaccaaagatttatatctaatggcagcttattatatgagctacatatgatataattgtaaaagggtcatgaaccactttataaatttgaacaaacaaacattataacttgtgattgatagaatctctcagatagtgatgacactctaatttgtggataatttatttgctactctcttaaattggtttaaataaaaaagaaaaaaacagaagtagagaagtagaagaggagatagaaaggacaacgtcacaatcttaaaagattgataagttgaaaataatttcaccaccaaaaattctttgataagaacctaagatttcacacaagaatcaagagagacaattcatgttgagttcacccaagtcaaactcttcctaatcctctttcacatagttagatatatattctttaattttaccaagccttgaacatgaatcatcaatcatatgatctttgataaaatttgtgattgattgcagcagaggctacttcaccctcta

SEQ ID NO: 19485 - DNA, 642 bp, Glycine max
  Intron number 1 from transcript Glyma19g40900.1 (locus Gly ma19g40900) derived from phytozome v7.0 (chr-ID Gm19; pos 47187461 to 47188102)
caggtatataaatcatcacgttacaattttcttgatagctcaagttcgacaacaattgttccataaacatagtgcttccaagcataaccaaccaatcaaatggttaaaataatttcacatttacttattttaatactttttttataataaaaaaatcactattattttgtaggtaacaaaatgatgggcttcaaattatgagacaatgagagaaaaatgtaaaaataacaaaaataagaattttaaaatgaatgtgtgattaaaaaatgacaggttaacatttgaaaacgaagagatattataatatagtgtagtattggtcgagaaaaagatgataaaagatcggttgaagtgatttaagcacgtataaagagatactaaacattggtgaaaaaagtaaagtgtataatttttagtcctctgaaagcaaaaaaccaagaagaacattgttaagggagactttgttgaaaaataacttgtataaaatttagtcttcagcatgttgtattatatgttgatggaagaacaattcttgaggcagttagtgttgttatctttgagtgaatatgtcagtcaataaactatggaatatattgatttgcctcaggtaacacaatttggttgcgggggtttcgtgatagg

SEQ ID NO: 19486 - DNA, 1025 bp, Glycine max
  Intron number 1 from transcript Glyma14g12380.2 (locus Gly ma14g12380) derived from phytozome v7.0 (chr-ID Gm14; pos 11123129 to 11124153)
cttacccatcagcttccccggcgcttcgtaaatccgtacgctcttttttcgtttctttttctctatttatgttccaattttctcattataatttgttactaattgttgccacgttcttcaatttaaattcttaatgtttcagcctttcagggtttagttccttttccgctgtttcgtttcgtttggtcccaaagaattgatttttgatttgcttggattgataagtatggttgtgtatttaataataatttataaaaatagatgtttggtgaacctagctcatatggttattgtgccaatcattgattcaactgaaaagtttgtaggtcatgtcatgtgtaagcacctaggaagcatgaagcatgaacaatttgaaaccatcttgaatattgtattaacactttgaagtcttctagctgcagtttatgccttgtatttttttatttttgaattccaaaacaagttggaacatcacaatattatatctatatcaaggttttgaaaaacagtttacgactgcaaggtttttggggtgtctgcaattgcatcacaactgcaatctgcaattatggccctgtcaaccgcatttctgtacaattttctgcaatgtgaaagattgtgacaaaaccgcaaattagactgtaacccacaatttaaaacattgatctaagttgactcttgctcatttttaaagcattgtttctctcttgtgaattatgatttagaatttttatattgttagttttaaattaattttatatgctctattatagtagtttagtgtttagtgtctgtgatgttaaaaatttctcgtacgtgtagtattgcatttgtgtcatgtattgtatccgtgcttttttggtaggcacccttgtgaggcttgtgacaggtgtgacctttgaataggtcaaccgttcctctctcaactttgatgtaaaagaaaatgttagttattgttcgctgaaaagctaaaagctaggaaattgactgtgttgttgctggtggtgacagttttattcagttct

SEQ ID NO: 19487 - DNA, 543 bp, Glycine max
  Intron number 2 from transcript Glyma15g11930.1 (locus Gly ma15g11930) derived from phytozome v7.0 (chr-ID Gm15; pos 8839852 to 8840394)
aagaatacaggtcacataagtacattaaaaacaaacatgtttggataaaagtttacaaactgaattcataaaaacaattccccttttttcttcttttatatcaaacttgatttcaatgtaaaaatgaggtaaaacttagattacaatcagacctaactaaaaatataaaacaaaaggtttttttagtctctaaacatgtgcctatttggtttactaactaactaccttcaatttacgtttctccaataaactcagtttgatgatatcttggtttctctcaagagtatgttcacatatttatatttggtttgaaacaaaaaaagtaatatgatcaatcaaagttagtttttcttctcaaacacagtttgcaaaaaatatgaaatctttcagatttatgtttacaaactttatcacaactcatgcactaatttgctaaatctatctttgtgcatatttaagttcaatttttttgtacaggaaaaagccgtgtctaacggggacacatgtacgtcctatgtgttttgttcttctttcaggaagaca

SEQ ID NO: 19488 - DNA, 256 bp, Glycine max
  Intron number 1 from transcript Glyma16g04770.3 (locus Gly ma16g04770) derived from phytozome v7.0 (chr-ID Gm16; pos 4074228 to 4074483 reverse strand)
ttcgcattggccaagaccttgagttgtttgtcaaggtacttatcatgtttacaataactcttactttaaaattataagtttgacttagtggtaaacaaagaagggagaaaaaaacaagtcttttaagtttttcgaattttttgaccaacaaaaactaacaattatcatttgccctaaaaaaaaaattcagacacattatattaaaccttttcttttctgatctctttttgtttttaatgcaatgtaattgcagact

SEQ ID NO: 19489 - DNA, 1036 bp, Glycine max
  Intron number 6 from transcript Glyma17g10130.2 (locus Gly ma17g10130) derived from phytozome v7.0 (chr-ID Gm17; pos 7578163 to 7579198 reverse strand)
ccctaattctactcttcctaaacctctgaaaagtaagtatattctaaacaaaaaataaaaattcaaactttgtcttttgatgtctgaaaatgttttattgtacatgctcaaattcaaatttcagagttaatgtttggaaattttaaattttatgaattttaaatatttcaattgaaatttttttattttaaaaattttgtgtttaaataaaaaaaaaattaaattgtgagtataaaagaaaatgaatgcaaaaagaagaaaagatatggttgggatgctttcaaagaaaagaatattgatctaggatggagagttgtaagggaactgggacaccaccatctcaccaaatcatctgtgccggtgagtaccttcccatgtgatgggcagtgatggttgctttcttgactattgggtgcacttccatgtgtctcccctctgtgcacctaatggaagttttgcgaaatattttttgaagaagaggatcatcgttatcaagaaagagttgcgagtttgagaatgaaatttcgacaactttcagaaagagaggatgtaggcaattgtttaaaattctgttttttcaaaaatttaaattttttaaataaatttaaacaatgaattttagattaaagaaatttaaattttatgataagttatttttttcaattaaaattctttattcaaatgaaccgttgaggttttttgtgtgtttattccatattattttcaagaaatgattttttgttttattaattttatatccatttctaaaatgtacgcatttttttctcaattatcagtttgttaaaaggttgctggcagcaactgtggtttatctttgttgctggcagcggcaccaactgttgcgttttggttagtactaattcgtgcttgtaacttttctttggaaaatggctgtgatatttagaaaaacattcatgaaaacgtagtttaccaattttagtttttgcaaatgtggtttatagtgcttcaaaattttgcagaaaatcgaagagaaaaatctctggctctgcttacc

SEQ ID NO: 19490 - DNA, 548 bp, Glycine max
  Intron number 2 from transcript Glyma14g03880.1 (locus Gly ma14g03880) derived from phytozome v7.0 (chr-ID Gm14; pos 2535255 to 2535802)
agggtgaagttgtatctcgcggcggcggcatcgacgtggcgaagatgaagtgcttgtcctcggagtcgcaatcgctagagaacaagtcgatggctggagatgggaggccatggagttgaaggctaaatttttgaaatattacaaactaaatttaaaaaaaaaattatcagggatcaaatgaaacatatttaagttaaaaattaatttctaacggaaaaatatttttaatagacaaaaaaatagtgcaaattcaatttataggagtagaatttgtaaaaattaaattaaagcttttagccaaacatacgtatatcaatttatcaacaattttattaaggctggtatggtgtcttaaatttatttgttttaaagtaaattcgaaaattttaatattgtaaaaattaatattttatgtcgcaccttttaaaatatttaacagatagttaatatttaagtttccatataattgatgatgacaagaataaattagagattataaaatgctatttttagcaagtaaccacatttatcgtgcagtcttataatat

SEQ ID NO: 19491 - DNA, 994 bp, Glycine max
  Intron number 3 from transcript Glyma16g02950.1 (locus Gly ma16g02950) derived from phytozome v7.0 (chr-ID Gm16; pos 2524684 to 2525677)
tgtgagtatttctgaaaccctcagcattttgctctcaagtgaaaattaacagatttgtgtttgcttgtactcggaatgatgataataataatgattatgtagtgttaattttgggtgtgctgcattgctgctgcttagattttactctaaactttgtcaattttgccaaaagaaaaaatcattatggttgtctatctatcttttattactaatgattaggggtgtgtttggaaaactgtttgattggtgttgaatggaagttttacatattataatgccaaagcataaagtaagagaggtgttggattggtgtaacattggatggaatggatatgtaaacacattctagttaaaattaggcactttagttagtaagtagatactagttatatttgctagacagttagcagaattagttctcgccttcatgtattcaccacagctactaatagctgaaactgtaattaaagttcaaaatctgttttttttataaggacaaaactaggatacagttttggttacttttagtgatactattaaattacattgaagtttcacctcgataatatgcacaataaaggtttgcattaaatgttagagtaggttaccaagatgaaacatcaattctaattggagaaccactccaaaagcatctaaggagttgcttctaaatttttcccttttcataattcttcatttgcagcttccctcactctaacactatttgatgtaaacttaggcgtaaaagtgagcatcatagtttggttgctgttttatttattttttcgtaggaatatttttgtaacttaccacttattcactgatgaaagtgcttgaagaacatgctctgtatggaattattatttgatttagctgaattatgatttgatttggctgaattaaatcttgtgagaagtttgttcttgctgttttggtaatatttttctttttggctataggttaaacaaattacaaatcaattctcctcagaggt

SEQ ID NO: 19492 - DNA, 483 bp, Glycine max
  Intron number 2 from transcript Glyma16g06590.1 (locus Gly ma16g06590) derived from phytozome v7.0 (chr-ID Gm16; pos 5904991 to 5905473)
ataggcaggtccctgttgttgatttgctattgcaggtaatctttaccattgcccctttcaaacttttgattattgttacaattttgtttagtgcatgagaatatttcatatctctgccctgtcctagtttttgcaccccattgtattcaaaataatttgcataaagctataatgaattatgtaagaagccatgtgactttatggcatgaaatactttgttaatgctgaagattatggtcattggatcaaaggtagtagtgacttcttttaatgatattcaacaggtttctgcagtggcacaactatctacaaaagaataaagcaaaataagattttcatggttaaattagtgttttaactttgatgggtttattctgctgatagtgacatattgcagtattggatttaccttttcactttcaagattttattgtcaatgtgaaatgaacctcaccaagacttttcttacaaatgaactacaga

SEQ ID NO: 19493 - DNA, 333 bp, Glycine max
  Intron number 4 from transcript Glyma18g29400.1 (locus Gly ma18g29400) derived from phytozome v7.0 (chr-ID Gm18; pos 33690176 to 33690508 reverse strand)
cgatacttgttagagagaaatcttgctattgtacagtatgattggatttgattaatgtattatggttaaatgtctcgtttaacaattgacatcataattcctactcacaagaaagaaaattaatctgagcccgtgacctaatagtaaacatgtaggttgaaaaattaggtcctcaatgtcttcagggtagacgagtgcaatgctaacaatctagaacattgctttgatagcatgtcttgaaagttaaaacaatttttcttacatgttagataatggttaccattttgtttgttttttattttttattcttttgaacttgaatagttttggttc

SEQ ID NO: 19494 - DNA, 456 bp, Glycine max
  Intron number 2 from transcript Glyma16g32240.2 (locus Gly ma16g32240) derived from phytozome v7.0 (chr-ID Gm16; pos 35401241 to 35401696)
ttcagatttgtaggaagcttattggaagaaaaatagtaagttagaaatagacatgtttagatattttccttttttttaaaaaaaaaatcttttttggctcataatttagtcaattttcaagtgacacaatttttgtatagttgaataatttttgggtagccaattcgttaagtcaatttctctgcttgccaaactttggggtagtcaaaattttcaagtttttgatgtccagtgctttaattgcgatagggtctatgatttttaatgaaggaaataatttcaactcgttatgtggaattttccttaaattccaccaaacttaattgatttttggtgaaatgctagttgcttgaagaaattttcttccaaatcaccaagtgttttggcatcagtatgggtggcattgatgattgatctttggctgttctgtttgttatcaggctttgatatttggaa

SEQ ID NO: 19495 - DNA, 425 bp, Glycine max
  Intron number 2 from transcript Glyma19g06130.2 (locus Gly ma19g06130) derived from phytozome v7.0 (chr-ID Gm19; pos 6834097 to 6834521 reverse strand)
atctcttgaggagtatcttggcaaactaaatcgtaaagtgtacttactttgattattgtagtgccttttcatttagtttgtaatttctatgcactattagcgtaaaaaaaatttactctagtaactaatcagaaaccattattaatatgttttttaagataacttatataaaagtcaacaaacttaccatgtatgttagtttgtgattgaatggcaatgtaactgtgtaaaaaccctttacactatcagtgcatagattatttactctcatttactatccttctattcttctagctgactggttgttctcaaatctcaaccactaaaaccttgtgttaactgagaaaagagcaagcttgtttcaaaggtgaatgtgttagtatttttatatgcagaagcaaaccaagaaccttgtgtgccatcgt

SEQ ID NO: 19496 - DNA, 686 bp, Glycine max
  Intron number 1 from transcript Glyma19g06130.2 (locus Gly ma19g06130) derived from phytozome v7.0 (chr-ID Gm19; pos 6835028 to 6835713 reverse strand)
tgctagagagggctatttatatttggttgcataaggtaattttagagcaaactttgaacaatactttaactgttcttgaattaggaaatatatttacaattttacatgtatggtataagtgtaaatattttgggggtgcttaacaagcgttaatagtctgaaaaaagtgtgttactattgtgattctcagattttcagtactgtgatgattgatttctctccactgttctttctatgcattcagacccaataacatggttttcattcttgctatctgacagtttcagtgcttcttgtttaaatgcgtgtttgcttcaatatgggatccacattaatgagaaattcatgtcaaaataatgcaaaagcggctatgctgaagtcaagcgtaccatagaaaatagaaaatttctgttttcactttattttctgtttttaaagatttgtaggaaacaaagtgagtgcaaggtgacacttttgtaattgctgaaaacagttttcaaaccaaaaaaaacctggtataaccccaaaggctatttttgattgtggttcattcctgtaatgttatgaagatcatgttaaagtgtaatgtttgtctcagatattgtagttttcaagataacaacaatgctttcttactttagaagttgcttatgcttttgtttctttttgtttcccttcaggttttc

SEQ ID NO: 19497 - DNA, 369 bp, Glycine max
  Intron number 3 from transcript Glyma18g12030.1 (locus Gly ma18g12030) derived from phytozome v7.0 (chr-ID Gm18; pos 10832712 to 10833080 reverse strand)
gtgaaagcatttgcaaaacataacggagaacctaagtgcatcaaatgaaagatgctctcactgattaatttcctttcatttgtacttgctaacttctagtactattacatgcatgcaagcatacttttgtagtataacaactttcgtggaagtttgcttaagtagtttgtcaagtagaaaaataggggcattgattttcttctctaagtcattagattttcatttcccaattttgtttctttctctacttcaccaccatattgatcatatgtataatcatttgtataattatgtttttttctttcttttgaatttgttagacttataacacgtcattttttttgttgttggccttttcatatgctagga

SEQ ID NO: 19498 - DNA, 680 bp, Glycine max
  Intron number 1 from transcript Glyma19g44690.1 (locus Gly ma19g44690) derived from phytozome v7.0 (chr-ID Gm19; pos 50048011 to 50048690 reverse strand)
tgcttcttgtgcaagacaagcttttggaaatcaaggttcatacacacaaacacacacgcacacacacacacatatatacatttcaatttggaatactttaccactttttaagcttatttccaacaagttttctgattaaatttatgacacgagcttttacgtggaagagcttatcaattacttctttgcatgccatgtcacaaaatatgacccaaaagcattttaaaatgttcaaactgttaactttgggggcaaaacttagaatctaatcaaaattggagttttaccttgttaatgtctgttgaactctactgcaaatctttattatacaaattactgaagtgaaactccaattctgattggagaacaacatcaaaaacacctaaggaattacatgtaagttttgtccttaactttgccctgtattttcttccttttaactagacatccaacttctatcagcacagaagttttaattttcaccactgccgttctttgtctccatcctaatatgctcgcatgtctaagggaattctttatttatgtatttttaaaatttgcaatgtgaaattggtcacaaaatttatttaaccataaattcaataattgctggtctttttctctggtgttagctatggctggcatttgcttacagatctttttcaacgtccacaggtgga

SEQ ID NO: 19499 - DNA, 845 bp, Glycine max
  Intron number 1 from transcript Glyma19g41980.3 (locus Gly ma19g41980) derived from phytozome v7.0 (chr-ID Gm19; pos 48089726 to 48090570)
tcctattcttcatcctccctctctgattactccaggttccatatctatccctctcataactcataactcacgcatttctttttattattctatttcgtattatcatgtacatgctttgcttcaatagttgattcaatacaatttatgaattttagaattctattggttttgagttctcgtatcctttaagatccatgaaaataacatagttgattcaatattcaccgtctcagaatgattaattactttataattagtagaaaaatataattcattatttccgaccattgtaagggaggccgaggcacacggttgtaaaagaagtagtttattcaatcttgttctctgtcttaggtaccaggagatgtttattacgtagaattgatatgtactgaattggagaatcggattaatgttcccgttccaacatttgggtttctcacttatggaatctgttttgttctatttcattccgttattatttttggcgattcgaggttggaagagatgtgaaacgaaatcataatttataactgatggaaatttatttgaaaatagattttgataacactgacctttgactgagcaatcctcagtctcatttgccgtgcatcctttccccctttactatggatttggaaacatggtttcttcaaaatgtttaatgttgataaattgtgtgccttgtagaggttgtctaatcattttgcatattgcatatgtttctgatttcaaaaacttgtagcaatacatgttggtgatttaataagtggattaatctggctttatcataacactttgttcatcttttcacttcagaagtgaaagttcttctgatagtgaac

SEQ ID NO: 19500 - DNA, 824 bp, Glycine max
  Intron number 1 from transcript Glyma18g44460.1 (locus Gly ma18g44460) derived from phytozome v7.0 (chr-ID Gm18; pos 54155781 to 54156604)
aacaaagcacccttctggaattgtgcctacccttcagtgagtatcacttttctttgaagtgaatgcttctttggattgcaattgcaagcatgagatgggtaactgtgttgtttgcaacaatgtgttttagttgcttcaaatgattaaatgaaagtttgaagttgtggcctgtgggttttttctcacgagtaataaacaggtttcgtccaaatccaagtgatcccccgtgtatgatattgggattactatttgcaatgatgataaaattaactctttttttgatgggttatactgttatccaaattaacctcgtgtggatcagatgggtttaccagtgtttgggctaaagattcgtagttggtcaatgtaccatttacttgtattccaatggcaactattacttcaaaacagaaaatgttttgcttgagatttacctgtaaatgatcagtcctattttctatatatgtcagcattcaagttcaaattcaaattcaaatctgatatatattactatatgggaattcttagctcaattcaaaatttcagccatcagaactaagtgaatgaggtttgaggggcatttccattatagatggaagttatactctaatgtggaattccttgtagagttgttgtgtattccatgatccttcaaagatgagctcaaaatatatgcagattatgctcaatacatttgttatgtaaattttatgttaagtacttagactggataatgattgcttatgtctgcattggaatatctaaaatcgtttactatttatactgccagaaatattgtgtcaacggtcagtttggactgtaag

SEQ ID NO: 19501 - DNA, 490 bp, Glycine max
  Intron number 3 from transcript Glyma17g07500.2 (locus Gly ma17g07500) derived from phytozome v7.0 (chr-ID Gm17; pos 5497513 to 5498002)
ggtgcagacttacaaggtaaatgtacatgctgtaccccccaagtctttcaattcataggatactggacattctcacacagttatactaattttggtgtctgatttaagaaactgggctttagtatattctacttcctgggtttcttttctttctccctttctatattttacattttgcttactagctgtttgctttgcctgggaaattcagcatgacatggggagtttttaagttttatctggctggttaactattgagattattttactgcactgtgcagctgaaatcaattcgtacaagtgtatgtggcaatgtaggattcctatcaagtagttttacaaatgtgtctcaagaaagtggcaacagattttgatttctaatctgtttgtcataactgtctttatagttccatatctgtaggaggagtgtactgagctctaaaattttgaatgctgcactaactttctgaacacaattttggtggataga

SEQ ID NO: 19502 - DNA, 908 bp, Glycine max
  Intron number 1 from transcript Glyma18g06430.1 (locus Gly ma18g06430) derived from phytozome v7.0 (chr-ID Gm18; pos 5003433 to 5004340)
taatattttggtccaggtatgttgtattaagctttatgtatttcttttttgtattgcacattggtaaattttttttttaaagggattcttttcttgttatcgtttttatttttctgttgacacatgaatctacatattttcctagtttttttgggtgggggcagggagtgctggagtgggaggagacatacaaagagatatgatggttaggtgttaaggttgtcaatggtagaatatgcagaaattttgaccagctttatcttatttgatgtgttgaattcttttggcagaaagttgatttgtcaattttgtccatgccttctttttcctttgttttccttttaaatttatatttatcctccgctcttgtaactcactatttttctttattgacatttcttctagttaaaacccaatcatggctttagtagggagtgatccaggctgatatgctcaatttaaacattgaacttggttttaacttctaagagttttccttattgtattctgttgatgttgttccctggaaaatgtatttattgaatgcttcttgttttgtaagtgtgttttatttgaatttaaaacatgagtcttttattctcttggtagtttttttttcccaaaaaaataatgttgccaagtgtgataagggaatttaaaactgaatttgtttgtttctcaattttaaaaccaaacaagaattcttgttatttctatattttaattcttcattctttcttcagaattgtgtatgattctaatttgctatatctgtaacattgctactcattgtcgtgttttagaaatatacgacaattaatttttaacatttcaaatatttatacaatgctctgatcactgttcgtctcttttgatattatttgtatagttattctggcgtacccaga

SEQ ID NO: 19503 - DNA, 946 bp, Glycine max
  Intron number 1 from transcript Glyma19g38070.1 (locus Gly ma19g38070) derived from phytozome v7.0 (chr-ID Gm19; pos 45085125 to 45086070)
tcggggaagagaaagaggaagttgaaattgtaagttatattcatccttagtcccaatttgaactttgcatgcttatagggacatgaagcatttccacagggtttcaatgctggatcagtacggatttgtaggatgtgttggtttttcttcagttctgtttttgctattgagtttgaatttcgcaaaaatgaaaaaaaaagttgtgtggccctaattgacttagtttgtgattgagaatgtttgctagggtttgtggatcggatcagtgttggattttgacaattgagttgaagaatgggttgacttaatttgaatggctgagaattggaatttgttacttgtaaatatgttgtgtttgatttcagttatctagaataatattatattatacttactacatgtatgttatctccaatttgatgaatttttcatatttcattcacacttatttactgtatatgaagtttgctattgatatcttgtcctttctcttggagctgtgattggtgcgtcatgactggttctatgaataaccatttctagggttgaggcttgtgggatgctcctgtagatccatatcattggtatttatagagttcttaatggtggcggtatgatattgtataattgtggtattgtatacttgtcatcacataagcctgcaaatttttgtacctcacagaaatttacaagttttgagaagagatgcaagttggttgaatgtctatgccattgttctgtttattttttttttcctgttcttcatttgatatttttctaaactgctagaagttaaattggtatacatctttgttgggatggaaaactgtttctagtttccaaattctggctcttttatcattcttgttgcataagttcatttgttgaatttgtttcacttttatcttgcatgcacatctctaatacttattatttaggttaagcg

SEQ ID NO: 19504 - DNA, 994 bp, Glycine max
  Intron number 2 from transcript Glyma17g11120.1 (locus Gly ma17g11120) derived from phytozome v7.0 (chr-ID Gm17; pos 8360991 to 8361984 reverse strand)
attgaaagactactcttgtgaggttaattttactggtatgtttgcttctttgtttgtctttctttgcattcaactttcttattctttcacctgacatgcattttacccatccttggctttagggattcctttactcgacactgttcataatagagaaacgaaatgctagtcttatttagtaactgaaaatcacaatcctcttctgttattaatcaaaatgttatagtttatgatcgtaatcataatttatttcaattgctggcttttgcaatttatagattacacattgaagagtttctgctaaaaaataaaaaaatttaacatacatcttccttgctcagattggatggatttacatttactaaatgctttaaaaattcatgtgcttcaattgcacctttaggtgctttcgcttgcatctcatttgatttacaaggattacgaattatagactgctccacctttgtaataaataatgattttttttttttggctgaaattctctattcatgcttttcttagtttccttttatgttctacatgtgaatttggtcatggatggatgatacttttttttcttccaagaatgctattttgaagccaactcttcattctatttcaatccattgctagtaactgtaaattgccaaccttgattatgaagatctccaaaattagctggcaatattttttaagatatatctttaggggattgattgtcagacactcttcctgacttttattaggatggctagtttgtccactatgtcaagttagaagaattgttgttaactaaggatcttgttctagctgatgctgagaggtgatccattaatgacttgtttgtttaaatcacaatttccacgcaaatacttatgggtaaagggtttacaagcaaatagtatagtgctcaaatttctgagtaatcatcatgtttctagtagcataatgtttttttgatcaattatcagataaggagcttgatataattgag

SEQ ID NO: 19505 - DNA, 923 bp, Glycine max
  Intron number 2 from transcript Glyma14g39000.1 (locus Gly ma14g39000) derived from phytozome v7.0 (chr-ID Gm14; pos 48151113 to 48152035)
gggattgtaaaggaaaaacgagtgtcttggaattatgacaaaatcaatgattgtatggttaaggaaaatgatgaagaaagatagcataattgttatggaaatgaaatgatgtttgtaactgttgtgtaagctcagaatatgaaagaagagactgacatgaaatcaaatgaaaatttagtgcagtctagttttgaccaagcttcatgtttttgagagttttgtttcggtggagtggaatgggaccgattcctagattatggcttgattatgaaacttatcttccaaagaaaatgatttgtttgcaaattctttttcgaatattgtagctaagtctagcccattactgcatattagattttttcgattcaactcttttggacaatatattctaaaatcggagacgaacagtcattaaattaaaccctaaaggtactaaattataaataaaataactaaaaaagggtactaaattattatttattagctgcttttggggtttcttcttctgactttctatttgtaatagactattagtctacttggactcagtttcagatgaagatgaagggtgttactattgatcgttacaaaattattgttggttcttattagtcaaatacaattacccaaatatcctttaaacatttcacctcaccccttttcatcccacgactctttgtacaattttttcataaattcttatgcataatgaaatcacggtttcgatatataagggatgcaaaaaaatatacaacataattaatatttcatttgttattatataatagaatctcaattctgttagaacaatagctttggcaccccctaatggagcagaagcataactccgttgtgtattgtgagtgaaggtaaatttagaatttttaaatggtgataggaaacaataacaacaactccctcgt

SEQ ID NO: 19506 - DNA, 459 bp, Glycine max
  Intron number 1 from transcript Glyma15g21910.1 (locus Gly ma15g21910) derived from phytozome v7.0 (chr-ID Gm15; pos 20394908 to 20395366 reverse strand)
gtatctcgaacatttgggaggttctgttattgttagtttttaaccaataaaattgtcaatttgtcatatcatttatcttcttgttaattaaataaatttttgttttttttaaattagttcttgattaattaaaatattttttgaaatttaaaattacaaataatttaaattaaaaatttgacaaaaatcaaatatttgtatttccatggattcaacgtgaaagagattaggatttcagatttttgagttttaaatctttgtaattttatttatttttaaatattttaattaatcaaggattaattgtagaaatacatttattaatttttttatttctaatttttttatttaatgaaaagataaatgatatgaaaattttattggttacaatatcgatagtatcaaaatccctccaatgtttgaggtactatagaaactttcgtttacgttatatcacaa

SEQ ID NO: 19507 - DNA, 1037 bp, Glycine max
  Intron number 1 from transcript Glyma15g38150.1 (locus Gly ma15g38150) derived from phytozome v7.0 (chr-ID Gm15; pos 44224525 to 44225561)
tgctccttctgttttggccacaactgaaatttcaggtttgtagctcgtctaatactgacatacaaataattttgttaggcttttaaatatgatgttttcaatcctcaacaaaaaaaattattcattttaataattacaatattacaattaaaaaacaatatagtttttgtaagatgttaaaagtataatatataatctttataacttaaaattgattaattttgaatatgggttaatttcaaaatcagagataagaacatatatatatatatatattatcttgttatctaatatatataaaaggcttaaatataattttgattcccctattctgttcactatgtaatcttagtcttttcattttaaaatagagatatttgatcttttttgttaaaattttttataattttagtccttatatttcaaaaaaaaaaatatttggtccttctattttagaaatttcacaaatatgatgtattttttctattaaaaatttgacaattttggcaaaatttttaatttgatctacattttatttctttatttcttatattataattaattaaatcatttttatgatacgttaaatgaatatgttaggtctatgactcaactggatcaaaatgaaagaaataaagcatagacaaaattaaaaatttgactaaaattgaaaattttgaaaaaataggaagatcaaatatttttattttgaaataggaaactaaaatcataattttttttataaaaaaatagggaccaaatattgtgaattaagctaaatagaaagatcaaaatttcctattaaaacaatcaaataacttagtagctctttcaaatgaaataattcaaaagagatatggagatccggtcccttcatgatgttaatttcttcaactagttatggccatgttcttaactagcttaaaatatgtgtgatttgcttgttaaaacaatcaaataaacttagtagctctttcaaaaatattatttgtgtttaattatatttttgaatttcttatgtagggaatcaagtgaac

SEQ ID NO: 19508 - DNA, 1027 bp, Glycine max
  Intron number 2 from transcript Glyma14g36760.1 (locus Gly ma14g36760) derived from phytozome v7.0 (chr-ID Gm14; pos 46054068 to 46055094)
tttaacttgctggatttatctggtaaagaaaaatagaattactgcttcattggttcttttagtttttaattgtgtttttgtgaattcctctgggaatatattggaattttaaaaaaatatatattgagaaattatggtaattttgcattgtgctatactgctattgcttccttgttgttattgagtttgatcctcaggtttgtgtgtactgaaaaaatctattaggagagatcagtcccttagatagattttagtatctcaagggatttgtgttgtgttcatacaaaaagaatattggtccagatttcgttttagtatttgggatcatcaaatcgtgttatgcaggacactacttttgtcagaaagcccatgtttattatgctgccaacttgagtttatcattacattacaatagaatgccttcatgtttcataaagtagtatacattgaccccgtcttgctatggggttatcatttatgatgaaatttattatcaaataacatgatacaaaaccaacaaatgaaagtcaactcttcagggtaccaatagagtttgtaaaatagtgaaaacaaaatacatgtgccttgtaagactgtagaaagaaaattgagtttttggatgagacttcctgtaaagagggagtgaagcttttggagggaaattggtttgcaggaatttgatatatgcgtgaaattgaatgtgttctgtaatatgtagatatagttacacattgcttttcttaattcccagttaggattaggaggaataaggaatttactaaatcattgatgcatgactgtatcatgctttatattgggttgattatagaacattatgtttacagtaatataaatgaaactccaaaaatcttttgactttttcaatcaatttgattgcatctagctgttggccatattcacgatttccatcgtttctttcacttgaatatatcatgttgtacatataattgtaaatcctgatatgaaatgttaccttttggttcaggaagtataagggcttgtaaaa

SEQ ID NO: 19509 - DNA, 368 bp, Glycine max
  Intron number 1 from transcript Glyma20g21510.1 (locus Gly ma20g21510) derived from phytozome v7.0 (chr-ID Gm20; pos 30848931 to 30849298)
gtctacaccttcgacaccgttgaagagttctggtggtataaattttctcttcctcctccttttttctgttccacaattttcatttttctaatttcagaaaaagggaatctaagcatgcaatctcaaatcttattatgggtatcaatgattgatgccactgatttagttttaagaaaaaattattgattttatggatcttaggagagaaactctttatgggtcttaatctttttctttttcttttttgcttaacatggggatttatggttttttgttttttaattgttattattattatttggagaatgaggtgttggtaaattattggaagaaatgaatttgatgtgggaaatgctggtatagtttgt

SEQ ID NO: 19510 - DNA, 827 bp, Glycine max
  Intron number 1 from transcript Glyma15g39810.1 (locus Gly ma15g39810) derived from phytozome v7.0 (chr-ID Gm15; pos 46665799 to 46666625)
cctgttcgaaccttgccgccgtcatcgacgagaaggtatctgtcgattcctccccttttcattcttttatttttctttccctctcaccaatggattcctcttctttgcaattgcttcagaacctcttttaattcgatcactcctttggagttgggctaattaatctcatcatttatattttccttttcgaagtgatttttttagaatatgtgttggaccaactcgtctagttgtattgccttcgttctgttcaattttcaagcattgcgtgatggaattttgactcttgttcctcattgttttttgggggattcacgcctgcccatatgtagttctaggagctaaaatcttcttttcttggggaattcatgaaaatttgcttcatttttttaatagggtatgtgcatgtttggttttaagttgtagaactgattctataatgagttttgctcctaaatttcataataaaaacatccaaacacaaatcacatcacttcaaaattaattttaaccaaaatcaattgtgcaaaatcaatttcattgaaaatcaattttgcctatgtacatccaaacacgcactaaactaattagagagatatggtttgtgagtttagggtttaagactgaaagagcattttttccaactcaaacttaggcttatgcatccacattgtggtcgtagttattattgctgttgttggctttcagttatccataattgcttattttttatcatagatagaagaaaaccaggggttgttcctgctgttgaatttaatttactcggtttttggtaaatgcaggaagaaatttgaatttgaagaaag

SEQ ID NO: 19511 - DNA, 317 bp, Glycine max
  Intron number 2 from transcript Glyma15g39810.1 (locus Gly ma15g39810) derived from phytozome v7.0 (chr-ID Gm15; pos 46666813 to 46667129)
ttattggcgaggtttgattattattataatacaatttcaatttcaatttttcgatcttcagtacctgcatttcagtttaatttgtatacttttttaaaggaaattctaatgtttgtctctttggaattttgtattgggttttttcaattttatgattgattatacgtttctgtttaaaatattcatagaaattggaggttcataatttcttcttgctttatgcgtcatttgattcaattgtgacattgagattgaactttttgtttgatttattttgggcagacatatctgggaattcaaatattcaggttctactt

SEQ ID NO: 19512 - DNA, 493 bp, Glycine max
  Intron number 1 from transcript Glyma18g21730.1 (locus Gly ma18g21730) derived from phytozome v7.0 (chr-ID Gm18; pos 24528009 to 24528501 reverse strand)
aggctcttgattggatttggaaggttggtttattggttttatctaatgggggttcttgattttcttgcttgtttcatactttgattgatggagaatgattactttcaacaaagctctttttttcttttcattcaacgatagttaaaaatgaattcccttttaagatttttttggttaatttacttggattcttaccttggtggttcaagtatatttaatgggtttttagtcatataaaaagattaacttttccattttggtatcaatttctttacaatttatggttttcttattggatttcaattggctggctattgcagtgaagtttcctttattttcataaatatcgaagtgggttatgtagcagcagtactactgttatttggattttgatatgttctgctcattacttgttgaagctgtgtgatttttggttttagattggataactcagttattaaattttactttgtctaatgtgatcaacaggctc

SEQ ID NO: 19513 - DNA, 1015 bp, Glycine max
  Intron number 1 from transcript Glyma18g45850.1 (locus Gly ma18g45850) derived from phytozome v7.0 (chr-ID Gm18; pos 55553400 to 55554414 reverse strand)
atttccttggcgacgcaaagtaagtttaaattcttacgacagtgacaagttaattatttggataccttacagtgatatggtatttgattctgtttttgttttattgatttcaaaatcaattcataaataagactaagattttacatacatttatagttcctgtaatataattgtcttatggttttatatatgattcttataaatattttctttgattcttagatttttttatgattttaattagtcccttgttattattcattgataatgtgacaaccatctattggaaaatatgtctgatgtttttctttacggtgtatttataaaccatgtatcttaaaaaagagtaacaagatatcatactaatcttaaaaaatgtgaagaatttaaaacgcatgtttaagaaaaaggctaacgatatgtatatcctttaacacaagaataagatttgttgaaaaccacaaaattgtgtgaatcttatttcttatttttgttaaaatttactcataatattttgtagtttttaataagttttaacaaatttttccaataatttatagtttttaataaatttatttattataaaagttagaaaaagtgttagaggaaatgctagtaacattccacatatgtttgatatatttaatcaaaaggaaaattttgcttttcaaaacagaaactagtgtgtttgatttaggatcatgtatgtggttttcatattaaagttgaagcacatagttctagcttttacaccaaagactcatttgatgacatgatttttttgtctggggaacgaagttccaaacatatactacattaaatttgtgatttgttctctcaactcgtgtgaagcagttaaataattgattgttttttaaaaaaaaaaccctttttaatgtatatctttgacttccaaaaaagaaaccccctttttagggcttttgagaaactaagggcaaacgtttctaatttatatgcagaattaatctggaaccagtgtttgctgtggggagca

SEQ ID NO: 19514 - DNA, 312 bp, Glycine max
  Intron number 1 from transcript Glyma20g29060.1 (locus Gly ma20g29060) derived from phytozome v7.0 (chr-ID Gm20; pos 38008071 to 38008382)
gttctgatttggtcggtcgggctcgcaccggtcaggtttgtatcttttcttatcacaaaccctttttgtctttttttgttttgtttaattctttaataatattcctaaagctttggtttttaactaacttcacctagtgggggttaagctttgttgttgttttgttatttggaattgtgcatgattagatttatttaggtgaatggtttttgagtggtgtgaagggttttgtttatttatttttttatctcaattgtttcctttggtgaaaatgtagggtaaaactctggcatttgtgttgcccatattaga

SEQ ID NO: 19515 - DNA, 465 bp, Glycine max
  Intron number 1 from transcript Glyma18g25820.1 (locus Gly ma18g25820) derived from phytozome v7.0 (chr-ID Gm18; pos 29611829 to 29612293 reverse strand)
actctgcttcaacgttagttttccctttgacgttcatcttaatctagatctatgaatgttaactctgttttttctttttttttttcttattttgtaagattgtagttattgttattcggctatttgggtattttgatgttattttttgtttatgctttttcatgcttagttatgtgtttacattttcttctttatccacccgatctgtgattaatagaaaatagaaatgatttttcttcgagatgatttcctttttgtttttatttttagtttctgtccttcctttttcgttttcgaagccctgattcctcggcttcggtgtttgttttctcttagctttcgcttatataaatgtgttttccactcgtttagttttataattttttttattaatggatattgtgtcgttttcgtttttgctggttgtcagagcgaaggccggaggaaaccgtgtcgttttgtgct

SEQ ID NO: 19516 - DNA, 998 bp, Glycine max
  Intron number 1 from transcript Glyma15g15610.1 (locus Gly ma15g15610) derived from phytozome v7.0 (chr-ID Gm15; pos 12000595 to 12001592)
aaggtcagtgtatatatatatactttttttttttatatatcagtgatcgcattaaaatttaaacctatgatcttagacatattattttaatttcctacaactatattagtgagttaggtcagtttatgtatatatatcagaggcataatattcggtgagttaatcttaagtatgcagtcacactagaatgattttattaatataatattaattattcgttttaattatgtgttaacttgtttcttgctcatatatacttttagcttaaaatatttgtataaatatatagcgagaggagtctattttgattatgcatgaatttaaatatattttgatattttattataataatatgatcaaactaattcttatgtaaggatatgcacgatttcttagttttacataaaatcaaaataaatttaattaattcttaatcaattatatatattaaattcaaaattaagtttttatgttgtcaaaactagtctcgaactagcttctaaataaaaatgatttctaaaagttcaattttaaaattaaatcttgttaaagataaactgaatttaaaatctattttaatcaaaactatttttataatcaattaattgaactacttattatgtttgatttaaattttttgtttttgttttcaattagcttacgttatcagatatttttaaatttaatttaaggtttgtttgaataaacttttatcaaaaacttataagaaaagaattttttttaaaaaaatatgaaataaattatttcataagctaaaattaatttttacttcaaataatttctagaaattttttcatattaacttattcaaaattttatttttaataaagggtcagttaaatttttgaacccatatatgctgaatggaacaagctgatcatgataaataatattttttaactttttttataggtcaactcgtcctgttctgctattaacgtgtctttaagtaggatatatgttaatagcaagacgag

SEQ ID NO: 19517 - DNA, 967 bp, Glycine max
  Intron number 1 from transcript Glyma16g06920.1 (locus Gly ma16g06920) derived from phytozome v7.0 (chr-ID Gm16; pos 6241724 to 6242690)
agcaaacaccccacaactggtgactggtaaagtggcatcagtgttttggaataagtttttttttttattcgtaggaatcaaactaaggtgttagggggtttacaataactcttgcacactactcaactaacttagttagacccccttggtgtgtttggaataagttaaatcagcttcaggagtttaagttggactgacaagtgtagattggttttgtcactttgtgtgttttggttttattgagaagtgatctgctatcattggcattgcttgtgatcaaggctttaaaaaatgatccgtgactgtgattatggccgcaacatcaaggttttttatggtccacgaccacaatttggaactgcatcaaccacatttgtctgtgatatcaacaaacgcaacaaaacaacaacgcaaccgcggtcgatatttaaaaccttggttgtgattatcccatgttagtggtgccactttggtgggacgtttttgttaagtgaaggatgtgttactgtgtgattctgttaatctattcatatgcaaactttgtgtgtttctgttctagctaaattgttcctgtgaatgttaggcttgatctgtgtttatatcagtttgttgtttaaactaatgtgcattggtattggtttctatgcgtgtcttttacttaactgatctcatatgaggtagacaagtttgttgtgctcatgtcttttatttagaaattcaggcaaacccccctcccccttccctcccccttttaataatgaatatattcctgctagtccttagaagtggttgatctctaccattcccagttatgtgaacttaagtcttttgccaaataagacacatgaataccattttgcagaagaagtgaattaatgaaatccttttcccttaatagggtgcgtaacatataaattctgtatactattcaggtaccctgcaataaacaaacctgctggggttttac

SEQ ID NO: 19518 - DNA, 734 bp, Glycine max
  Intron number 2 from transcript Glyma19g42530.1 (locus Gly ma19g42530) derived from phytozome v7.0 (chr-ID Gm19; pos 48497602 to 48498335 reverse strand)
atagaccctacagggaggagctactctccaaagtatttctgtcacaaaattcattacctctcctctaatcttcttgtacttgatgctaagaactaggctgatttgattgtgctatgattatttaaactaattagctatagtgctgatgaacatttctttttttgtttgtttgtttggctgggaaaataaatctttcttaaactttgggggtatagaatgagagaattctgaaaaagataagcctcaaagcatataagcatataaaggactaagaatcatgtccgcatggattggtgaatggataatatgacagtgacccaataggctctaatatcatcttaaaaactaactcataggataaggattgtctctccacttatatacactattcagatgttatctctaatcaatgtgcgatttgggttttcccccaatgcctaggtgcagtttgttctgcttcgtaatgttaaatgggattaattaagcctgcacaattcagtatttagttattttcttaaaattcttcagttgatttaataactggctggtccgttcttttttactggagaaatatgaagattctgtcttttgcaagctctagacattgacctttattgcaatgcttccttagttatcatttattataatcattcctgtgtccttgtctcttgtagtatcctcttcctatgcttcatattgaaaaattttggtgtttcaaatgcgacaggaagccg

SEQ ID NO: 19519 - DNA, 823 bp, Glycine max
  Intron number 2 from transcript Glyma17g34630.1 (locus Gly ma17g34630) derived from phytozome v7.0 (chr-ID Gm17; pos 38615274 to 38616096)
atacgtaattacagcaattgttggtcacagtaaaggtcagactacaattatctttattatatgtaactgaagttatttgtggactgaacagacaacatgtgtgcaattcttcagtggcagtttgaaattgttttctcttctgcccaatgtaacagatttgtttagataatttttaatcaattattctgtaattaaggttattaatattgtcagaagtattttattttgagtgcatagaatagaggtaagacagcaggccttacagaataaatataattatctcaagttaattttttgaaactgtgtttgctgagaagatctatggaaaatgcaaagagagcaaggtttaaatctatatttggtttttcatttctgtggagaaagcatatgatgacattgttcaggtggtaatatgattttcttttaatcataaacagtgttgatatatcttgaatgttgagtgtttaatgttacaaagaagaagttatagaaggaaaatatttattagagttcggtgtagctttgatcaatcggtaagatgaagggaattgtccaataaatggttaggagatatatgatataaaggtgaaaatgtttgataaagattagacagtagtgagtataaaaaatggagtgagctcacattggttaaactgaagatatagttgtacagttttagtggagaatttaatcttccatagggtttgatggtaaactgaaacttaagttctctgtgaatgtaatagagttttcttatataagtctttcacaatactcaattcctcttgtaaatcactgactagtatggtttctgcagggggta

SEQ ID NO: 19520 - DNA, 671 bp, Glycine max
  Intron number 2 from transcript Glyma19g30380.1 (locus Gly ma19g30380) derived from phytozome v7.0 (chr-ID Gm19; pos 37990500 to 37991170 reverse strand)
tattggatcagtaagtataagttattcttaattattatattatagagtttaatttgtatggacttttagtttaaattttttaatgttatcaaaatttcaaatcaatataaatattttttataaatattttttttaaatagttattataaaaatcaataatcttattatatatgataattcataattaaataataatataatttttttatattatcaatatatttaaattaaatcctaattatatattatttgttgaatttaattagaatgcattaatagtaaatgatttttataatgctatcgaaatataaattgcttgcatttatctcatttttcatatagtgaaaaatatattaaaacatcaaagacattacaatgttgtacattttgttttcaatttagttgtagtattaagatagtttcattgcttcaatgcacatgggcagactagtgtcccttaattaacatatgattagaaaagtcctttttgtttttcttctttacacttttacatattgataaatttatgtatgtgttttactatatttaacccatttacgcaatagatagtgaacttcacatttctcttatcttcaacagaacctaactttcttccttgtcttcatgtttgttcagcgtaactacccattcttcatattgttcatatcatc

SEQ ID NO: 19521 - DNA, 704 bp, Glycine max
  Intron number 4 from transcript Glyma20g32440.1 (locus Gly ma20g32440) derived from phytozome v7.0 (chr-ID Gm20; pos 41046435 to 41047138 reverse strand)
gtgaattcctgaaggtaacgtctcatttcttgtctggagtaaatatcctctaataaagaggggggggtgtattttattattgtttccaccagacatatcttgcttttagactaagatatcactccttataggagtaatactgttgtccacaagaaatctacaaaattatgaataatagccagttgctcttgtaactttgcttacacagtatatttataaaaaaaaaaaaaaacaatttttagcctgtatttttgttggacagtattatggatcaataactagtaaaagacaactttttcttacatatgctgcataacaggatggcttttgcatgtgttcagcttcggcctgatacctattagttttattagatctgagtaaacaacatagagaatgcgtcatttgagaatgaaagtaaagtatattttgagagcttcatcatcaaatctgaatgaggacgaatattgtttccaagtcataactaatagatagaatccacgccgcccttctttgacatagatgacccaatctcttagttctcaacagaccattgcttcaagattatgtttcctagaaaacaccaccatcaaaaaaattactaggaatttgagtaaatcacatagcacaaccaattaaggaagcgacattgcaaaaacagtgaaaatgaatgttttgtgtttcaggtcatctattgtactgaagac

SEQ ID NO: 19522 - DNA, 275 bp, Glycine max
  Intron number 2 from transcript Glyma20g32440.1 (locus Gly ma20g32440) derived from phytozome v7.0 (chr-ID Gm20; pos 41047720 to 41047994 reverse strand)
gtccacctgtaagtcgttagttttgatgattgaataacatgttttctatcacttgttgtaatttgacacatcacttccatagatggctgatattagtcttcacttcatagttattagctttgaaaatttaatttgggtgagtttttgtggatgttcatttcattctatcttgactagggtcagaaacatggtaattttgctctgagttcatatgtagtcaaacacaaaagtttctttcattttgcaggccttattgttgttgggctttgaagcag

SEQ ID NO: 19523 - DNA, 819 bp, Glycine max
  Intron number 3 from transcript Glyma16g15790.2 (locus Gly ma16g15790) derived from phytozome v7.0 (chr-ID Gm16; pos 16710886 to 16711704 reverse strand)
ggaaatctcgtcgaacccagagtctggtggaggaggtatgtatattgtttgaattgcgtttatgctttacattttttttatgattttgggtttgtttgtagcatcatttgcaaataacttgtgttgagaaaactggagaactactacattaagaacatgttattagataatcaaattacagttgatggtgttggtggcttgtgaacataccaaaagggttcaggttttcacattgttgcctaaatgaagatatttttccacggatgcgagtcataactttagagtactattttacaaatttaaatatatttttagtcccttaaaattaaaaaccctttttttagtcctctaaattaaaatatgtagttgttagtatcttaaattcgtgaaatgttttttttaatctctcgaggcattaaaaaaaacattccatgaatttgaaggattaaaatatataaattttaatttaggagactaaaaaagatagaccctaattttaaaggattaaacatatttaagcctattttataaattgatcctaatgttgaggatatttttccattgacccaagtcataacttaagaataatgcccagtaatggatcagaaagcaaaggtgttgtggtcccgttatagaaaaaacatgcaattacaattgaatgagtgtactgtgtactacttgcagagtgaactaataacttattcactaactcacttgtttcccattgctctggggcatgcataaaccactagttttactttttttaatttttttggctgaacagagaagcaagctcgtagaagactttagaaaggaaga

SEQ ID NO: 19524 - DNA, 762 bp, Glycine max
  Intron number 1 from transcript Glyma16g15790.2 (locus Gly ma16g15790) derived from phytozome v7.0 (chr-ID Gm16; pos 16711993 to 16712754 reverse strand)
ccttttgttcacatgtacgtgatttcttttcattttctctctccattgtatgcgtgcggatataaaaaaatggtgatactaatcaaataaaatctaccgacattttttatatggtaattctcgtaagacaatctcactagagacggatttcgaatgctggtgacatccaaaaaatcaaattaaatcttacaaatatttgagagaaatatgaaagagaaagtaaatatgaaaattttgcatcaattttttttttgaagtgtattagactttcatgaaatgttgttcttatgttaataaaatgtgatagttttcatggagatgtgataaattgctttttatttggaacttctaaattctctccatttctatttagtttttcttcattttactaacacggctcgtaacgtttcaaaacgatatgttcattatccaagttttcaattgggtaacgcacacaaaaagttaatacaggataattacatgcatgcagctaaggtattcttacaaaaccacaagcgttagttgctgagcaataatctatatggtatacataaaaaaatgaaaagaaaaaaagaaggaagaaggattttgtgtcgtttctgaagggaaataaacgtttaactaattttgttcatgtattatatctggtttatgtaaagttatctgagattgtgttttgaaatgttcttatttttttatttcggttttctaatgacttgaatttcagaaattttggtggcagaccctgtgagaaatattaaa

SEQ ID NO: 19525 - DNA, 668 bp, Glycine max
  Intron number 1 from transcript Glyma19g35170.2 (locus Gly ma19g35170) derived from phytozome v7.0 (chr-ID Gm19; pos 42721804 to 42722471)
ttcttcaaactctccccaaaacctcagatttccacgtaagctctctgttgcttcttctattccttttttttttttttttttccatcttgtatatggatttagctgttgttgcttgatactcgtaaattcgttcggcggtttcaaattttgtaacttctttgagttctgtgtttctattagaggccaatttataaagtatatgtatgtgaaaattgtggattttgagtgtactcatagactcattctgccttcaaattttcacgctttgaaatttcaggcatcatagctcaacaaaatcatcatattctgtaacccaaattagtgagatgagtccaaacacaaaggaagtaagataataggctataattttggtccctcatgtgaatttctgtttcagtttggtccgttaaatgttaaaaagttttatcttggttcctttagtatcttgttagctaaaatggtccttttgtctattttttgcactaacaatgttaattttagccaaaataatactcttttttttttcagctgattttttttgtaagtgaaaaacatgaactacttgttattgttaatttgttgaaattgtgatcataatatgaactgtattatggtgcttgattgtgactaccattttttaaactcttgcagttccacgaagaaagtgg

SEQ ID NO: 19526 - DNA, 413 bp, Glycine max
  Intron number 1 from transcript Glyma14g35240.1 (locus Gly ma14g35240) derived from phytozome v7.0 (chr-ID Gm14; pos 44153615 to 44154027 reverse strand)
ctcctagggtttctcattaacttcgtcaagtacaacacatcactccatgcaatgttattatatgccaattgctcttttcagtatcatttcttaattaatttgtgatccttgtttcgattctcaaattggtcccaggtgtgaagcgatacatagatgccaaaaaacaaaaggtcaaaggtgtattgtaattctttgttgaataagattcgattgaaatttgcttttcttgtcttataaatgaagtcaacttctcatgcatgcctttgtttctttcatcaagctctggttttttttttgtgatctttttactaatggcaatcagtttaatttgattctcggagatggtatatgactttgcatgttcctttattaaattagcggttggttcagtttttggaattgcaaaccttttc

SEQ ID NO: 19527 - DNA, 466 bp, Glycine max
  Intron number 1 from transcript Glyma20g38720.1 (locus Gly ma20g38720) derived from phytozome v7.0 (chr-ID Gm20; pos 46259410 to 46259875)
acagtgttctggtcagcttttacttctccttgtttcttttttgtacttttactattgggattcattttgatctgtgactcagaattctgatcctcatcccgttagaatttaatctaagtgcattgttacaagtcatcaaatcacattttttgtcatgtatgataagtttgtaagttttataataatgaccttaaaatcggtcatacctgatatgattttcaatcggttgataatgtaaaaatctttatattgacgtgacagtggaacaaaatttaactcgtgttgttatctcctttggtaagacatgaggtggtatatgcatcttaatagcctccactaaaggttcatatggatgacctttgatggatatataattgtgaagcttttaaagttgtgggatcttcattagctgaatttgttgttttcgggttacatgataggaagaagacctgaaggaattccgaca

SEQ ID NO: 19528 - DNA, 974 bp, Glycine max
  Intron number 3 from transcript Glyma20g30660.1 (locus Gly ma20g30660) derived from phytozome v7.0 (chr-ID Gm20; pos 39388360 to 39389333)
gctgacataccacctcttcctttgccttagtcctggtaagttttctgctgttcacacctaacttatatggatttatataatcatcttgttttgtgattttttttattgtataatttatgtacttatggcatttgatatgtgttgaatttttttttccttgtgaatctaggctgaatgtagaatttatttatgtttacttgattttcgattttgctaaattgaatatgatattcatttctatgtttggattggtgaaaagtgatggaatcaagtggatgctttcttgtattgatagctcatgacgtttgaatgcaaatctactcaataaattgcaacctttgctaccattaactagatcttactaactgcttccaagtgacagtgggaattgtttgccgtaattaaattttcatggaaactaagttcttatttgtgcaatttagatatatggcaagtgtcacatatgatggtcaaattctttgctgtggcccacttatgagtttcttgtgcttatttattgaagtttatgataatagctaatggtttacgaagttactctaggattgggtgtgctgatgccacatcatgcttaattgcttattgttattgtttacaagtggtcatataatccatttcaataattcatccttggtaactaggtgtatttttattctattttgcttgttagcttagctaatgttttagtggtgtgtgatgcatgtctatggtttaggttcactataattattagcaaatagttcatgctttgtggtctatcctacctaatgtattttggttcaataattgctatgttgtcataattagttccttattttgagttgacaactgtgttgctgctactatatgctgtataattatgcatttggcaattttatgttcctgcaagttgttgtcttttggacctgttttggactcataagtctgttctgctcctgcagccttgcttgttgaaa

SEQ ID NO: 19529 - DNA, 934 bp, Glycine max
  Intron number 1 from transcript Glyma18g34490.1 (locus Gly ma18g34490) derived from phytozome v7.0 (chr-ID Gm18; pos 40501082 to 40502015)
gaggtactttttttttaataacccaactcttcatgtatatatttatattgcaatcgtttttatttagtgttcactctcatgactaatacatgataacttaacgaaaggtaagggtaatttctagtgaattaagcttttaaatcttataggctggtttagtctttatcttttgattttaacatgtattaaaaggaatagagagagatgaatttcatgataatttatggaaatgaatggaagatagtagttatttcacacttaaattatagggatgctgattgtaatcaagcatttaatttttcttgatgtcaagaatcacaaacctgaaggttaggaagagagtgcagtaggagtaaacattgataatcacatgaatgaaggcagtggctggattaactcagcctaacaatgcaaagcctattgttgattccagtttttccaaggctaaactagaagattctttggactcacaattcaaaccgccacaagcttcacaactagtttcttttgtcactattttattcttgtttggttgctcaaattaaatgtattgttctaattttttaacattgttatttttctttgtaggggaaagcacacccaactcaattttttttgcttttgatgtccaccccaacccaattatgtgtgtttaagctgtattagcagtgtgatttgttatattttgtgaaaactgggaatttcattctgtaattgtctgtttgtgtacaaagctggctttattgtagaaggaaaggagacactcttgttttgtaactgccttttctctcactctggtgtcttacagatgaaaatgtatgtttctaccatttttctttgttttcaaaattaatacactaatttcaattgaacctttctcttttatattgggatatgattgatgtttaatagctttgtcatagcttagagcgca

SEQ ID NO: 19530 - DNA, 642 bp, Glycine max
  Intron number 1 from transcript Glyma15g02040.3 (locus Gly ma15g02040) derived from phytozome v7.0 (chr-ID Gm15; pos 1368410 to 1369051)
caagtgctcctgctgctaagtatgtttgtttgcatccttcttaacttttttgttttttctgttgtgtttactaatccacatgttttgttttgcttattgctatgctataatcaggctgaataaaggaatagaaggtggaaagagtttgagttagatgtcttgtttttttgttgaagatgtagcaattcatgaaactagcatctgattggctgttcaatggcttctttttctttctattttctcatggaggatttgaaattgtgagcatgaatgggaaattaacctttcggaatttgatatatatctattgtatttctcatacctatgaaaaaaattagttaactttgtctctgccagatgcggtgccttattaaaaagaaggttgtgcgaggtaggtaggttgataatctattcaagacattgttaaagctggtgtaaacaaattgtgtgattaaaaattgatagtcatatttttaatcctggtttttcagttagatattgtttctaatcctaaaaagtgaagtggttaatggatttttttcctttatgggaaagttttcgacttctgatattactcttttatagaattcattttgggactaatgaaaataatttttttcgcaacagggcacaagttgtggg

SEQ ID NO: 19531 - DNA, 959 bp, Glycine max
  Intron number 2 from transcript Glyma19g28430.2 (locus Gly ma19g28430) derived from phytozome v7.0 (chr-ID Gm19; pos 35913406 to 35914364)
gcgcttcggttccctgcgcaggtttgttgcttcccttttgtggccaaaagggtcttttttttcttccctttttgttctctcttttctctgtgttgtattgcttttaaatgaagcttttttgctctgtctttttggcctttcttttttctttttgatcttttgaggatgtttgtggtgggtggattataagaagatgaaacttagatacaggttgtgttttatgccatgtctggtttgggtggacagaaaggaagttttgaaatttgaattggagagaaagtgaaaagaaggaaaattttgtgcccttatttttgttcattccctgttttcactttctgtttttagtcttaatttacaaaacagttgccttgttttcaatctgtttcatgtacaaatctttgaaaataaagtagtaatcttgtaaattaaaagtgataacagggaataaaagaacagtaaacatgcacttgaatttttgttttttgaattaattttatttttttcttttcactttctccctaactaaacagcaatatacatgttattcggctttttcttttctctttattttgtttcctcctatccaaacatactattagtactgttttccgatcagaattgaagttttatttgtagtcggcccaataaggatttgcattagaggtttaacataagttattgaagcaaaatttcaattttgatgggagaatagcaccaaacatgcagttagtgttattctctcattagaattgaattttcattttagtaatctgcctgataaggatttggattaaaggttcattattggttaataaaggtgaaaattcaattttgacagaaaagtagcaccaaaaatgccttagaaactgcttctaagttttattctgatatgaattgtgcaaggaatttttgatggatggttgagttgtgaacaggcagctggtgctgcgggtggtgca

SEQ ID NO: 19532 - DNA, 676 bp, Glycine max
  Intron number 4 from transcript Glyma20g24190.2 (locus Gly ma20g24190) derived from phytozome v7.0 (chr-ID Gm20; pos 33895495 to 33896170)
ggagaaggatcctgctccatttgggtgggacggtatgtttttgttcttatccaagaaatgttattgcacaattagtatgctacttttgtggctggcatggttattcattttatggcatgcgtatactcttctcttgatgtgtaagcttcaacgcaattcccaaaaaatccagattttcaaacccacgttttaaagcttatgtcttggttgttgttaactgaagtgtatggtgctttttcctttaaaaaatgttcctagatggactgtagatgttttctggattgttagttcattacctctttggaattacacagatttttttagaaatgatctattgctaaaatcctagtgagaaaaggcttgattgctgttgttattctactgttaaaaatgttcataacgtactttttatacacagaaaagcacatcaaaatacttgtctagattgtttttttcccactgtatactgctcctacatataattttggagattcacatttttgttatttgaaatctaaggagagaggtttatcttactagaaatgtatgccttcttattgctgtgtgtaattgattgcaaaattatcccaactccatagcaaatttcatgttttagagtagtgatgaagctaatattattttattttatcagtctttaatcagaagacattataca

SEQ ID NO: 19533 - DNA, 1015 bp, Glycine max
  Intron number 2 from transcript Glyma16g27200.2 (locus Gly ma16g27200) derived from phytozome v7.0 (chr-ID Gm16; pos 31212013 to 31213027)
gaagtcattaaatctgaaggagttcacttctttatgtatccttactatagctgtttttgttttcagtctttctgtttacaatagctgaatattatcttttcattcttattccttttgactaataatttatgaacaattcatgcactggtttgtttcatacttttcattaaaaagggaacatggtaagctattttctttgcttttgaacttggcggtgaaaatgtgagatgaatgaacgtgaggggaggatatggattgtccatagaaatttattcctacaacaaccaccaagcctttttttgctaggtaggatctgggtggacgaaacaatgcaataatgttttgttgtgaatcacgtctattccaaactaagaatttcaaaacctttaatttggtattaaaaaaaattgttgcttcacaagatttaatcgttctattcttctcccatgctatctcttgtattatgtgaaccaaatcttggtaaacagggagaattctcttcttcctttgatttcccctcagtattgttgcgctatacgtaacatattacagtgtacatttgccaaactgcttgtggaaaattatctctgcatgataaggcacataaagatgttgacatgctcttatctggaattccctttgtccccctgccctgttttttcttcataaaatcctatgcatggtttctttgagttcatcaatgaggactgcatttttgctcagcttgttagccatgctcacatgcttgtgcatggacacacggtcaaaatgataattgttaagacaatgtaatactgtaaccatgttgttctccaattacattccatgaccaggtgagagaaagctatctcttcatgatttactttttaggaaaatgcgaggcactgttgtctaggctttacctaaactaaagctactcatcatggcagtgtgtttacatggtcatactctatccatatcaatttatatattagatgctgtcttccttaacatatagcagtgttcaatagctgtg

SEQ ID NO: 19534 - DNA, 603 bp, Glycine max
  Intron number 2 from transcript Glyma1655s00200.1 (locus G lyma1655s00200) derived from phytozome v7.0 (chr-ID scaffo ld_1655; pos 2935 to 3537)
gggtctcaacactcaagacctcgtcacccttgtcggtaataactttatacaatcacatgcacatataagtttgtttacacacttcaaatcaatgaattgatcatcattactacaatttcaatttagtagatataagattcaccaagagttcatcacttcgaatttcttaattaataaaactaacaaattgatacttgatcataaaaaaaattcgattttgctttgtgacaagtgaggttctaactacgtagtggcaaaatgctaatagaatcactatatgtaaactgtattgttgactttttcacgtcacttttcttatattgtcattaggaaacgtcttttttgggtcttatttttttcccattttcaagtgattaattggatatttttatagggtgttttaaaaaattaaaagacgtttttcaacgggtatacaaaaaactgaaaaagtctaagcactcaaatttactcgaactttatcttctatgtacgaaaagaaaaaatcatgtgaaactaaggtacgagtagttaacgatagagttgaaataactaatttattttggtgaatacatgtgtaggtggacatagcattggtactacagc

SEQ ID NO: 19535 - DNA, 798 bp, Glycine max
  Intron number 1 from transcript Glyma19g24640.1 (locus Gly ma19g24640) derived from phytozome v7.0 (chr-ID Gm19; pos 30295161 to 30295958)
aactcgccgccactcctcacaacagcaacaacaaggtaagaattcttgttacaccctgtctttctcttctttgttcttagaacttgggggtatggacataaacagaaccttacaaaaccagcttgtaagataaaggttgtcctcacttatatactacgggatctccaacattctgggtttcaggctttcagcttaatccaaaagttagcttacaggttgaggattgtttcgtgttaccactcaatataggatttccagtgttaatgagtgtaaagtttgagcatttacgggtgattcaataacgacccgataacatgttgagagttcaagagttgtcaatattggatctccaaaacattcttttacgtcaaagactagacatttgaagtaaaatttggacatctgcagatgatctaataacaaccagataagggtggtccaacaacaatagctaggatagactagactttgttatcaccttgaaatttgagttaggtctaacttaattcaattagttcaaaagtttttttttattttttatcggcagttagttcaaaaaggcaaggattgaccatcacttgtatacactgttttggtcatataacttgacggttgcggtttggtcccaaaccttgacattgggggaaaaattgcggacagatgtggctgatgtcaaaaaacctttacgctgtggctgcaattgcggttgctgaccacaatttaaaacaatgtaactggttaatgtaggatttccaacacataggaattgatttgttttgtgattgttgcagggaaaag

SEQ ID NO: 19536 - DNA, 571 bp, Glycine max
  Intron number 2 from transcript Glyma17g25990.1 (locus Gly ma17g25990) derived from phytozome v7.0 (chr-ID Gm17; pos 27122909 to 27123479)
gcagtatccttcatctctattctgcttttggcactctcattaaattgcttcatgtttatagcgtttcgcttaagtgattatatgatttgttgtttttccaaaaaaaaaaaaaatagccagttttctaattttgattgaaaaataatgtgaaaattacttatggtgatgcgaaatttaaaattgtctttattcttagagcaaattacaacaacacctgagttttcgtgtaattacacaagcatccctgcttttttaaccattactttcacctcttgtaggaagtgttagtgtaagttttgttggggtgttagtataatgttttcaaacttagaggggttagtgtagaaaaataaaaaaaaggatggggttatgtataatttgataaaagcttaggggggtgttgctgtaatttgctcttattcctattcattgaattcattgaaacctagttaatcaaaccaaacctatatcttagtttgtgcatttctttgcatttttcaatgttgttggtcttgacttttgctgcaaccgcacagtggttagtttggctttgatttgctcttttaatcgg

SEQ ID NO: 19537 - DNA, 459 bp, Glycine max
  Intron number 1 from transcript Glyma19g28480.1 (locus Gly ma19g28480) derived from phytozome v7.0 (chr-ID Gm19; pos 35972220 to 35972678)
ggacttaccaggtttgtatctcttctagttcctttgattttgatactttgttacaaagatattcaataaatgatgcatggacacccatgtacgaatctacacctagaaagagagaaatgtatgcttttatttttatttttgatcgatacatattcttagttaatatgttagtttttttgttagtaaaatattcaaatcatattttctcttttctctttatcattaaatcaatcttataatcccagagaaatatatgtaataattgataattgacataatgtgataaaatgaaatagtataaactctattactcaagataaaaatatcatgttaagttagggactagagttagtgatgtgtgtcattcaagtccatttattaatgtttgatgtggaagctttactaatgatttgtttttgtggtttctctatcagctaaggcaacctttggggagaaaga

SEQ ID NO: 19538 - DNA, 716 bp, Glycine max
  Intron number 1 from transcript Glyma15g15360.1 (locus Gly ma15g15360) derived from phytozome v7.0 (chr-ID Gm15; pos 11770872 to 11771587)
ttggcagcaagacctcttgtaagtcacacatttcttaaattttgacaataattcggtttgtaagataaggatggttcttatcatatattatttctagttaacctgagagttaaagaatttttctctatagcatttaattgttataccaatcatgcatgatattacatatgatatgatcattcatggggatgaacttattcttattttgttttttaatatgttggattctgggaggaatccaccttaagtattattaagggggcaatatttttttatttaaatatatttaataaaaaaatgtatcccataaaaaaaaagtgataccccataaaatgaaaatgtgtttataaataaatataaaaaattactagtgacacaaacccacacattggtccaattgtaatttttagaagttcaaataatttgaatttttttacgatgtattgtgtaaaagcttaaaattaatattgttttaaaaaatattataaattaatacttttttgtccccattataaaatatttttggatccctccttgattgtattcatgatctcagttgcctaatctcaataatttggatatttcaagtgatatatacgggatatggttatttgattttgatctttaatttattttggttaggtgtgattggagatttttttaaagaccatgaaattgtatagtaacaaagtgttggaataatgtttcaggtggtt

SEQ ID NO: 19539 - DNA, 850 bp, Glycine max
  Intron number 3 from transcript Glyma18g19000.1 (locus Gly ma18g19000) derived from phytozome v7.0 (chr-ID Gm18; pos 20662664 to 20663513)
cactgtagcttggggtatgctctgaagccctttaatattctccagttaaatgtgtcattttgtttattcctgttatttgtatctacttgttttcccctgaattagttggtgattttgttttaaattttgttgcagaaaaaatttcagtgaattattgatgttttgtatctgtttattggtgatggaagttgttgataggattttttaagtgagggggtatttgagtcacgatgattgattgtcagaaaataataaacctgataaaaacatgttttgatcatctgctttgtatactgtatgttgtgagtgagactgtttgttagttgttactctttcagtgagttaaagggtgcaatttgctcgcccttaagctatgatttaggctttttactcagatggtctttccttgtatatatgtttttcaattatcttaatacatatactgtgttggtcctctttttctgttaaacttttcaactaatgcaaagtcagcttcttaagcatataatgtagagcatatttttttcatcttttagtgttttcctttttatctggctgcctaatcttcatgatgccacagccacaagctcaaattcatgttgttgtgaaattttttgattggacatcattcttatcataaaatgaacaccctgctccacgtgtaaagttaagttttacgctcatataagccatgcaaatagtcttttcataagtaacactcattaggacacacaatatgttttcctttattattattattattattattattattattattattattattattattattattattatttaattttgcgtgcaacagtgaaaacaggacctagttttgttg

SEQ ID NO: 19540 - DNA, 611 bp, Glycine max
  Intron number 1 from transcript Glyma19g29100.1 (locus Gly ma19g29100) derived from phytozome v7.0 (chr-ID Gm19; pos 36672761 to 36673371 reverse strand)
cccgagtatgacaattctcttttctgcattttctagttgggcacttatttgcttacccttatctataagaggcattggttctgctactctacttccttcatattttgatctcaagagtcaagaccatattggatgactgtttttttgttatacattgtgatgatcactctatgttttaaactaatcaactctgcacatcaaatggtgaatggttgttaaactactttgccatgctgtccttagctgaattctaatggtggaatctctgcataaattaagatgaatttttaacttccctaggaaggaagttcacagttaatatttagagtcttctaatgtttaacttgtattgcattgatgtgatgtatatctcattgaatttttgagatgcaaaacttagagatgagattaatcttcttgtcataaaaccatcaaccctaactagtaaggaaatgaaatgtccttataatttctttcttgttattgaggttagttatcattttatggtgaattagtggaattgatgttataagatgccgaatagtaatattcactaactagtgctttatctctttgaatccattaattctgaaacttgtgttgtttttagg

SEQ ID NO: 19541 - DNA, 472 bp, Glycine max
  Intron number 1 from transcript Glyma18g48810.1 (locus Gly ma18g48810) derived from phytozome v7.0 (chr-ID Gm18; pos 58221822 to 58222293)
taggtcaaggttacaacatcctgagactttctcaggtaatcaagtaaatactatgcattagtattttttttatatatattttagacatttttcttgctgctgctgttgtgataattgtgttgatttgtcctttcattttatgtaaccaataaatattcccatatgctttatcaaggaattttgaaaaagcttgcaaagatgtaatatttacaggttaaatacacagatatatgtatatatttaggttttatatatgtagaaattgcactgatgttatgtttgtgtattaattcttattctaaattgaatttcaatataaatattccttatcttaatttcttctcctgtatgtttttcttttgttttataactttgatatttcgattttttacttagttattcttaacagcatattaattagttcctttgattatcagggaaaatttcttggtagaggagctgtggaattttg

SEQ ID NO: 19542 - DNA, 913 bp, Glycine max
  Intron number 2 from transcript Glyma18g52240.1 (locus Gly ma18g52240) derived from phytozome v7.0 (chr-ID Gm18; pos 60901987 to 60902899 reverse strand)
caaatattaagcctgtcataacatccactggtatgttctcttctctttcattctaacctatccctgtttataaaataacacactccttagaaacaacacgtacacacataaacctctctcatgttaaaattaattcaactaagcttctcccattagttaaattaactggattaagttttttccacaagttaaaattaactaatgcataagctaaagtcaactattagagaatttaaataagaaacttctatcaactagcttaattaaatgtaaaatttaacttataaaactaatgtcatttatccttttttttttctgttctaagtggttatattaagaaatatatcctaacaatatcatacttgctgatattaattattatgattacttaatgtgaaattttaatttaaatgatggacacatctaaaattgaaagactcagggtttgttagaataaaaaaattctaaacacctcaaaggatataaaattagaaaaaataataaaataacttttactgtaaattaaaattaacttatgaaaaaacttattttattttttatgtttatttttttcttatagaagtacttatgaagaagtatatctaaacataccccaaaactattatagattaatgtaacacacgtgtaagattcaactacaatttccattacacgttataatctctcaaaattaagataagtaaatacaaatatgttttcatttccgatgctttaattttcacgcaccaaaccaaacaatccaaacagaagcatgcacgtggaaaaatcagggtcacgtttctaagaagcacacaacatgtatatatccgtacgttgatgcatatactgtgtaccagatttaataaatatctgtgcagtgtggaacgagctagagaaagaaaacaaggagttt

SEQ ID NO: 19543 - DNA, 909 bp, Glycine max
  Intron number 2 from transcript Glyma17g03070.3 (locus Gly ma17g03070) derived from phytozome v7.0 (chr-ID Gm17; pos 2056420 to 2057328 reverse strand)
tcaaggcaattgttgttacaggtattgcaatttgcttgcttcttaattcgacagagtctgagcttggagattattcaaataactgggaagggacggcacttaagtttgctcaatttatcagaaaaatatcctctccagttaccggagaggagagtccagtatcaaatatgcagtcacatgggatctgtctactaccggactctccaataattggggagaagccggagcaatttaaaaacatagacttagtaattaggcaacatttatgatagatttaaatacatttttggtccttacaattttgtgcttttttgtttttcgtccttgcaaaattattttcttggttttaatccttgcaaattatgctagttttgtgtttagtccataaagaactttagacagcattttgaacagtgaacaaaagttattcaaagtgtgtaagaaccaaaaacaaaacaaacataatttataaggactaaaattataaaaaaaaaacataattttgcaatcactaaaagcaaaaaaactctaaattgcatactaaaacgatatttaagcctttttgatattgaaagttgttatggtgtgggacgcggagtgtgatttagcttgcacaacacattatagattgagagaataggagaaaacaagggagagaaactagagtgagagggagagaaactagagggagagggagagaatttgtgaatactcgtagtagtgttgagttgtgtgttgtgtctggaagttgtgtaaatatgcttacatggttcatatttatagtgtttgcctctatgacattatagtccgtgtggaaaatatatagatttcttggccaactagcttgtaagtgaatcttatgttacttttttaggtgcaaagggaagattttctggaggttttgatatt

SEQ ID NO: 19544 - DNA, 635 bp, Glycine max
  Intron number 2 from transcript Glyma14g37290.1 (locus Gly ma14g37290) derived from phytozome v7.0 (chr-ID Gm14; pos 46573195 to 46573829)
gagggtatgggtttatagttttcaatagtatattaggtggagagatcaatacttaaattttctagtatatcaaagtaacatgtaacttgatagatatttagatatatgtaccatgatagatatgagagaaaagaaaacatcatattatatcctcattcagggtgaaattgttgagcgaaatcctcttaattaggaaagatacattgttatcctatttataatagtggagatttatttctcaactaggtcctatgttttttcctttacttacatttagaagaatttttagttttcacattaacattatttctatcatatatcttcatatgtatttatttagtgtccattatgaattaagaaatgagagtttggattgatataatccccaacaacctccttatagcaaaaacacaagaaaaccaatccaatatactaataatcaaatttcttgccttaattagattaactaaaaccaaatgctttggccctatgtaccagtatatatgccttatatatgtatatagactttttttaacgtgcattatgcaactttcaatgttggtatatatctgaaactaattgatttttttaaaatggtaggactctgacttcttccgtgaaactcaaagcttgtc

SEQ ID NO: 19545 - DNA, 678 bp, Glycine max
  Intron number 3 from transcript Glyma15g01340.1 (locus Gly ma15g01340) derived from phytozome v7.0 (chr-ID Gm15; pos 813802 to 814479)
ttggtgtatctgatagtgagtggaatggaatcgaatgaggtggaaccgaatggagtagaagaaggttaccattctattgtttggatattttattatggaataggttagtttcatctcattccacccaagttggaggggaagaaaaggagagtatttggtggaatggaatagattccattccatcaggttcattctattttaaacaatctaaaacaataatgttttgttatgtcctaacgtaatgtcttgccccccatttcattccatccctttgcatcattctaaacataatgtcttgttatgtcctatggaacaatgaaaatatggaaacagtttttgtttttgtaagattggactttttttcattttctttttgtctttcaatcaaatagaattccgggcctttgcacttgttttttaagtcttattttctcattaaatgagttggtcatttatttatttaaaccctgtgtcttctagcatctgaactagtacaattatgttaaatcctctggaatttagtcagccaaaacctgtccttgcacataaagcggtatatgggatcatattaattggttctcaaacatggtagtactagaagtgtaggtgctgccaagtttaattacttcctcctttcaacagcttaattattgacagaaaaggcaaaatacttttgtg

SEQ ID NO: 19546 - DNA, 1001 bp, Glycine max
  Intron number 2 from transcript Glyma19g39870.1 (locus Gly ma19g39870) derived from phytozome v7.0 (chr-ID Gm19; pos 46412226 to 46413226)
gaaggagacctattggggcaacgttaatcccattggtcagttccaacctctctcttcttttctttttcttattctggactgtactttaagcaataccctatggtccgagattcacatgctctgaaccatagtagttagttttttagattagacttattgcgtcacgtgagaaccacggtgttgcgacaccacacctctgtttgtgtgttttccttttcaaactaggtgaattgaggaaaggagagtcaaaccaaccgaggtttttggcttgtgagacacgtgggacatcatgagaggaccacgtttcccataccctgtcaaaattctcatgggcaacgaggaatccctcactccagggtccacccaacggagggttcagacttcagatcttcgttccttgttctataagatcgtatataattcgaattgcaatcatcacagtacgtttcactataaaaaatccttatcgccaaaggtgaaaaactgaaaagggttggtacttggctttttcactaccatagcggctaacctacatacataatgtttggtgcggtaaaacgaaaaagaaagaaatactaatacagtattcattatatcaacgaaaaagaaaaaggagagatacaattatatttgagaaaaacattacatatttaatagtgtaaaacaggtataaaagtgttttatgctactagtacgtacatattaaactcattaaataaaaatgagattaattaggcttttttttttggcagtattacgttttcgtgttataagaatagaaatgtgcgtgaataaagtatatgtaaaatacgtcataaaaatatatacttcccatttcatctttagtttccaaattagaaggattagaaattgaaggcttggccaaactttgacttcaaattatttgttttccttgttaaatagtacttcatcctctcattcattttctttagtattaaaacggcataccaaatattaattgataggtgttcgaagctgct

SEQ ID NO: 19547 - DNA, 1042 bp, Glycine max
  Intron number 1 from transcript Glyma16g03010.1 (locus Gly ma16g03010) derived from phytozome v7.0 (chr-ID Gm16; pos 2583904 to 2584945 reverse strand)
agattgtcgtcaccaatccagcaggtattcaactcttaagtcttacctagatgtttttttttctatgaacattaatgaatcaggactaagaatcaattaatcaaaaccacccttctttctttttgtcacaattggaaactttgatattggcatattgtttttttagaaactcattaattattacttgacaaattaatgcttttttaattttcatttttttattttatattttccttctgggagggagaggggttaagttaagtggttaacttttctttttatgcttggtgacatgacctgaatgggaccaactttaaggaaaaaaaaattcctagtgatttccaaaggaacatagtacctacctacctaatcacattaatgtatgtaccattcctagacaggtctattcttagctgctggcaacaaattttggatttactagcccttgtttcgtgcaactcactgtacctggacttatcggcatgtcgtttttttttgttttttttttgtttttacatgcaattggtcatacagattatgcttatatcgctttcttttaaactttggctgcattctcttctttttcttttcaacttaaaagagttttatgttatcacaataaaaccatgttttttccccctactaaatagaattgacacataaatcaaagaactctataattttcgattgtaatatcatttttagtttttctcagtttccttctagcttcctctactatttgacctgttatccatcttcagaggaaacattctcatatatgatttgtaagcatgtcaatttcttgtctcgtgatactttctcctctatattcatgttataaattttcttcacagcaaaattttgaaagtactttaccggagtcttaacagctgaaactggtagtacaatgcacacaatatttttgcacagtactaatattatatgatacataacaaaattccaagagtcttgctagtctatactaatcattaatgttataacttggcctaatttgcaggcttgtacaggtaccggctaggtg

SEQ ID NO: 19548 - DNA, 919 bp, Glycine max; identical to SEQ ID NO: 19325
  Intron number 1 from transcript Glyma14g38840.2 (locus Gly ma14g38840) derived from phytozome v7.0 (chr-ID Gm14; pos 48022859 to 48023777 reverse strand)

SEQ ID NO: 19549 - DNA, 816 bp, Glycine max
  Intron number 4 from transcript Glyma20g29010.1 (locus Gly ma20g29010) derived from phytozome v7.0 (chr-ID Gm20; pos 37956576 to 37957391 reverse strand)
ttctccttgtcaaagctgaagcaactcgagttcttgtaagtttgaaaacaatatatagcattcaatgtgttttgcttttttaaattttaatcggatgagttttaagttgaacgggtgaatgcagaaatttaaagagcaaccaattgactggtcctatcccttcaactttaacccaaattccaaacctaaagactctgtaagttcttatcttcttttaaagtgtgtggtgattgttgtaagttgtagcttttttatatgaaagaggatttttgatgcctcattgctttagctagctgcgtctaaataagttctaattaatgctcggtcatgtttatagtgatcttgctcgaaataggctcactggagagataccaagaatactctattggaatgaagtcttgcagtacctgtgggtttaatcttttcattgtgaactttacaggggttgactaagtttttagtccacaaatttttgtttgactggtcaagtccttaaacttttattagtttcatttttttagttcttgaacaaaaatttgaatcctttatttttatttatttaatgagattttaaggactaaaaattgaatttttcaaaagtttagggactataaactttaatgggaaaaaaattgagggacattaaccagtcaaacaaagtttaggacctaaaaatggaatatctaaaaattttagggactaaactttgttaacccaccttacatttacatttagatgattattcattattattgtattattctttaagggatttttgttgtcattgttcattgatccagtgggttgcgtgggaac

SEQ ID NO: 19550 - DNA, 646 bp, Glycine max
  Intron number 1 from transcript Glyma15g08460.1 (locus Gly ma15g08460) derived from phytozome v7.0 (chr-ID Gm15; pos 5983922 to 5984567 reverse strand)
tttgatttccacgaacaaagggctgcatcggctaggtaacttactaggaagaaatattgtgatttgtatttgacataattaatatggtgtttagcatatttgtatgtagttctctcctgcgtcttctggtttacttttatggatttccactatcatccaatcatgtattgtcaaatcattgaaagaaatttgactatgacaacttattactgggaagtccaaactctttaaatgatgtgctagtgtatgattacatgataacataaaaaacaggacttttgacgaggataaaatttaaactattgtttattatctttgcctcttggttttattattcttatcaaactgtgggcaagatatccggtgatcaggtactccatgattcaaaatgcttgcttctgttctgtattgcttgatatactagtactctgctatgttcttcatgttaggattcctcaacaggatttagctttctaggatgtctggggaaaaaatggatctagaaaccagttcataatgttgccgtgtacattactctctttttagtaggttatgtagaatatcaaatcattcctatgtcgtataattactttattttttcttccctgtagggctgattttgagaggacaggtctaagcagcttag

SEQ ID NO: 19551 - DNA, 796 bp, Glycine max
  Intron number 1 from transcript Glyma17g26600.3 (locus Gly ma17g26600) derived from phytozome v7.0 (chr-ID Gm17; pos 27889066 to 27889861 reverse strand)
cactaggggtatttactctttttttttgttatttaatttaattttactaaatggggcatgcatttttttattattggttaaagaagacaattactgatgcttgttttcttcggttaaatcgatattacgcagaagggttgattttgtgtgtggatgttttctgtctctaaaactaaaaatttgggataaaagaggaatggtgctgttaattttttattagttgctaaaaggaaaacaaggttttgcttgggaaaataggtagtgagtggtgctttttttatttctggcaaggtttttttaaatatcggtggcattacggtttgttgatattgcggcaaatcagggacaaatgcagccgatgcaatctcaattccagtcacgaacagttaaaaaaccttgaagttgcggcccaaatcatggtcacggactgatatttaaaaccttgatttctgttgattaacaattcatctttggcagagataagattggttaggtggttaagaaagaaggaaaggaggaaaaggtggtgggttcgatttccctgctaacaaaaacctaacaaactaaccactaacatttgtcgataaaaaaagcaatgcatgcttggctggtcatacttcatacgtcaaattaatgcattcattcctctgtgtgtgtatgctacaaattctgtaacatgattatgatgatatcttgttgtcaaagggtgccagagatcgagaaatttgaattaccttttggcatttttctttaatatgcagaaggtgtgcgagctggattcaaggctgcttccatt

SEQ ID NO: 19552 - DNA, 686 bp, Glycine max
  Intron number 1 from transcript Glyma20g34980.2 (locus Gly ma20g34980) derived from phytozome v7.0 (chr-ID Gm20; pos 43302906 to 43303591 reverse strand)
tcagtctaagatcaccgaggctttccttgttcaatgtatgtctatctcaattgtgattctttctcccttttcatcgatcaatctttgtttttgtgttgtttctgaactcaatttagttgccaggttgttcctgcttttgaattttccgtgttgattagagatctgaaattcttatttcatcataccttggttcagtaaaagtttgattctttgatctggccttggaattttccacctatatccatctaatctcactgggttttatggtcttctatttgcatttggtgtagagcaaaatagcagttcaattatgttaagaaaaacaaattgtgatgatcatataaaagttagatgtactcaccacaaattattgttttaaattataagttttgatgcgttgtttgtgcaattttcattaaatttgcttcttttcatcgttttgctggtgtgatttttagatatttccgacattaattcacctaaattgtatccagactttactttagtatgcatgcctgctactgacgaaagttctgtatttttcttcccttgatttcatattttgaaacttaccagatagagaaaagaaagggaatacatttatgtactttaaatttgatctctgttaaaattttacctatctatttattggtttttggccatgttatgtgcagcaaaacacaaaa

SEQ ID NO: 19553 - DNA, 838 bp, Glycine max
  Intron number 1 from transcript Glyma15g12690.2 (locus Gly ma15g12690) derived from phytozome v7.0 (chr-ID Gm15; pos 9388247 to 9389084)
ctattcctcattcacaaatcacaacatatccattggtgagttccaacttctttcatgtgtttctttgcttttagcttccctgagggatatactatcatatatctcagtatatcctttttcttttgattttttgtttagttgaagttggatcagtgtgccaaaatgctaaacacacttcacttgtgattgggatcgggatctttctcttatatccactattctttgttttatttaatgtggatttagtgatttactgaggaatacacccttcattcttcctcacttgcttacttctcattcggttcaatgatctattggtttttgtagtcggtacttccccttctttgctttccgaatgcttttgtgattattactatagcaaatttggaatatttagttacttggaaaagctaaaaaaaactcaacttttggtatgggtaagtaagtaaagtaactgagtattttccttgcactataagctcccttctctagcagaatcctattttattctcttctcttgtttggttcatttttcgttatgcttgcattgaataattttgctgcataaatctaattaacagaaagggaaaagttccatttttttcaaccattccttttttcttttcttttttccaatttggggtggaagaagaaatgagacttccatgttttgtctttccacttggcgttgataactcgcaattctttgtaaaggggaagtgttttcctccattcatcatacacacttggcatccttgcttttgttttgttttgttttgtttgtttccgacatgaacggtgaatatttcaactgtttttttttgtagtgtggtatacc

SEQ ID NO: 19554 - DNA, 994 bp, Glycine max
  Intron number 1 from transcript Glyma16g06700.3 (locus Gly ma16g06700) derived from phytozome v7.0 (chr-ID Gm16; pos 6013587 to 6014580)
gaccattcaaccttcctcgcctttgcctccgtttcgtgagtccactcttcttcgattctaggtttctttttccatttccgtttaattgcgtctgtattggttaggttccccttttaattttattattaattattaattattgtttgtgaatgagtaagatgttgttgtttaaagttttgagtgtgctgttctaatataacgatttagagcttatgatgatttttaatttgggttatcagaaaattgcgagaggcacttatttggtgaaggtataatcttgattcagaaaatatgctggttagaattatatagtagatagccagagttgtgtcctcgaatagtggattattgtttgtaattttttcttttgtgtgtgtgtgtgtgtgtgtgtgtgtgtgtgtaattgatgtgcttgtggagctacatcccttccacatttgctacgtgatggatattgttattgttgttgttgttttatcatcatcattattatgctgttacctggctagttttggatctatgattgtttgcattcttagggagtaagaaggtaatcattaaatcattgtttgtttggcattttagatcatctaatcccttttttgcctttgtttaggtttctctttgttgatatatgtttcgtaccaaacatatatgttgtgattgaggttggaatttgttcagctattgatatgcatcattttaaagctacccgcatttttatgtagtgtttaaggctattttgttgcttggtaaatcatcacagcataattttatgttacatttttaagtgtgatagcatttcctgtggcaagtctcattgcttgttttcgtgattgttctgttgcagatgaaatttggtagattgtttgttactttcacatatatatgtttatttttgtaactttatgtctagtacttatattagatggatgatgctaattatttattatctatttgtgtatttttgggaacaacctacagcgtgactgag

SEQ ID NO: 19555 - DNA, 736 bp, Glycine max
  Intron number 3 from transcript Glyma16g06700.3 (locus Gly ma16g06700) derived from phytozome v7.0 (chr-ID Gm16; pos 6015404 to 6016139)
atcacgcttcgtaagtttggcttgaattttccctatattttcctatcttttgctcaacaatattgtttaccaaattagaaaataagataatcttatccctgctgaattacatgtaataatgtttagtttattgtctccaatttattaaccttattttatattttatcacatccttagatcagcaactcatccttcttttcccttgtcatttcatatgtctttgatgtgatataagtaacatggtttgaatcttgtatgtgactccggtttacatttgtcctccattcatagtcaacatctaataagtccttcgatgacataaacgatgtcgcattcattcaaatgcccttaatctgtgaggacaccattactgagagctatagtcgatgttatcttcctatttttttgacatatgtagtaaggaccaatttgattacacttgtatttttggaggactaacatggtggtttactctatttattatacattgattgcattgtaatttatctagcaaaatagtttaatctctgatttttgccaaagaaataatttcctgctttaaggacattagctgtggcaactggcagggttcataaacgatgaatacatgttctgctgctatcatgtatttaaaccatatttcacgttaagtttatattaatatcaattcttaatgctttcaattaatttttcatgggcaggattcgtcgtggtcatcaagtttatacagaagtct

SEQ ID NO: 19556 - DNA, 900 bp, Glycine max
  Intron number 1 from transcript Glyma20g02500.1 (locus Gly ma20g02500) derived from phytozome v7.0 (chr-ID Gm20; pos 2107781 to 2108680)
tcaaccatattcagtgcctacctgctgcccttgaggtggggaattttggttcttctggctatgttgcaggtttctacatggctttagtggatctcctcacacttttcaattgaattattgattatttatttttgttgtttctgttttggttctttttttttagtatttacatataggtatatgttggcactatgatttggatttatagatggctaaagaaaaaacacaatatagaatgttagatatgggaaattttttaaatgctgactttcttaaagtttgcacaattgatttaacaaataagaaacaggtactggttattgagaaatttttgggtcactcaatggatgttttatcaaggctaaaagcagaatggtctccacatgcggataaggcactgaacagtgaatattgtttatttttctttggcctacaatggtctcttatgagaaaatgattaagaaatttctattatgaaaaagtaagcttatcgcacaatttcacatatctttatattggataatttcctcccctaacttacactattctgagtttatgtaaatctgagttgcattaacgtaaaatttttccacatgttttagatgtcaaatgctgatagaatatagtatatctaactacaatgtgttgtttttctgtttagtttttttggtaatttaattacagatattttatggattaacaggaaacatacaattttctttatggtgataacctaacttattgtaaaatctatttttatctagaagtaccatcttaaagcaacaatggaactatagaactattatttaagatcttaagtttgatataatttctaattaaagatgctgatctgaagtcatctcttaatttccaaacaggggccgggaggtgtttggtgtg

SEQ ID NO: 19557 - DNA, 355 bp, Glycine max
  Intron number 1 from transcript Glyma18g47980.1 (locus Gly ma18g47980) derived from phytozome v7.0 (chr-ID Gm18; pos 57509980 to 57510334 reverse strand)
ttttcataggagcaacaatattcacaccactcaaggttttcacttcttcatcacacaagtttgtaaaatatattgttttcttagagtttcctcaagtgcaccctcatcactaatctcaaactaaatgaagaaatcacacaagaaaaatatgttcaacatttttcttcatttttttacctttgtttctacaaatgatttgtttttggttagcactatggagaaatattatatatatatatatatatatatatatatatatatatatatatatcataattttaccttttttctcttttaatccttttttctttatttctcagattggaaggagaactacaacagccaaaacttgcta

SEQ ID NO: 19558 - DNA, 938 bp, Glycine max
  Intron number 1 from transcript Glyma17g31250.1 (locus Gly ma17g31250) derived from phytozome v7.0 (chr-ID Gm17; pos 34397515 to 34398452 reverse strand)
caatacattgtctcaccatataatcgtcattacaagtaagatttaatgatcaatattttgctatatattctccccatcccatctctttgttagtgaataaacttcatttcatttgttctgcatgttttaatccactaagatcgacctagtggtaaagagttacaaactcctaggctcaaaccttgtttgtcattgtataaccacatttttttactgggagtgttttagtccttgtttagcaagcaatttttttttctttgatacaattgttttttattattttcaatagctagctttctgaagaaaaaaactacctaaaaaaatcatttcttcaaacaaaaacaattttagtaatcagtaagaaaagatttatccaaaaagctatgaattggttgttttagttgaatttaaatagaaaaacaaatttttaaatataaacttaacatgttgaacttctttgatatgaattaaataagagtttatttagaatacactatcatataaagatttttttacattggcatctaattatgaataatcatgtagggtaaaatagttattattgaattctaagatgatgagattagaggagtttcttacatgtataaatggtggtactattcattaggatcgatcaaataaataacaagttatgatttttcctagttagattttatatcagttatgatttctggcatttcaattgaaaattgaaattagtaaataatgattcttattctttgagagtcagaaaaaactttatacaaaatagttcctatgaaccaactaatagaattctcaactgaaatacaagaaatcatatcatgatatgaaataatctaagtacctaactaacagaaatcattacttgttatttatttgatcctaatatactatttataatgatatatatgtaatgataattgatattgcagact

SEQ ID NO: 19559 - DNA, 615 bp, Glycine max
  Intron number 2 from transcript Glyma19g31200.1 (locus Gly ma19g31200) derived from phytozome v7.0 (chr-ID Gm19; pos 38966568 to 38967182 reverse strand)
atagctactcttggccgcattttcttgagcggagggtagctcatctattcaatatattcttaacacaaatgaacatccaaaagcattctacttaggagtatcatttaggtcatgtttggataaacttctttcaaagaggagaaaatacaaaacaaaaaagtaaaatgaataaagcttcttctataagtttaaatcaatttatgctctttagcttttgaagaagttagatgaaagagttcctgtcaaaattgaagtgcataacttgattttaacttttgagaaaccttattttcttaatctataagtacttatttagaagtttatccaagtaggactatagtcatgttgcagtggctatgattttcatcaacaaagcgcatgtttggattgacgttaggacagtcacaacctccgtttccaaaagtatgacctatgattttcatctgtggtgaagtagcatcgtacctcgtgctgccacaagatcaccgcaatacaaacatgtgctaaattggttgacagttgacccattgtatcactttttacatataatccctttttgttttttggtttgcttgctgacttgttgttggtttagattatattggaagatcaagt

SEQ ID NO: 19560 - DNA, 950 bp, Glycine max
  Intron number 3 from transcript Glyma17g36440.1 (locus Gly ma17g36440) derived from phytozome v7.0 (chr-ID Gm17; pos 40380421 to 40381370 reverse strand)
aggtttgtttatgttgctaatagtagtagcttctaacttgcaacttttttttatgatatacgtacttttttttaactctttgttgttacaagaatgtccattcaaatagtttttttttttttatcagcaaatgttagtttgttagaatgttagtgaagggatcaaaaaccgcaacctttcccctcttcccttttcccttaaccatccaacccaccttatatctcctaacgttcattcaaatagtaaaactgaaaaagccccctgtttggttttcagtagtgtccaattgtagactgagttttgcctcagtttgaagtggaagtaaaaggagagttgcttttgcaaactcaatttgcaaaatgaagttcattcgaacttacatttgtaaactttaatccaaacatgcatgtaattgctgatggaacttacttttgctgaattgaattgtactactactaggatattcaagatgatcttctttatacctttatttcttgggaactaaatgctaaggagtgccttaaggatgcttggttaaggaatcaagagttgaaagtttttattggaatgtatggcttttattgttactgatgcactcctaccatgttaccaataaaacctttctatttattgattttttaagcagtggacttaaggaacttgctagcagaatctttctttctttttcttttgtttgtttgaatgcaacttcttctctttgtttaggcgttatttatcttatggttggtataattcaaatgtttgttctgggatcttattgcttttcccttaaactgaacacgtcctcagttgagtttggatgatgtatgcttgtcttgttaattgttaactgaatcactttctctaacatgaaactggtgaatcaaacttttaattatcacactggcatttgtagaggtttacctacacaatcagaacaattcaaggat

SEQ ID NO: 19561 - DNA, 784 bp, Glycine max
  Intron number 1 from transcript Glyma18g52650.1 (locus Gly ma18g52650) derived from phytozome v7.0 (chr-ID Gm18; pos 61205211 to 61205994 reverse strand)
aaccccatcaacaccgtcttcggtaattcttctcagtcctcattatctgctcaataatatttttacctacatttttctaacaagctttttacattttatcgtaatgttttatgttttattgttctcattattttttttatccgcaaatattattttgttagttttgttagaaatggactcgaacacgcgacttctccccgtacctttcgtcaaacaccgggtcaacctatatctccttttaacgagtattagtgtggagttttgttgtaaaatcttaattacgcgtttaagctgagttcatgtttggttcatttcaattacgattattcaagccttcttctttttaagaaataggatgacaattttcaagttttcaaggttcttgatattgcgggttacaattgtggaagcctctgaaaacttgtggaccgtttcgttattattttattaaaatgagctcaatccaaaattacatgtttggaagcagatgtggtcctctttggtttgtttatagggtttgaattgagatcaatatatatatatatatatatacatatatatatatatatatatatatatatatatatatatatataaaatattatataaaataggaattctcttaatctaccctaatttaagaattgttttttattcccgcgatatacttgtttcaatattctatatatgtacagtgtggaaggttttcattctattgtggtgtaatttgtgagttgatgatgcttggtgtgattgttgataactgggggttgtcactttgcag

SEQ ID NO: 19562 - DNA, 626 bp, Glycine max
  Intron number 3 from transcript Glyma20g25200.1 (locus Gly ma20g25200) derived from phytozome v7.0 (chr-ID Gm20; pos 34944996 to 34945621)
gaaagtccctcctgccataaactatcaggtttgctttctttagatttcctctgtttccttccttggtgggggcatttattaatattgggtattgggaattacaattttttaaataaatctgtcagcagtgatattggagaagatttgcttttttaaattaggtcaataattttaaaggaactgtaaaccactcgttgccagtggagattctaaaggattatattaaaaaacatctcatagacaccgataatctttgttgatatttaatttctaaatgctgtgatgtctattctaaaggatatatatggtttgtttactaggttttcactgccctcctatatcttcactggcaaatatgctctctcactttgcttatgggttaaaagtacaaaaaaaataaaattactccagatgagcaacacatattgttgatttttagaaactcaaaatttgtattttaaactatttagtctgagatcatagatgcagcttgatatttctgtacaaggaatggagaaagaggaagctgggtttttattcttcaaagtaattatgtttataatctggtgcaaaatgaagtttatttttattttcaggagtacccgcctggtaatataattatacct

SEQ ID NO: 19563 - DNA, 911 bp, Glycine max
  Intron number 3 from transcript Glyma14g12880.1 (locus Gly ma14g12880) derived from phytozome v7.0 (chr-ID Gm14; pos 11847183 to 11848093)
gtgttgtatcctatttaaaaatttagttctaatatgatttatatggtaactatttctttaaggttatgatatgtctacttttactccaaccttcccttttaatttggcaattcttcactttgtgatttgattcaacgtgacatgtattccttaggatttttgtctgatgtgaaagtacgtcacaacttgtcattctactttaaccgtattttaagtgggtagtgacatagtgttatacttgcttgaaaatagaaggaaagactaatcctttgagagtcctgaggtgctgtaatagttctttatttttccgtgaaagatttttgttatttttctaatcactttatggtaatttgttcccttttcttgacatcaaaagggaaatctatgagatcttgtcggcttgccattttgattgcttgtgacatgcatgacaacttataataattttactgatgatccatacaccatagcttacatgtgtgagagcagtttcatccctttattttgaatttattatgtttaattcataaaatcttttagccatcttccttttagattttgacccttttgattggtatgaaaaatggagaaattatattttccgtaacgtctagccaaaacatttatgctaattttacaattcaggttcaatggtcaactattaaaatgggtggtgggtagtgacctagtggtattcagttactctattcaggcctttagggtcgagttatttcttttttatgactttgaaagaacaaattggattaccatcaattccatcaaatacatacatttcagtttgattttattgtttattatatgaggggtggagacctgaagtgctcaataaataatatatatgattctagatcttttgctcctttttcttgacttaatatgtagcttcttcc

SEQ ID NO: 19564 - DNA, 574 bp, Glycine max
  Intron number 1 from transcript Glyma15g29940.1 (locus Gly ma15g29940) derived from phytozome v7.0 (chr-ID Gm15; pos 32909511 to 32910084 reverse strand)
aggaggagaaggaggaggaggaggaggggaggcaggtggagaagctataatcctgtatacatcaagaaaatgtaaatttcgattacagacaaatatcgacatcaacagttctttaaataaaatgtgatcaatgtttataatttcataaactaattttgtatgactattctagataaacaattaaagtctcatatataataaatcatagattaaatttccactcattttcttagaatgagataaacataagttgggttagccacatcagaacaaaacaatgaaaacgcatagtacattaatatacatgttactgttgaattttcatgtgatagctagtacatttgattgaattctcaaacgtacactcatgaatattaatgaaactagaattaatcagacttaatttaggccttaaaatcaaattcaacagtaatgtcttcgatggtaccaatatttgtgttagttgctttaaatgccaaatgccaatataatctaatactttaatttctatatatgttctcacttgtgtttgctactagctaggtaataggttataggtattttttttcttcat

SEQ ID NO: 19565 - DNA, 934 bp, Glycine max
  Intron number 1 from transcript Glyma19g11770.3 (locus Gly ma19g11770) derived from phytozome v7.0 (chr-ID Gm19; pos 15030152 to 15031085)
gaggtgaggccgtggacttgtctagtgatcataaggtatatttgtttccattttcttaattatttaatttctcaaatttctactctattttttatattccttggacagctcattttagaattgttattgttaatttttagagtacttgaaataacgtcatattctttattaatcataggaaaaaaaaacgtcgtattctttaaatttgttaactttaccataattattattgtaaactttgattgattttctagttttatttataagaatataaaaagtaaaatatttttgcactataaagtaaattgtcatttattttaaatattaaaggtgtatagaaattaaattctataaaaaaaagtacatttttgaattttccttgcataaaatttgctgccatttttcaagttttgatttcatgtatatttatgttttcactatgttaaaagcgggcgcagcactattttgattgacaattttgacattttcttaaaaatatccatacatatgtgaacatgtaatgcaagtcaatgctcttcaatttgatgatgaaaatggttattcagcaaaaattgttgctggcagtgaatgtctggactttgggggtgtgtatttgatgtgtagcttccaaaagagaaagatgtcttttggtcgtatcgtagagaattgagatcatctttgtaatgggtgcatcaaagcttttatagtgttaattattgaatttaagacgtatgcaccttaaaacttggcattcaatcacaaataattatttgaattattttaagataattattttaaaaattaacaaccttatcattcatgattgtgattagatgattgtgtaaatttttttacaattattaatgcataatccttattctcttaattatttctgtcagattttttcgtagcgaagcaatttattgtaagaaaa

SEQ ID NO: 19566 - DNA, 859 bp, Glycine max
  Intron number 1 from transcript Glyma20g31000.2 (locus Gly ma20g31000) derived from phytozome v7.0 (chr-ID Gm20; pos 39669664 to 39670522)
gggtattaattctttggaattcacataataaattgcttgcttgatttatttatttaattatttttgtgatgtctactctgggctgagctgtttatttccagtttttcttttagttgtggggatcctgttatacatcaaggaattatatcctttctttcattctacaacatttcaattttctccattccaagatatagatgatgccttagcagaattatatgggttcggttaatggcaataagataaagttgtcaaaagtcattgaaaacttgttatattttcagatctcttgaatatgaaggtaaccaaccagtttccagtacctgcttcatgctttctgaaattttggaattttttttcctggcagtttatttcattttatatttcttctttcaccctatgtttggatgcagagaaagaaaagaggagtaaagaaaaaaaaattgattttaaaattctgttgtttggttgaaaagaaagtagagaggaaaaaatatctaaaaaacaaaattttgtatgttttatcttcatttcatatttcaaaattttttctctctcctattttttccactaatcagaatttagtttaaatgaaaactgaattgaggaacttttctgcatgtattctgccagtgttttcataacttgtgttcatttctttactgacattcacttctttttaaaaatttcattttatggttgaaagggccaacatatgtgaaataaccctgaatagttgatcttgtagaattgattttagctcgtctttattagtaattttcgtatttatatgcagagtttgttcattaatagtgtctttttgtttaaaacctcagggggcacttgttgcaaattatcc

SEQ ID NO: 19567 - DNA, 626 bp, Glycine max
  Intron number 5 from transcript Glyma19g41190.1 (locus Gly ma19g41190) derived from phytozome v7.0 (chr-ID Gm19; pos 47500652 to 47501277)
gatattgctgaacttgtcacagtattttccccctctttgtcacagatgacactaaaccagtgaatattaggaactggtacctactacctttgtttgatcccaatacttgtttgtttgttcttgtcatttgtaaatggcaacttgttatgaacaaattaaaaatagctcgttttacttatcttcacttgaagtatatgagatttgaagctagttttcagaatttttcagtgttttgaattttgaaataaaacctacaagacttgttgaaaagttttgatggatctatggagcttgatgaaatgtttttcctgaaattagttggtacttggctgtctcattgacagtatgctctatgcatagaaagattaaggggaaaagtaaccgagaagactaggcctaaagtatgagtaggtaggtttggataaatattttatttaaaaccattgttgaagcattatacttaggtattcttacaagtttttatttgtttgcattcattctgagtccttgcctcaaaagcttcaccctccaccctcctttttcccttctaaatttgccacgtgatgctctttatagatttttttttcacttaattagtttattgctggtgcaggaggctggcatca

SEQ ID NO: 19568 - DNA, 459 bp, Glycine max
  Intron number 1 from transcript Glyma18g51900.1 (locus Gly ma18g51900) derived from phytozome v7.0 (chr-ID Gm18; pos 60657161 to 60657619)
acgagcggaaagcagctgagcagggcttgaatcaggtgcgactctcctttcggttattatcgaattttggttctgatcagagttttgatcggttttctctttttgtttatttgattggcttctgcttaagtgtttgccaagtacggatggttgtgaaacgcggtgattttggtgttgttgtgaattttggcgtgtgattgctaattgaatgcagcagtgctttaattggatgaatttaaatttggttgtgtgtattaatgatcttcttgaatatgaagagttgattttcacgaatgtgtttgtgaggctctgatacttgaaaataaagtaaaaacacattaactttgttgtctgttggtataggtgtgcatttatgcgtgctagttgaatgtattagtgttttaatttgatgtgttttttttttaactatattaaattaaatatacatacagtttcagt

SEQ ID NO: 19569 - DNA, 588 bp, Glycine max
  Intron number 2 from transcript Glyma15g13510.1 (locus Gly ma15g13510) derived from phytozome v7.0 (chr-ID Gm15; pos 10122797 to 10123384)
ttcttgcccttgctgctgagatatcttctgttctggtatatatgtctcattctatttttaaataaatttcttctgaaatgtttgatgccattagtactttccactttataagattagaccttctccatgtttagtgtgtgttttcttaatgtgcatattatcaaaattgtatgcctaatattttaacttttcattcttttagtttctagaatgtgtcaattttaattcttaactgacataagaaaggaggtttcacttcttaaaatcactttcctttgatttcattagcaatcttttctaagattctccttaatatttcatatattttaagatcaattttatggtctcccataaacatatgctcataaattaactgaccatttaagtagacagagaaaatgaaagtgagttgatgaattagttaaaacaaattattagtaaggaaagtccactcgcagccgacattgaaaattacatactacaacattcttaatatactaaagtgttaaatcaaagtctaagttaacaggtatgacttttgcttttactttattatcccttcttatatttacaaccatccacaggctc

SEQ ID NO: 19570 - DNA, 927 bp, Glycine max
  Intron number 1 from transcript Glyma20g23000.1 (locus Gly ma20g23000) derived from phytozome v7.0 (chr-ID Gm20; pos 32935629 to 32936555 reverse strand)
ctccgttgttgccatcgttgctcttagcttcacaggtaattcactttattcatctctctctctattcaaattcaaactattctataaatttaagatctagggtgaacgataatcctccccaacaacagatcgcaaatcactgcaattcgtgttgcttattttgactctacaatttttttatattcaatacatgacatttatcaacaaagcctttagttcacgcttattaaattttttccccgcttattcgtaataggagtatcgttgatgaatttggatatcccgttgaggtagggtaggatttattggagaaaaacaactatgactggttgtatagtccaagaaacaacggattgattgaggggaagttttcttctttctttctttctttcttttagtagcatgaattctaatgattgccttggaccttttgtgcttatatgtttttcttcttgtgtggccattactcattagcaaaacaaataaactaacttctggtttttctataaaagaaataacttttttatttgaataaaccctcaatttcatccttcaaatatgaccctctcggcaattgtccctgaagtaaaattatacaagtaatttctcaagtattagaaatcatgctaagtaatccctcaaaaattgaaaagaatcttcaaattagtccctgaacatcagtaaaatatattaaattaggaactaaattgacggatattcaatacttgaaagataatttatatagttttattactttaggactacttaagagagagggtaatatttaggggaccaaattgatggtttattgcttttcatttcttaccttacattgtcatatttgactgttgaaaatctcaaaattaccctgtttggtaattcaagtgtctgtttatgctcatgtaagttgcttctttcagctgaaaa

SEQ ID NO: 19571 - DNA, 723 bp, Glycine max
  Intron number 1 from transcript Glyma14g24300.1 (locus Gly ma14g24300) derived from phytozome v7.0 (chr-ID Gm14; pos 29117728 to 29118450)
aaagcttctgccttctattttccagcctcatatcagtgaggcaatggctttttgctgggccattgaaactgctcatacccttctcccctcatctatttttgaaactgattgttagagaatattccttgcttggaaagatagatccttaactgattatagctacttcgatgggatcattgatgactgcactcgtttgctttaccaggatacttcgaaccttttgacctttgcgaacagagaagctaatagagctgcggattctcttgctagattagcttttttggttaatgattttgtttggatttgaagaggttcctcctcaaattttgaacattgttgaagatgatgtaaagcttgattccgtttctgtttcctttcaacgaatacacatctttctcttaaaaaaaacaatatatgtaggtaacagtacacaaaaaaaaaatgtcgttaacaactacgtgccaagtgctttatgtttctccaataactgcaactaaatattatcttcttagggtaaacttaaaaaattatggaggaaacgtaaatatgtgagttaaccgcaagttcttcgttttttagtttgtagacattaattaattaacttacgtctttatttcttcattaaactcaattaagaccgggcggttcacatttagacgttaaatctacttttgaactataaatatagcttcataccaaccatttcaaagccatcaaagctta

SEQ ID NO: 19572 - DNA, 741 bp, Glycine max
  Intron number 1 from transcript Glyma20g30620.2 (locus Gly ma20g30620) derived from phytozome v7.0 (chr-ID Gm20; pos 39305956 to 39306696)
tcggctgcaagttcgtctgctctgctgttaacaaggttccttgtccttcctataatcccctaatctctttctcttctagttctaccacacatgcatgcatccatttcatttgagttcaaggaagcacctatattgagaggaaaaaaaaatttattgctaattttccatcataaaaagaaacagcctatttcaataattttcaggtgaaaacgcataaataatagtgttatgttgcatgcacatttaacagctcttttcaattttcacgcaagactcctttaaaatccaagtataaataacacatgccaaagtggtcgactttaaattagtttcaaggcttttttaatctgatttgatcaagtttgatccaggtttaacatgtaaaaatttctaaacaacatcatcagtttagaagtccgaattaaaaatggacttttttttctagcccgttttagcccacactggacctgcctgcatgaggccagatagcccattttgcaaaaatgcaaaaagaaaaaaacatagatcaggtctctctaatacaatgaaataactaatctaaaaatttaaattattatctgacatgaatgtttttagattgcattttaacatatacaagcccaaggtttattttattttatctttgatgaatcggtttattactatttataaaatctttaattataacaattgattacgcatgcaggcgggtcttgctaagcttattggacttgcaggaga

SEQ ID NO: 19573 - DNA, 481 bp, Glycine max
  Intron number 6 from transcript Glyma16g21590.2 (locus Gly ma16g21590) derived from phytozome v7.0 (chr-ID Gm16; pos 24685217 to 24685697)
ccaagtgtcttcagtaaggaaactgtgagttcatacgacttcctctggatacttaatgtgtttgttgtgcattatgagatgatgtatcaatcagcttgctgccaattgtcattatacatttttttcttgtcaattttacattcagtattgtagatgttcagtatttccacttttggtatataatatggctaatgtaggggcattgtttacttttgtgttatgcagtacgcaggatcttttaagactccatttccttgtccttgaattattttatatcacagacaatatataccatctttttttttactttttagtatgcattttgattttgaaactttatgtagaaacatttgttgttgtggagagggctgatatgcagttttctacttttgtgtattgctaacttatctatcaaagagatatatttaactgtaatctattaaatcagagttcacctttttgttgcttgcaggagattgtc

SEQ ID NO: 19574 - DNA, 937 bp, Glycine max
  Intron number 1 from transcript Glyma15g16410.2 (locus Gly ma15g16410) derived from phytozome v7.0 (chr-ID Gm15; pos 12709700 to 12710636)
tggtggaagagagaagacatcacaaattattattttttttacttaactcaattctgtaaaattagtttaataaggtaaggaatactaataatttatataatttattttgctattatctttattttttatgtgagaattcaatatgtccaaataaatatatatatattttttcatggtataactataagtaatgtgagacttttaacacattcgagatttgggttctaataaggttgtgattttgcttcagtgaaccttccatccacttctaacaataccatcttggaagagagaagccacttgcagcattgggaatctaaaatacaaaagatttggcggaatgcaaagaataagagtagtagttttaaagataacgatggcttttagtcgttataatattaaaattaattatttaaaatttaaatattaaaaaaaccaggctttaaacataattaaaaaaaaaattaaaataatatattttaaaaacataaagaatagtaatagaacttaatcttttaaaacaaaaataattataaaatataatgaatataacattaggtctttttcttatgttaaagaatataacattgttgaattatttgataaattttaattactttttctttatgttaaagaatatctttaataaaagattttataagaaatgatttttttataagcataacattaggtctttttatttgataaatacaagtgggatttgtaactattttttttaaatgatttttttattacttcttcacaacatcccaattgtaaatattagaaataaattctttagacttaaagaaatggtttagttatatcaaaataagaattgttattgaaataaaaaatgaatgatacgtaacattgggagacctaccctttttacattacagggtacagcagaaaaatatcaggggagtaaggattg

SEQ ID NO: 19575 - DNA, 463 bp, Glycine max
  Intron number 1 from transcript Glyma19g42940.1 (locus Gly ma19g42940) derived from phytozome v7.0 (chr-ID Gm19; pos 48755253 to 48755715 reverse strand)
attgctgttctttgggtaaataagtttttgttgtcatttttaagtggtttttgtcatgttaatggtttttttaaggatttgctttttttcaacatgcatgcaaaaactttttcaggataaaccttatggaatgttttaaggacagaagaaaatatggagaattaatgttttggttggagataaaagaaagaagaaaaggctgattttcataatagtgaaacttttcagtttttttttcttcacttttccttttttatttcaaactttttcggtcttttttatgttttttaaaacatgcattttgtattcttggtcagaagttaataattaaaagatttatcgtctttttttactttaaacataaacataatttttaattatttgaacataatgatatactactattcatttgtgtttctgttatagtaactttgaagtggtttgttttttttgttcttaggaa

SEQ ID NO: 19576 - DNA, 577 bp, Glycine max
  Intron number 2 from transcript Glyma14g11410.1 (locus Gly ma14g11410) derived from phytozome v7.0 (chr-ID Gm14; pos 9935870 to 9936446)
tcgtgagccaaagactcatggtccaaggaagcaacaaaagtaatttaaatctaatccatgatctcaataattctgagtattctgagtgttcttttttattttttactacataatttagttggtgattaatttctgttgtaggagaatttagttgcttattttttaggaaagttttttttattaatcacattttttttaaatttataaacttaaatttaaaatgttatttaaaaaaatctaatatcaatttcactcaaaacattccaattttgattttttcccttgtttaaaaaagaaaatttcttttttaatcacattttttatataaaacttgaattaaaaattttacttaaaagatctaataagaaaataatcaattttatgtttatgatgtgcttatttaaactatttttacttaaaataaatacttttatattttttttgaagaaacaaattctatctacttattaaaaaatgtatttttataataagtgtttattttaaaattatttttttaaaatttaaacaaactcatccaagaccagttttcacccgaaacaaccacattttgatattt

SEQ ID NO: 19577 - DNA, 432 bp, Glycine max
  Intron number 3 from transcript Glyma15g14440.1 (locus Gly ma15g14440) derived from phytozome v7.0 (chr-ID Gm15; pos 10915778 to 10916209)
attctgaggtttgtattttacatttacatttcggatttccccttattttaaaacagatatccttctgtctgccattttaatatatacacgcaattttctttcccttctctctttgatgtgtcactgtctttgtgtttatccctcgataaagatttgaaggagacccttgatatgcttcttcatatgactaaaaacttcattgccatttggcatatactaaaaggaaaagaaaatgtcagtatttttggattttttagcataaaaaaacttgagaggatttaacgtttttggactgttagtatattgtttgaggtctgacaacggatgaaagatggtgtagccaataaatggaacttgatttataattataactattcaaaattagctattattgtaattattattttctctggaaaacatgtagatacttca

SEQ ID NO: 19578 - DNA, 667 bp, Glycine max
  Intron number 3 from transcript Glyma15g38930.2 (locus Gly ma15g38930) derived from phytozome v7.0 (chr-ID Gm15; pos 45431571 to 45432237 reverse strand)
attgcctattttatacagtgagtcacatgttaaaggtggggaagatgttattaaatagagatgcacctcagtcccagcagtacatgtattttagttgcttacaacttacaaggacaatgcttattatttttgtttgtcgagtttcttgtgaaattagattattgacacatgatgttggtttcaattgcatttgctgcccctaattaataattattatattttacctattacctgtgccaacacttttgctttagtctgatacaagtaacacaaaaaatatgttttagatactgttattagttttctttaatcaagcttgaaacacttgtcaagccatatttctaaagatactcattttctcaagagactacaaaaaaatagaataaaggaactaaagaatatcagtaaatacgtaacagtttttactttttttttttttttttacgttttttagtattttttatattaaatataaagataagactgcattaattaattgttacgcaaacaggctaagcatggattgaatatatgagcttatagtgccttgtactagtgataagggcggtaaaaaaatggttttcatcttgatttgtgggtttgatttgtatttgagatttgttttgaattttgatttgtattccattcattgcagttgggcagagtc

SEQ ID NO: 19579 - DNA, 794 bp, Glycine max
  Intron number 1 from transcript Glyma20g00800.1 (locus Gly ma20g00800) derived from phytozome v7.0 (chr-ID Gm20; pos 524705 to 525498)
cctttccttttattatcattttttaatctttttctgtttttcatttttaaaaaatgcatgtgccatttgccataaataacttctataataacctcttctaagctgaacatattcagaaaaaaaaaaatctgcaaaaaaaaagccaaacacattaaggcatattgcctttatttgttgtaagatataagtctgaataaaaaggtataaattgttataaacgtcttaatagttatcttcgattcttactaacaaaaaagatacaatcccggctagatatcaccctttccaatcttctttgaaagcatgttgttttgcatggtaaaagaatcatgagtaaaagttatagacaagttggaatcagataacaaaggaaactcaaagggtaagatgagatagttgaacactgaaatcccatatctcacccgtatccatgcaacataggttgaacagttcccatgaaagaacggagatggcagagttggaatatgataattgtttaaacactcaatatttcaaagtttaatctaacttttaattcaagtttgactatgatgagagacttttacatttttttacctcattacccttaaaggtacgtagcccatacactcatgatatattctcatcgtgtcactaaaaaggtactgcgaatcatatgcatataaaccatatctacatgcaacgtgcaaacaatgtcttatcatagatgttctacaaccttattgggtgaaattcataaccaaattgtccatttcatcataattgactttcctcatacaagatcattagcaaca

SEQ ID NO: 19580 - DNA, 850 bp, Glycine max
  Intron number 1 from transcript Glyma18g50950.1 (locus Gly ma18g50950) derived from phytozome v7.0 (chr-ID Gm18; pos 59949276 to 59950125 reverse strand)
cccaacagcaatttcattcaaaactctctctcaggtacctttttttcttctttttccaaatattctacctttgtcgttttctcgcatatcctctttcgtttttgatcgtttgattgccttcttatttggtaatcgcaactgggtatcacttttttccgtttcttcttttctggggttcataaatttgagtgtttttctcggttgatctttttttttttttgggaattcaggggtctctctctagacaattgatgcatgtgattttgtctctcttattttatattttaacgtttcaatttctagaatggagggcgtcgtttgcttctatgtttaaggttgttgtctaaatagtaaaaattggtgattgtgatttttccgctgaaaggtaaatgatgatccttctgctggttgatgtactagcatagcttaccagtgaagcaacgaatcatttttgccacaatttgaaggaacattgcaaacagattatagctttcccttgaaacactcaaatttgtattggtttttttcatgcttttgatgttctctaagtttttttgtacttattttttatccttggagggaaaagaatagtatgttgatcttattttgaagtcctgatttgccaatgatgttttgtatacgcgacgctttggatttgaagtatatgcattaattgaattgcattgttcaaccgcaggcccttagaaaaatctgttattttgatttgtcaattgcatagtgaaagcttctactacgatcttcccaaattgtttgctttcagtgatatttaaggcggttttggtgtatatttcaggtgattaagagaatcagagtttgcttatccatataa

SEQ ID NO: 19581 - DNA, 351 bp, Glycine max
  Intron number 3 from transcript Glyma18g49770.1 (locus Gly ma18g49770) derived from phytozome v7.0 (chr-ID Gm18; pos 59111645 to 59111995 reverse strand)
gaagaaaaaggtttatgttgttttttataaataaatttcaatcctttttttaattttagatattccaatatttcctgcaattttgttttgttttgttttgtgaatattgatttataattataagctcaagaactttatgtatttttctaaccctgttatccttataatctaatggtgtggagtttgaggacaaatattactgttttccttatgcttatgcttgagtttacaaaatatatgttacctcctgctcagtcttgttcattaaatatacttatcatttcttttccctcttttcttttttcaaaacatgttgcagtgagaagagaaatcaaaattttaagattgttc

SEQ ID NO: 19582 - DNA, 635 bp, Glycine max
  Intron number 1 from transcript Glyma15g17340.1 (locus Gly ma15g17340) derived from phytozome v7.0 (chr-ID Gm15; pos 13709716 to 13710350)
cccttaaacgtggttgtcatttaatcacttctaaggtgtgtgagttattgaacttatacctcaatcattttttttccctcgcttctttgtaaatcccatgtttgttaatttcaagtgtgtgaatcaacttgtacgggctgttcttgtttaacaattgagtatttgagttcgagcagttatatgtaacaatttattaataataattttatctgactcagatatgattttctctacatgttcaagtaggattgtctcccataaaggattccattggtttataaaaaaataataagaattccatatattttcaggacaactatttctcttattatatgcttgctgatcatttaaacactatttttttgtaatagaagatgattattgaagctacaggggtgagtaattgaagataggaaagaggacatcaactgttaaaagttgttttcagtacacgttattcttttaatggcgtttgcaattaatacttgaaaattctgtaattttttttctttttctttttactaattctaatattgtgcatcaatagtctgttatgctttaatctgtattgcatatgaaccatgtataatattgcttcagatagtgaaagaagttcggcaagaattgtctgaata

SEQ ID NO: 19583 - DNA, 989 bp, Glycine max
  Intron number 5 from transcript Glyma15g21490.3 (locus Gly ma15g21490) derived from phytozome v7.0 (chr-ID Gm15; pos 19710141 to 19711129 reverse strand)
cttgcagtattccaaaaaatagccccattcttgaggtttgttttttctcccactctcaatcacttatttatgcgtgcacttagcacagggaagttatgctccttccaaatgattttcttactgctatacgttatactgaagtcaacttctcaaaacaaaaaagtgatatcctcagggaaatatatctaagaatttatattgttgttcaaactttctacttggatataattcatcagaaaattaaatatgtaatcattgtacaatccttgcatattcagttactcgattaacttactaatgcatagaaatttgaacaggcagataggttcctagattcgattagtcactagaaggaacctgataaagccccagtgacatacttatctggaccaaatctccatttaggggagggaataccttgtaaataacttgggagggaaagattgtttgaggagattgaggataaaaatgttatattggataattcagagggagggaagggtatgtgcacttctattttcagtttaggattatagcttggggccatagtgatttacctttgctaggagcatttgttcttcctttctgtattttcctctactttgttgttacttgttaacaaatagtctcattttgttagataagaattgttcttatcacatgctagtaccgaatactatgcatggcatgtgctgttaccaagtattaggcattggcattacgtttatgacagtggattgcaataaaatacttgtagtttatgattgattttaaaatttccaagtcattgtaacttttgtaaattgtccctttgctcaaggggtgtaaggttgatctgacactccccaaaatcctacactagtagcagcttaccctattttcattgctattcacacttaacatcgcttcatttttaaattctctattatttattgcaattttcatggattgcagacagaagctgagaaaatattgattcagaaactcat

SEQ ID NO: 19584 - DNA, 625 bp, Glycine max
  Intron number 3 from transcript Glyma15g06210.1 (locus Gly ma15g06210) derived from phytozome v7.0 (chr-ID Gm15; pos 4395221 to 4395845 reverse strand)
caaattggtgaagttgctcgtctccgggtaatatttctatgctcttacttcttgttctcacttgaaaactattgcatacattatgacattatctcctataaatcttactttttctctcattacgaaacttgtagctattaactaagtactagctattctttgattttgatgttacttgttctcactttaatcattgtgaatattatgcgatccatcttgtttttcccttggttctgaaacttttcgctatatataaagatggtcaaaatatcctagtgtcttagaatctttgtcatggctcagattgtcacttgttggaaaatccttgatgtctattttcaacgcaacatatatatgctttcatgtgcataattcaatttcttttttctgacattatatccaactgagtgttcttggtagaggtgacattacaaaattagccttaccatatgttgaactttcctgggaaagggaatccatttaaggttgttggtcccaaattcattgtatttccttgattcttagctcttggtttgtttgttactttcttcttaagtggaaggttattaaattgaatagaccctgttgttcatattgttgataatcttgcagtgctctccggatt

SEQ ID NO: 19585 - DNA, 825 bp, Glycine max
  Intron number 3 from transcript Glyma15g02350.2 (locus Gly ma15g02350) derived from phytozome v7.0 (chr-ID Gm15; pos 1574990 to 1575814)
acagctgtgtcccagcccaacacctctcagaaaaggtactccagtttttctttcttgtatccatgttttgttacttttcgacagaggatattcattcccagagtcacgttgtttcacttttttttttttaattttctgttgtgtttgtggtccatgcaaactaatctctacttgttaccgtatgatagatctagtgtttcacaaccccttgttgcacttgagtgtaagaaaaataactaaagagttttccattattaattattcacttgtatggttatcctcttttccagagagaaagaaagaaagaaggaagggacaatttttaagctttgatatccctgtacgctgtactggccgtttttgttctgctatacttccttgccatgttctctcagatatgtccacatcggttttttgatgctatctgtcatttattatgtgccttccttatcttgaggtttgacattggctggcatgcgaatatcggaccctttctctatttccctctctctcttctccctttgtctctccgtttttaatttctttggtccctcgtggggaaagcctacttttgcttgatttaaattaaaaataatgtacaaagacataagtaatagtactatatatgtgaacttgatgagtgatggcagggttgtgctagtgcccagtgagctctttagccccacctcatcttttgtatttttaacttttagcctggttcttaccagtttcactgttcactttcatgcctaacttaacattttctccttgtggacccattaacaaacagaactgctcctgctccagtggtggggtggcccccaa

SEQ ID NO: 19586 - DNA, 743 bp, Glycine max
  Intron number 3 from transcript Glyma17g08010.1 (locus Gly ma17g08010) derived from phytozome v7.0 (chr-ID Gm17; pos 5925466 to 5926208 reverse strand)
tcgaacttgacttggtattatgtcttttccttgctattgctgcatctctatttaaatatttcttctatttgttggctaccatgacatcgtttggggtggattgactgcattcggaagcataatctttagttgtctatgttctgcagttgaatttaagctcaattagtataagttatctacttatctacaaatgtatgtgtcgttttgatttcttagggtagctattatttgtttattttcttatggtcacacttatttagttacacactaacactatgtttcatagtttctgcatgataaaaaggataataaataaataaaaaaggaagtgcttcctataatttaaacatagacagatatcacaactaactttggtgttgaaaacctaagggggcggttacttgtgcttttattttctgttttcactttttaattataaaaatgccattttgttttcaattggttttctgtttcaaagatttgtacaggaagcattgaaaacaacttttttcttctctgttaccttttagatctttgaaaacaggaaacaaattgaaaataaggtgaattttgtaattaaaaaaagaaaacaggaaataaatacaccctaactgcttcaagtcagatcagagtagattcactggctagtttcttttgcacctacattggaacatgggctacttgtgacgagaatttatagacttattttctctccttttttggtcaggtaatattatccccag

SEQ ID NO: 19587 - DNA, 651 bp, Glycine max
  Intron number 2 from transcript Glyma19g31480.1 (locus Gly ma19g31480) derived from phytozome v7.0 (chr-ID Gm19; pos 39270205 to 39270855 reverse strand)
agcctcacaaaaacaccaagtcccctgttcccaatgtgagtttatatatatatatatatatatatatatatatatatatatatatatatatatatatattattttggtacaatgtgagaatttctagcatacattacaatttcatttcttcttagatgcaaactttgtaagttttattagaatttgggagatatcaaacatgataaacgttatcaaataaagtattttttttatgtcaaattatcaagagtatatagattcattaaaaaatggaagcatattacaaattaattgtcatgcaattaagaagtttgtctttcaaattgtcagtgtctgaagctttccaaatgttctagaggaaaacaaacttcttctttatgacaaccaatctgggaccaaggtctcttatttataaatccaattttttatattttaatgtagcctctaatcaaatgaaaaataccactttgtcttctacacattaatttccatgacaattaacccttcaacttttacaacttcatttctaaaatagattacaaaacattttaataattgcacgcatgaccccacatgttgaattttgttccaaaaagtttgtcaattcccatgttatgttaacttcatgtttttgttttccttagttgcagc

SEQ ID NO: 19588 - DNA, 724 bp, Glycine max
  Intron number 1 from transcript Glyma18g00800.1 (locus Gly ma18g00800) derived from phytozome v7.0 (chr-ID Gm18; pos 377008 to 377731)
agaggaaagcagtacgagttttgcagcggttcaaggtattttcccccccaccaaaatgcaaaaacaaaaatggataattataaacacatggaatggacacaacatagcataaccaagaaaaaaaaaaaatcctttctctctctctctctctccttttgtttacttcttcaaacacatatggttatatgtgcacataaaacatactatcaccgaaaaaggaaccgcaggacctttctagttctcatccacacctttctctcttcctttgatttttgctgttttcagtgattcaagaccaccagctagcgtttgccaccttctcaatttttatttttttttatgcaaacaacatgaaaaaagttgagtttcttttttcactgttttgagtttttccgtttctgtgaatgtctcggcgtttttagcaggttgagtgtttctgtggtcttgttgatgttagatctgcaactggaaatgcaaagaaatataaatacaataaaacaacatgagagattattactgttgtattgactgttctattctatgtatgtgctagtttttttttcttccttcttctctaattttgttttcccccaaccctttaccaccattctctttcttaccctcttttggctctcaacccagtgatccaaaatttatttatttttgcttcatttgtgttaagtttcaagcagatctggttttaaagttttccccaaaagcaatt

SEQ ID NO: 19589 - DNA, 436 bp, Glycine max
  Intron number 6 from transcript Glyma15g10890.1 (locus Gly ma15g10890) derived from phytozome v7.0 (chr-ID Gm15; pos 7935875 to 7936310 reverse strand)
ttcagtaacccaaaggtccaagcagaagttccgtatatataatacttctttatctttagacataaacacaattttatgatgataaactacatgattcaagaatttatttatttatttatttttggtttagtgttaccaactaattttttatgctagaaatttgtaacttattatctatctctatgatacacacacaccacttctatttatgatgatttatggccaaaaagaaagatatatgaggagcaataatgccaattaaaattctgacatgtatagtatttcttatctagtgatcataaccaaattatgacatgatagtttctcttcttcgtttgatcacttactcaaataaaatataactgaacttttggggtttaattacaatcttaacagaaaaaattctaatattgttgtatgttaattgttcaaaggt

SEQ ID NO: 19590 - DNA, 975 bp, Glycine max
  Intron number 1 from transcript Glyma18g07120.1 (locus Gly ma18g07120) derived from phytozome v7.0 (chr-ID Gm18; pos 5816933 to 5817907 reverse strand)
atcattttatttatcgtagcatctggaacgacaggtatttttctctctatttttcttcattgtgtgtctctcatatacaattatgcacacttaacattaatatacattagattgtctgtaatccaaaattttatcatgaaaatcgttttaagttacgcatttaggttttgataagagtgaattttaatttgccgtaactttcttctttcaattcatccttatattgttatttgagaagaaaaaaaaaacattcatccttcattttaaataggtacatgcatgttatggttaaaatacaatttagtttcccatataaggactaaattccattttaatgataacatgcaaatactaaattgcattttattgataatattcatggacatacctgaaatgaaggatgaatgtgaaagacatttttaaggatttttttaaaaaaattttaacatttaggaattaatttgaaacccttttacactttcaaggtttaaattaattattgtgcaaaaacaaatcaaacaatccgccccaaatatttatcaattaatccttagttttgaataatattttctcacattatgaaaattaacgcacttaattatccttataaataatatttataaagagaactttaacgtattgacattaatacatttaatattattattattattattattattattattataaataatgtcagaacacacaactttgtaagagaaaaaaattgattctaaaaatcagtctcaacagagataaacaaatggcaaagcttcattgttgtttccttgcttgatagttataattctcatagcatttggaacaggtattcttgtttttcttaatttgttctgtgtctcttatatacaattatctacatttgaaattaacatgttgtctacattaggttgcatgcaatgcaaattgtgaaatgaatttgataagagtgaatgaatttggcaggttttgcga

SEQ ID NO: 19591 - DNA, 722 bp, Glycine max
  Intron number 1 from transcript Glyma17g01290.1 (locus Gly ma17g01290) derived from phytozome v7.0 (chr-ID Gm17; pos 764026 to 764747 reverse strand)
tactttcacgtctctttcatcccaacatagtgcaggtaattaagctcttacaccctacacaactcaactgtgagtctgtatacacgtaccttcttgtccccatggtttttgtttgttttgctttatggctttttgtttctgtcagttttggaattgaagcaaaccactgtttgaactgctttgacttcaaaattctactacaaacataactgaccatggaccctgaccacatattcaagggacttgtgagataatcatatcccttagttaggtgtatggtgttgagagaaagatcaatccttaaatgaatgaatctccgtatcataacagattagcctctacacccggccgagataccctaagttcacctaaaattgtttgctgtaattatggttttaaagtttttgcttcttatataaataaatacccacaggccactgccacttaattaccactttagtgggaaaaaaggaaaaaagaagagagatgaacttgctctaaaaaattatttctttccttttgacttttgtcgtgtatttttacgggatgcaacatgtatatatagtatgatttatatttatgtgtgtggttatagtagtcaatcgcatttattatgttgaactgcaaatgcaggggagtgtgtaattatccatataatatgagagggtgactaatataaggtgtgatgtttaaatgactgttaatttacagtttattgcagc

SEQ ID NO: 19592 - DNA, 960 bp, Glycine max
  Intron number 2 from transcript Glyma17g18500.2 (locus Gly ma17g18500) derived from phytozome v7.0 (chr-ID Gm17; pos 15889107 to 15890066 reverse strand)
ataaggcttgtacagaggcagggttcttctacgtggtaattgtttgttgcatctattaacattttttttccttttactcttgctgctttagcatttcgatatgcaaaagagggattggaacaaaaggattattaaccgtgtggcaaattgattagaatctgcactatagcgaagaggttaatcttttctgatacagaaccgcttatattatagtgggtccactataatatgatgttttgaatttcatatatagaataatggttctcttgttagggtatgcacatagctagtatttcttgaagattgaaatgacaaaagaacaaaataaaataaaatggatgaagaggaagaaaaagagtatttcttgagaatttcatataatgaatatacctttgattttgcatactaaagtgtatgctcggattgcagttaaagaggctcaaaaatacttttaagttttaatcctaaagctacaaatccttccttctttattctgtgactcagagttcgagaatatgcatcgaaattctcaaaagtactttttcaactttaatcccaacattgcctatgttaatttgataagttacttatgacagcttaagtcaaaaactatggctaccaacatgcttttgactgaatagaatttttcaattcaactcaagaattgactgctctcatttcctaagagtctttttgttataggggtgagaatttcatgaatcagttcacgtcactagtaaatttgcaaagaaatttagtccatgaatttttcctctccatttatatccctgtggtcaagttgtgactactgaaattgtgagtaaaagcagttgatgtggtcgcaattgcaattgctatagaaacctcaaaaggcaaactgcaatttaaaatcatgcatggcactttggccattttgtgtttaattttcaattcatacggtccttgattgacagaaaggac

SEQ ID NO: 19593 - DNA, 449 bp, Glycine max
  Intron number 1 from transcript Glyma17g10180.1 (locus Gly ma17g10180) derived from phytozome v7.0 (chr-ID Gm17; pos 7599988 to 7600436)
ctttcgaaactccgctgcaacccccctccccccctgtctattttttgtctgtttattttgctttcttattcttcatctccttctgtccgatttttttggtttgttttccttctgagtctccagcgctttgttgttagggagagagtaaaaaaaattattttttctaataatatgcagatgatcttcatagggttcttgtataataatccattcccatgagatttgttcaacttttttattgagagatctaatgaaaatcggatcttgagcttaaaatttttactcaagattagacattaaagatactcttatactccaccatcaaaaaattgtcttgactcatgtatgatcacattgggcatcaattatgaattgacatttgtgatacaatttatgcccctgttgacatggcataggcccttagaaagagattaatacaaagcttacct

SEQ ID NO: 19594 - DNA, 557 bp, Glycine max
  Intron number 1 from transcript Glyma19g43340.1 (locus Gly ma19g43340) derived from phytozome v7.0 (chr-ID Gm19; pos 49019109 to 49019665)
gtctcccttccgaattcaggtatcatttacaatcaagtgccaacagtttttcttttttttgttgttgaatcgggtatacctcagccaaaaaacaagaactatccataacgcacaagaacaattttatttagcatatacttggttgagcaaagaattttgtctagcttttatcttttatattttataaatttgatcatttttatactaaatatgttaaaagtcatatttaactttagtatctgaattaactaacataaaattagtttaatttaactagtaattttaagttaagtattgtataagtttattggagtataattgtaaaagtgaagttacatatttgataaaaataaaaaatttgaatatcatgtaaatgagaagacataaaactaatatcttaaaattttgagttaaaatatgatgttagttttggttatgtggtgtgttcaaagttcattactgattgttatagatgattttgtatagaataagatagaagtgatcggtggatgttggttgcagataaacagcttccaagggggaggggttgcaatagg

SEQ ID NO: 19595 - DNA, 390 bp, Glycine max
  Intron number 2 from transcript Glyma19g36830.1 (locus Gly ma19g36830) derived from phytozome v7.0 (chr-ID Gm19; pos 44111342 to 44111731 reverse strand)
ataatctgtagcctctttgctagcattggaagcaggttatacccttcattctcttagattgattattgcacacctttcacttttgccactctgatgtcacttgtcagaagcttccctaaacatgaaaactgtaccaataatttccaattgaagaaacaatcaaagggtctttttttcactttttggaaatagaatatgcaagtacaatacagatatgatcatatatggatatgatgtgtacttttagattatctgcatcagttcttgcatgccaaatttagatctgctatgaatgttagtgtaatattagtaccagtaagtttcttatagtggaagatattttcactgagtgtaggtggtccataatagcatctcagttgccggggagga

SEQ ID NO: 19596 - DNA, 1046 bp, Glycine max
  Intron number 1 from transcript Glyma16g32650.1 (locus Gly ma16g32650) derived from phytozome v7.0 (chr-ID Gm16; pos 35820445 to 35821490 reverse strand)
cctcaccactcctcttcggtttcctccacttcaaggtatataaagaaaattagatctgtttttctctgcaattttaccttttttttttatctgcttttgttcactcgatgtctttttttgggggggcttcatttttttaatgaaattaaccattttttcaccacgaatcatgtctagcttgagcagaattgccttcctctgaggatgcacttgatctgtaaaaaaaaattcctttcctcttttgaaaagtgatgatgtttgtttgaactacttttagcatgaatattgaaaattctctgtattgtgaaattggaaagtttctatactacgaattctccatagaagatttacacggttgccaatcaggactctgcgttgcattgtttggagaaattctcaaaacgaaagatagatttgatgtgctaggttgtttgattcagcatgatgtgtgcaagcaacaaagaacttttagattactatctatagaaattagaaagtcataatgttagattgcctattttctaattgttttaggcaaacaattatatcggcctgtttgacttcgttctcaccttttggtcgtaaaaactattttctaaaataatttcgtactactcagcaatgaatttctcttctaaaatctattatgttttaaaaattattttcaaaacaagtgtttaaaaaacctaaaaacataaatatttaggagatatttgtcgacatcttcttctatttcatggttctaactctagggtgtgagtcatctgtcggagttgtgctgcatgtcctgaggcatgaccttggtgcaaatgtctgttgtctttgttttcttgaaagctaaaagcagattttgaaagtagaaatcaaacatacccttatatttccttctagtggttttttcttgcatgcaatgactatcaatgtggttcttgttcattgttgagttttattttgctgtttttataatttgagcttgatctgctgatacaactgatttaatctatgattcaggggtggctatactgtgcttataaacacttggaggc

SEQ ID NO: 19597 - DNA, 805 bp, Glycine max
  Intron number 1 from transcript Glyma20g12220.1 (locus Gly ma20g12220) derived from phytozome v7.0 (chr-ID Gm20; pos 17148662 to 17149466)
gaatcagacaggtttgttcacttttgtttttcatgccattttggcctatcataatccattgacataaataacaacaatttgtgtttcttaacgaagtgatttaaaattcaaattttcattaatttttagatataaaataaatcgtattagaaaaaaatatttatttttatacgctcaagatttttaataaagatttatcactatgacaaaaacaatttcgtatcactatcatagttgcaaaaaaaaatcattttaaccttattttctaatcacatcaattaatataattttatatttataaggtctaaataaaaagtatgaattagtcattttgacctcatgcatattactcccaaaccccttattactaagcccgatccaattgatttttagttagtcattttatttgattcaatctaaaatatcttttgaattttttttttcacaaaaatgatcttcattaaagtgagttctaagataacattataacaatagaaacataatccattaatagcatattttttaccaggatagttttgaagaaaaaaaaactaaaaccaaatttaatactcttaattaaattaaccaaaaattttaatcatcataaattaattaattgaatcttataataagtactaaagctagtattatatttatctcttcttccatccttggtccactccataatagggaagacgttttatatattttccttttaattaacatgccgagtgctagctaactcaaaataccattttaaaagttttttctaatttatgttttcaggttggaactccttgggcag

SEQ ID NO: 19598 - DNA, 1000 bp, Glycine max
  Intron number 1 from transcript Glyma16g25190.1 (locus Gly ma16g25190) derived from phytozome v7.0 (chr-ID Gm16; pos 29118722 to 29119721 reverse strand)
aagaagaagaagaagcctggtacgaatgaatgcgatcgtggtcttaatgtttgcttttttgttttaccatttggttctgaatatttgattaatgcatgatccgtttagtgtatcacattttgtttttgtttgagtttttgcagtttagtgttagtgtatgattttagtttcgccgttgaagcgaggattttatgagaagtaacgcgaactatggttctggttctggttatttcgccgttcaattcgaatatgcgatgatttatttctctgagaaaattcgttttcttttacagaaacaaattgaagacgccgagtttttttttttttttttgaagttttaatcttacccccccctcccctgactaaaacagggatggtaaatggtaattatggtttcgtcgattaaacggtgaattctttggatttcatacgtgtgtgtgtgtgtgtgtgtatatatatatatatatatatatatacttttctgtatatgccaaatgctttttgtctgcttttcaatatttttgtgcgtatttgtagaagttcttcactgcttgattttggtttctttatacctattttttgagctttggtttctatatatatttaaattcactgagattgaaattttatattgcagtgatgtaattgtgttctttcataatctgtaggtcaccagtggaaactgattcattttctggagactttgaccattttggaattaacgaagggatgccaaatggagatcatttgcggccttttgatggaagtacagagttcaacgtttcgtatcataaggttgatggttcaagcaatgaagatatgtcaaaggggaaaactcatataagtcagctgcgcgctgatcctgaattcactcatgtattcgacgaaatcatgcactttcataagactgatccttccttacaggttgttgatgatgttgaccttgatatggaatttaatgcaagccaggcaaagagaaaccatctgagacaaacggact

SEQ ID NO: 19599 - DNA, 664 bp, Glycine max
  Intron number 3 from transcript Glyma20g33040.1 (locus Gly ma20g33040) derived from phytozome v7.0 (chr-ID Gm20; pos 41651162 to 41651825 reverse strand)
aggaggtaatgctaactattttatcaaatatattgtctcaaaggcaaaagaaacaaattgtttgtttgagatgcagtgttgtcaaatgaacctaagatatttgtcattttcttttttattttatatgcaaacttgttattattattggatattattgtatattgttgaaagttgaaactagatctaagtattataatatatatgatttgaaatattatgtgtactttgaatgttgtaattttttgtatacttttgtgttataaaatggtgttttgtttttaaattttagtgttataaaattaagatattatgtttgtttaatattttttgtattatttaattatcatcattattttataaataccagttcaaccgtgttgaaccttgatccaatgcctttaccagttttgaaaacattggttttaaaccaagtttttttattctgtataaactgtgactatttactttttgtggggtatattattgatggagtgaaatgtgaatgtcgaaatgtttgtcttgtttcttatggtagagagacttctttatttttgttatttttgttttgggggaggggggggggggggggggggtcttctttttttataagaaataaaatgaacagaagactgacaatctttttcatgtattttcctgcagcaac

SEQ ID NO: 19600 - DNA, 361 bp, Glycine max
  Intron number 2 from transcript Glyma19g30750.1 (locus Gly ma19g30750) derived from phytozome v7.0 (chr-ID Gm19; pos 38385953 to 38386313 reverse strand)
aggtttctgtctttattattttcttatggtctactgtttattattttcctatcattaatagaaaaaagccaatttatattcatcactcccctgttctgtcaagcacacattagtctggtaaaaagcaaaaaataaaataaaatagcaggttcaagttagatcacttttagtttttaggcaattgaaattgccattgttaaaataaagtttgttattgacttcgaatcatagttcatccgattgttttttgtcacttcatttgagttatatttcttttctcaacttctgatgatctcccctccccttccttttggtgtggaatttaggcaaagctgagagaggtggcatctttggagggaca

SEQ ID NO: 19601 - DNA, 504 bp, Glycine max
  Intron number 2 from transcript Glyma14g38030.1 (locus Gly ma14g38030) derived from phytozome v7.0 (chr-ID Gm14; pos 47251158 to 47251661 reverse strand)
acaaacctgtaattgttagattacacttatctagtatttattattacaccgaaacttatgattctgattcatatgtaattacctaatggtaatcaacttatagtgctgttgataatttctttacagttctgttcataactctattatatcttgtaccaaacttttggaaccatttctagtagccaatgttatcttactgttcttttccccttttatcttgtatgttttagtttctcttacttggctactagggatttatgttcgtgccaaaaatatacctatatttctaaaatttctttgatccgagcatctattgtcctgttggaagtgttttcattatcaagaatgacactgcaagatattgaaaatgctgtgttctccccccctcccatcttcctatgaagttgcttggtatttgtttgattttggttaatctatcattttatcaataacatgcgtgtctaaaggctttttgtgtgaataattcgatgcagagaattcaat

SEQ ID NO: 19602 - DNA, 722 bp, Glycine max
  Intron number 1 from transcript Glyma14g38030.1 (locus Gly ma14g38030) derived from phytozome v7.0 (chr-ID Gm14; pos 47251792 to 47252513 reverse strand)
agaaggtcaagaaaggtaacttcctttcacacccctcttcccatgttttttattctttgctttatatatgcaatcgttttctggattcactgtaatttgtgaactttgctaggttgcaattattatgcccgtaaatttttaagtgaatttgtgagcagtagactagtgcctgaagtcttttttctgctgaattagggtagccgtggatttggcttaggagttgtgattcttgtatctcttctgctgaagttttattgattgttgtgaagggaaatttaatggggtattggagtgtgcgtgattcaattggataacatggaaattaataaaccgagatatatgtagtggcatttttttattcttgtccatgattttgcatctcagatgttgtaattggattttttgctgattttattgatttgattttagggttttagaaaaataaattgattatgttgttgatcctatgacagagtttaaaactatttggatatgttcttttgttgatttgactatagggttttagataaatatattgattttgatgttgacccagtgacagcttaaaattaattggatatgttcttttggtgattattgctgatatgactttagggttttagataaataaattgattttgatgttgaccgtatgtaagagtttaacattttttttcaatgtggcagaattgaagagatctctgtattgcttattctctcaa

SEQ ID NO: 19603 - DNA, 739 bp, Glycine max
  Intron number 1 from transcript Glyma16g16290.1 (locus Gly ma16g16290) derived from phytozome v7.0 (chr-ID Gm16; pos 17346938 to 17347676)
tgcagttgctccaatcaaagatcagggaagttgtggtgagtattttttcctatcatttttccttttcttatggtaaagataatgtttgttatctaaggattttagatttagtaatcagttagggacttgttttaaattcaagtgtaacagcttttttgctagttaaggttacttatcagataaggatttgttttataattcaactataacagatttctctaactttgataaaagatacccctttttctttttaaatgtctttttagatattttaaactgttttgagatttttgttaacaatataaataattaacttgattgcatagattgtgaagtagcaatatcttaaatttaaaaaagtgagtatgattaaatgtattatttttaaccaaaaaataaaaataaaataaaactacaatcaaagaaaaatattgaattgaatgtgtacaaatagatttttatgtgtttgtaagttgattgacatactaccaaacacatatagatcaacctatggagttatttcaatttaattgtctttagtgaaacatatatgtgatctaaaaaaaactcatttccgtattatttaagtggtgcttgagtttttttttttcttctgaaaattcaaaagcatttaagtataactttttgaaatctgatgttttgagttgttcttgatttaattttattttttttacttgatgcaggaagttgttgggcgttctcaacggtggccacagtg

SEQ ID NO: 19604 - DNA, 327 bp, Glycine max
  Intron number 1 from transcript Glyma20g01500.1 (locus Gly ma20g01500) derived from phytozome v7.0 (chr-ID Gm20; pos 1024298 to 1024624 reverse strand)
ccactcggacctacataagttgaagaattaatgaatggagtgattccatccatccacttgtttctggtatggtttatactttttaattaacaatgtttgtgtctcttaaaatagtattttaattaaggtttaaatataatttgtttatgtaatttagtatttttttatttttgattcttgaaaaaaaatctgttttaatctttataaattatatttgtttttcttaaaatactttatagataatgattttttcattgtttaaataatttttttactattcgaagccatttaggactgaaacaactatattttgtaaggattagaaca

SEQ ID NO: 19605 - DNA, 558 bp, Glycine max
  Intron number 4 from transcript Glyma14g09390.1 (locus Gly ma14g09390) derived from phytozome v7.0 (chr-ID Gm14; pos 7430194 to 7430751)
aacaaccaatccaggttgcttatgcattttccttctcttcttttaactgcataaattcatttctaattaatttttttttatcacccttttggattcttaagctaattctggataaataggcttgggaaatattattagagcatgagctgtataatgtgatgttctgataataaagcaaaaactaagagaagatatggtgtaaaaaatataaattactttttggttttaaactcttctgatggcttaagctttctacaatcaatctgagctttcaattgtttcctttgaaaccaattccatatcaaatattttctatttcttgttagttaagggaatgctaatagatggaacgattggtatattgcaatttgtaagaatgctcgtagtctgctgcacttctaaagattttgtcaatgaacaaatccagaatttacttgttgccatcaattcagccttcatggttaaaagttgttcataaaaatgctgttcaatttatctttctggagttctcttctattacttattcttcttctactatgtgtccaaccagtcgttcac

SEQ ID NO: 19606 - DNA, 375 bp, Glycine max
  Intron number 1 from transcript Glyma18g06790.1 (locus Gly ma18g06790) derived from phytozome v7.0 (chr-ID Gm18; pos 5457504 to 5457878 reverse strand)
aggtgaagtctcacatcgaataaaaatgaaaaagttgaatattatataagtgagaaaaagactcaaacttgagttttaagattttaggttaaaatgtaatatcaagttctcttaggtgattgctcataactcagttagactatgtgtcatgaataaaatgtttttttacttttcaattcaatccatgtcattgcaaaattcttcgatcaatattaattttttttctttagttggtgtacttgttataagatcatgacttatgacttaatagttagtactggagttgatatatttttagacttatatgtgtgtttctcctttgtgtctattttccttttagttcttgctgcagtttcaggtgttaaaagttaaaat

SEQ ID NO: 19607 - DNA, 963 bp, Glycine max
  Intron number 1 from transcript Glyma20g28220.1 (locus Gly ma20g28220) derived from phytozome v7.0 (chr-ID Gm20; pos 37172452 to 37173414 reverse strand)
ctcatctttggtaaggtcttacttggttttggaaaccaaataggttatcctcttttcttccctttcccatttttcttccatttgctccagaattttttaaaaataagatcgaattatgttcgttttaaaaaataaaagatttaaatgaattttttaaaataaaggctctaattcaatcttttttagagaacacaatgcctaattaaaccacttcaaaataataagaggatgaaatcatactaaaaaaaataagaggacagaaaaataattaaatttaaaattttcgacgtggatatcgttaaccatgttagcaacacctctaacgacatccataacaagagactagaacaaacatttttttgaaattcaaggaataaaaaagcaattttcaccttttaaaataaagcaattttgagattggaagacaccaaaaattgactgaaatttgaaacacaaaaaacatactatttacgttcaagattttctctgtattaacttgaactgaagtgtgatccacttttcctaaatttaatgtaaaaaaaaaaaaactccaacacactttttaggcttttaattcataaattgttctcaatatttgacgtttaggagccttgatggagattactttgtattttctctcatttaattatataaaatcacttatattttatagctaagaatgtatctttttgatatttgaaagtgcaaccaaaacttcaacttatgctacattttttttttgtaaatcacaaattctatccacgtgttatcaatgtaaacgataaagctaagcagattttggtctaataccatggaaaaaaaatatttgactgatattttgatggtatgaggtggaatggtaataacaagtaccttttggaactcattaatcattatttgttgctttaattttatttttttatggcaggtggtgccagttttcctttcagagatcgcaccatc

SEQ ID NO: 19608 - DNA, 816 bp, Glycine max
  Intron number 1 from transcript Glyma17g23900.1 (locus Gly ma17g23900) derived from phytozome v7.0 (chr-ID Gm17; pos 24100774 to 24101589)
tcttgcggctagggttttagcgcagcttcttctaggttcgttatctaccaccgttctatggattttattccttctattcgtgtttattctattggtttatgttgcttgcaatatgttttttctgaatctgtcgtcgttgtcttcaattttatccatgtttcagagatcaattttgtttgtgtagtatgtgcttattcttcttcttttcgttcgagttgttaataacggtgctatggtgttttcaaaagtgttttttttattacttttgatttaaagtttttttggtaaggcttttatttgcttgttatattcaaatctttggatccagatcttatataagtttttggttcaagaaagtttttggttactgatgaatagatctattaactgttactttaatcgattcaagctaaagttttttggttactgatgaatagatctattatctgttacttttaatcggttcaagctcaagttttttggttactgatgaatagatctatatacgtcacagtgtgctaaacatgcccttgttttatctcgatcttatgtatgggagtgccataaattttgttatgtctatttttttatctgttggaatcatactgagtttgatgcgttacgattgagcatacctatttttgggcttgttgtatggtgggtatttagatcttaatctttttatgcttatgaaaggttttgtaatgacaaaggtcttaatgttgttaaacttttatttttactttatatggtgtgttgatgtgttatggttttgacaactttttttttttctggatttttgcagatttaaggaag

SEQ ID NO: 19609 - DNA, 656 bp, Glycine max
  Intron number 1 from transcript Glyma16g02940.1 (locus Gly ma16g02940) derived from phytozome v7.0 (chr-ID Gm16; pos 2518259 to 2518914)
gagccagagaataccacattgtttattctggacaagtaagagtagtacagaacaatttcatttgtagtttattttttatctattttgttgttataatccatgttgatgatatagcatattgagaattgggaaaaacccatgtgacatgtcccacattgacttgagattatacctgctaggaggttataaagcttaggcacccactaccttacatgttaattttgtgaggatgtgttaggcctaaatctgaatttttgctattaattaatggtgaagggaaaattgaagaattctctttagcattcaagctcagtttttgtgaggatgatgagttaggcctaaaatctaagattaagtcaacacacttttgctattaagtcatcacaattttgctattaatggtgacaggaaaattgaagaattctctttaaaattcaaactcagttttgtgaggatgatgagttaggcctaaaatctaagatttagtcaacacacttttgctattaatgctgaggggaagattgaaaaattctcattgacattcaaaggttgtttgttgtgttattttatcatggatatttgatgtttctaattgcactttgcaagagaatattcttgaatctgattgagtgaacttgtgatggaagccagatttg

SEQ ID NO: 19610 - DNA, 689 bp, Glycine max
  Intron number 2 from transcript Glyma19g40490.1 (locus Gly ma19g40490) derived from phytozome v7.0 (chr-ID Gm19; pos 46875971 to 46876659 reverse strand)
cctccagaccacgccaaaagcaacaggtatttcattttggacacaaccgtagctgatatcagaacttatgttgtcatctgactcctcaacatttatagttatataacatgttagagatataaaaccattcaaatgcttccatatacaagcttaaacttttaggagaattggtctttgacttgttatctgagcctctatggccaagtagttatgaatttgatccctttgtcctaattcttcttaattacataaaatttcaatgaaagatactattatgggcacatgccttgtcaatgtgccaggcccaaagagctcttgtgtgaaggagagtgttagatttagaattatttaagtacttccacccaaaagcttagtttctctgagataccttatatgggttttggttagaggatatttgtcttttttataattaaccattaataggtgagaagtctctataaaatgttatttcatgggattattgaggcatatcttatctaatttgtctgggaatgggaggttggtaccagctttttagatctcactcttatggaagtgtatctgtgatcttgatttcttatataaatattttctcatttcttttttacttatagaatctgatttgatcactctcatcaatctgttttattacagagtaattcagacgataataattctccttctgataa

SEQ ID NO: 19611 - DNA, 502 bp, Glycine max
  Intron number 1 from transcript Glyma19g40490.1 (locus Gly ma19g40490) derived from phytozome v7.0 (chr-ID Gm19; pos 46877354 to 46877855 reverse strand)
cagagaaggaaaataaaattcgccccaagattgaggtctttaccaaattcgcccctcgcatattctcaattttactgaatctccgtctcttatgcgtttctttttccttaaattgcgtgcttaggtttccaatttgctgtttttaaatgaaggatttcgtatatttcgattttgactgtgaattgaaccgcaatgttatgcacaagtgccgccgcgtcactcctactgattcgagttttgtattcaatttttgaagccgtgttaaagaaaataatcttaattgaaattcaactttgagtttgagtttaattcactgtgttcaagtcttttttttttttttgtgaaaagtggaagaaagaagttatagttaggttaaattggcaatattgtggtttttggtttgatttgttttgtttttttagaatgatcaatgtgattgctgatggtttcgtgtaactcaattgcagttgaataaatagtggtttgtgagggttttctctcg

SEQ ID NO: 19612 - DNA, 711 bp, Glycine max
  Intron number 1 from transcript Glyma19g05030.1 (locus Gly ma19g05030) derived from phytozome v7.0 (chr-ID Gm19; pos 5286996 to 5287706)
gaggaatttgtcttccttaaaaaaggcagaaagtatgcagaggatctcatttttgtttatttgtttacatattttatgtttggattaaatatgttttctgttcttgaaaatatcactgttttttgtttttcttttttgtgaacccgggatatccctggccaacagataatttttttagttactatgaaaattttgtttattttttgtttctacttttaacaaaatgatgtggcttttttagtccttcactaagattaaaaacattataatgagggactagaattaaaattacatcattttgtaggacaagaaatgaatacagtttttatagtaactaaaacaaaaaaaaaagtgatatttttaaggattaaaaacatatttaaatatttatgttttcatgaagttgttattaaagggtattcttttgtgtctgtcctattatctgggatatctgttctatttccctgtgaaattgattgtgtgaaagctgccagaacttttcttctagattacttttattacaaaattgaaagaaacaaaaaaaaaagagtgaaagaagaaagtactgtgaagatcattgacctgactggctcaaaatttctgtttcttgattgatgtgtgacaactaagaatagatttgcgtgaacagttcttctatttttgtaaaggtttctttttttttattggggggattttcaatgacaacaggta

SEQ ID NO: 19613 - DNA, 491 bp, Glycine max
  Intron number 2 from transcript Glyma15g41810.1 (locus Gly ma15g41810) derived from phytozome v7.0 (chr-ID Gm15; pos 49020209 to 49020699)
atcattattgacattcatagaattcttggaaacaggtaaaggagataaattacaagcacagaaaatgagacagatgaaaaaaaaagtagtaaaaggagaacagaaaccttcattattttttaatcgaccaaaaacatatttattatataaaagagagcagtataatctgtcctttacaagattttgcacacaaccaaggatcaaggaaccactgatcaaataaagatgaatattacccttttgatatccataatcatgattcatgaccttaatctaatgaactctacaacaagatcttcatcaaattttccttcatgctctcatgcatgtccaatgcaagattatattcaaattttgtgtctataagacatatttaatgttatgagaaaagagataaatacaagagctaaaactgattttacataacatgtatataattcattgcaaaggtttgcaaattaataaatgcatgtgttattggtctcctgcag

SEQ ID NO: 19614 - DNA, 362 bp, Glycine max
  Intron number 1 from transcript Glyma14g09990.1 (locus Gly ma14g09990) derived from phytozome v7.0 (chr-ID Gm14; pos 8075970 to 8076331 reverse strand)
aggtaaattttcttctcatttttcatccacccaagtaatcgtagtaattaaatgaatccatatgatatgaaacttcttttctatttattttttttgtctatgtgtgtgattttaaaaaattggttcttattttggtggagccagtcaaaattccaaaacattttattttatcatcagattaattgcgatgatgaattataggattaattaaatatctagattatatttgaccaaaaatataaggattaaaaatatatatttttattttattttatcatcccatgatgaattgtgatatttgatagtattgtttattcttttttcaattttggttttgagaattggcatgtttgaactgtagg

SEQ ID NO: 19615 - DNA, 357 bp, Glycine max
  Intron number 1 from transcript Glyma15g27610.1 (locus Gly ma15g27610) derived from phytozome v7.0 (chr-ID Gm15; pos 30009728 to 30010084 reverse strand)
agccttccggtttattattcttccagccattgacagttttatatggttcatccaggtgaccttggaactggtttaatttgaagacacttattccatttgacattataggccgtgttcgaatacttcatcctccagtcatgacttgtttcccattctcatttggtaagaaagcacgatttgtggcaaaacatgatccagatattgatgaaggtaacttaacaatttttgattaatttttaagaatatggttgtttaattaagatacctattatataatgataaaattcatgaaaaatctgcttacattgcttgaattagaccgaatatgtttgtgaacagtactctcaggtattcaaa

SEQ ID NO: 19616 - DNA, 984 bp, Glycine max
  Intron number 1 from transcript Glyma18g17470.1 (locus Gly ma18g17470) derived from phytozome v7.0 (chr-ID Gm18; pos 18731088 to 18732071)
ctttgccaattcaggtttgtcacaattttaaaaaccaaacacagtcttatgttatgttacttttttatgtgaaggtctattttgttctttgtttcaagcttgtctccgttgatgctacatggacacatgtgttggacatcattagtatgtctgcatggtcctgttagtgggtatgaagttctggctggttttagttttaccgattggttttgtaattatttttttgttagaataggaaaggatcctaaaaaactagttatttcttctgggtggagataaattgtaaaagaaagggaaaagaagttactttgatgttcaattgtgtttatgatcctcttgacttgggtattggtgtgcgtttgaatcggagaagtacatgcagcgggttattttactgttccaaaataaaacaggaaacagaatggctcatgaattaatttttgaagaggttgttggtcatgtaattgagaatcgttttgagaagtggaaaaagaaaaatgtggcaagattattattattgaagtctgctaagtaaaacctggagtactgtttttgtattggaaagttgtagccataattttaatttaagatctgtactgaaatcctcaccgtattccatcaatgttctgaagggtgaaatcagttaatttcctttcacagcttctaaagaaattttattattattattattattattattattattattattattaagtagcaccctcttactcctcctacactactctagctttgctcagatttctaatctcttgtttatttatattgcaagcgacccatttgagattaaatgagataaaagaatttgatcatttgatgttagtatatcccattgcaatactttctacatttttactaagcttagaatgggggcataacattctttaccaatgctctaatctcctaggacaattttggcaagtaattgatggttagattgacatatatgcctgccaacaggaa

SEQ ID NO: 19617 - DNA, 890 bp, Glycine max
  Intron number 1 from transcript Glyma17g15860.2 (locus Gly ma17g15860) derived from phytozome v7.0 (chr-ID Gm17; pos 12588385 to 12589274 reverse strand)
ttgttgcggtcaaatacatagagaggggcaaaaaggtaaacttttttaggccaaaattgtttcagtggcctgtgccaaattcaattgcctactactgactaaatgctgttgttggttcagatattttctttgcattgattgttttgtttttttgagcgatctgaatttggaaaatgagcagccttgtgccttcttctgcatatttatgatatgatagatacctctgggccatgcttttttttttctcctttcagctttgtgtactttcaaaatcttaaattcaatgttcaatgtttcataacatcaatatgaaatcaaagtagttaaagtacaatcgcaatggatggattttggagcttttttttttccttcctccttatatttctcaactagtcaactctctaaatttatgctatattccattagttggttgtttccatgaaagtcttgttctgtatcatctcaaaggaaattctacaatcattaagtagcaacatatcgagtcttcaaagggcactttgtgttccttgcgtgcaactagaacacccatttgtttgtttcttctttttaatttcaagtaaaaaaaaattgaatgctatagtgctcatgatgtcttttgccactcttatcgaaattttgactatcctttgaatctggataacattttgttcctaaagctcatgaatgatgaattttagcctctgaattcataaaatatagaactatttttgttgttctctctatcaagattaagtaacttacctcattctcagccagaagggtattattaagcttaaagggctggcacaggttttcttttgaaatagttttgtccaaaatctttctgatctgtgtgtttctttgtgagctatgtttgtggtatcagattg

SEQ ID NO: 19618 - DNA, 773 bp, Glycine max
  Intron number 1 from transcript Glyma18g44320.1 (locus Gly ma18g44320) derived from phytozome v7.0 (chr-ID Gm18; pos 54047156 to 54047928)
attgctttgttcaagcaagtcaacttaccctttcatcaatcttcttcaagtttttattatttcaaatttcatgttccccatgcatatacgcgcgcacacgcatgcacatgcatgtttatcacgaataatacacagaaaaatttcttgaataaagtagcagttttgctagcttacttggttttctttcgataaagaaaaaggaaatcatggttcacgttgttgaaaattcgaattgtattcttacactaacaccatgaaaccaatcaaaatgctaaaaaaaaaaaactatatactaaaggaaaagaaatatatattacgtattatagttgtcattatattattaatatatacattatagacttaccatcagggattcaggggttactttaaattcctatgcttccctgttatagacagagtaactcggtggagcggtgctgtcatttgtaattttagtacttgcttgaacaattttgttatttcattttatatttcataagaatcgtaaataagtataaataatttatgataatttgtgtattttgttccatcaagctggataccttaatcaaattctaatattttttatcataagtttgattgtgattacgtctctttttatataaaataaagtactaatctataacgtctactttaacagtttaattttgatttgacaaataatatatcaattcaaacaaattcaattcctaactgttaatacatgacatattttagtgattatattaacatctaattatccattagtattt

SEQ ID NO: 19619 - DNA, 558 bp, Glycine max
  Intron number 1 from transcript Glyma17g13730.1 (locus Gly ma17g13730) derived from phytozome v7.0 (chr-ID Gm17; pos 10521343 to 10521900)
ctctcaactctggagctaaagtctttgttagtacacgtacactctacattactatgtatctttactaatttgactatagttgttaatcaataatcaagttgagagatgatgcatatataaaaatagtataaaatttggtgtattctagcattttttttttacttaattgtaattttagtgtccgatcataagattttgtcatctttattttaacgaaaagtctaactctgttgataagaaagtctacgaactgttgtaaacttaactgtttttaatccctataagtaaataaaaaatctcttcaactttctcttatttataattagttcctttaataaggatctcatctaataatgactcaattaacgcaaatagaattttttaacgatcaaaatttcataatcaaggtaagcgtaagagattaaaaatttaatgaagtcttttgttttttaattatattagagttgattgaattcagtttatcccagaacaagagcattgaaagttgttgtttctgatttttatttctattttcaatttctcaggctgattttgaag

SEQ ID NO: 19620 - DNA, 507 bp, Glycine max
  Intron number 1 from transcript Glyma18g03550.1 (locus Gly ma18g03550) derived from phytozome v7.0 (chr-ID Gm18; pos 2426356 to 2426862)
aacccatcactcgcagcattaaagaccaacacattgtcagtgatcttttcttttactttgttttttcaatagacaatgattcaaggacaaaacttatctacagttctttaagcatgttgtttgtacggttcttcaatcagaattagagttttattttgataatctgcatgatactttatgcaaacatttattgtgtaaattaatcaaatgaaacttcaattctgattagagaatagtacaaacaacacctgtagaactagaactgtacccaagtttcgtgcatgattcaattcaatgataaaaaaatagagaccctttggttttattagaaaaattaaaactagtgacagaaacggaacatgcaatttttttacaaattcatcactaaaatttgttgagccagaattggcgatggaaaaataatatttcgtcgctaaatttggttactaatgttgttatgtttactgattgttttatgtgttgtgtatgcttgtgcaggaggtttca

SEQ ID NO: 19621 - DNA, 293 bp, Glycine max
  Intron number 1 from transcript Glyma16g06860.1 (locus Gly ma16g06860) derived from phytozome v7.0 (chr-ID Gm16; pos 6179713 to 6180005)
gtggcagcttcaaacaggcaaggtcctctttcttcttgttcagatttagtcgaagttggtttgcttttatggttagttttttagttctgggttaaactatttcagcatgttaaagaaatattggattattgtggtctaaagctgaaaactggaaaaatgttattgcgtggtttgagttgttttaatgttctgaagatgttcttgaacatttgaggtattaatttcattgggagtatgttggttagttgttatagattgatttttgagtggttagtgtagttatattatatagt

SEQ ID NO: 19622 - DNA, 1057 bp, Glycine max
  Intron number 1 from transcript Glyma20g35660.1 (locus Gly ma20g35660) derived from phytozome v7.0 (chr-ID Gm20; pos 43889142 to 43890198 reverse strand)
gcttcggtgcctccattcctcactggcgcaggtaatttgccaccataacttgttcatatctccaagtcttatcacttctcatgttgctgtgttctcatccacccatttttgcttttttcttttttagatattatttatccttgcttatcactttcatatggtacgttggtagccacataaaaaagggatgataaaaaataatactctgtgattagtaattggataggcgcaatggattactgcatcaagaagaagctgataatatcacccccttcccttaaattatatcccataacatcgatttatgagccaaattaaaatttgttcaaatttagaacctaatatatcggaattgtcaatctcccttttcttagcaacggtgaagaatcccctccctgtgttcaagttcctcccttttccaattccactggcaatcaccagcttcaagtatctgaaaggcagaaagggttgacgaagaaaagaagaaactttagtattgtgaccactgaccatgttaattataagttctcattgagcttgcattaaattgctttaggaaatttttggcaggatattccgatttcaatttccagaccttaaatcctatcaggattcattagaatctatagggaatctgagtatccactatctcggttaaactaggactgatggaaaaaaatgctggaatgcttgtacttgttaagttggtagtgatctatctgaccatatattgaactctggttttgagttcttgacagttgaccctcaagcatattcaattccaactaaatgaattttcttactcagttaatgtgagattctaatcaagcattttttggttactattgtagtttttctttttctttttcctcatatgatataaattccataatcaacataaaactttttcaacataacaaatcctcaaaagtcaccttttttttcttctcatttactctctaacaatgtagtcatcgaattgaaccagtaggtaagtattttttgttgtttttcttcttcaggaatatcagcacactggcccagaattatactgttt

SEQ ID NO: 19623 - DNA, 563 bp, Glycine max
  Intron number 2 from transcript Glyma14g05430.2 (locus Gly ma14g05430) derived from phytozome v7.0 (chr-ID Gm14; pos 3874770 to 3875332 reverse strand)
cacctgtggaacatttccggcaggcattgcaaaaggttagttgtgctctcgctttctcttgattaaaatttgtctattggtaaccatgttaattgcgcaatagtaagaggtctttgttgcatcttactttttatgttctgttaaattatgaatataagtctagaggaaagtttataaatttcttttttggactatctaataaaatagtagcatatggaagaggattaaagggtaacttgagctggttttaacattcgttatgttatacaattcttgcatatgtattgtatatgccactagatcaaggaacaaagtatcggttttaactcttgtcattttattgtctaatagtatattttatgtaagggttttaatcaagttgtggattcagttgtatattggttttagtggaattcatattactttagtatattgaagatcactccattgtcacatatttctgtttcacgcgaaactgtggatctgtgtttaccgttgatgctttatttagtctgtgattcctttttctgtttttaatgtttgatttttggtacagggttgtg

SEQ ID NO: 19624 - DNA, 631 bp, Glycine max
  Intron number 3 from transcript Glyma16g34320.1 (locus Gly ma16g34320) derived from phytozome v7.0 (chr-ID Gm16; pos 36966343 to 36966973 reverse strand)
ccaggaaaaacccttccttgtttgatcaggtaattgcatgctctctttgccttacagtgtttttccaacctttctgctttatattagaatttgattggaatactctagcaatgtgaaggttttttactttttcattcaatcatggattgtcatataattttaaatattttacttttgtaataatttcattaaaactcatgtttatgataaattggttgagagtgtcaaaatcttatgctaacagtgtatcaaaattaaactcttgttattatcattattaatattatttgagtttgtgttactggtgtctaattgaacatgcacatttataaatgataagttgcttgaagatgttttgctcccttgttttctgctttaaatttgtctatgatgattctactttatgtacagtagttggcataaatttcccctgcctcagtaggagagatagttctttgcttttacacttaaaatgtggctgggataagtgaatgcaggataggttccaccaagataatgagatgagcttacattgttttcccttgtgcatatagttgaaaacttgaaataattgacaatcttgtgaattgtggcagttgctttcactagacttggataatattattagtac

SEQ ID NO: 19625 - DNA, 900 bp, Glycine max
  Intron number 1 from transcript Glyma16g00440.1 (locus Gly ma16g00440) derived from phytozome v7.0 (chr-ID Gm16; pos 149153 to 150052)
ttctgtcttttcaacaggtaagctttcctgtttttcttcaggagctgaattctggaatcatgtatttgcttgaatgaaaattttggctgttacttagaaataaattatgaacattgtcgtgcatcattttacccgtttcctttcatttttagtgttttgcttttgatctccttattgcaatgcacttttcatctttagtatataatagatggattggatagatgcattaacaacctaatcacgtatcgtggaaattcagttttgaatttactgaaatgtgggaaggtcattactctagccacatctttccaaagtggctttgtcattactgtcaaaactttactgtatgtgttcaaaaccatgatatatgatgaaggaaaacagctcagcccataaagaatcccccttctcatttcttgtgttttgtttggaactcgctccatctggtcatttgttgctgaaatgtgttttcagtatgacgtgtcctggttgcttggctataataacaccagctgtccaaagtcaatgaagggttgtctcaactagtaggatcaggctgtttgatttctgttaataatccttcctcggtaggttatctgtaaatagccactacaagctgcaaaagcatgtcgcatgccataaccacttagtgtcatatatgtatgatgtatcactaagtagccaaatcatcttagaattatgaatctgttattaggtttctaaaggcttttaaataattatatttctgaatgctttaagggacagacaaaatgtttcttttgtttataatttgttgtttcagtggtaatgaattttctttttgtcaacagttttaagtattaagtaatgcatgcatcatctccctttcactgactgtttgctccttttaaatgttttcag

SEQ ID NO: 19626 - DNA, 427 bp, Glycine max
  Intron number 3 from transcript Glyma20g22280.1 (locus Gly ma20g22280) derived from phytozome v7.0 (chr-ID Gm20; pos 32312182 to 32312608 reverse strand)
gtgcattacaagaactcataccaaattgcaataaggtcagcttcactttatctgattttgcttttgttaggcatgcctgaaaaactttgtaagattatggaatgatggttaatggttacctctaatgatttgaacttgaaaacagacagttattgaagtttgttcttgtggaacatggaaggtttatcaaatcatcagaagttactacttaaaatctgtagattcaaacctgaagttaggcattttgtttgaagggtttatatcctcaaattgaatataaacatgatctttcattaagtatattggtaatagaagtggaagattaacttaaactattagaatactttgtatttacatatatacatacttgattcctcatttattttggtttttctgactttgtatatataaggtggataaagcttca

SEQ ID NO: 19627 - DNA, 748 bp, Glycine max
  Intron number 1 from transcript Glyma17g36520.1 (locus Gly ma17g36520) derived from phytozome v7.0 (chr-ID Gm17; pos 40477664 to 40478411 reverse strand)
tcaagagctcaattaagcccagcaactacgtcgaggttcgacattattatctataattcttacactaacaaaatttagtcacggagattactaattttttattattagcactgaacatcacatcaattttacacgtaaattgtttcttcactaatgttaaacttctaggattcatatatatttataagaataaaaaatgagtgctttgatttcaccctatttgattagttagaatcatgctaaaatattattttaaataattttagattaattttataatgatgaattaatttcaagtctaaaattgctttaaaataactttagataactttgaaagggataaaaaaaattatgcaaaattctattagcaacttgcttttataattctcctaaaaaaacttgttttctgttaaacatatttaaatataaattatataacgttaaaattaattttaaattagtttttattaatgctcatcaaaatacacacttatttttgaatatccagctagctatgtacttaaccatgatggtcctacatgaagaatatttgtggtttagaaaaaaaatactcactaactcatatttaaactaatttttatttatgaaaaaacttgcatttatttatttttttctcttaaaaacaataacagattatctaaatgtaataatgatgttgttaatcttatgaattacaagtgacagtagtagcgttgtgctttcaggttcgacgacacaaaacggcgtt

SEQ ID NO: 19628 - DNA, 1018 bp, Glycine max
  Intron number 2 from transcript Glyma18g02280.2 (locus Gly ma18g02280) derived from phytozome v7.0 (chr-ID Gm18; pos 1432269 to 1433286 reverse strand)
gtgctccattgtcatcgagttactattccaatctggtatgaatatcatacctaatctatttttttctttgatttctcttactatgtagagtaaactatgattaagcataacgaggtgtcacattagttcttcaaactaaggaaaatttaaaattagtccagggagtttctagttgtttcatcttgagattttggtctcttaaacatatgataatattatcattaagtcacatatttttttataactttggattaatgcgattggcggattgcagcttcagggacttttttgaagtttcttagttttggggactaatgtttatgtgactaggctttatactttcaggaactaaaatgttggtttactctactatgtaacttgtagtctcaatatcttaaatgtaataaaaataataaaatatcggattatattagcttgttttattgattgtttaacaaatagttaatcatgcgaattgcaaatccttgattggataaggtttcaattcgagtttaatgtgacactaacacaaaacatggttcctttctgagtgtaatggttcaatgaggtttagaatctataacaggtttagcacttatttccagtaattgattggcaggtgctccttcacatatggggcatctattatgcaggatagagatctgaatgagtatagtccgtctcggtccttatccagtaagcatctatcttgcagtcatcagttgtgtgataagggttcgaattgtaaaagttcacagcagcagtgtccatacatggtcagttacttgtcggagaacacgtcgagttctggattgttggttgaggacatactgcatcttcagtcaggcggcagtttatcaaactcatctgttcaggctccagttgttcttgggtgtggctgactgccctgtctttgttacttcaacatcactttccctgatgatgtattctttttttaattaaaaacaagtttcctggttttttctctgacgtcagttttgttgaatgcaggtgtggt

SEQ ID NO: 19629 - DNA, 634 bp, Glycine max
  Intron number 2 from transcript Glyma16g33160.2 (locus Gly ma16g33160) derived from phytozome v7.0 (chr-ID Gm16; pos 36174480 to 36175113)
agattccaccacctgatacaagctagaaaaccgaggtatgattctgaaatactgaaaactattatcttatggttgagtttttttatattcattccaccacctgtgttacatctagaatggtttttctttacaaaatgaaatgcctgtggattgttattataattgacattggctaactggtttttttctggttgaggtggtgtttgatttccaatacttaatttctgttttctgcaattgtaatgtgtgctgtgatattttatcttcatgcagtctctgtttcaagttgatcttgctacttttccttctctttttttttcgtttcataaaattattaattgcactattttgaattttctataaataattatgaatataattgtgaattatatttttaaattttgcacctgcacaatttttttatccaaacatgttttttgagaaataatttttgatgtcttttattgtaattttatgctattacatccaaacaacctaaaatgacttaatggtaatgtaaacttctgctttacataaatctcttgaagaatcacgttgttttacataattttaccgtcactttttataaacttaagcaaatgggcattgaatccctaggcattacaggtttgaa

SEQ ID NO: 19630 - DNA, 629 bp, Glycine max
  Intron number 3 from transcript Glyma16g33160.2 (locus Gly ma16g33160) derived from phytozome v7.0 (chr-ID Gm16; pos 36175175 to 36175803)
ctcttcgccatttctcttccggtacattaatttctcctctcattctcagcagcaattagaacatttaaattgaatttcatagtatttttgtagccgatggagaaagatgggaaaaatattggaaatagtctcagttgctttggggttcctatttgttatcaacagcaaacaggtctaagtttaatttcacagcttcactcagattatttgattaatttatatcctagtcttgcagtaataaagctatattcttttcaataatgtttaacggtggcttacataatcatttattttatataaacagtcacaagttggattaatagcctttttaatgctctgaaggatcccaaactatgttgctttaggcagcgttaagtacatttcttagaagaggaacctaacaaatcatatgggttgtgttttaaaataaaacaatagaaaacatggggtgagaaattgctacagtttattgtatatgggcttaacgctatcttaggcctgctagatctaaaatggaaattatggcttctatgctgcacttgttgcttcttcctgtattgtttggttacatttatttgttctgccttttcacagaggcaacaaactccagtcctcatagtacacgagag

SEQ ID NO: 19631 - DNA, 622 bp, Glycine max
  Intron number 2 from transcript Glyma18g05540.1 (locus Gly ma18g05540) derived from phytozome v7.0 (chr-ID Gm18; pos 4185393 to 4186014 reverse strand)
aattgccagaagaggtgagttcgaatttcctaccttcatgatttgagtacatcttggtaatgatgcaaatatatggcccaatatattccaagtctatcttccttggctacaactttatgattttagatttattacatgtatttatttcttcaaaatgatgctaacttgtacatatctggttctttggtttttgagatcattgtctcttaattatatggttatccattgatcaatcagagtagataacagtcaattgacaaggtcagcaacaggtaaggaagtgtagaaagaatttgcaattaatggctagagttgagtggccaggtttcaaatttaccattgagctgctatttttttctgtaacgtcaagctcttgctatgttgtaatttgtaaatattactcattaaccactgaaatgggaatgtcccaaaaccctgacaacattagaaggtaattttttacgaaacaaatggagctttagtcgttaacctaaaaaagtggagcttaagtatcctatgtaacttctggctggtgagttgcttatcacttccatgcgcttgagattgaataattttttatggtgtagataagttatcagcacatcaagacttatttgacaat

SEQ ID NO: 19632 - DNA, 915 bp, Glycine max
  Intron number 1 from transcript Glyma16g32000.1 (locus Gly ma16g32000) derived from phytozome v7.0 (chr-ID Gm16; pos 35213217 to 35214131)
atagaaccatcataaaggctttgatcctggtaagtatataagattagtacatgtctaatcctgcattaattaggtcctaataattaatcttgaaactatatatatagggatatgtttggataaattttttaaaaaatactttaaagaaaaaaattgaaatgaattttttcatgaattaactctttattaactaatttatatatagaagttctatcatatcatttttctaaaagataaaagtacatttataaatttataactaatgaagaattaatttaactcatgaaaaattcatttcatttttttatatttttcttatcttagaaatgattttagataagtttatccaaacatactcatagtcgatctttgtttctaactttataaattctttacttttctaattaaaacataatttactctcatcctttatgtcaaatgatgtgaaaaaagacaagtaatggctttgtaaagtttagataaggtgactggcgtatacatcctaagaaagtggtggtttactatttatttttgtatcttccacattggtgtaatgtaaattaggaacaacattttaaattcatttggggttcagtgagtagtatgccagagagttttattaggttctaatttttatttaataaggcttacatgaattccactcttcaagcatgctagaaaacactattaaaaaaagagttaaaagaatatgttactaacctttctttttagtctaattattgtacaaaagttatattttccttttaattccactgtagtatgattcttcgacaaaatattaggtcatatgctttgctagttatgaaaacttggataaatgttgagtttattttctttcttggaattcaaaggtcgacaacgaaattgacaattaataggaatttcttttaggat

SEQ ID NO: 19633 - DNA, 849 bp, Glycine max
  Intron number 1 from transcript Glyma19g28700.1 (locus Gly ma19g28700) derived from phytozome v7.0 (chr-ID Gm19; pos 36274848 to 36275696 reverse strand)
ctctccaggtgccctttgatataccccctttgcttatgtgcttctgatttatctatcattcaccttaccgtataccacaacgtgtatgtctagattaaagttaggagagctcaaaagtatttttactttagaaataacttttttttcctcaattcattcattggaatgcacaattttacattgacatttgtaaaagtactttttttactttaaaccaaacatagtcataattaatgtatgtttggatatcagatatcaaagctcattcagaagtatttttactttttaagtgacgattttttcttttttccttttttatcttgaaattcaggaatatgcattgaaattttcaaaaagcacattcctaactttttactctcctgactgacattcaaacaatacttccttcatttcaaaactaaagatattttagcatttttagttttgtttcaaaactataaattttttacaaatccaagactaaattcaaaacttttttccaactatacacttgtccactacattacattgtttctagactctccactatccaaatatttatgcttaatgatgattccaacaacatgattaaataggagtacttttgtctaaaattttatcaattaatatttcttaatggatgtacactacccttaaacatctatagttttgaaactggaggaagtactaattcaaaagcatgttcccaacttttatccaaacatacaattagtcttcttttgtaccgtgaagcactgaaacttggggtttgcttttgttgctttcttcattgcttctattctttttcttgcagcttgaattaagctgcactagtagattctttgacat

SEQ ID NO: 19634 - DNA, 430 bp, Glycine max
  Intron number 1 from transcript Glyma18g41590.1 (locus Gly ma18g41590) derived from phytozome v7.0 (chr-ID Gm18; pos 50524741 to 50525170 reverse strand)
gcctcctaattgttgaggtaatcatttgtagcttcaatacactttgaacatattaattactttcaggggtgtttatgaagaagttattaaatggtcctggactaccacttttctttgatatcgattaatctttatgtaacatgtatttaagattttaatttaagagaaaaagaattaataaaacttaattaaacatcttcaataatatatatatatatagactaagttgaacaattcggagcataactcaaactcattttctacatgcattggttctagtttcttaaacccggacctgccaaaagtcctttcaagcagggttgtgttagtgagacaagactcatgtgaacacccctaattacttttgcagttttaattatattaattttacgagataatgtttcatttttacagtgtagtgaagcagtca

SEQ ID NO: 19635 - DNA, 556 bp, Glycine max
  Intron number 2 from transcript Glyma17g04450.1 (locus Gly ma17g04450) derived from phytozome v7.0 (chr-ID Gm17; pos 2986227 to 2986782)
gggcagtgacgttttttcttgtccgggtctttaaggtatgttatgccattttttgtgttgtgttgtactttgggaatatgctcctttttcctgatttatgatcaattttgatttgattgcctttaatattcaatgtggcttgaccacaaagttgttgaatacagtggatgttactgtgctctttattggaatttaggctttgatcttgattgcatctagggacctctgtcatgttcagtttgttacagtgttatgttacctttaattatagttttttttctttctttcttgtcgggtgaatctcaatgatgtgattttttaaacatttttttacatgcatctattcacgttgatgtcagtgttcactttcattaggatgtggtccttcgcttcatctgcacaaaccttcctctgtactcgattgagcttttactgcctttaaccgttgttttcagtgatttgatcacttttataatctggctatttgaatggtattacctacttatcttaatttatattcattttctctgtattgcaggttgtcactcctgttaaa

SEQ ID NO: 19636 - DNA, 496 bp, Glycine max
  Intron number 4 from transcript Glyma17g05030.3 (locus Gly ma17g05030) derived from phytozome v7.0 (chr-ID Gm17; pos 3388334 to 3388829 reverse strand)
tcagcctttgtctctttttgattccagaacgcgtggtatgatttttataaatgattattcttttctttgtagtaatttgtgttgctttcattcacaaataactagatgtttgaatagttttgtcacccatgtcttgttatgcgtgtttgaataatcacctgctagtttatgaattttactcagttgaatgatgactattttatgggatttgtgatgacaatacaaattcaagtataccaagttctacaagtaagatattgattgaatcagtaaataagggaagggatatcaataaaaaataaaaaaaaatcaagagaagaagcattagaatattgattttgtcaattccttcacatgcagtccacgaaattagccaatcagttcgtctattataccccttattattgattcagattactaattctttagtttttatcaacctaagtttttagatccttttggtttatgttttttttttttttatgaatcctagcaa

SEQ ID NO: 19637 - DNA, 350 bp, Glycine max
  Intron number 2 from transcript Glyma19g41710.1 (locus Gly ma19g41710) derived from phytozome v7.0 (chr-ID Gm19; pos 47914150 to 47914499 reverse strand)
tggagaacttaccgaagtcacagctcactagggtgtgaatttcttccactttttgtactctgcttgttatttgttttaatttttacactttggtattgtttgaataaacttctctacaagtatttataggagaagaaaataagaaggaaaaataaattaggcttttctcataataagtttaaattaacttatgcacctcagcttttggagaagttagacaagaaagcttctataaaagttaagtttacatgtacttgtgaagaaatttatcaaaacaggacctttatgtgttggattatttgatattaatttgccttttgatttattgcaattgtttcagaaaaaggtgg

SEQ ID NO: 19638 - DNA, 541 bp, Glycine max
  Intron number 4 from transcript Glyma19g35340.1 (locus Gly ma19g35340) derived from phytozome v7.0 (chr-ID Gm19; pos 42880434 to 42880974 reverse strand)
tggtgtttcaactggtaagcgactaagcattatccttttcagaaactctattgagcatgctgtctaatgaattcatgaaaatgtgtttgcataatgatgttacatttgcctatgcagctgtatattattggtgccttgccatactacacgtatgtcatattagactctatgtttctgatcagagttactacttccatccatcatccatgttttcaattagaataaccctgtgtttggactttggagtttcatgtaatgatagctcatggttattgtttattattattattattattattatttaaatttgataacaagatgacctatcagtgattctgcacttcttattttgattgtttagcaattaacatgcttagtgaaaaatgaaaatgttactttacagccttttcttttctaatgctgtgaaatgcggtgtcttgtgtccttccagtaccaagttcacttattattatgaagttgtgatatctattttccccactttttaggccttggagctgtctggaacactgcaaaagtggag

SEQ ID NO: 19639 - DNA, 743 bp, Glycine max
  Intron number 1 from transcript Glyma15g04710.1 (locus Gly ma15g04710) derived from phytozome v7.0 (chr-ID Gm15; pos 3285580 to 3286322)
ttcttcaaggtacattcatttctctattccttttgaactacgatcgtttgtgtttttgattttttttttttctacaactcttcggaactcgtctttgtcgttttgcgctacggggatttcttgttttcgatattagtgttctgaattttttatgaataaaatttcctagatgcatcgatgtatgaaggtaatttgtctcatggaatcatataattgcttaattgactgggaatcatttttttttcatattgggatcctagatttccccctttatttaacactttgcatggaaaaggtttttcacactctgatctaattataagttgtcttatgctaagattgttaactttttgcatatatatactttaactgattgataatataaattaagcaattaccaatacgcaatgtggtgtagcatgattaacagataactctgtttcttaactgattgataatataaattaagcaattaccaatccgcaatgagagttgatttttgtttggggagaaattctttagatagatgtcagtatcaatatttggatcagtatttaaaaagattagttatcgtatcgtacactgtggatatcatgtgttcatccaaaaagtaataataaactcattattttaagtggttatgtattttagattatgaatctatgttgttgtattgattatttgtgaacttgtgttctccactcataggtagtggagtggctggaatagtgttgcctgaatca

SEQ ID NO: 19640 - DNA, 929 bp, Glycine max
  Intron number 1 from transcript Glyma18g04080.1 (locus Gly ma18g04080) derived from phytozome v7.0 (chr-ID Gm18; pos 2845150 to 2846078)
tccgtctccactgtcggagctgtcaacagagctcttgtatgatgcctttcccactttaatttgttacacttgcactttttttaattacaattacccttattaaggtcttatttcatatgcatgtttttcaatgcaagtacttcactcccctactttttttctttttacatgtcaatgatgccatgatatttttaataaaaaaattacgatcatgtttttgttctcctttaatttcccttacacttttttttcccacttagtcatcaatgcttaaaccttaaaaatggtaatgattaaatgatgaatagctaaaattcaaagtgtgacttaaaaaagtgtaaggggatgtaaaaacgagtaggctcaaatgaatgaatatacctcatgtaggcatgtagccttgtgccattttcaaataagttgtttactttatcttcattttacgtgtcatagtggcatagttacatgataagttcaaatgattgaagctatcaagtggcttcgtgtgcatgtttatacaactcatcattgttgcatgatataacatattgaaatcttaaaaaattaacgatgacaccccataattggaaaaatgttttattagttctgtacttttaatcaaatatggttcaaagtctttatatttttatattaatgaatttagtcttttaaattttgaaaaaattacgaatttaatccattttaaattttttttttatcatgttatagaaagttagaagagacaaaatctacatggcatttatagtttgagaataaaattcattaatataaaagtgcataattcttcactatatttgaccgaagatactatacaaaaacatattttctaaaaagaattaaggagaagagagagcaaatgtttgaagtactgaatatttattttactgtgacattgcagttgaacctga

SEQ ID NO: 19641 - DNA, 454 bp, Glycine max
  Intron number 3 from transcript Glyma18g01670.1 (locus Gly ma18g01670) derived from phytozome v7.0 (chr-ID Gm18; pos 937799 to 938252 reverse strand)
aaaagaaaagcttcaaagaagctcaagagccctaggtttgttttttcctcaaatttttaattgttagtgcaacaaagcttacagagttgtaagagattttcagcattatttattttggaggtattttctcttctgagtgtttcagaatctagttttgtacaagtaacctttttgtgaggttgcttttctgttctatgtaacatattttggctaatctctgtctgtgggagtaagttgggcaatgacattaatctttctgctcctttttttaacttaattttagtgtatgattacctggggaactctctttttccttcgaaaccttttatcttttcccctgtttggaactttgagtagttattggagcatgtaaacattatttgggttgttaacttgattccattatcttttaaatttagtcagaagaagattaagttgtctactgccgaaaact

SEQ ID NO: 19642 - DNA, 788 bp, Glycine max
  Intron number 3 from transcript Glyma17g36290.1 (locus Gly ma17g36290) derived from phytozome v7.0 (chr-ID Gm17; pos 40249710 to 40250497)
tttaataatcatttgcttgtattttctcattcaaagtgaaaggagtgtttgaaagttgatgacataaagcaggccacataagagagatctactgcagaatagatcattatcaaatcataactcaaattttagatgttgaagtcatatagtggagctgaggagaaatttgaaagaacatttttatttattaataaaaactacacgtgaaagtactagtagttacttttaactctccaatctctctcacctactcaaatgcccagcaccttaactcactctttatttctctcctacatcttgaaactcacattgatacagaactcccatacaaggagcaggccttttatgggcaaaacatatctatacaataatattagaaattaaatcataggtggtgacaataaccaagcttgatccaattagatttattgaaacttgcctgaataggactgcactaattatcttataggttctcagcttatccaattgtttcttcacttcattgccacctaatctaggatattatagagctgctgccaacttgatataataattggtacttttaacattagatttcgtctaaacttgaaattccatttgaaaatgtttggaaaagaagactctgattgcaaatattatgtaggtatttaagtatcaattccatattcagaataatggcccttgaaagggatgttggacttcgaatgataggccatcaagccattatggacaatatggtgtggtgtggaggaaggacctcgtccctttaatttcagcagttatattga

SEQ ID NO: 19643 - DNA, 385 bp, Glycine max
  Intron number 1 from transcript Glyma17g17120.1 (locus Gly ma17g17120) derived from phytozome v7.0 (chr-ID Gm17; pos 13955829 to 13956213)
ttcaccaagaatccttagccaaaccgcaccaacaggttggtttgtcaaattttaatgctatatatgatcattttatacaggtaaataataaccagtatcctaagcaacaagtaaggaagtgaagagaaaagtgttgtgtttttttagggtaagcagtgttgtttttctagagatgtgtaaaaatatgttttcatatgatttttcaatgctcttccatataatttataacaaaatcttttttattttaagttgtgtgtcttcagaatactagttaacaagactcttctatatgtattgaagataatggctaagtatatggtatattaatatattactgattattgatattgttttgatattaatttgtagagcgttgaggcggttg

SEQ ID NO: 19644 - DNA, 562 bp, Glycine max
  Intron number 3 from transcript Glyma20g24320.2 (locus Gly ma20g24320) derived from phytozome v7.0 (chr-ID Gm20; pos 33981174 to 33981735)
ccgtgaaggaagacggagacagttcagttatattggtaattaattaccctgagagtgtttttattcggaactactagtatcaatgtctgcgaatacacgtgttcatcagttcatgttctgacccaatctctatgtgacacatatttgagttttttaatttacgagaaagaattaataacagtgggtgtcatgagcagcagattaattgagatcatgtgataatttctcgcatttaggaggattagttcatgtgttttagttttaaacaaacattcaaacatgattgagcttcatgtcatattgttgtagatctcagatgtgttttatcactctttccaatttgttttgcattaactgtgactctgtaagtctatttatgcatcttggcttcttgtgataagatattatgttgctatcaattagtatagacaactgcacaattgtcaatggatatacttgttgtaagttgatatgatgttatgcacattctgcggtgccgcttcatgttcttcatacgtaaattggctcaggaaaattgctacgggaagtggatcctgagtta

SEQ ID NO: 19645 - DNA, 289 bp, Glycine max
  Intron number 1 from transcript Glyma15g18770.2 (locus Gly ma15g18770) derived from phytozome v7.0 (chr-ID Gm15; pos 15649002 to 15649290)
ccttagatcgaaatcattttttttcgcccggcacagtgagttaatcttattttcatccactctctaacctgtttcacctttcataacttgattttaattagccactgattgcattattgtttcatcttctgtttccagtggatcgagatcctctcttgtttctctgtttcaatttggattcgaatttgaatttcagttaatctcgttttcactgccagggttgtgttttatttttatttttttgatttgatatttctgcagagttgggtttttttttatataactgata

SEQ ID NO: 19646 - DNA, 344 bp, Glycine max
  Intron number 1 from transcript Glyma19g34370.3 (locus Gly ma19g34370) derived from phytozome v7.0 (chr-ID Gm19; pos 41970722 to 41971065 reverse strand)
aagacagtgtccaacctgcaaagtaagcaaaatatacttttcttatatatttctaaaaagataaattaatataagagtttgttaattaatatcttagaacattgattaagaaactaaaaataaaaaatttatcataaaattataagagagcctaaaaaatattatgaacaacacaagttgacacatttgaattgaaaattttatcttcttagtttattaaccaattcctaagatttgtcttaatataataaatgaaaactgaaaagtaagtaataatgatgctaatggatgaaaattaatggatggcagggtacaagtagtggggtggccaccaattagatctt

SEQ ID NO: 19647 - DNA, 408 bp, Glycine max
  Intron number 1 from transcript Glyma14g27380.1 (locus Gly ma14g27380) derived from phytozome v7.0 (chr-ID Gm14; pos 33581698 to 33582105 reverse strand)
ctctaaccactgtttttctcttcggtttcaactcggtaggtctcgctgagtccaactcactctctttcttccgagtcatggatcgttgattctcttcacctagggctcgatcgaccttttcttatttcgcttctttttgtatcttttttattttaattttttttaactcaacggcgcattttagtttgattaaattcaatttcttttatttcttgtttatttatttatttattttttaattgaacttgaggcttggttggggaagaagctaatttggtaattttttttaaaggttttattaattagtgtgatttattatattactatatttgtttttaaatgttatggtattctgtggaccgttgttaatgacttggatctgaaaattggtgtgttgtgcagagactc

SEQ ID NO: 19648 - DNA, 477 bp, Glycine max
  Intron number 1 from transcript Glyma15g12750.2 (locus Gly ma15g12750) derived from phytozome v7.0 (chr-ID Gm15; pos 9423855 to 9424331)
cgttttccctgaaatcaggctcgtcccaagtccatgtgagtcgtgttcttatagttcgcataagcttaagagaaattattacatgatttatgataatcatagtctttatcaatttctatgtcacatataataggtttattgaaaggctctacatgacatgtgacatgtaggtgagtataattcattttgaaatatttgattatgtcatgtgaagattagtcaagatcataaacatgtgagggtcttataccatgtaataatttttctctagcaagattaattggttacttgttggtgctattcaaggaatgaattacaaggttgttaccattttgattaatataaatactgaagtcaacgggagaatgaagtggttgtttccattttatttaatgaagccattgatttagctgactttctgtgcttgatcgtattgcttttgatgtttgatggcagttgggaaatttccaaggagtc

SEQ ID NO: 19649 - DNA, 747 bp, Glycine max
  Intron number 1 from transcript Glyma15g10480.1 (locus Gly ma15g10480) derived from phytozome v7.0 (chr-ID Gm15; pos 7603813 to 7604559)
agaagccttctgggattggaacaagatccaaagtgagttttgtgttttgtttttcatgtactatggggggaaattgggaattgttattttgtgtttgattctgaaggaaacggttaattaaataattaattgataatagtttttatgattggtttgacttgaagtttgtatcttttagtttgaaattacatgaaaatatcaagggtgtctgagttatttagttaaattcttcatttacaaagttggggtaaataatgaagtcaaccattttgagaattttaatatatttatggggtggtaaataattttgccttgaatttgtcatctggtaaatttgagtaattatccgtagtagatttttatttggagcggtggttgggatgattttggcaaaaataaccctgattgtggatattttgcctgggaaaatttccttgataatggataacctattcatccagttaaaggagcaattgtgaacttttattcttttgttagctctgattagtgattacattttgagaaccatgagacacggattagtgtctgaatggaatttacatgctagaggtttagtaaattctagatgtaagtcctgcatctctcatagaaagattttattactccgctttagtcaaatctcatgtagttatgtcacatgttaggtggtcaaatacccagcttcttatgactagctgaaggcattagaaggtaactgacatgcttgaaataatatgttgcaggcaa

SEQ ID NO: 19650 - DNA, 962 bp, Glycine max
  Intron number 4 from transcript Glyma20g31710.1 (locus Gly ma20g31710) derived from phytozome v7.0 (chr-ID Gm20; pos 40303369 to 40304330 reverse strand)
ttattcctggcctcacaagtgactcttcgtctcaagtaactgtttctattttgactttatttttcatatacccttggactaaagaagaatatttttactatgtcctcaactaattgataattactatattattacttttaaagttgttacgacctcaaatcctcatgtatagttaggatctcctcatcatgtgaggcattgtccgctttgatgctcaatggtcatcatggagatagattgagattggagactagaataaaaaaacccttgagctagagactagggggattacacacacaaacttgaatgctctggctaggtctcccaaaccaggaacggtctataccggaacaaaaatagatattactaaagtcaacaatctaatgattagatgacaatgtaacagtctgttgtattttaatttagttcttgtatgcctgattgttaatgttgtctccatcgttgattttttttttctactaaatggggatcggggaaaatcacatgtttatccctactctgttggcagttacttgacagctgctagatcagggcttgtaatttgattgtattaatatcattgtcctcatagttatatactagttacttatatagttccagctaaaactccctagcttagtcgtcaggttgaaatttgatgcatgctgaggtgttaatgctaaaatgaacaattgcttcccttatactagtcgtaaaaataggaaagtgtattgaacactattgttttattaatttattctatcgttaatcatcaaagacaataaatatttccttgtatccttatgaatattcattatttttcaaattttcgcttgattttgattaggagattcatttatactgtaatgaagtcttagttcctacagtttatttttcctttttcttttcatgctctcatgttgatagtatatcaaacatcttgcgtatcacactgcaaagcg

SEQ ID NO: 19651 - DNA, 959 bp, Glycine max
  Intron number 1 from transcript Glyma19g32730.1 (locus Gly ma19g32730) derived from phytozome v7.0 (chr-ID Gm19; pos 40437460 to 40438418 reverse strand)
catttcatttcagaagaaacccttttctctccaaggtaacaacatctcggcattatacttctttaacctaaaagcctctcctttatttctctctctcttcttctccttcattatttgggtggtactgaaaattctctatttttttttaattctatttgcttattttttttccagcacccatttggtaaaaaaaatgtttttttttttggtgaagaaaaatctgggaaaatctgttgaaatgagaagaacatgaacctgcttatcatcagtgtgtagatgtttttctgttttttttttcttttgttacaatttctgtgggtgggttaggtggtatgaaagaaagtgtgctgaaacaagcgaagcaaaagtaaaccgagggcgatgtttgtttcctgaaaataagtgaacactagtttaataaagggtcttataatgcagaaagtgtgaaattttgaagtggtacctccttcatctcatgctacattctgtcggcagctaccctggaacattctaggttcagattgattttctgtacttttttattcattaaaaaataaaaaatactttgtgttttcgtcttgtgattttgtgcttttaccgaacacaatcggatctagacatttaagcttgcacactcttggtgtgaccatagatctatgcttgcatctctgtttatttatgcatttaattattatctttgattttccttgtcttctatgattttttgtgttttaatgttttcccgaatatttaggtggctcgatttgttagcctgtaacggctatttgacagtgttttttctgttttttaggctcctcggaaccgttgtgcttttttatttcttttaaagcacaactgttcctgcggtggaacattgaccatttgaaaatagttgtacaatagcttccattatttggaaaaaaaaaaaaaggggtcttctgattctttgaagcgagaag

SEQ ID NO: 19652 - DNA, 867 bp, Glycine max
  Intron number 1 from transcript Glyma16g28640.1 (locus Gly ma16g28640) derived from phytozome v7.0 (chr-ID Gm16; pos 32578405 to 32579271 reverse strand)
gaaagcccaagttttgtccatttagactttcccatgtaagttaactgaaagccttttcaagagtgtttttggattctctacatcacatctttgttaactgcctggttggacagttcttgattgattatgtgctcatgacaaatagctgatattgcatgttttttatgctataactatatgagcaatatagtatggaaagactgttaatttgtattgtccttattttatatgccctacgtccgatgaggtgtcattttgttctttatcgggattgaaatttcgacactttgtagtagggagttccctttaaattgtaatctctaactaactttcgtgtgttgactgtattgtatagcctcctaaactttttatacctattttctgcaactttttaatgcataggaaatagatgactgcaccttgaagtattttacttttacttatatgccacttaaatttcactgtgtggctaaaattggtacttacctgagttggcactgcgaattctctgggttcactgcattatagtggcacaattcaggttaattagtattattactatccagatctttatgattttgcatagatttttattaatatccatgctgagttttcttattttagtaattagtgctactgctaacaagtagaggtagtgtagctttatcgctggaaaacatatttcttatttggtgtatgcggtatgcctttacggttgtatttataaattcaaaaatgctaataaaaatgcatcttttctattcttccttgattgtagactaagagttgaacatttatatatagtaggcttgaaattttaaactcttgagttatttctatgtataaacgttatctgtaaactgcagg

SEQ ID NO: 19653 - DNA, 888 bp, Glycine max
  Intron number 2 from transcript Glyma16g26380.1 (locus Gly ma16g26380) derived from phytozome v7.0 (chr-ID Gm16; pos 30515557 to 30516444 reverse strand)
gcagggactggttttgcctcaagggcattgtttgggtatgctctgcctccatttttctatacatgcattgatgttagtattttagggatgtgcttgatttgttgtgttgaaggattttgatctaggctaggatatacatattgacaaaatatgattgatttggttttgaagattttggtatggcttttgattattatacactctacttttaaagtttatctggatggcgaaaatttgctttttttttttttgggataaatggggtgttgataaaatttagaacataatttggtgtgtgctgtttattaggacataatttggttcattgccaacattggtataaattgaaatccattcacttacgtttatttttgaaatagttaaaaattataagatttaaaaaatgtcgttataatgtcttattgtggtaaaacagtttgttatttattttttaatgtatatatgagtggatttagtagcatatttgactaacatatcattggtttgagtgatcctggactcggtccccttaagcaaggtctagggttcgagccttgtggatggaaataatgtggttaagaagggagactccactaaagatgacaagttaggtttcctggcggagattagttattagtaaaactggtggatactccgtctcaatatcatgatataaaaaaagtagcatatttgaaggagttaccattgacctaattgtagcaatttggaggaatgaaagaaggaaaacctatgaacatttgtgatgtttgtggaagtgttatgagttgtagtatactgtcctactttggttaaaccatgtgcaatgagcatatatttacttttaactctcacgcgactttaatttcaggtcatcagttgcatattgtg

SEQ ID NO: 19654 - DNA, 451 bp, Glycine max
  Intron number 3 from transcript Glyma16g00670.1 (locus Gly ma16g00670) derived from phytozome v7.0 (chr-ID Gm16; pos 367399 to 367849 reverse strand)
ggtcaggtctgctagcctttttttttgtcaactttattgcaagcccaaagccttggcttgataacttgatgcatcagagtcttgaaattctgatttcatatttttgttatagatagatataacagataagaattacaattaagtgaggggaaaaaggaagggccatgcagtgtccaattctaaactggcccccgaaacaactatgaagtattccaatataagcagaaaaaatgtaaaatgataaatttattaaatgtctgccgttgaattgtaattgtacttatcttgactcatagatgattgatccaatttaatttggcaatacatcatcttatatctttattgtcaacaagtcacctcaaattcttaatgtgtttgtattcataaccatgattgatttacattatcaaatgaattctgactttttagccttattttctggcttatgtag

SEQ ID NO: 19655 - DNA, 650 bp, Glycine max
  Intron number 1 from transcript Glyma16g20260.1 (locus Gly ma16g20260) derived from phytozome v7.0 (chr-ID Gm16; pos 22804333 to 22804982)
ccggcaccgttcattcaggtctgtcatgcgtttgatctgtgagaaaatgtgcagattaaaaccctgtttacatggactcttacatgattacttgtaggagaagaaagtaggaagctaaaatgaattgggtttatcccttaagctaaaattaacttgtgcattttggtttatggagaagttaaatgagagatttttacaacagttaagcgtgtaagtgcatgtttggacccaaatttccttcttcatttggtgcattggaattcacaaaagtattttccaaactttaatttaaacataagtgcatccaaacataagttcatgtttggattaaagttggagaacccaaaagtacttttagtctgcagcaacacttttttttttcttgatttggtgtattggaattggttattatgcattagaatctgctaaagtactttcaaaacttcaatccaaacatacagttgattaaagcctgtgggagaaattcagttcatcatcttacgtttgtattttcttctcctttaagtgcttatggagaagtttatccaaacagggtccaagttgctgaaaacatctgtgttgttgaattgccttctgatttgagcaaatttgcagattaagttgctgaaaatacttgcgttgttagggag

SEQ ID NO: 19656 - DNA, 650 bp, Glycine max
  Intron number 2 from transcript Glyma20g31260.1 (locus Gly ma20g31260) derived from phytozome v7.0 (chr-ID Gm20; pos 39891945 to 39892594)
ggtttgtgtttccttactctatcttagcgtacgaaactttgttgctcatgcatgttttaacacgtgcatatcaaaagtatcaaatctggaaatctgtccgtcttttgcatgaatcttattaaaaaatgataacccagcaataaaagataccgaaaaatgataaaatatatatgctttatttttggagtatatataacaacaaagataagagaaagaaaaacaatatattgtataagtgtataaatattattgttgtttcgtacttaagtgagacttaatagatgaaaatccacgtgctggaaacttcgatcccttatccctttagagtttagaccacctttaaccattcttcttaacacattttttgaaaaaaatttagatttacgtggagatacaaatattgactctagaagcaaccatgctatattgagagagaaaaattggtggtcccaacatgcttttgacttctttttgcaagaaaaatggatagaaaataaatagactttttttgtacaattgtaaaggtggatttcgtttagtaatgagtttgactacatgcagaaacgttgtacacttgttagaagcgtacgttgccgaaactattaggtcaaaatatgtcgtttgctgacgagtttgattacatgcagaag

SEQ ID NO: 19657 - DNA, 163 bp, Glycine max
  Intron number 2 from transcript Glyma19g25870.2 (locus Gly ma19g25870) derived from phytozome v7.0 (chr-ID Gm19; pos 32195802 to 32195964 reverse strand)
caggaagacttgaaacgtcagctatttggtgagtacttattagttattaaatgacatctatttttctatcttgaagattattaatcaaatacttcatgatgactgattctttctatgttttttgataggtttgcctccaaggtatcgagattctgttagggca

SEQ ID NO: 19658 - DNA, 866 bp, Glycine max
  Intron number 1 from transcript Glyma19g25870.2 (locus Gly ma19g25870) derived from phytozome v7.0 (chr-ID Gm19; pos 32196505 to 32197370 reverse strand)
ttgcttcttcgagtttcacagccaagtcgtaaaaggtactctctctcctctcatctttggatccccaaatctagggcttcttcttcttgtctgcgaaaatttcttgaatcactgtcttaattttcgtcatcaatttccgatttcgaatcttcgtctttgtttactttccatcgttgaagctgtgttgtgcttacttcactgtgctggttttggtaagctcttattgtatctgtgaatgctcgcttcggatcttcgatttcgttttgtgatcttgcttttgctgtttaagtttcagtgtgtgccggtgtttgtgcgagatgtgagtgaaggtttttgtttttgttccatttctgttttttattttttgaacttgagttgttacctagcaatttgatgtcagatttgtgatggcgtgttgctgctaagggtttggtagcgtcgattttgtgtggagttgcattgaagtcaaatgtgcaaatccatgttctttaaaatggataaataagatttgggagctcttttatttgctttgtatgtgttggttagaaattattagaattatggttttccctttttatttttggggttatcaggagtagcaaagccccactatactagaatactacgaaatggtatgaaattggtgtaatttaaaacttgaagtaggaattatgcttttgtgaactattataaatctagtcaggcgtttgacctgtgtcaggataaaaaaggaagatgttgttgaagcattttctttttccctaattgcatgtttgctatgccctgtttctcgctgtgtttgtgttaatttactcctttaataagctctatattttgtttatgataactttttagggtttcaaggg

SEQ ID NO: 19659 - DNA, 632 bp, Glycine max
  Intron number 3 from transcript Glyma14g08220.2 (locus Gly ma14g08220) derived from phytozome v7.0 (chr-ID Gm14; pos 6249135 to 6249766)
aaacctggtagtgcacctttccaatgtaacaatcagtatatatatatttatatactcacagataggtttgggtgcagcatgatttttgacactttgaaagttggttatatgaattgttgataaagttcttgatatgaaatgaaaacactcaattatggctcccaaattaatttaagaaatacaggatcttaggtcatcctccaacaggtgaataatgaaggaatgggtaatggcagaattaaatgaaaccctgtgaatagggtatttttctatatcattgttcgataacagtcttgtttctctttggttttttaaggtcattctcatttccataacacattgtttaatagtctacagttctgaagatttattggtctagtacgtattatcgcatggtctcaaacaaactcaactaatgatcctctcacctccaatttatttatttcacttctactgtgttaaccatgttaaatatcacattattttggtttcctctttcaacttaatgagttaatcctcttcatgagatagtccactgcactatactttttggcttttcataagtataatttcctgtgtctccacttacaacgagattgtctaatatattttatgaacagatagaggtgaag

SEQ ID NO: 19660 - DNA, 744 bp, Glycine max
  Intron number 6 from transcript Glyma20g24380.1 (locus Gly ma20g24380) derived from phytozome v7.0 (chr-ID Gm20; pos 34063596 to 34064339 reverse strand)
aagaatccgtaaagaacctcccagctttgatatgcatgtctatttttgtttgtttgcttgcttatgcagttatgctacatctatttaggaaaaagggtaaaataggtttttggtccctctaaaatttctcaaatttggttttagtcttccaaaaatttttgccatactttgactctctaatttggaaacttttggtcctcaaagtggttataattaacatttattaacggttataatttataaaccatataaaaatatactttgaggataaaaaatggagtatttccaaattagagggatgaaaataggacaatttttttggagggctaaaaccaaatttggaaaattttagagggaccaaaaacatattttactctaggaaaaataatttatgaacatttcttgtgaagttgcttattatttatgtatctgctagaaaaactgatgccttatatattgcatttgacaactgttgattggagatataaacaagtgttatttacctaaaaaattcagaatgtacagatatcctcatattgcatcaattgttgaatgcacaataattaaatgtgtaattcttcgtgtaaaaaaatttaacattcaccataaaaaaatttcttttgtacaaaattctaaataggggtgttcctgttgcagtagatcatgatatatgtattttaacattcaccatttcttttttctttggcagtctcgaccatttggagtatctcttctcattgctgg

SEQ ID NO: 19661 - DNA, 1026 bp, Glycine max
  Intron number 1 from transcript Glyma20g24380.1 (locus Gly ma20g24380) derived from phytozome v7.0 (chr-ID Gm20; pos 34065267 to 34066292 reverse strand)
ctctcctatttggcattcgcagatcgattacgaaggtagggtttttcctgtttgaggtttaattttatttccccttccctcacccctctttgattcattgtatgttgacatataagaatcttgtcgttgtcaaaactttggttggatgatctgatgccgtttagtcaatagtgtgtgtgatttttggttacatgagagctcgtgcaccagctatggttgttactttactcggtgaatatcacatcacatgggttgattcatggaggcttaaaggtgaagagatactgcttatgcctgaactgagtttgttatgtaaaaaaataaaaatgaggtgggcgtgtgtgaaagagacggaatctgagagagggtttgtttgtgtgtaaatgtttagagggaaaaaaaatcagagggtgagagaaagcaggttcgtgaaattcagagctcggtttgttgtggtgaggagagtcttggtttctgtatgttttaaaaagaaatgaaaagaatcagttgggggaggtagtgtggaagaaattgaaaatacccaatgtcatctgttttatcgtccactgtagtattgcattttcacgtatattgttttgtttttcagaggatggtgcatgaataggaaataggtgaacatgttagattattatcataagttctaccatgcttgtgttagatttgtaatgttggattaataccatcttgttattgtaaattctaccgtgcttgtgtttgattcatagtgttagattttaaattttaaattgtagtgttagattgttagatccacaaatgtgttaaaagtggtgaacagtaatcagggcggggaaggaaaaacccatcctcgccccattgccatgcctacaaaccccagtgaggagcaaaccgaatgcctcttcactaattcccaatatccccaaccccaaccccaaacctttcccattctttttactctttcccttcattgttctaatttttttcttcaaccattttatgcagtaatttcactgaatcttattgaag

SEQ ID NO: 19662 - DNA, 786 bp, Glycine max
  Intron number 1 from transcript Glyma15g09720.1 (locus Gly ma15g09720) derived from phytozome v7.0 (chr-ID Gm15; pos 6951597 to 6952382)
gaaatgtaagtttttttgctttctcagctttccaatttttagttcatttcaaataatttctcctaatttaattatctcaattctgaaagtgtatgatctttctttgcccaatgaatttcaatttgttctaaaactttgctgattatagtttatgaaacccgttttttatccttgaatagtaccaactaccaaccattggctggaagaaaataacagaaagattgcaccttacattgattttattgtctcattcttattttcagatttgttttccacgtgggattttggacccacgagttcatgttcatgaagaacatctatctttcagtgaatgacaacttcagatgccattgctccatggtagactaccatctgtaatggttgaatctgccatcaattcatagatatataggttaaacatctatgattgtgttcacttaactcagtggtttgttttaccatgtggcttatcagtagtaatcaatttcctgaattagaaccacaaaattctaaacttctataataattacagtactggtttttaattatcgatttaagtacccaatttattttttgattgttggcttcaggtaaaacaatgcagtccttgttttcagtaaatatagtggtttcattccatctgtcccactagtactgttctattctgtgttagtgctaatctcttgggttgatcttcttttcactgggcatatcataaaccattgttctttatctttcttgatttattaacttaatatgaatatttctgctgtgtaatcagatcat

SEQ ID NO: 19663 - DNA, 392 bp, Glycine max
  Intron number 1 from transcript Glyma16g19540.1 (locus Gly ma16g19540) derived from phytozome v7.0 (chr-ID Gm16; pos 21601235 to 21601626)
gccgaaaccgccctcagctccggctaccctctcccgtaagttgctttactctctttttttgttcttaccaacgagcgcatgaatcaacttgtacggaattgtttcagtcgtgtctcgagttcgagtctttttagtgtgttagtttttgctagcaggaggaatagaacctgcgactttttcccccttcccttatttcttaaccatccaaccaaccttgtatctccttcgagtgagttgatatgcaactgcgataagtaactgactcgaatagaattgcctttagcagtgtattaaaaaaataaacatttattcttcccactaattgctttgattcaactctaattattaaaattgcaggaccttgcctgctcagaattcaccacgtgtctcgt

SEQ ID NO: 19664 - DNA, 689 bp, Glycine max
  Intron number 2 from transcript Glyma15g07330.2 (locus Gly ma15g07330) derived from phytozome v7.0 (chr-ID Gm15; pos 5147079 to 5147767 reverse strand)
gatcaacctcaaagaaagcgacctgctctcgctaggtcgtcgacacttctttctacttcttcattgttttgttctataagctgcatgtagttatcacttagaaatatactccatatagattcgttctatgtgcctggtccaaataagaaccttggtaggttcattaattgaaagttctgtttgatgggaattaagcaatatgactggaataatgtcctgtttggaccataactatgtggaatggatatagacatacccatagttttattcagaatggatatacaattatacacttctactgttgggtttagtagggaggggtcctgaccatattaactgaataaaactaaatataagtaatttttaggataaaacttagacatagttccttaggtactcttggtagttggtactgttcttatatcaaaattggagtttcctcttggtaatctatgttgattttttatgtagacctttattgtgtggattaccaaactgaaactctaattttgattggaaaacaacaccaaccacatctatggaactgcgtaccttgttattagggtattaacactaatatgttaatctgttaaagcttaatttgctgatcaatgcatttgttgtttttcttcatttattcataccaatttgcagtgtaattgttgaagccctgaaggtggacagtctgc

SEQ ID NO: 19665 - DNA, 861 bp, Glycine max
  Intron number 2 from transcript Glyma17g12290.1 (locus Gly ma17g12290) derived from phytozome v7.0 (chr-ID Gm17; pos 9314153 to 9315013 reverse strand)
gcaacatttgcaagtgaaggcccatctcgaccagtgtatgtgtttttctttttcctggttttgaattgccatatggtgtggagaaattgtagaaccaacactaactattgtttttagggatatcgtattttaactcaatcttagttttcttgcaagaggagtattaacaagtaacaatacactcttcttaaccctatattcaacatgctctttgttattgagggaattacatgttatgttggttctactaattaacctggatttgcactctatttactagtgcgcacatgctacttgcccaatagtagaaaagtttaattaatattttctgttagtgttaaaaaatttctacattcaatcaatcagaagttatggtagatattacttttaagatggttattgtaatagtcaacaaactcatcatacatgactatttgtgattggatgacaatgtgaaatccttttacatggttagtgcataactattttcaacatagaagagtgttgccagcatttcttctgttctccacggtttctgtcataacttctgattgattgattgattgtagttgccagcatttcttctgttctccaaattcaatttgccatggaaatacactggggcaaattctatcgttgatctgcatgaattttcttctactttgctcattttcattctgtcatagagatgactaatttagtttgatatgctattattaacttgagaatatccaaatgctgctctactttattatgtttcctgtgatcttattatcttaatataatacctattgatttctggtaacttgagtggctgaactttgaaatcatttcaggtcctcggaaacaagtagctggaag

SEQ ID NO: 19666 - DNA, 907 bp, Glycine max
  Intron number 1 from transcript Glyma20g28170.1 (locus Gly ma20g28170) derived from phytozome v7.0 (chr-ID Gm20; pos 37128011 to 37128917)
cgacacagttttggatactccggaccacccattcggttagtcccagattaataatatttttgtccttttcattgccctcccccactcttgtgttcaaacttaatgcctgcctcacagttctctttacaacaccacggatttcactaaatatgtccttttcattgattctcgagggttcttgatactactccagattaaacttcatgcctgcctttttgttcatttggtgtgttttttttaatgtagtcaatgtgaagtttttttctttcctttctccttggtgagaaagtaaaacaacctttaagagagagagagagagagagagttgtgaatgagagcatgttatagttacaacttacaattataaggtagttgaagaagcttatggattaaattcagaacagaaattagtggtttattataatgtcgtccaattacaaatcatatgtatatattactttttaaaaatcaaattaaagatgatttttggttcatgttataaatttttttacctttacactgaacatgataattaagagaagttatatggtaacttgataaatctaggagtttttggtatagttagtttttggatcaacagttacatgagttcttatttattgaagtcaagtcatttgttttgtcagacttcattaaacgagaactcctgcaacttttcgtccaaaaactaattataccaaaatccctaaatttatcaggttatcatagcaattagcaactctcttaaattaaactcttctcatgtataagttatcacgaatgatgtattggattttccgagtttgctttttactatgaaatcatttccttattattcttttttgttgtttccctcgtctcaaatgttgaatatgtgatgcttttttcttttgggtcaggtatcctg

SEQ ID NO: 19667 - DNA, 531 bp, Glycine max
  Intron number 2 from transcript Glyma20g37660.1 (locus Gly ma20g37660) derived from phytozome v7.0 (chr-ID Gm20; pos 45481292 to 45481822)
gcttacaggtttggttttctttgctcatttttttcactcatttaaagaaccatgaagttttttctatagtcctaactcctaagcattatttttaagtttctagggaccatctttatgactaaatgaaatttaatgtgaaaacggaaaaagagtgataatatattactatgatcattgtcatgtaaattgtggcttgttaggctaaatcttatagttggaagtaatataactttcgtaactttcagtcagtcagtagattatatggaaatgacaaggctcctcaatgattattttgtctctataaagtatttgcgtaagggtgtatctacccttaaaatttagtgtgttaagaccacgatgcagtttaataattaaatggatacttgctcagtttagctcactttggtggagctctctctacggaaaatgtgactatgagcattagtatttatttgtagtcagacatgtgcatattttgaataccttatttctattcctcacataacgaagtattataatctggcagtataa

SEQ ID NO: 19668 - DNA, 484 bp, Glycine max
  Intron number 2 from transcript Glyma20g31750.2 (locus Gly ma20g31750) derived from phytozome v7.0 (chr-ID Gm20; pos 40352275 to 40352758 reverse strand)
gaaattgctcccaaaattcaacaagttatagagtaagtcaaaacccctctatcttttaatattaaatcctctaggtcttcttacaccttacttaatgagatttactcgtaatttttcagttctcaataaattttgattaatagtacagaacaatagagaatgtgttaaaagaaaaagtgtgttaaagtatatgtgttgataacatgaaattttgattaccattgaatgcttggatcaattgacgtggggttattctagcttaaccagtggtttcgactttgagttctgagtcttaggcatgcagctatgtattgcctccaataaagaataactgtggattttttaggcctagcattttgtttctgacttaagattttgtttttttggtgaagattgtttttgcagtgagccaaacttttgaatttggattgaactgtcttgtgtggcaggtttggacagctgcagggtattgatcttgaaagtg

SEQ ID NO: 19669 - DNA, 427 bp, Glycine max
  Intron number 1 from transcript Glyma20g31900.1 (locus Gly ma20g31900) derived from phytozome v7.0 (chr-ID Gm20; pos 40494134 to 40494560)
tctccaatacaggtacaattagtttttttttaatatgcaaatgttagttgttagtaggagaattcaaactcagagtctcttcctcctccttttttgttcactgtcaaactaaccttataactcttaccgatacacaattagttatgttatgtagcttctttcaattttggatttgtttaagctttcaattttcgatgtactcttattggcttcctatgtgtgtgcaaaataaaattctaaatcaatgactaaaaactatgagctaatgaactaaaaagctaaggtagttagctagaaatagaagatttcaatatttagtggactagtgatgagtttttttttccttcttctggttgttaacgctactaatttcaaatttgtctgatcattgataagttatggttgtattttggattatgcagtctgg

SEQ ID NO: 19670 - DNA, 984 bp, Glycine max
  Intron number 2 from transcript Glyma15g08670.2 (locus Gly ma15g08670) derived from phytozome v7.0 (chr-ID Gm15; pos 6134583 to 6135566)
ctgttatcactcttctccctccctttcatactaaggtatttgtctctcttttcaatttcatcttagttttaacttcctttgctttcatttaggtttctgattagtaaacatttcaatcgaattgcacttgcacgaatccgtttcttatattctgagcgaggggtagtgctgtcatgttaacactcagctgattaaccaccctcctgcccacgagttccaaccttgatgggcttggggttctaattcaggattcttaataacataagttatgttcagcaatttcagagtatgctagtattttcctatctttctagtatctcactgtctttatagtatttaggttaaagcttatgagatattttcaattacaaagctctaatattaagactcttctaaaacaagaatgcagagttgatctgtgcttatggagaaattggatgaggtagcttctgaaaaggttgaggtgcttaagttggttgtagtatgagaagtttaattcaattttaccttcttgatccattttatttttttattttcttcttgtgtgtgtaaaaatatagaaattaacttaaatatgtttttgattcctaataaatatttaatttttacgtttgctttctaataaattttttatttgcattgagtttctattgaaacaacaaaacacaccattcgttaatttatcaactaaaaaaagtgtcaatgaccaaaaataaaattattgttatattaaaaactcaacacaaaacaaatttattaggaaacaaacacaaaaattgaatatttattagggataaaaataaaatttaacttgttttgagactcattaactattaaggcacatattatccaggctcaagttcatctattagttgtgcaattttacaattttattttagtctattattttctttgatgattcaatccgaatatttaaatatatgcatagctcaataccctgacaaagtggttttcaaatgcagt

SEQ ID NO: 19671 - DNA, 914 bp, Glycine max
  Intron number 1 from transcript Glyma19g02490.1 (locus Gly ma19g02490) derived from phytozome v7.0 (chr-ID Gm19; pos 2227008 to 2227921 reverse strand)
cgctttcccctctttcccacctcatcactttcaaggtcagaacacacacacacgctcatcatcttcctctcttcaagtgtaattccaagtcaattcatgtatatttttattttattttaatatatatgaaggtctttaaaaaacaatttgtaactgtgatttcagacataaacatgattttttttttactctatggctctataatattgcatcaactgtttttatctgcaatatcaggaatcacaaggaaactgtgatatcaaccacaatttgaaaacattgatctcttatataataatcaagattctaaattgtgaatcacagtttcattttagtggttgataattgcggataaatgtagtaaaagatccttacaacttttctttaggttgagatcacagctgtgggtattttttaaaatcttgataataatattagcccggaaacgattgtttttctcttctaaaaataatatgggatatctgataaaaaaaagttattgttttttttttttaagaatacaagataaaggaagaaggtatactgaaaaaagttaaatgaactcctcgtaccactgtccaacacttagaaatagaataaaacatatagatacaatagaaggaatgatgtgataaaaagaaagataaaaaaaaaacgagggatgttagcatagtatttaaaataatcaaatatttatatatcattactcatgagttatattatgaatctgtttggataaaggttaaaagtgtttttgagagtttttttttactgaaaaaagttttatattttcagtagaagaactctcaaaatcacttgtggcgtgtatcccaaacaggaactatactatagaatatgctggtgttaattttgtgtggttgtattcatggggtggtgcaggtgcaggaggttta

SEQ ID NO: 19672 - DNA, 995 bp, Glycine max
  Intron number 1 from transcript Glyma20g10360.1 (locus Gly ma20g10360) derived from phytozome v7.0 (chr-ID Gm20; pos 14534516 to 14535510)
ggttggttacttggttcaattaatcttgagaaatggattgcagtagtaataatattgagatccctgcatgtttgatttcatgtgtactgaacacctgtatcgttataaacttaaataatcaacacatagtagttctatggtgaaaaatttaagtgcaaagtattttgcatgttacatgatccaaatgaaaaaggtggacttacagtggtttgttttgtgatattttcttattttttgcaaaaacttacagtgttacatcctggactgttttgagtacagaaaaaagatgagatacggggatgttgcttgggaatttgtcggagataggttttcttctggcattcctatagttttcttcttgcaaggtgtaaccatcaaggacatttcattgatgtgtactgaagaggggattataggtttgtgtttaggcagttagacttaaaggccaatatgaaactttgttgaatcttcgtaactagagtcaatgatacattggtctttgatgtagagagtggtattgattgatccatgtagctgattctaccatgtgggatatgattactttgtacttgttctattgaacagcttcgactgttttattgtcttgatgtattttgtttgtccatttttttgtctgatgtcgtgtttgatttgtgctcaagtcttgatggtgcaattttagtcttgttccacttctatgggtttagcgtgtcatacccccattagaagaacagtatgctttgtattaagcagttaattcgtagtgccccaagatgttggatgttgataatcacttaatcttcataattcacatctggttatggaattaatatattttttttcaaagtattaaaatctcggaagttgatccatgtagccgaccccatctagtgggataaggcgttgttgttgttgttgttgtattaaaatctaaatgcttggaatgtacgataatttcacagttatgttcttaatcacaggataagccatcggca

SEQ ID NO: 19673 - DNA, 286 bp, Glycine max
  Intron number 2 from transcript Glyma15g02890.1 (locus Gly ma15g02890) derived from phytozome v7.0 (chr-ID Gm15; pos 2020363 to 2020648)
gccctggcctcttatttatcttggttgtcaaatatatcttgaagtttattatctggtgcaaaaaatgttattaagcataaatgcaaatcaaggacagtttctttgatatctgttattatgttaattcattaattttctgttgtttacttgtgtgtgtcctaaccaaagtgaaagatacaattcgaatatagtggaagatgaaacccatgttgttgctttttctatataattttctcatcctataattttttttgtcaagagtcattttttaattacttcagcaaat

SEQ ID NO: 19674 - DNA, 1040 bp, Glycine max
  Intron number 1 from transcript Glyma15g37780.1 (locus Gly ma15g37780) derived from phytozome v7.0 (chr-ID Gm15; pos 43737216 to 43738255 reverse strand)
aatcatctctctgctttgaatcgttcagtaaacaggtaatcttcaaatttcgctgtttcgttgtttgcttggctagtagtagtagctgattgatgtaatgaatgcaatgcaagaactcttaggcttctgttcactcttttgtgttgagatttaaacatggaataagatgcataccttgtgtttgattaatgttctgagataaatgagatgacgtttgtctgatgcatggtatagtatgtgtgtacttctgtcactacccttccctgcataattattagcttttcattcccactcccacgcattctcttttccatccgtgtgaactacactaagcaatttcaggggctaattttttgtttgttgttgttttaatgataatatgtcttgacgtttatgaattgatagaggatcttgggtatttgaatgttgttgtctattgatttagactgtgatttacctcaaacttgagacataattagggtagtcgaagatagagtggaaattgtagcattttattttttatttttgctgtgtgtcagtttcgtttggtccttaactgtgctgaataacatagtacgatttatgtagctgacttcacatagtgggttaaggctttagttgttgtagttgtcgttgtgtccggtgtcatttggttggcaactgagaaagtatctaagattaccatatttttgggcctgctatttttgaaaagttaacaccaaagatgtatcaatataagctaaatagctatgagttgttcatcttagctcattttcaggcctgatttttcatttttgtttgaaagataactatgtaaatgctttgtttacaaatagctaaaagatttatctcaattaacagaattcaaacgaccatcaaatagtatagacatattaatttttttactaatttcagagtccattagaatattttagcaacctatttaaacattcaatttattataaagatttgctaatttaattctttcttattgggtaatattttaatgagacattccacttcttcagggttatcaaaga

SEQ ID NO: 19675 - DNA, 1045 bp, Glycine max
  Intron number 2 from transcript Glyma17g13050.1 (locus Gly ma17g13050) derived from phytozome v7.0 (chr-ID Gm17; pos 9965164 to 9966208 reverse strand)
aagggtttctgtcatttttcaaaaccctacctgatgtaagtatttttttcctccatcgtcgtgttccattgtctctctctcggaattgagcatgactctctctcgcgagagtgtcattactttacttattagcattatatgtatgtgccattttattttttattgctaaaagtataaatctttcatccattatgctcatgaaatttcacattagcctaacattgttgttttgtttcttacttcattgaagtgtctacaaattaagcatatatcaagtatcaaccacttcgtcatatacttattcttgtttaaattttctaaatttaggcccagaagcagctacatgataattacttataacttatttagaccaattaaaataattttctgcacaaagttatttagaaagaatatgaaattttatagtgggtcaatccttccccaacttatatacgtagtagtgaatattttaatgtttgttgttttccatgcctattattttacatgtaatggaatgtccaagcattgtttaaaaggacttttggatatatgggagaggatgaaaacttagacaaaaatgatgaaatgctcacttcattgaataaatcattggcagcatacattaaaataaatatacagctatatcaaaggataagaaggaatctgctaaaaagacacctatgcaaaatgacagctaataacagctatacatgacagctgcataaacagctcatagcatcaacagatattctagaaactgctagaaacttctaggagcaatattgagcttgggcctgatgagtgggctggcttggtgttgtgggctgcttttctgatattgttgtttaactaatttttcatttcctcattgttacatgaaatcaatgccatgatgaaatggcatatgggcatgcatgcacacaatccattttctatccctttaactcacgttttaaattggtattgttcgttttccatttattatgtttattttcatgtttctgctacaggatccaagggctgtacggttttttgatcgccgggt

SEQ ID NO: 19676 - DNA, 765 bp, Glycine max
  Intron number 1 from transcript Glyma17g12060.1 (locus Gly ma17g12060) derived from phytozome v7.0 (chr-ID Gm17; pos 9091610 to 9092374)
gaaacaaaattcactctgttttctctcctccttcattgtgaatctaaaaaatagcctagtgtcatgccaccctctctcaaatgctccatttgagtcttttcccgctatacgagtcttctctctgtttctccagcttccttctgaatccgcaataagtttgctgtgattctgggtttacttcaaaattaaaatcatgacgttttctggggaaccttttttttttgaaaaaaaatgaactttttgtggcaggcatttttatggagtttaattatgatgtgggtagttaaaaagatggatatttttcagctttctcagaaccctttttctccatcttcatgtttcagcactttaagcatagctaacttcatgattcctttgaaggaacgtggggtacaaagaggaaaactaaactagttcctcttgtaaaattctacttttcattccaaggcattttctgaaatttgaagtttcaaagattttgtagctgaaatcaaggatttttgtgttatgatggtgcttcaattggcattgtcagatccaaaaccaagctaaatgcaattatcatctattttatttatggattatagcattactctttcaaaaaggaagctttcacattctttgtattgatgcagcaaccgagacaagatacttgaatgctagcaatagagaactatgccctccaaatgaagctcgattatcttctgataatcctgatcccccatctcaggagaataaggttccttgccagctccttcaatttac

SEQ ID NO: 19677 - DNA, 538 bp, Glycine max
  Intron number 3 from transcript Glyma20g29480.1 (locus Gly ma20g29480) derived from phytozome v7.0 (chr-ID Gm20; pos 38337388 to 38337925)
attttgggctctatatctcaggtgatgtgaatcaataacaaacttggtattttttttctctccttaatctgttttcttgaatgacgttttggatggcaatttgcagtccaaggcagcaggagttgtagttgatttcactgacccttcctctgtatatgacaacgtaaaacaggtttgatttctggctggctagaaatttaattagaaggaatgctagttacagcattctgtatcacctcaattcttttacggcagcaaaaataagtttaacatcagcatacataaatgatttatgtttatagaagtgtgtatcttttgtccataaatttagtactagattagtatttttaaagagatgtttcatagcaaaagaaaacacaactttgactgtaagctaggatagttggacactaggacaagattgaagactaacctcagaagttatagttgtgacattagactttgtattttgatactagtttcacatgtgccaagtgttaaacatcaactcattcttcattaggcaacagcatttggc

SEQ ID NO: 19678 - DNA, 679 bp, Glycine max
  Intron number 2 from transcript Glyma14g03970.1 (locus Gly ma14g03970) derived from phytozome v7.0 (chr-ID Gm14; pos 2652603 to 2653281)
tctcaggtatcgtatcgtttctctctctctctcttcgattttatgcagtaattgaaaactgagaactaattgtgctggtgagggtgtggctgaacaatcttagcaatggtaagaattaataagttaataactagtataattgcatttaattcaacttcagttcttttcttcctttttcagctattcaaacaccgcgtaagtccaatgaacaagataattgttccttagaaatgtaatatagacattaaatttgtggttaacgggacaaatacatctaataatgattaatgagaagcatttctatttgatatacactttgaattttacattttgtacttaggtctagtttggataagcttctatataagcacttatacgagaagaaatagagaaataaaataaatcaaacttctcctgtaagttaaaatctagtcttgcactttagcttttagagaagttattataagagagcttttaaaagtaaagctgtatcagactataagttcattttaacttctgacttgtgagagaagcttgatttattttacctctttattttcttctctcataagtgtttgttaagaagtttatctgaattgggccttatgtttatttgatttgcttcatttttctgatctcgtgtgttctcttttcttttgggttcttgaacaggtacgga

SEQ ID NO: 19679 - DNA, 709 bp, Glycine max
  Intron number 1 from transcript Glyma19g00460.1 (locus Gly ma19g00460) derived from phytozome v7.0 (chr-ID Gm19; pos 262215 to 262923 reverse strand)
cccttgacctgcaaaaatttcttgaagctttgcaagtcagtcctccaaaccctaacctctcttattttacaatttcctgaaacgaaaacccttttgcgtcttttctattcagacgaaacaccccgcttggttttcttttcttctttatattcattttttaatgcttatggaatcacaccatgctttctgttgctatgaattcgttatgtactctgtggttcgtgtgtttataattttttcagggttataaattgctctgttgaggatgagatggagtgatagacttaaggtccattaggaagagtttgtttataacttttttgaaattatcttctagcaatagaacttctaagtgtctgagagagcctatgaaaatagcttaataagcttatgatgtttcataagttgttagccgctcattttaattttttacaggatagcttatgaaaacaacttccagcttatatggaaacaacttaaccttattttctatttgattttgaaaaacaacatatgtaaaaagtgcttatatattaaatacttattcaataagtccttaattaagtttggccaaatgggtccttattgttattattttattatttttaaaaatatgcactgttgtgatatttgcatatattgatgtgtgttcaaatcatgacgtgctctttgttggtctgtaattgttgagccaggattaagtactata

SEQ ID NO: 19680 - DNA, 848 bp, Glycine max
  Intron number 1 from transcript Glyma19g06150.1 (locus Gly ma19g06150) derived from phytozome v7.0 (chr-ID Gm19; pos 6914954 to 6915801)
cacaggtaataaatgctaccagattgaatttattacaattttgattataagttcaattttctcaatcatagattttttgtttacagaaagaatcatagatttatattgattcccttatttgaacaataaagatttatatggtgaagaagagatttattagatgaccgtcaaaaaaagaaaaagatttattacatgtaataactgatacggtatggtaagaagagagaaataatctaattaatagatagaaaaataattataattaatcatgtaaatattataataattacctattaattacatcaatgataaccaatttattctaaaatttattacactcaaatcaatcaatacaacctctaaatattgcattgaaatttatattagattaaattaaaattaatttgtaaaaagatttaatttaagataccaaatgttgtaatcaatcaattatatcaataacaaattgatttgatttcgtggaggatactttaggttgggtgttaaatatatcactaatcagggcaagacagggagaaagaacctatcagagcatattcttgtttttttttttaccgttggcggaaggtgattaatttttgttggagagtctgagcgtacacacaagataattattctcttcccaatataatttattttatatctaagggtcaatcaggaatcgaattctagaccacttgattaaggaccggatacaagtcataatcacttctctcatcagttgttggtattgaaatctgttgtttatggctttatttagtttaatgttatagaccaggtactatcttattgacagattttttatgtatgtggttgttttgtagaaa

SEQ ID NO: 19681 - DNA, 540 bp, Glycine max
  Intron number 1 from transcript Glyma18g47420.1 (locus Gly ma18g47420) derived from phytozome v7.0 (chr-ID Gm18; pos 57081768 to 57082307 reverse strand)
gagacccgttcactccgttttcggcgccggaaaacgtaaaactttttttttgttcattttttcttgctcacttatttttgttgtcgttttattgcgttttgggttttgtgaacagattcaatgtgggaatgttgtggatgtaagttgtaacatgttaaattgtgctttgtgtttctctttgaggctccttgaaattaatgaggttttctcaaaattgaatttttttaatgttagcgaccttaccctggttctagtttattatatgttacgttttcaggtggttttaattctagatgagtcgagtttagcttatataggcatggttttgaatgatgataaatagcttgtaatgtgaatttgactagggctgcataggtgaaaattgggatgttaagtcaagaattgaagagttgtttgatgaggtgtcattgaatggagaattgtatgcgattgtgagtggttttatagagtgataaatgaagttgcagtctgataatatcttatggctttgtttttgatgacaatattttgcagctgctg

SEQ ID NO: 19682 - DNA, 1033 bp, Glycine max
  Intron number 1 from transcript Glyma19g44870.1 (locus Gly ma19g44870) derived from phytozome v7.0 (chr-ID Gm19; pos 50178127 to 50179159 reverse strand)
gagtttctctgggggttcttggagttatttcccaggtacgtacctatatatctatattctttctttttttaatagacagacaacactttgttttacctttctcatttctgatttcaagcagaaataaaaataaatttatatatattcaagcagaaattaagtggtcgatcatgagactaaactttttttaatagatcttactttgtctggtcatcaatatttcttctatgcaatataaatatacaatactattttttaacaaaaacacgagatgcttgagccagatcggttttaataactaaaattataagttatataattttttcacattttaatctcatgcagtcatatctgattactttattttatatataaagataaatctaaacaaaataaaattgttaaaaaaaggaaaagaaaactaagtattacaacgttccaataaatatacattgagagtgaaagagtagttttatgtcattgtaacttgcctttaaattaaaaatggcaataccggttagtacgtagatagcttaagattgactatatatggaacttcaacttgattttttttttttgagaggacttcaacttgaattagtcagcattttctttgtcaaaacttgaattggacaaccaatttaaaacatagccaactaataataattcttttataatattttatggtcatttgtgattgaattataaaaatatttttttaaaataaaaaaccgtgtaattatgtagcaatacttttttacctcaataagaatatatagttaaaagcagtcactttttcttatctttaactaatgcaacacaatacaagagttgcaccccttctcctcccgaaaaagatacaagggagggtaaccttgaaaacttgatagttgcttgtatttctaccatttaccattcagttttcaagtcaaactactacaccgagagttgttggattgttagtctaactgatacgtttggttatcacttttgtgcaggttaccctgaaattagagcctctcttcaagcgatc

SEQ ID NO: 19683 - DNA, 565 bp, Glycine max
  Intron number 3 from transcript Glyma16g04950.1 (locus Gly ma16g04950) derived from phytozome v7.0 (chr-ID Gm16; pos 4251869 to 4252433 reverse strand)
agatactccattctctggaacttgtatcagattgtgtaagcacacttcactcaaactctttcatacccttttttcatttttcaccctttcttggaaatcccagtcttatacttaaaaataatgtatataaatggagaacaaacacattctaaaatgagttagtgttgtagttaaattcaacctaaatctaaactttaaaatggaatcagaacctataacagttgtttgcaggacattccggcttgcaaattttaaactttatgttgaaacttggaaatgctcactcctcctccatctgccaatgatgggaccaaaataacaaagtgaaattttttaagattagactttaaaatctaagtaaaaacttgcagatatatgattaacattgatggttggaaaggaaaggttcaaatctttactactgatatttttactaaaactagaagaataatatttattggttaaaaggaaataaaaaaaagaacttgtgagatgtttaaggagaaagatttgatgttggggatgtgcaggttctttgtggacgaggtgccaatcagggtgttca

SEQ ID NO: 19684 - DNA, 1002 bp, Glycine max
  Intron number 1 from transcript Glyma14g10690.1 (locus Gly ma14g10690) derived from phytozome v7.0 (chr-ID Gm14; pos 8888439 to 8889440 reverse strand)
ttcttcgcaagtctgtttcttctttctatccatgctaccattgcattcttttaactcataattcttttaattttattttatttgttataatgttagttttattaataaagatgatcactatcttttgactcttcttttttttcatttaactattcaactcactttatatattcttatttaatacttaatgacacacaccaaacaatgcaccactctatacttaattttcactctcagagttgtattatttgtaaaaaaatttagggtttaactttttaattagaaatcattctcaatataaatttatattaaaatggaaatgcattccaatgaaagagtaaatagtgtatgcactaataatataaaagaacagaaccaagaatattttttatagtaattatcttaaaaatcagagccatgacaattttttattgattcataagaaaaatagtagaaacacactttaattcaccccttataatactctcatcaagtgaaaaataaaattgacacagtcaagtgttatgatgttaacttatattcttttaaaactcaatatcataattaaagcatattattttgataaatttattgaaaggatgatattcaatgataatgtcattgtagaaaatctactcattagtggaaagaggaacttttaaaaatttatgatttctaataaattttacatgatattatcctgaagcttttggttcttatgatacaatttttttagtcaacttgatctaagaagacaaggctttgttgttattgtagtgttgttgtcatttatattatcttattttatatatctttggttcttttctttcaatttgtctcaaaatattcctcactttagaaattaaaaataccaattttttttattaatatatctctttgttaatgtctcacctaatttcttaattaaaattacaactacaacattttatctcatttgtaacatgagaaagtgtgtgtttggattcaaggctaataaaagta

SEQ ID NO: 19685 - DNA, 516 bp, Glycine max
  Intron number 2 from transcript Glyma18g01200.1 (locus Gly ma18g01200) derived from phytozome v7.0 (chr-ID Gm18; pos 617698 to 618213)
tagttggattactgttgcaggtgggcttctctgacttgcataagtaagcttcacatgggataaacatgtctaggttcttaaagtaataatggtgttggtttatgcggcatggcaagttccttttttttcgtttgactttttggggtgtcattacaatgtgagaagagttcattgatgtttcatgtctgttaaccttgaacatgtattcaaggacacttgcatgatcaaaatgtattcattacttacaattaccaaattgctctctcatatgaaaatgaaaagggcataactaagcatcaacttcagcaacatcttttattgctaccatatgggacaacatgaagcatcaaagattgatccaactaattatataatctacttatctgtaaacaaaatctaattgtggttggtcaagtttctgcatcaagtacagttattttgtactgtacaatcataatcattttctgttttctgaaaacaggttggcgtaaggcttgatatcaaggtcaaacttgg

SEQ ID NO: 19686 - DNA, 461 bp, Glycine max
  Intron number 1 from transcript Glyma15g01710.1 (locus Gly ma15g01710) derived from phytozome v7.0 (chr-ID Gm15; pos 1134477 to 1134937)
ctggcctcaccatttccagcctcgccattcctcaggttcacaacatttagccacccaaattacttttctttttcaaacttctatatcactaattttactttttcttatatagcatgttttagatgtgatttttcatgtttttttcttttaacttgtatataaattgtttcgtccctaattttacttttccttatataggtatttgattgcatgttttagatatgatttttcatgtttcgaacatgattatcaaagatgatagttataacttctgcgtcttaaatgtgatttccctattctaggcgagtttccatacaccaccccagtgggagtctctcttttttctttttcttcaaacatagcatttcacaaactctttaataattgacataaacttacttacattttaacgcgtctgaaagtttcaatgtttgtctcttattctttgcagggaatcagtt

SEQ ID NO: 19687 - DNA, 510 bp, Glycine max
  Intron number 1 from transcript Glyma17g14150.1 (locus Gly ma17g14150) derived from phytozome v7.0 (chr-ID Gm17; pos 10913316 to 10913825)
tcgacatctacttccctcccacctgtattcagcaggttaccacatctctctctctctctctaaatccactttcttttccttaatttgacttttctttgtttcgaaaatcccatgatttgcacaacgctgaccacatgcgagtttgtttttgctaattaatgtcgattaattaatgaaataaaaagaagaaaaaaaaaactgacacagaagtttagttcggtacacggatttcgttttcggttttatgttgtatgattgaataaatgaagatcattaaaagtgtttctctgtgtaaaaaatcatgagatccccccaaaactgcatccaaaatccaaattatgattattatggcttatacgattaggagctatatctcatgtggtcatgccatttgttttattatctcactgatgtaaattgaaattatgtgctctttttcttttttctttttttatccctttaaatagtgttttcagtttcttcactttatgcaggaattgctggaggctc

SEQ ID NO: 19688 - DNA, 911 bp, Glycine max
  Intron number 2 from transcript Glyma14g22840.2 (locus Gly ma14g22840) derived from phytozome v7.0 (chr-ID Gm14; pos 27168153 to 27169063)
ttaccatttcaggttggtttgtttgtttctcatggttctttctttctatgttcttctcaattggtgtggttagtttttcaagttttgaaaatattggggtgtgtttgattagtttgaaaaagtgtttttagttaaggttgctcagacaactgatggaggaacaagttgtgtctgtgtttttttttaaacaattgtttttagaaacttcaaaagttgataagttttggtcgacagattgattgctgaaacggtgtggagttggtttagaaaacagttttaaaattaaaaagtgagaaggaaatcagactccttaattttggtgaaaaaaatttaaacaactttgctctttaagtttactttgttagtttggctgtcttgtttttttttttttttttttttttttttctttttgtgaataaatagtcttttgggtgaacagtttttgaaccgtgatgctacagtgaatttcgttggtgattttttgattggcttttgtgattgaatcttttctttctctatagatttgtaggcgaggctttgttgtaccaagttgctgttgtttttcatcttcctatgtgttgtttgtcaatgaatgtaattgcgtattgaaatcttcaaatttggttatttaagttgctgaattttcaaagtttgacaagttaaatgattgataaattggttgtttcttttttcaagtccttgataatgtctgttgacaatttgcaatattaatggtacattggtactgcatacttgtgttgcgaaatttctcttctggtaataactattgttactatacggaaagatatggtgtggacaatatattcataacctgttatggattttagtttcttttttaccaaataaactcactgttgtgttacatttctgctgtagaaacggagataggt

SEQ ID NO: 19689 - DNA, 647 bp, Glycine max
  Intron number 1 from transcript Glyma20g32920.1 (locus Gly ma20g32920) derived from phytozome v7.0 (chr-ID Gm20; pos 41528702 to 41529348)
cttttcctattgcatccagatccaatctcagcgtgaacattttttatatgttttcaagtttttcttaataatttcattgtctgggttattttttttggagttcaagttctatccactgtcagtgtattttaacactctcaaccaattacaaattatgacttttaagggacatatggtaaagagttgaatttctatgcatgagaaaatagtgttcacacagtcaaccaatcaaaattcatgacatgatttttaaggtttttatggtaaaggtaaacaaatttatcatacatgtcaatttgtaacggggactttacactgtatggtgcatagactatttaataaaaaatataaaaaaataagagaaaatagtctatacacactctcatctaatcacaaattgtcatgtgctataagtttattgatttttacaacaacggtcttagaaagtcataccatttatgatccctgattggttgacaatgcaaagatttttacactttacattaacactatagaaactaaattctatttttttatatacgtagactgatgcagaacaaactttgtgttgttttcccattgaatttgatatcatttttatttgctttagatttatcaattcaacattttttcttccctgtgttcag

SEQ ID NO: 19690 - DNA, 992 bp, Glycine max
  Intron number 2 from transcript Glyma14g06040.1 (locus Gly ma14g06040) derived from phytozome v7.0 (chr-ID Gm14; pos 4344864 to 4345855 reverse strand)
tggcaggattcaggagtaactatagttcaaacctagtaattctcgctccctttgcttcttcgcaaagttattctaattgatttgtgattttttttttcggttcagcatttggctctgtagattaatattattgtttgagtgagtttccttttttgatgtcagatatggagataatttttctgcattaatttacagtttcaatgttgcgataccttggctcatgttatagttggcatttttaggtttaaacttaagagaattaggtacattggatgcagaatttatttattgtttatcataggaggggtatagaaagagagggaattcataattattggtaacttggcatgggaagtcatggtaaattggtaatggcaactggcaagcaccatctttttttaggctttagcatatttgccaaacctgggctttgaagaatgggctacaagcctacaattggactttcaagccaggtaccttagtgtttttcctctgtctttttggcactaaccacttcttatcaaccttcatgttaacattacatttcaacggatgaaatgaccatggtcttgaaagttgaaaccaaatcgaaaagcaaagtaatatctgcattgcctacttgtatacaaggtagaatttcccttgcctactagtaacaacttacgagctttattgatatttggtaataataatatagactgcataatctgcattttaatgtctctagttgttgctattggtaattggcatgcattgttgtgtgtatatacagtcttcctgttaatgcatatagccacccatttaagatgtgggctaattgtttcttttaatttattatgctggtcctaacccactggtgatggtctatattgacagctactaggtttcaaaaactaatctctaatctgtatattgattattgaataccagatagtagaagaaaaggaacttcagctggttttatttgatagagaaaccactgttacagaaat

SEQ ID NO: 19691 - DNA, 831 bp, Glycine max
  Intron number 1 from transcript Glyma20g19930.1 (locus Gly ma20g19930) derived from phytozome v7.0 (chr-ID Gm20; pos 28198045 to 28198875 reverse strand)
gccagagtgttctactaccatttattcattgtaagtcaattttctatccatttccattttccagtctcagaggccaccagaattattgcatggcacactcatttttcaagtttttcagtttgaatttcagactcagttgtcacagcataatctaacttcattcttttttattataaaaagaaaattggtgagaatttgtaataggtaactttactcctttggaactgcgtatgagtttggcctcatacttattttcatgttgacttacttgaatagtaagtgttaaacaaaataaattaattcttatgatgtatcaatttctcatcatgagatcatgtacaaatcacattatttttctttgtaccctacagcagacattttcaatttacagttcagtaatgaatagtatatttagagggactagacaatcagatatgagactacacaaaacaaagtaactgctggtttggattatatattgatgctgaaacattttctcaaaaaatagaccaattttgcatgtttacagacttttaggtcatcaagtggtttagaccatttgactcatattctctggtttgcttatatgcttcattagaataaacccatatgccattccatggcacacaaatatagatcttcattaaaatgattaatgcctatattcagttaagcacaagaagctagaatttattatattgacaaatatcatgccatacagcttggagtgtgaaggaatttggatttcttgtcaatgataatctggaaatttgttactcattctagttattgatactgttctgatttctacagatatcaaagtttgtggaa

SEQ ID NO: 19692 - DNA, 1041 bp, Glycine max
  Intron number 1 from transcript Glyma19g01050.3 (locus Gly ma19g01050) derived from phytozome v7.0 (chr-ID Gm19; pos 740335 to 741375)
ttgctgcccctgcccccatcatcaccccaactgtggtatatataccaaacactactacactttgatcattcacacattcaaattacacatttgtcatcgaatttaatttttatgtaccatcggtttgtaaaaaatattactgtattaaccaaccagacatcattattcatatgactttcgatatagttgtgataaaattaacaaatttatcatagataatcatttgtgcattgtctggacatatactatttactctttgttgtttttgttttgtgtttcaaattttaagggatccaaaattctcataaacttggcatttttggatcacaatgtgtgtttgatgagttgtcacttgtcacatatattttaacttgacttagctagttgatcatgtgcttaataatctaacaatgtccacgtataaggttgctatgcttgtaaaaggattaagtgtgtcgtttaaagtttagttttcacgtgtaacaccgtttgatttttctttgacatctaccacatgcacattggtagcttagttaggtaacaataacaaagacaggtgtgtggcatggatttgttcatgcactactagtatgtgtcagcagccagaaccatacaattaacaaattattttttattaggaagacaattcataccgaaaataaaaactatatataacgtgaattatagttgtatgggggaggtgtgttagttggaggattctaaggcgaataaagaagcaaatccaacaaaaaatagcaactaattaatcctcggacagtgtaaaatcaaatttccacatttccgaggttttacataataactgaattctgaatatttttttcctttagtcctcccccggcgaattccacagaattttatcatagttactaacttatgctaaagtttcatgtttaggatagaaaattataattagaaaattgcttttcgtttctcatcatttcattttttggtcacttgttactagtttgtttttaaaaaaaactgatacgtaattttattttctttttggagagagaggat

SEQ ID NO: 19693 - DNA, 1011 bp, Glycine max
  Intron number 2 from transcript Glyma14g06340.2 (locus Gly ma14g06340) derived from phytozome v7.0 (chr-ID Gm14; pos 4585989 to 4586999 reverse strand)
aatccgaattctagaattcttgctttgaaaggtacgtgacttgtgagttgtgttctgttgttactaatattctcgattctttatctggtaccttggtattgatatgaattctgtctttgtggatataaaaaatccattggaagctttctttcaacagtttttcttctatttatttttgcttcctttagttgtatcatttttgttgatgagattgttggattaaatgaaacagactgcttaattatgactagtatgacttgaagcatttgaacacgtctagtcatccataatatatctacttctaattccgtggttcttggactgtttctgccacggtcaggtactttatatgcatcctgatcgatagggccacagagctgtgaagcagggatctttgattggtttgagaagttgaaataaactggcatccttattttaaattttatatataatatataatgaagttaaaatatcatgtttttaagtgctataatagtatttgttggaaaaaaggtattgtacattgctctcactcttccacaagaagatagaaggagggattccattagatgaggaatttatttatgtagatactagaaaaaattatgtttaaactaaaactttattctggttaattttaataaaaatatatgaacattatctgataaatattttttctccatttttttttacttttgctaatatatcaataatccccaatttcacattaggcctattagatgtcgcaatcctacatatttttcatgctgtcatcgtttgaccaggttttcagtggttaaaagaaaatttttggtattaagatgagctgcaatgttcatagaccataatgctcccaaatgttgagcagtcttttaagtttttagtttgttgtgcatgtgcttctgttgacgctgcttttgaaatattgtttacttttggtttatcttcacttacaagttacatcattctgttgaagcccaactgcaaggaactactcaagatcacctgcaa

SEQ ID NO: 19694 - DNA, 955 bp, Glycine max
  Intron number 2 from transcript Glyma15g02280.1 (locus Gly ma15g02280) derived from phytozome v7.0 (chr-ID Gm15; pos 1540239 to 1541193)
ttcttgaccactgacaagaccctcgctcaacaaaggtttctctacttttcttttttctttttttattcatttatactctattcttttttggttgtgaaagtagttgattagggaaagacatgccccttactatggaggagaaagtagtaggtagtcgtgaatgtgaatcatcatggtccctgttgatattcacccgacacataattaagtgttatcaattctctctctcgcaaacaaggtccaacacaattggtagataattaggttttttaagcaatcgattccctggccgtgtatatcgttatatggtgaaaactttgttggaaaaaacaaaacttcagaggaatttacatatcactcaccattatcaaatgaaatctgaaaatcaaacccaaatcacacttagaatgagtgaaatactcttattttaattattcatttacagactcttattttttggtagtgaaatgtttagattagggaaggaacactcacttgcaaggtcacaaaagactaccaatcacaacattttacagtgaaatattagtagtcacactgacagctgaactgaagacttgactaggtgtgtcaacccataattagttttatactgtgtgtatgttgtttggatgagcattaacaaaattaattttgtttaaaattaattttgaagtgatgtgatttatgtttgaatgcttttattataaaatttaatatatatatatttttatccaatgtaaaagctacccaaaattattttaacttaaattaattctggatccagaatcaagtttggagaagactccaatgtgatgaaactaaacatgtgtatcaataattaattttctaacttgaaactaaacatgcacacacctttatttgatttatggaaaagaagaataaaataaaatattgggtattggaatgtttgcattgcagggcggctaaactgggt

SEQ ID NO: 19695 - DNA, 540 bp, Glycine max
  Intron number 1 from transcript Glyma20g22600.1 (locus Gly ma20g22600) derived from phytozome v7.0 (chr-ID Gm20; pos 32546408 to 32546947)
accgctgtttccgcatctcgcttccttcccaaactgtagattcgtttttttctctctctatttcttccttttatttttatgccttctctctcttcagttttgtttctccaatgtgactggtgttgttttgtgtttttcgtgtgcgtcgttcgttaattttgttttgtgtattcggatcgagatttttcgcgttcggttgcggggatcttcggtttaggtttgtttagggattttgttttctgtttctgttgctgatgagtttttcgttggatttgtggtgttctgtgagattggcggactttttatttttatttttatattccttcaattttttcttttttggaaaaaatgaatatttatttatggacggaatggatttgcttttttctgtctcttaaattcttgtttaaacggtggtgcgactttcctatttagttctgtttttatgaagcctgttcactgcaattttgcttctgaaaaaaaaggatatatatatatatatatattaattatggtggaattgttcattctggcaggtaa

SEQ ID NO: 19696 - DNA, 720 bp, Glycine max
  Intron number 1 from transcript Glyma19g29870.1 (locus Gly ma19g29870) derived from phytozome v7.0 (chr-ID Gm19; pos 37572120 to 37572839)
gtgttctcgtacgttctttttcatcaaaccttgacaatttttattttgttttgttttgtttaaaaaaaaaaagtggaacaaaccgtgccgcatgtgttgtattgtatcatattttgactatgtttctgtgttgctgtctcactatgttgggtctagtctaacatggcgaatcaaggttcgaatttctgttgagagaggcgtttagttttagtgtttgatagtgtctcaaccaggattctcttttaaaaaatatacatgttggggaaaaggaaaacatgttattctgattttttttaataaccctggttgttgttctgtatttctgtattgtgactcaaggaaacagatctgtttcatcaattaaaaattaaatatttttgttcttttttttttggttaatcagaagaaaatcttttggtgttatggcttgaattattgtgattgtttgaacttgggttatagggagaaatatggattgtaacgtctgcagttggtgaacatatgctatcaccatttttaaaattacattactttgtgggtgtgtgtacttttgcatttatttgattgattttaatttaacctatgtatggtgtacagatgtaactttttggatgaaactgtattggcgttgtgttacaattgcaattacaaatttacaatatgatgcctttgataatgactcaaatttattgttttgtgaaatgacaattgcagttagga

SEQ ID NO: 19697 - DNA, 762 bp, Glycine max
  Intron number 1 from transcript Glyma16g02980.1 (locus Gly ma16g02980) derived from phytozome v7.0 (chr-ID Gm16; pos 2552503 to 2553264 reverse strand)
tgatcagaagattcagacacaaatctctaagagtaagggaattttactttcctgtagtgattaattttttatttttttaatgagacctgcatgaagtggaaaaaaagtcttgtatgagcttcaaagatgaaattttttgtctatggacaaaaacataaaaaatgtaccaaccaactgcttctttcctctcatttttagttgcttgggaccatttagattttctggctttacatggttttttgtttcagttggtggggtgtcatggaatgtaccaactatccaccaaggctttcttgtttctacattttgggaattgttgttcttcttcttcaagtcttcaaatgagtgttaaaacaaaaattcaactaatataacttgttgatactttccttcttgacaagattttaaaaaatggttctgcgaccgcaattttgtccgtaatatcaaggttttggggggtttatgtgacaatttatctgcaatttttcgcaataccgaggatcgcgacaaaattacaactgcggctacaatttaaaaccttgctttatgctctacttgcttgcaattagaacaagagtgggaatttaatttaaatgaacattttttatgccaaatcatataaaacattttgttcttctttttcttaacaaaaaaagggaacaatcttagaaaaatgttgagtaatgtcaagtgcttatgttggtgcttagcctttgatgtcagtggtaatgtgcattattataaatgtttaattgcagaaaa

SEQ ID NO: 19698 - DNA, 711 bp, Glycine max
  Intron number 1 from transcript Glyma16g03660.2 (locus Gly ma16g03660) derived from phytozome v7.0 (chr-ID Gm16; pos 3077809 to 3078519)
tgatctctttctccgaggaatcaccgtcgtcgttggtgagcgagggggatgaagatttattagaaccatatgaaactgagatctctctaaaatgcttgcttttgcttcttctctctaaaactgcatccttggaatcaggcgagacagagttttcttcattctcgaaagtcgaaactttcccctcattttcattcttctttcagttatcgccatccttcactctttgcttctaataaactctctatttttgtttcttgaaggaattagggtttttattttcttctttttttctgtgtcgttttggtaattaatctgataaccgatgattttctttggtttcatgcgctggaagtgtttgattaggtttacatgtcatgatatttttttttttttgctggtaaactttttagacttgcgtggttgataatcgctgtttgtatttggctgttgtttgaagttttatggtttttaaggttcctataattaattccatactaatggttttggttcctcatatttttcgttcttgttaatgttaaatgtcaatgttaatgtttatcattcttgctgatttgattttgtttattctcaacggtagttgaatcataattgatgaatttgcttggctttctgaaaataatgatgtgtttgtgtttgtgtttgtgtttgtgttagttcagattagcaaaggtaggtagttagttatttgca

SEQ ID NO: 19699 - DNA, 624 bp, Glycine max
  Intron number 2 from transcript Glyma15g23980.1 (locus Gly ma15g23980) derived from phytozome v7.0 (chr-ID Gm15; pos 24382114 to 24382737 reverse strand)
caagtgagaaattttttgttgcaaattttctacataaactacagaaggatttgtttggctatcctacatcactatatagttaatggttatatttccttctcaactttccccttctgaaatttcattccactaatcacttttataggagtcacctatccttgtacaattatccaaaggaccgcacactggtttcttccagattttgacacttggggtgttattgttggattcttattcttaaatcgctttgcggagctgttaattcacaagccaggagaacccttcctacttggccttgtggccactttactttcaccattggtaatagtaaatgagatcttgattaattaaacttcttcacaaatatttttaaaaataaaaagtaaaatgaatcaagtttcctctcctaaattaaaaccaactcatgcacctcaacttttagaaaaattaagtgaagatatagatttattttagtctaccgaaaaagtatttttttctgtttaaaaaagaatttatccatgcaaaaccaaattgtcacatatatatatatttttcatattgatacttgcaattagaagtaaagtacagtatgttcatgtacagttccattattaactttcagag

SEQ ID NO: 19700 - DNA, 717 bp, Glycine max
  Intron number 1 from transcript Glyma15g23980.1 (locus Gly ma15g23980) derived from phytozome v7.0 (chr-ID Gm15; pos 24382938 to 24383654 reverse strand)
ttgctctgcaacataccaagaatttatccatagaggtaaatatttttagtttttttacttatctgttcttgttttgtgaataagtatctccatgggattcttgaattctgtttttcactaaaaaatgtagtgactaattgacatcatggcataggtatgcagaagttttaaatttttgaatgtgtactcccctatcgtctttgagccgagtccatgaaagtaatcgtggacgtttttactcttttcagcctcttcgtgccaaaacgctagagactagggattgtgtatcctccggtcgtctttgggccgagtcatctaagggatcattgactcaattgtcaccaacccagcccaaatatgaatctagtatattggagtcatacttaactagtttatgtccctatctaatcatgtattatcatatcttatcaaatcttactgtatctcaccacatttcatcaaatcttatctcgaggaattaaggagataagatatgatgagattaacccttggagactactattaccgtacgcaaacagaatgacatggaagatgagtttgagttcaattaattaataatgaataaagaagcagtatgcttattagattcttttgtcatttgcagtgctcacttttgctttataataataacatatctcaaattgaacatttatatgaacaggtgtataaggctgagtttgtcattctttgcgttgg

SEQ ID NO: 19701 - DNA, 827 bp, Glycine max
  Intron number 2 from transcript Glyma14g05490.1 (locus Gly ma14g05490) derived from phytozome v7.0 (chr-ID Gm14; pos 3932005 to 3932831)
ataaaaggtatgctgattggaagttgttaagtgttggcaataatttcatgtagttaaatttatgaggtaaaatttcttataaagtatatctcatacatcatagtgtggtgatttttgcacatactgttggaaataatattagttaatgcacttagaaactagtatgttcatgtatcacatgataaaatgcatttactttactgttcatgggtattagtgtctgaggagtagcactcagtatcagcctaggaactaagtttccactgaccaccaattatttgatgccaagttatgtgatgattgagtgcagggagactaccattggtctctcttttggggcagtccattgaactttcattgttggttcattatctctcctacactacatgctatgatatttgaaagaaggctcaaagtgtctattctatgacatgattgacatctcaatggagacttttatcaactgtctcatatgtctccccagtccagggggaagaggggtagtggatactaagcaagcccataatcttctctgtgtgtctctctacatattcatgtatcctttgtatagtttaatcaatcagaaatatatgtagtttttagtcttttcctttggtctcaagtgtttctgttcatggtgcacaacttgtgaggttttagtgttaaatttaacataagataaacatttagttgtacttggtaaccaactagagaatttattttgcattcaactcaattttattctcatctgtatacttggatgatttgatctttttaaaacttgaatttcagatattcggaagtaagagaatctgaaagtaaagctc

SEQ ID NO: 19702 - DNA, 771 bp, Glycine max
  Intron number 2 from transcript Glyma15g13680.1 (locus Gly ma15g13680) derived from phytozome v7.0 (chr-ID Gm15; pos 10293061 to 10293831)
gcaacgatttgtctctcagaagatctgcagttaaggtttgatagtactttttttattttgttttgtatgcttttgactttggaaacatgtttatgtgagtgcttctgctggttgtgtcatgttaaattacagatccaattgtctgaagaatctatagttatgctagatgtttagtactacgttaatttgatatggctgttaaaataccttgagggatcaactatagagattagtgcatgttcagtgtaaaagggctatgttttactgtacatttgatttggttcgtttcggtacctgcaagactgtaatggagttgatgaattatcttacaaatgtaaaagttttatcttatggccaaaaaaagctattggttgttgttggtaacttggtatagatgatcttctactttttaattggcgctactggtatttttaattttatattagaaatgaagagctttagtttgatgtattttggtttttcaagcattgtggtgttttagttacagtatctactaaacacatgtatgtttctgagttttacatcttgtttgtgtagatacttgtgttattatgtattaattgattttcaaacatggattgtcgaagcactaagaataatactgtagttgttagagttcgagattctgtttacataattatgttatgataatgaaatttggcttcctgtttatgtttaataacttgtatttttaaagaaatctacaaacttgatgtttcaggcccctaacttgaacttttgggataaatc

SEQ ID NO: 19703 - DNA, 782 bp, Glycine max
  Intron number 1 from transcript Glyma15g43240.1 (locus Gly ma15g43240) derived from phytozome v7.0 (chr-ID Gm15; pos 50778390 to 50779171)
ggattgttcgagccaccgagtcttccattgaaagggtatttctctacttctctgtcttaattctgaaaccgtattttatttaacttggttgagtagagtgcacctgttgttgttgtaaatggttggagatctgataagaaaaatgattattaataacatgtcatatggcactgaactccttatgcatgaatgttgagatcttatactataatttatttatcagaaacccgttgtagtttgacaagaatataagattacgattaaacatgccaaaagacaaaagtaattatgattattgaaagaactttcgtatgtgactttcttcggaaacataacttctcttaaatggaagatcaaggtaaaagcttgcaaacttctacaaaatttaagtgatcaaagttttttcattggagaagaaggggataggtgacctgatggtagaaggttctttaacatcgtcatcatatcaagagctatggagaagcattaggaataggaatgggaaggggataggtgacctggttcaatgaagttccaaacatttactaaaaatcacgttagttgctatttcaatgtgattctggatgatccaacatgaatccaaatgcgcacacaaactgacattgatacaagattataagtattttggagcatgacaatattttcccctttcattattgtcaagatggttataaactggtatatatttgcttttctaattaaaagctttttcattccgttgagcaggtcatttttgatttccgcttcttggcattacttgc

SEQ ID NO: 19704 - DNA, 988 bp, Glycine max
  Intron number 1 from transcript Glyma20g28900.3 (locus Gly ma20g28900) derived from phytozome v7.0 (chr-ID Gm20; pos 37843808 to 37844795)
tctggagctctgatcaccccggcattgatttcacggtcagtgcaatctctatcacttttctcatctaatcatttgccctaatcacttgctaattgactcaattatcaatttactggtgagggtttatttttttaggtgttggtaatagttggcattttcattttctagagggttttttttttttttttacatatttattacgaagatcaattatgatgatccatgtattgtacataattacgaatcctagtttgataagcatgcttgctggagatatggacaaaacttagatgcagtttaacaggtgcttttggtcttattctccgataagaattggagttttattttggtaatccgcgttataaaggtttgcactttgcattaaagatcaacattggctaccttggtgtagcaattctaaccggagaagagcagcacagcaccaaaaacacttgttttagctttagaaaaatcaaatttctcatttttcaataaaaatcacacatttcaatataaatttatgactgagattaactgagacaccatcaataacttggaacccggaaaacattctccattccctttttgaagtatttgcggtgaagtcgggttgcaaattgaatggcagatagtggtgaaataggggacttaaaggatataatgcacattttacaagtgggtggcctttagtttctgcgcataattagataacgttcaattattgaacattaagttgttgaagactcttgttggttggtaacctctgcatgaagggccattttgtgtaaaatcttatgctaactactattgtgggaagcacattggccatctttggttgctgattgtatgatttaattgtggcttaacagtaatttgtcagatgacctgcccaaatttgtaagtagtttgtaactttagccttccagatattctaatttttcagttatctgcaggtgacaactgctgcagggaatactgtccacagtat

SEQ ID NO: 19705 - DNA, 680 bp, Glycine max
  Intron number 1 from transcript Glyma14g03610.1 (locus Gly ma14g03610) derived from phytozome v7.0 (chr-ID Gm14; pos 2347682 to 2348361)
gttccgattcaagagtaatccgcaattacgcagaggttttttaattgttctcctccgcgctggttttttttttttatgccttttttgttcaacgtgtctacagtttcagtttaaattgatttcgttttgtagataccagtgcatggagttttgtttttcgatataataatgatgcattatgaccaagttcgttatgtagtacgaatgaaagagtaatgtgaacacgtgcatgcgtttttgcgtaatttgaactttgaaatagatctagggtttggctggtggggtctaacaatcgagcttctgaaagtgattggaaaaattagattgcaatctcttcgaatctaggtgtgatgatgatgactttgggtatgtttggattaccgttgtttcaaaaatgtgttcagaatgcaagatacaaagaggatcattctctaaaagtacgtgcaacactcaaaagtgggttcagaacagaatgatgagtgtctgatttgtaaagggaaatattctcttgggtcatcctccaaattataaaaacagaaagttagaagtgaaatgtgcttgtgccagctcgtgtatctagaattgtctttttttcagaagttttgattctacttctttgtatctgctaaagttgacttggattcccccctcctgcttccttgtaggcctttgctgtgcaa

SEQ ID NO: 19706 - DNA, 728 bp, Glycine max
  Intron number 2 from transcript Glyma16g34580.1 (locus Gly ma16g34580) derived from phytozome v7.0 (chr-ID Gm16; pos 37193534 to 37194261 reverse strand)
caactattacccctgctcttaattaggtatagatcttcttggttatgtttgagtgagcattatcaattagcaataacgttaataaaattttatatgctttcttatttttgcttcaatgatggagaaattggaggtttgaacttagtattttgttgagagtggcctttaatcttcaatttgacgtttattaaatgaatgatcaatgatctatatgaaaatgttctaatttgtcctgagacagtggtgtgtcagatatggtagaattttttgacaatagcatgtatggcttcactaaaattcaagcatttttctctgctgctctatgtattttgttaaatgtggttgtctttagtctttaatgggacattgtattaaatgaatgatctatatttggattcgagaaaatgttctaatttcctcttagaaagtgagctatcagatatggtagaatataaaaggagtataatatgtatgttttaacttaagcttgtagagtagtgttatagtcacatctatccttttttctaatgtatacaaattcgctgcttttttctttaatgctccattatctctgaatccttgtaaggatgacaacaatacttgtttacatgtgcatgtatgaaattacaaattcttggtcttaatacaaaattccttagggaatatatatgctgtagatatttgtcattctcattcatccaagaacttgttattgcttacagattgaa

SEQ ID NO: 19707 - DNA, 796 bp, Glycine max
  Intron number 1 from transcript Glyma17g09770.1 (locus Gly ma17g09770) derived from phytozome v7.0 (chr-ID Gm17; pos 7271295 to 7272090 reverse strand)
tgctctttcgattgcgccatccaaatatcatcactgtaagttctgtttcttcaaccatttatctctattcctgcatggaacatactaactttgattttcacctttaactgttatcactatcaaagattaaaagaatagcatttgccccccacacccaccttttcaacttttgtatggttcaaaggtgtaagtttagagagatacagttatagaaaatatagaaccgcgtctatccgtctacaaataacgacttctatgatatggtggtactccttctctttccctctaatcgaaaaatgacacgtcattaacattctctaaggttgttagtgtttctttttttgttgtcgctgttgaagtgctagtttttaattggagggaaataaaaacaggtgatttgcatacaaaggggtgtgtgtattcatctgaagtctgaagctgtaatatgaaatttgtatcagcaaaaaaacagctgtagtatgaaatttcttggatgaagtgttcaaaacgaataaattattattaacatgatggatttacacatttactacatgtgctaagaaaaaagtgttttttttttttctgtgatgcattggggcttattacatgagtgctagcacttggttctaagattagagttgcattattatttttttatatacaaaacaaggctttttatgtgtaaaatatgcaactgtttaataatatagaaattgaacaatttcccccagatattggcataatatttattggtggtgcagtttgttgcagcttgcaagaaacctcctgtcttctg

SEQ ID NO: 19708 - DNA, 664 bp, Glycine max
  Intron number 2 from transcript Glyma19g11030.1 (locus Gly ma19g11030) derived from phytozome v7.0 (chr-ID Gm19; pos 13733730 to 13734393)
aggacaacaacctattttatagaattgtggaaattgtgctatcttaacttttatttctttttattttttgaggtcgacaaaagcggggcttttgctcctacgtaccctcctttggagaggaaatcagacctacgtagttcttaattatgcgtgaatcaagtgattctttttacttgaagagtgatcatttaaaggcgttggaccttaagaatgatcctttttacttggaaagaaactgaaatgataaacttccaaaatcctatttttgtggacgagcttgactaggcgagttgattttagccttagtttcactttagtcattagtcaattcaattaagaatgagaaatcccaaagagaaaacgtccgattttgatcttttgctttattttactaaaagggtattttttgattattatattattattttacctcttttttgatttccaacgtggttacggcacgaccgaacggtcgaaattcattttaaccaaagttaacggataatacaattcaaacgttcggtggaaatttattttatttttagtttaagcgagaaatgacttagatgaaatggcttaagcacgtcaaaagggggtataaaaagtaaatgaaacaagaataaaaatacacgaaatacaatgtggaccaccacaggtacataga

SEQ ID NO: 19709 - DNA, 1022 bp, Glycine max
  Intron number 1 from transcript Glyma16g25210.1 (locus Gly ma16g25210) derived from phytozome v7.0 (chr-ID Gm16; pos 29153661 to 29154682)
ggtattactcctctttccttttacttttgcgctcgggtttctcggattttgctgtttctggatccgtattctcccaaagttctgaattttcgctgcgactgatatgaattttcatgcttttcttcttagatcgatgttctcgcttcgtttttttttttgttttattttattttttggtcggtggataaaattagattctcgctttattaagttgatattcgatgacaaaatgttaacacattctgtagggactgatgagttgatgagtttttttttttttttttgacattttagtgcaacatttttattttgtgtgtattaccttgtcagtagtaaagcctaaatcttattaaattattgtgattatgacccaatattagttaattttggggttggtttgtttctagttgttgttgtcttgttgaagctgtaagcattgaatatagagcagtgtctacgtgcggtgtatatttgttatgaggaactagatgattttgtttaagtttgtctataagcacttatttggataagtttgtctataagcacttattgggaaagaaaatcagagaggtaaaatgcattgaactttacccgtaagctaaaatcaacttatgaactgtagcttttggagaaagttaaatgagagaacagttaagtgcataagttgattttagccacgagaagctcaatttattttaccttcttacatgtttatagagaagtttatctaaacatgatcttagtcaagtacttatattgataacataagactgattgtaataaattaaaaagaacttttttttgagtttgataagttaaaaaactattatatgaacgccaagtttatacaaatgtgtcattgttttttatctgtctttgcctttgtcttgttagtatgagaaaactatagcagaatatataaaagtacgtttcctcaagatctgaatggaatttagaaatattttaattttgtttggattggtgcagttgtgttgtgaggaagattggtaagctgtgggaac

SEQ ID NO: 19710 - DNA, 791 bp, Glycine max
  Intron number 1 from transcript Glyma19g35320.1 (locus Gly ma19g35320) derived from phytozome v7.0 (chr-ID Gm19; pos 42862621 to 42863411 reverse strand)
cagacgaggtggttgttgttggggagaagggtcaggtatttcctccaaaatttcaattttttctctcacttttacataattgttagtctctcaaatatcgtgcatgtgattgattgattttcttttttgttggtgttttaccaaaagtttgatttagatgtactggtaagtgggaagtgccgtaatgtgttttaatttttcttagtctttttaatgccttgagcatgaactgtctgggtctcattttccattttgtggatttcgttcccaaacaagtgggatccatatgaatttcaacaaattagagaaaatgtgttttgaaagagtgttagtgagtataatgctagcattcctattttattttaatcgattcatattgtatgattgaaattggaatatctgattctgattaagattctaggagctatgagcaaatgtttttaactctgtttttggaagaaagcataaccagagtggatcatagtatagtctttgctacattgtggttacttatgattcagatgtatttaacttctgatgaagttgtataatttctagcagtatgcttgtgaatacaatgcttaattgaggaatttacttctagtaatgctacagaatgcaatacttatttgctcgttatacttttttgattttgttttctcaaaactacaatttccatactttctttgcttatgattgaagacgtatctatacctttttaaatgtggaggttccttatttatttttgaattgcagattgcgtgcagagactatcctcatccccggcatct

SEQ ID NO: 19711 - DNA, 798 bp, Glycine max
  Intron number 1 from transcript Glyma19g32410.1 (locus Gly ma19g32410) derived from phytozome v7.0 (chr-ID Gm19; pos 40147380 to 40148177 reverse strand)
tggcccagcacttcgaaatcgttgctcgctgccaggtactgccaaagttctcttctttttcaattttcatggcttttgtctttgtttcaaatcgtgggttgttcggaaagtcgatggaattagtgtgtgtgtgtgtgtgtgagtgagtgttttggtggcagtgttgtgttaaggttgattgctctgcggtttaactgaatcagtgtattttgtttgtttgtttttttttttttaaggtttttgatattttaatttattatgagaagaacactagattgaacctggaattgggaggcctgtcaattttatgcctgagattacagagatgtcgtttttgtttctttcattatcgaataatgttttattttagctcttccatgttagcaaagggtagtggtttgacactttgacttttgagtccctgatgttgcaaaaataaggattaaaatgagggaaatgtttgcaatattctctaacacattcttttgaacacactttttactcttggttggaatttattggttggaaatcataaaacttttgggtctggcttcttatttaatgagtactacacatgattttatagtttcaaataaattttaacggagtccattagagagtgttttctcttgaaatgattgacccttggtaatttcaagggctatagtggcaattttgtaatttcggatagcaatgctatttagtttagtgattattttggtgtattgtgatagggtttttcaattgttattttgcactggtaatttgtgattattatgtgttctcagggtggagcta

SEQ ID NO: 19712 - DNA, 968 bp, Glycine max
  Intron number 1 from transcript Glyma18g06610.1 (locus Gly ma18g06610) derived from phytozome v7.0 (chr-ID Gm18; pos 5184884 to 5185851)
aacattcgcaagcactacgattccttgcctctcaggttctgatcccaacctgggtctgcgtgtgtttgcttcggttgcgatgtttcagttttgatgggtttataaaaagggccttcttttaatctgaatcatgtgaattaatgccaatgtgaagagtgaagattcagttgcactttttttgtgtgtttaaggtcactctctgttcatcagggatgcgtttactcgttttttttttgacaaaaattacatgcaattacataggtgatttccgtgctatcttcttaccagaattggagtttcatctcgctaatgtgtgcaataaaggtttgaattaaagaacaacttagaccactgaggtcaaactctaattctgataggagaacaatgccaaaaacatccaaggagtgtatttaagtattgttctttttgtttttgcatttgggaaattggttttgcttcttttgatttggaagctctaaagttttcaacttgggtggtgatccagtctgaatgtgagtgttgatgttagtttggttgtgtttaaggtcacttcagttagaagctctacaattattattattattattattattattattattttgtgtattttactttgggaaatgggtttatcttctgccgtgttagaagctctgttctaatctgaatgtggatgcggagaaaatattatatggtcaatctccacgttacatgtaattaccaagttttttaatttacgaaaaagattaaataaaattttgctacgtgtcatggaaattgatccgattggtttcgaaccgtacaatgtttttcgggaatgttaatgtgaggattcagttacactgttttggttgtgtttgaaaatcacttacttcggtgatggattttcttttttttcaatatctagagtttgtgttatttatttatttatttgtttttatttggcagttattctcaggcggggtttg

SEQ ID NO: 19713 - DNA, 654 bp, Glycine max
  Intron number 1 from transcript Glyma15g40590.1 (locus Gly ma15g40590) derived from phytozome v7.0 (chr-ID Gm15; pos 47582811 to 47583464)
gacccacaacttttccggcgaccaaccgtgcgcaggttttttttctcgttttttcttgtttctttttttcttcgtcaactgtttttctttgctttttcttctcttctcaaatgttcttcatctggtattctgtttatgctggtgctctgtttttctgaaatttcagtttttcatctcaattctgtttttttttattaatttcagattttcaattatgtgctttaataaattcagaatgtattattcgtttgctgtcctgaggtttgtccaaattgttttttttttcagttatagccttataaaatcttggtgtttttattaattatgtttatgactttgtgatgactgaaattatgaattttatgaattgtgtcattgaggaccaagtggccatgcgtatccctgccccaaccaaggataacacaactctttagagattgaataaattgtgttggacttaattatgcaacaccccttcatggctcattttgtcaacactagtgttttgaaaatgtttgactgatatgtgagttgtggcatcatatttttgctctacctgattttagctgtttctcaatgtgtacatttgcattgtttaattgatattttgacactgaagcttctacaggtgcaaggataagtgtgtgatctatc

SEQ ID NO: 19714 - DNA, 893 bp, Glycine max
  Intron number 4 from transcript Glyma19g14930.1 (locus Gly ma19g14930) derived from phytozome v7.0 (chr-ID Gm19; pos 18036212 to 18037104 reverse strand)
cggtgcttgttgaattgtcttcagattcctctgtatattgtttgcattatcttgtttatggcattggctggtgtattgttagttgttacttatttttatatactgtctcttttgaatgtgttgtttcaaatgttatgatcttatgggaaaaccctctttttttcttttttggttctttcgatgaattatgtgcagagtggcatgggattaaactatcttatgagtaattcaagcctatggcactaagaaatagttactttccttttggttggtcagcaagtaggatggctttgaagatttaacattgaattttcagctgggggtagggaaggggaagtttctgggaagagaatgggctacaagctcactgcttgtcgtgtagctgtatttctgttcgatcaaccaaaatgagtaaacttattttcagttgggaatctttaaggtttaatttgtttgcttactttaggggacctgtccaaacctttattcatagataacaacagaactgcgctatgtttatttgaatgtgtaagagtgtatatgagtaactaactcagtttagtttactactgtagttagttaaccgttggctttagtcacttttcagttacaactgaatctcaacagtataagtactgttatttttagagatctcagtgccttttgttactcatatacgatagaaaagtgattaaagctaactgttaacttactacagtagtaaactaaactgagttactcatatacactcttacaaaatggatgaagtcaagtaacctgcttatttggtctgtcttgtggtacatgcaaatgatgtttttggttcaatctttcattctgtttcctatctctggtttataggcggtgttacattcgttttattagaaaggtaa

SEQ ID NO: 19715 - DNA, 930 bp, Glycine max
  Intron number 1 from transcript Glyma14g23820.2 (locus Gly ma14g23820) derived from phytozome v7.0 (chr-ID Gm14; pos 28282183 to 28283112 reverse strand)
gccgtctcgtcattgatttcataggtacgcataatttcgttttctcgcttttattttgatctacatgacaaaattattaggtgatcttggattacttttaatttatggttctgacaatttttatagacaaaattataaatttgctctttctatttttctcatattttgattttatttcttttataatttaatttaagaatttacttttttaatttttttcattctggttattacttcggtcttcaattttgaaattaaacgttgaccgctaattgtttgttttgacaatcatgtgttgcgtttttattagacgttgattgtcacgtgtcgtacttttattgaatgttaattttgtacacttaattaacgtcaacttctaataaaaatgcgacacgtgattgttaacgtcaaataaaaatgtgacatgtgacggtcaagacaaacaattaacaacgtccaattttgggattggagattaaaatattggaattgcaaaaaaaaaaaactagaaaattaaattcgtgaattaaattatttggagatcaaatttacaattttgatacgaataagaggatcaaatttacaattttaccatctttatgacatataatgaattattattaattgttttcattcaaatttaaaaacataaatacatgttacatataatgattgactaaaactgtggacaaatctaagactacttaataatttcttgtctaaacatgtgtagatgtctaacttatcataattttctttttggttataccaaagtttgattgataacttacaataactaacttaccacatacaagaatttagtattaatcaatcaatttaaaacaccactcaagatttcaaatgccaattttgatttttaattttgtaatttcagcaaagagttttggtctcccttatctaagtgcgtat

SEQ ID NO: 19716 - DNA, 1064 bp, Glycine max
  Intron number 1 from transcript Glyma16g17470.1 (locus Gly ma16g17470) derived from phytozome v7.0 (chr-ID Gm16; pos 18949532 to 18950595)
cggcattgcgtgaagggttgtcactaaattttgaggttcgttttttttttccttcttaaatgtgtaatattctatcttttttaacaacggaaaaccatgtaacaatgctgttattattcgtcatcctaactaattcactgagcttcattatgtgtcttgctattaccatttagtgttggagtggattttttgaatatgattggatttgcaattttcagtaaaatattttggtttttggtctctagcattgattatatttatttatttggttccctttttccttaaatttcaatcaaatattactctggtcccagctctcaaccttctgttgcaatgtgttaatacttttcaatcatcaacatctttattagaattgttaaaaatgtcttcttgggctctgagatttgtgattgctttttgacaaaagaattttttatgggtattatgaggaatttgtttgatggtaaagtttttttttttttgcttagggtatgaagaaagaatcattgagcaaaatagaaattaagttcttctgaataaaaatttgcaatgcctcatctagctaattgtagctttttttccccttcatttttaacaaacgttcaacaactatggagttcattttcttgtaactgagtcaaacctaagaatatttccttctcacaaaataaaatttcttacgtgaggcagcataatttttgtttttctatatgatcagtatcgagaattcgatattacacttgtatatgaacattacacatatattggattataatttatatgcatgaattgcattatgcattgcatgtaattggattcatgtaagaccagataaatatgccaacacgaaaataacatgaaaaattgatgcaatatgtgaatttgacacatgtaacccattaagtttcttctatatatagagatatggcataccttgtttcttattggaattgaattggagaaccatttttggagataaatcaatcatatgtttgagttatgctccttggtcaatttataccttaacaggaagcaagggctcttcttggaaagttagagtatca

SEQ ID NO: 19717 - DNA, 785 bp, Glycine max
  Intron number 1 from transcript Glyma17g18720.1 (locus Gly ma17g18720) derived from phytozome v7.0 (chr-ID Gm17; pos 16286425 to 16287209)
cacaaccacaacctcaaactttgttcatagaggtgagaaacctgctaacacaccctttcttatatatatatatatatatatatatatatatatatatatatatatatatatatatagcacaacacctctgcttttcttcttctatttttatttttctaaaatctctcttttctataagttactaaatgactttgtatggcttctgtagtttttgttctctaaatggaaaaacgtggaaataaaacatttttctcgtgattttcagttgcatgcgagttttttgtcggctgatgtggttttttgttggctgattatggtttgtcttattttttgtcatgtttgtataaatagaaaactgcgacaactttatgtttttatgaaatgtacgaatttatatcttgtatggttgagctcaatgcgatggcataaggagcgtactaatgatattttttccttttgattttagtaacatcctctgcaatcatgttgtgacgatatactcgcatggttaatttaatttcttgagggaatattcctgatatatatagtgtaatagtgtgtctcaatggagatcatactgctattggtaataatagtaatgctaagaatttcggattatgcaagtaatagctctggttgcgtgaaatgttgtaattttggttatcttggatcgttggttctgttttatgatgaacctgcccttcaagttagacttacagtaacacagtctctttgcactggacttgattccatgcaggttcttccctgttaaagcttttagcatt

SEQ ID NO: 19718 - DNA, 1012 bp, Glycine max
  Intron number 1 from transcript Glyma14g33930.1 (locus Gly ma14g33930) derived from phytozome v7.0 (chr-ID Gm14; pos 42339356 to 42340367)
gctaaggtaataggctaatagcaacactaaagttgtcaatatatttcttctttgcatttagataatttccacttaataaagggaacatggaaagagattgctacgttgacatgattttttaattatagtttgttttccgggatttcatgtatcaataaccatctataagactataaccacctttggacttctctgtagaaaatgctttctaaaccataagtagcatagttctacttttcaacaagtccaactttagaactgatataatacgtcttccctttttctacactttacgcacaaactgctagatctagagcctgaatcaatcttcatatctcaggaaattagtacggtactacgtcaattttaccatttgactcttgacatgtaatttatctttcaaaagaaattgccccatttcaagggaagctttcccttttatgttgctagtagttgctaagtcttcttaatttagcatgcatttggattcgcgtctataattcacgatttcacatcaaatttcctaaataatgaagaagtaataacaattaattgctttaattttaacgcatgtctgcctttctaaaaatgtgcaaccaaacatgcggttaatttgtgtacgaatgcatagagtcacctttgttccttcatctccatatctcttaatttatcagttgacatgagcaaagaatggtaaaaaaaaaaagacttgccactataaccctgtagattcacactacactgcaataaaaaaaaaactaatgtaccatggtatcctagaactagaaggctcctcgctatgggaaaagataagagagtccttatacttaggcttaggcttatctttgcatatacaaagaggattaactacactataataataataataatacactgcaatatacaatttgagccggaggggggggtaagttgggtcaagttgttatccagtgaaagaactaagtatatactatattgttttgcagcaagcattggctctgtcaacagctga

SEQ ID NO: 19719 - DNA, 223 bp, Glycine max
  Intron number 3 from transcript Glyma19g02270.1 (locus Gly ma19g02270) derived from phytozome v7.0 (chr-ID Gm19; pos 2007900 to 2008122)
gaggagtaagctgctgcatacttttacgttttaattgtatattgtgttgaaaatatttattttgatttctgtgtgtgtgaatgcacataatagaagaaagactttcaaaaatggttgtaaaaagttattttgacattattttattggtttttgcctatttcctaaatatttatcttcatattcttcagggcaaacctcctgattggcaagactttgttgggat

SEQ ID NO: 19720 - DNA, 841 bp, Glycine max
  Intron number 1 from transcript Glyma18g04690.1 (locus Gly ma18g04690) derived from phytozome v7.0 (chr-ID Gm18; pos 3465231 to 3466071)
ttgtggaattgtcaaaggttctttttgttaacttctttgtcttttgcttttaattgactttcttgttatggtgatgcatgcatattttataaatttataaatactgggtaagtggattttatttttattttttgaaaaaagtggttaagtgaaagaaacttctgcttaatgaaattattctcacttgtcaaatacaattatttagttagttgcatcttatttgctgctttttctgccacttttagtgttgtgccattgtcatggtttagggatatagggatggcctaggcaagttggtttcttttcctgtttcttattgtcacttcattgatgcattgagcaggcccatagatatggtggttgagcactattcttttctgttcttaagtttagttttgatagaatgctgtttctattcttgctgaataacaattaaagtctttaagttattcttatgtagatagacatttttgttattagcatatttaatttgtttgatcaaataacagtacagtgataatatataaatgggctgtaatttttgaacaagttagaagttggatttcttacaaaacaatcatgatttgataattcataaaaccatttttattacttgacaatcttggaaagtagtatgactggcactaatgacagattgatattttatgatgttccctggcaggcattttttaatcttccttttccatttgctactttctgttttcatttagaattagttgtgtcaatcttactcaatgaaattagaaaatgttgcaagaacagttatgtctcaaatctgttgtcatcgtcaaaaacatgatgcatttggtgtaatacaggg

SEQ ID NO: 19721 - DNA, 1013 bp, Glycine max
  Intron number 1 from transcript Glyma15g05910.1 (locus Gly ma15g05910) derived from phytozome v7.0 (chr-ID Gm15; pos 4206433 to 4207445)
gattgtttctgttgcttcaacaatcaggtgaggatttctggcctctattaaagtttttttttttaaaaaaaaaaattgtctttggaataataaaccttcatgcatatacaacttaacgttttaggagattaccatgtattttagaggagccttagatgcagcgtttgtctatttgaggattgagttttgctggggcagtgaatggctcaggactatcccaaattttctttttctaagcttaattgataatgaaaattgaaacataaggattgtttctaagcttaattgacaaagctaatactggcttgtttcttgagtcttaacgagagtttggtacttaactgtgctggaggtagtttcagcattcagcatttgtttttgcagtaagctaattttgtgagacaaggctcatttcaaatggttgctttaaacaccaaagttgtctaattaatattcttttgacccttggatgtttcgtgagtggtttttggtctacttatgagcaaggttttaaattgaggtcacgttgcggtttttgtcacaattcttgatattgcggggaattgcagagaaatgcaactgttacaaccacaattgcggaaaaaaaccttgtcgaggcagccaaaattgcagttgtggaccattctgtaaaaccttgagcatgaactatgttctatttctatcttctttggttgttggtgctgataaatagttaatattctggggttgtgccattttaagtttgacacttcttaacaagatggaattataatagtacagagtgtgtttctctgttatatttctgaatgttgtgcttattgtcaacttcctatttccttgttttgcatttatgctatgttcccttttataatcaaccacgcatctttgtctttgtagtaatttctttataatttcaaccatgttccttgtattgcattgcatttgttatgttaaacagtagattcttttattattgtattttaacttgcatagttttaggcggtacgcacttc

SEQ ID NO: 19722 - DNA, 969 bp, Glycine max
  Intron number 1 from transcript Glyma17g04020.1 (locus Gly ma17g04020) derived from phytozome v7.0 (chr-ID Gm17; pos 2664976 to 2665944 reverse strand)
tttgttattaataacaagacaaaaagttgataattctgactctttaaattgaagctatgccaattatgcttggttttagttagtgtgtctttgtgcaagggatgatgactctgccttcttatctttaaaaagcaagaaagctctaacacatgtaatcgtcaagatcttgtctttaatgaacgaaatctcagtaatgtcccttgccccctctttctataattcccaagggaaagaaagggtttattgaactcaacatcatctcgaaggatctctaatttgccatcttacagcctacagaagagtgtaaacacaacagaaactgtggaactgttggcgctaaaagccagctgaaaacaagatatccgtgatacaaggaaggatttttccttaacatcaaagtgtagacgcaattgcaatagcactggtagcccatggttacaaaaagcaaacaacacacctgtgaacaattattatatattatatgaaatgactcataaatgcactttttttttatcggttcctcatctatattctctttcagaagtaatcctgtttaagatacaaggaaatattaagtatcgacacttcacatctcttttaacaagaatttgaactttaatttgtcacattgtgaaggattagccttttctgctacacccaacaaatgttagtactcacaaatgcacataaaaaggattaaaatacagcaaattaaaggggtccaacaattttcccttttgtcaattggtggcaaacaaatctcaattttttaactcaccaacgaccaacctaactttaaatagcagccaagaaagaagcttggtcattcattcccttacccgagaaaatgaggtggagctcactctttgtgccctcttttctactccatattcttcttctatcttgcattcttttcacaccaactgattcctctgatggggatggggatggggatttggtagaccaaat

SEQ ID NO: 19723 - DNA, 838 bp, Glycine max
  Intron number 1 from transcript Glyma20g01200.1 (locus Gly ma20g01200) derived from phytozome v7.0 (chr-ID Gm20; pos 828617 to 829454)
gccccaaaactctcctcattttaggtaatcttaatgagttcaatgtcaatttcattcttgaaattgagatttcttatgttatctattggtttgtgatagtatgaaatagtaaatttaatccttgtttttgtttggtaataaataataatcaattgatttatttgctaactctgaaattggtacaaattttcaattcagttcttcagtgttgtaacaaagtatatttagtggcattggtcaatgaatttggtcctcaacacatactaacatcagggtagggtcaaattgggttttttaaaccatcataattagggcccaagtcatgataccttgggcgtatttcttcatgtttaagtcctttaggccaactataagactaattcttagtgtggaatttagtcaaaaaaagcttcatgctcctcttcaaggatgtgttctgccaaactcggctcatccccactaaggatcaaattgattgaagattactacagtgagaaattaaatttggttctttgttaaatgtaaaaggaccaaattacctgtttcgtaatgttaaggatcaagttcattgttggcatcaatttatgacaaaattgatgttttactctggtgttaatcatgcaaatgatcaaaaagaacagaagaatagaatttattttgacacacaatagagattgttctacaccaacataactcatgtaggatcatgtatactctcgtttgatttgacaataattatttaaaatcaagatgaaacttgcacatttcaaaactaaattcggcagagaaatattcacgggttgaagattatgtttcattagggaaacattgcaagagt

SEQ ID NO: 19724 - DNA, 480 bp, Glycine max
  Intron number 2 from transcript Glyma19g25000.1 (locus Gly ma19g25000) derived from phytozome v7.0 (chr-ID Gm19; pos 30718982 to 30719461)
ataggcaggttcccgttgttgatttgctattgcaggtaatctttaccattgcccctttcaaacttttgattattgttacaatttggtttagtgcatgagaatatttcatatctctgcccagtcctagtttttgcaccctgtcttattcaaaataatttgcataaagctataatgaattatgtgagaagccatttgactttatggcatgaaatactttgttaatgccgaagattatgttcatcagatcaaaggtagtagcaaccacttttaatgatattgaacagctttctgcagttgcacaactatttgcaaataaaataaagcaaaattagattttcatggttatatttttagcgtttgatcggtttattctgctgatagtgacatattgcattattggctttaccttttgactttcaagatttaattgtcaatgtgaaatgaacctcactaagacttttcttacaaatgaactacaga

SEQ ID NO: 19725 - DNA, 810 bp, Glycine max
  Intron number 1 from transcript Glyma16g33780.1 (locus Gly ma16g33780) derived from phytozome v7.0 (chr-ID Gm16; pos 36564049 to 36564858 reverse strand)
gtagctaacttgtctggctttcatttcaaacacgggtaccacaccttaccaatcttttacttcataatttttgttgggttaagtgtcaattgtctaatgatttgatgctaaaatttaaagagaaaagaaaccacaacattggtatcaaacctgtataggaggctatttgtttgacttcattaactctttgatgggaggatttaaatttttttgggaaattcaaatataaacattttaattgttttgatttaattttttttattttgtaaatattttgtttgtacaaaacaatttaatttcttgtattttaattttcttatttgaataaagtaatttaattttaaggatatttaaatttttatttttaaatatctattttaaaattaaaattttaatattgaataaaaataaatattagtcattttttaaatagttaaatattcaaaataaatttaatactagacaatatttaataatcaattttttaatatttaataattaaataatcaaatttttttaatactaaataattttaaatcttacataatatttttctattaacacacacttaaattaaacaatactgaaaaattaaagataaataatatataattttttttcaatctaatttcaattacctaatatcacaataatttaatacaaaatattttaatgtaaaatatttgacctttgatttgattaattatatataaataaatgtatatgttaaagagatgtacagggggaaagtaacgaatgacacagtcctcctaacacttgtttaaaagtaacctcacctcttcagtgact

SEQ ID NO: 19726 - DNA, 567 bp, Glycine max
  Intron number 2 from transcript Glyma17g11880.1 (locus Gly ma17g11880) derived from phytozome v7.0 (chr-ID Gm17; pos 8927987 to 8928553)
actgggtaacaattcacaccatattttttttcttaaatacttttttccttcatgtaatttgccacattttatttatttattttgattcttgtaattttttattttattttagttcttccaaaatgtttattttttcatttttagaacgttttaaatagtaaaaaaatattttgaattatgaaaaaaatattatctaaaatactttaagaacgaaaaataaaataaacatattttattataattaaaatgaagaattttttcgtaaggatgaaaacaaaccttaaaaattacaagaaaaaaaaaatttaaacctactttataaaaactcttatctaactcctcaagaagttaacctatataagttgattttatctcatagaagaagctaattgtacttattttcttatgaagaagtttattaagttattcaaagagaatctaattcattgtcagtttagaagaccaaattgtaaatatttaattttagtaatattgatgcaaaatatggggtcatatatgttctttgttgcaggcaccagatatctcgagagaggaatcaggcaggga

SEQ ID NO: 19727 - DNA, 654 bp, Glycine max
  Intron number 1 from transcript Glyma15g20090.1 (locus Gly ma15g20090) derived from phytozome v7.0 (chr-ID Gm15; pos 17762262 to 17762915 reverse strand)
cataggtgaggaaatataatcaaaagaaaattttaaaaaataaaagtaaaaataatttaggtgaattaagaaatagattcaatttttcttgaatatagtaattatacgtgtgtttgaaaacctctttgcaatgtttgcatcattgcaaacggaagttcccactttctaaagcatgaaaattgagaatgtttcccacattcaacacggcgtttaggtgaatgtaactggtaaccaaacacacaccagacagaccaggtgatttggttgctcaattttgattaggccaaaatttgatgaaattagaatgaaaagatcatttataaatgattttttttttaatatatggactcaattggtacaattgtaacataagaattatttttagaatcggattaccagggacggtttgaatagttttcaccaatgttaaattcaaactttgtagtcatatactaaagaaggataagaattaaaatcacatgatcaagatgtaagtacaacatcaatttagtatgtgcaacagcaacatgcatgattttataatttaaatactaaaccgaaggtataatttaaattttgatgagttgcatgtgtggattaagagaaacaattttactaaaataattacaaatttggtaaatattgataaaagga

SEQ ID NO: 19728 - DNA, 1039 bp, Glycine max
  Intron number 1 from transcript Glyma16g29580.1 (locus Gly ma16g29580) derived from phytozome v7.0 (chr-ID Gm16; pos 33359392 to 33360430 reverse strand)
tccaagcacttcggcattcccttcatttcggaaaggttcatcgctcttctattcctaagggattataattgtaatctttttttttttttggtttcttttgaattcttgtgttttcaatttttgttacaacagcgatatcttctgttttctgtttttaaatacaacaggagaaatataaaagttcaccccattttggggtggatttgattggtaggaaggggaaagaaagatagagagaaaaagcgatgacaaaaggagagagagagataggaagaaaatgaggtagaaatgagatataagagaaagtgaatgcatgaatataattactctattaaataaagtgaaaaagtggcatttttataattaaaggtgaaaacatagaatggaattagaaaacttttttttgatattgaaacagtctatatgcttggatttgtataagtatttgaaagaacttatttacagcttatttgagtttatcttatgatacaacatacaaatatttttataagtatttgggaatgctaatgaaaatggaactatgatatgtgcacaagcttatttcaacaagctcgttggattaactgaaaacagcattcaacttgtgtcaaaacagtttaatcattttttctctctttgatttaaaaacaatttgtacattagtatttatacgaagtcacttgttcaatgagagattaattaagttatttagccaaacccaaccatatttgatggttgagtttggttgcacttagtaatcttagtatccgagtgagatgctaagagtttatgtgagattcctgtgaggtaatctcttaccagtttaccaaacaccagacatcttgctcaggcttcaaagaagcttgtgagtttctgaacattgcaaggaatttacacctaagataaagatagttgattgaaattgttactcatatagattaagctgttagtggccttattttttctgaaaatgtgaattttcacctactatctatcacctgcagaacccctgagtggctgaaaaaaatatttgcaccga

SEQ ID NO: 19729 - DNA, 671 bp, Glycine max
  Intron number 2 from transcript Glyma19g01590.2 (locus Gly ma19g01590) derived from phytozome v7.0 (chr-ID Gm19; pos 1208718 to 1209388)
aagatctcaagacagtggtatgttgactatgttcactcatacaacaattttcctttctattttgttttgtatcactttgatatctaaacaccctagcttattgtaaaattgctttttaaatttgtcattatccgtgcgatttctttattttttaaagataggtccaatctagccagcttgtttaatttggtaaattctattgatgtttgtttcttcaaaaaaaaaaaagaaaagaaaagaaattagctgacaacgtcatgtgctttcagctttctattcctgtactatatatgtaccatcgaaaatgcttaatattaaaatatcttacacagaggaaactttaagtagaaagcaatgtgtaaagaacaaagtgaaaaatgtagggatatagttaaaaatgtagcacattatttatttatttttaacttttcatgactttcactcctttgttaacaaggacaatctctacatgagatagatatggaagatatcttagaccaatcaaagatatacattcaatatttagtaaacagactacatctcaaatgtagaagctgttgatgcatgaatgtgttgacattagcatacataaattttgttgttaaaaacggctagaaatatggcattttggtacaggttcctgcacctgctccaccagtgaaggcaccaac

SEQ ID NO: 19730 - DNA, 938 bp, Glycine max
  Intron number 3 from transcript Glyma19g39470.1 (locus Gly ma19g39470) derived from phytozome v7.0 (chr-ID Gm19; pos 46135947 to 46136884 reverse strand)
ccttaagcaaaagctagttgctgagtggcctcaaggtttgtcgtcttgtttgtggggtgtgtctgactgtatatatatatatatatatatatatatatatatatatatatatatatatatatatatatatatatatatatattgtttttttatacaatggcccaaaggcccgatctgactttctgtatataagtttttcttaagacttcacaatcactttggttcactaaaaatatatttgggaacaatttggtcattcaaaacatttgtgggaacaagctagttccccaaagactcaaagtgacatcaaaacggttcaaattgatgtcacatgtaggactgatttgatgttacaacttacaagtctttggatcaccaaatgaatgatgccacgttgataattccttattttattttatgttggatcattgttgtttaatattctatgcacattataatttctccaagaactaatttaaaacatacattagacatcttttggcaattgactgtaatatgtatcgggttatattttttgctgcatggtagacaccaacaataactaccatgcctggccccattatttttagtgaagcttaacttattcaatttaaaattttgcaattcttttcttatatatttatctctccttttagttgcagacttgcatgctttctttgtgcatttatcctttgttctacttgtgagtccagtactccagtctcacacattccactaaaaaataaaagaaagtccagcctcgcacatgatcattcctgcagataaatgtcttgttttccttttcccatgaatactttcacatatgtatgtccatcatttttttattttctcttttatgcaacatgcttaccttacctttcagtggaatctttctgtttacaggcaaaacagttacaccaaagtctgtaagtgaccta

SEQ ID NO: 19731 - DNA, 489 bp, Glycine max
  Intron number 2 from transcript Glyma14g17930.3 (locus Gly ma14g17930) derived from phytozome v7.0 (chr-ID Gm14; pos 20042854 to 20043342 reverse strand)
gaagacgaattccgcgttttcggagttattcggaggtaaattaacacgctttaatattttaccctctcaatttcgttgtggatacttctatttctctgttttggttgctatgatttttgtttggttttgctgattaggtttattttgaaaagaatattgattttgtgttaaatggatattttgttgaagactcattaaatttttcccctcaaatttgttttggacacttcaatttctcagttctttgttgaagggatttttcttcttttttaaaaaagctgattttgtgtttaatagatactatgttaaagacgcttaaaattttcccctcaattttgttttggacacttcaatttctcagttttgttgctgtgattttattttttgttttgttctactattaggtttattttgaaaaaaaatgattttgtgtttaatgggtactatgttatgtttgcagtgtttgggttgcacgtagaccacctggtt

SEQ ID NO: 19732 - DNA, 668 bp, Glycine max
  Intron number 1 from transcript Glyma20g38270.1 (locus Gly ma20g38270) derived from phytozome v7.0 (chr-ID Gm20; pos 45909680 to 45910347 reverse strand)
ctgaatcttccatctccatttttcacccgtgagtccgcccccttttccaatttcatcttctttttcactctctatttctttcaaatgcagcatcctagttgggtggcttggctatgcattttctcagatacccaattgttagataaccgtacaaattattatttttaaaattatgggttcggccagttattgtaatcgttaatttgttgagaatttgataaattcctaatgtactcattttacagagtcaccttgttgtgatgttatttgatattgttaaatgcgaagaaactttggtttagtttctgaagtaaggctttgtcattttttattgcaaaaggcgcattatctttgatctgttctagacttccagttttttttgctctatgtatgtattgaataggggaaattcaaattagagggatcttactttgaaaataaacagtgtcatattatggtatattgagtttgttgtctctatggccacctcttatgtgtatgaattgtgctgctaataatattgacaccctaaacatgtagatctgctagaggtagtggagtctttttggatttctattcattattgaacatgaatcttattatggctttttttcttttgttttcaattttgtttggacgattaggatttctttgccagggttccagaa

SEQ ID NO: 19733 - DNA, 412 bp, Glycine max
  Intron number 1 from transcript Glyma17g14400.1 (locus Gly ma17g14400) derived from phytozome v7.0 (chr-ID Gm17; pos 11147962 to 11148373)
cagcatccaaagcatacatcgaaacagttcaatctgtaagcattatttttaacaggcaaatgttactttcgttaattttgttagaaatattatttaatttggaacctctactttcttcctttatgtctcgtcaatcttaaagcgtgtaagcatcttttttgtgtttgtttggtctgtttctactgcattatttaccagtaatataatcaaaatagtgtatataaattaaatgaaggacgatctttattttacctgcaagcatgttttgtgagatttagttagaccaaatctaaattctaaaaaattgattattttttaatatcgataaatattaattgttaatttttgttaatcgtgttttattgttttctttgcagtgtcggattttccgggaatccggggtggcggagct

SEQ ID NO: 19734 - DNA, 635 bp, Glycine max
  Intron number 2 from transcript Glyma17g37260.1 (locus Gly ma17g37260) derived from phytozome v7.0 (chr-ID Gm17; pos 41056383 to 41057017 reverse strand)
aggtaaacttgtagactttgtggcattgaatcacagttcttttcttttctgttgatataattgccttgatctgtctccagttcttgtgtttcatatagttggtcttctaatttgtgttcacataaaattatatagtgtatgtttagtttattttgaagtacaaagcttttttttttttcgtattttttctaagagaactatagggggggaaaatattgttttccatgaaataatcatatttcaaaacattgttccaaataagcattttagctaacagtttaagattgtgtgaagttattattttttctaatcttgtatgttattttccccccgaaaaggtgtatgtgttgcaagtgctatatattactaagattgctaatacactagcaagtgagttgttcaaagagtaaatactttctctgtggtttggttgatcttttgttatgcaatttagttttatacatatcctgcattagtgtttgattgaactgtgtatacttagatactaaaaacacagatagtgctagtgatgatggtgatgtgatgagagtgttagctagtgacttaacaactcttaatcctttctttgctcttctggcaggtggataaaagatacagacagtactgccaccaaa

SEQ ID NO: 19735 - DNA, 574 bp, Glycine max
  Intron number 1 from transcript Glyma15g15910.1 (locus Gly ma15g15910) derived from phytozome v7.0 (chr-ID Gm15; pos 12248576 to 12249149 reverse strand)
ttggtttatcaggacctccttacaggtaaactaatctctctcttttttttcctatcgcagcttttccttgtcgatctattgccaaagatctgcttaggttgcgcttctgatttttccattgtagagtattaaacttttatcgacgcttggatctggctttttttcttctcgatttaattactgattgtggacaagcgtttgtttcacgcgtatctgattattttattattttatttcttgtcgttaattatagctaggttattgatttttaccgatgttgtttgatttgattaacgtaaaacgctttgattttcaatagttatgggaagcctttagtcagtgattgtgagttccaggtttttattggttttattgtttttaatagtattgcctatgattcgagtgataatttaaagctagactaattctctgctttacatatttaggtgtggtgtggtgtataaaatattatttatgaaggaattttgttttgtgccattctttgatttttattttttttgttggtttctgttttgcatgtaacattgactatgtgtactgccttgtgtaggtg

SEQ ID NO: 19736 - DNA, 633 bp, Glycine max
  Intron number 2 from transcript Glyma20g32210.1 (locus Gly ma20g32210) derived from phytozome v7.0 (chr-ID Gm20; pos 40827157 to 40827789 reverse strand)
gggcttcttggcgtcttgcattaagaagactagaggtaagaagatgctcccttttttctatcacttctttcattttctgagcagccaacccatcacacgttcatgatttagctagaaaatctgaatgagcatgttgatagatctaaggaaacagaaatttttgaaacatactacatgctaattggcctttgcggatgaaaattatggatgcattataactaaaatggatgtaatttgaaaggggtaaatagtacactttattttgaactggagtagggatgttagtacaagacaaacattgaattcatgaatatgtttatgctgggactatattgttcacatttaacagaaggtccttcattattcttcacaccatcttttatattagtggcttgtttgtattctcctatttagaccactatttttcatttcaaaaataaaaactaggactagggaaaaaagaaaaaaagtgtttcttgctacaactaaggtgaatggatgagggaaacagctacatttgaatttctgttatataccggaaatctgtttgtctaatgagacaactcttcttatgctttggattctgatgatttaacaggagatattgcaaaacgtttgtgtacagcagcagaa

SEQ ID NO: 19737 - DNA, 527 bp, Glycine max
  Intron number 1 from transcript Glyma20g32210.1 (locus Gly ma20g32210) derived from phytozome v7.0 (chr-ID Gm20; pos 40827830 to 40828356 reverse strand)
ataagcaaagagtccactttttgtatcaaagatccgtgagtttcttttttaacaatttattattttattatatactttttttttttttgcatcagtttggtcattttggtaaccttctgagctggggtgtgggaatgcatagacattagacagtttaatttaaagatgaacaggtagatcaataagttcagttatagtgattgttggcatttggatgcaggatggccattgtcatgttggtttaaaatcaatgtttttaaatgtatgcatataagttggtttactagaggaaagctcaaaactgaaaactcatttcatcgagtttatatttgatgttgatggacatgttgttagtgagaaatgcagttggtgttgaagtgaattatagaagttattctgcttgaactgtttaatgtttatttataattttatttataacgagggttggaaaagaatagagagagatgaatttcgtgataatggatatcaatggaagatagtacttatttcacattcaaattgcaggg

SEQ ID NO: 19738 - DNA, 548 bp, Glycine max
  Intron number 1 from transcript Glyma18g10270.1 (locus Gly ma18g10270) derived from phytozome v7.0 (chr-ID Gm18; pos 9111860 to 9112407)
cggctacaccgttaaggccaccgttcgcgacacaagtccgtcaccgctactctcctttttttttttcttcattttttgttattttcatttccttggtataatcattgttttaataatgtaatcatttcattatatatatatatctactataattttataattttttcaatttttttttcctaatatttctaaatttccatttttctactttacaaagtacaaagtagatcgatagaatatcgagttaattttcattttttctgtcacttgtaatttttttgttagcaaatgttaatagttagtttttgcttactagaaatattgaaacttatgatctctttcttttccttcaacacggaagatagatagatctcgagattctgtctccttgtatttctaacaaaattaagccaattaaaaaaaatatcaaaattggttcgtgcattatgattattttatctcaatgattaataaattaattaaaagattgaataatgaatatgtaatgtgcaggtgatccgaaaaaaataaaccacttggttggcctc

SEQ ID NO: 19739 - DNA, 1025 bp, Glycine max
  Intron number 1 from transcript Glyma15g01830.1 (locus Gly ma15g01830) derived from phytozome v7.0 (chr-ID Gm15; pos 1205424 to 1206448)
gctgcacctttggcctctgttacctttcaggtaaattaattatttggtttttcacgttatttctttcgtctttatctgttttaagtttagttacagacatattttaagatcaggggcatcacgtggatgatggggggtttatccctttatatcctttcacgtgggaggccacaaccaaccaatctcttcttctgcgttttttggtgtcttctgtaattccattgattattagatgtacaatcgttgaagccacctcaatgccagataggctgttggaaaataaattttatcaaggaaagaaaatcagtctttagtccttctattttcggtaaaaaataattatatacttttatactatgaatgaatttcatcttcaaacttagaaaaacaaaaaatcacttgaattcagtctctcattctcaagaaatcatcgtgttttcaaagttaaaagaaatttaatgcacgttttttaaagtttgatgatcatattcatcgtgtttgactttaaaaaccagtcctattgtcttattattcaattatttgtttgtggatattaacgaaaatcatggtgcactgagtcatacacgcccagaggcaatattaaaataaattatgggaagagggcaacgatggattctggattactgaagaatcatcatcaattactccacgatcaccgtcatccaattgttgagaattccaccaattatgaaagtcgtattataaattgtgacagtagaatatgccagtgctaataaagttgcatatgtgatatatgagtcagtgaatacttcaaaatttgctcattattatgttcagtgttttactggaaaaaaattaaagtaaatacatatcttctttaatcgtggtcggtgcaaatttttaaaaataattattttctaaaacaattttatatgtttaaaaagatgaactcaccttgatcacatgaactcaaatccttcttataagaatgtgactgaccacaactgaagtgattattttgtatatgttgaatgcagaacgct

SEQ ID NO: 19740 - DNA, 849 bp, Glycine max
  Intron number 1 from transcript Glyma19g39050.1 (locus Gly ma19g39050) derived from phytozome v7.0 (chr-ID Gm19; pos 45869218 to 45870066)
caattttcattcaaagactttggaccaggacccaggtatttttgctcactccttcctctcctctaattttgacccaatctcttgatttttgtcattgtctgtgcgggttttcattctcctcatttcattgttaggtagcatttagatttcgaaattgtgggtttttgtatttcactgtaatatagtgcgattttaaaagccaatacttagttcgtgatccaacattgtcagacattttagcaaacaacaaatggacacattggattcagattatgagacaatgcttaggaattatcaaaattgctttcgagaaatttaagcctcctagtttttattcagttgataagaattctgttgtagtttcagtgctctacgatttttttagggtaaaggtatttgcgctcattacttctttattttctgtgctgtgcttataaacataatttacgagaactttttgtttctaggttgataaaaaaaacttgccaagcaatttatttgttatttattttagatagaaagaatctttttggtacttctctgaagatttgttgcatttcatttgcatctgcaccttatgggttagcttattattctctttgtctgaatttgaattccgaagtggatactattaattttgccacttgatctgtgctcatctgaattctaagccacataatctgaagcacacacataatctgaattgggttaataatcattttgcttaaaattaacttttaagtaattcttttcattgatttaatagtgaccttttgatcaaatgaaccttgaattttgttagtgttttaacgttatacatcctactaatggcgtgcaggttcttggcca

SEQ ID NO: 19741 - DNA, 362 bp, Glycine max
  Intron number 1 from transcript Glyma14g07980.2 (locus Gly ma14g07980) derived from phytozome v7.0 (chr-ID Gm14; pos 6030508 to 6030869 reverse strand)
gtggctccatacctgtactcacccccacatcactacttttcttcctttttactaatttctaccctccattgtttttatttttattattactaggtgggttcttctaattcttatcttgtcttttcttttctttttctttttttcgtttttttccttccttttttgctatggatgcatttttctctaagcatcgccatcacgttcaattaaattttttttctagaccacccactagaggtaatagtgtcacgttcaattatttagtatatgaggaaacaatattagtatgacatgtttgaattagttaattgggtttcatggtcgtaggttgagcttggagagcttgaatacatactgaggga

SEQ ID NO: 19742 - DNA, 964 bp, Glycine max
  Intron number 1 from transcript Glyma18g04480.1 (locus Gly ma18g04480) derived from phytozome v7.0 (chr-ID Gm18; pos 3225044 to 3226007)
tcaactatctactcctcttcttcacactctctgtgtgtaagtgcttacattacattacaatttcactcttcaactgttctggatttttgtttctgttgataacccttttgtggacaaaacggtgtttttagtatttacaaggaacagtcactaaccaaagcatctttggtctttaagtaaacatttggttctgtttttttgctcatctaattgcagtgagcaatatgattcatgaaagaagtaaattttccatcttgtttgtgtggttcttctaaatacctcccttcactcaagaaccaaagagattttggtttccataattcccgttaagaaaatgtgtttatagcaggaaaacttgttttgagtagagtttcatggtaaaattgtgacttttgatgggagcattaatgctctatagcctgaagaaagtgttggatggaagaacactccaaaaagcgtgctacatcctgtagttgctatatgatcctcacctactcttgtgctgttggaaagccaccttagttgtggactggtcacccttagcccaccttagttgcggcctttttgggcgctgccttaactgtagcctcaagggtggtatttagtcccacatcagttagagaattttggatattcctcatcttacaagccgattttgtgaaattgagataagccctaagcccaaattctatgactttctcattttgtcatccctgcactattgaagcctaaacctgccatgtatgaatgattcctaattttgtttataatgtaagtgtggaaatctgtcatttaactcaatttgaaacatcttgttcagaatacatttcatatttttcccattaggccatttattccgacattttggttttattgattcaacagatctgcttgaacaggtcctgatgttctgctttcttttctcattgacaggggataaagcaatctcaatctcttcttcata

SEQ ID NO: 19743 - DNA, 602 bp, Glycine max
  Intron number 2 from transcript Glyma19g00780.1 (locus Gly ma19g00780) derived from phytozome v7.0 (chr-ID Gm19; pos 489046 to 489647)
tccttgcatttttatttttttttatactcaggaatgtaaatatttttaatgctcattatctgcaagaaaaagattttttggacaaccttgagagaggatagataagtgattgattttattgatgatgtaatgcaatgataggaagagagagaaaagatagttgttgattggttgtttgaaattttttgtcattaaaatattatcactctctatttgcaattaggataggactaaacttagatacagttccttcttctatcagaatttttaagtttttatctcagcaatttcaatatttattatgctgattattcaactcaaactccaattataattcaagaacaaaatcagaagcaactaaaaaactgcttttaggttttctctgattaggatgttcacatttttagttggtggatgcttatttgtaggccagcgcattggggaccttttctacaccagctgcagcagcttgcggcaaactccacagtgttgaggagcttgaagcacgtcactcctgagtcccttttgcctttggatttcaattccactactggaaatgggattaagcttctgtcttctgactggaaaacaacacctacgct

SEQ ID NO: 19744 - DNA, 724 bp, Glycine max
  Intron number 1 from transcript Glyma19g42930.1 (locus Gly ma19g42930) derived from phytozome v7.0 (chr-ID Gm19; pos 48746679 to 48747402 reverse strand)
acgctcgacaaaacgccgttgcttttctcgattccgtactctcttcctcttttcattttccccgtttcgtagggcaataacatgtttttacttttatcaatcccttcatgcaactcaccagagcccatttgtgaattttcatatactctgcttgcatttttccttttttttttcctttcaaataactgcgatcttttttacgcaagccctaatgagcataaagcacacaactaatcgctgatatgtatgtctctgtactctctttggatgtgtttatctcagtaattatcatagattgatcgtgttgtgtcaatttaaaggaacgagctgtctttcataataggttgttttcatgctgtcctcaattgtgctgtgtagttgctgcttcatttgtatttttaaaaacaaattagatttatttagttttttttactttaaattattgttatgatgtctttttcttataatcaaagtagcaattgtttgtttctggaataagcttgtgctgctgctgctgctgctgctgctgctaggattactattggtttatgagtgtcgttactttgtggtgattaattgtcgtgctttaatacttgacacgcgtccgggaatattttaacaatttatgagcgctgctactattttatggtgattagttttcatgctttaatgtttgacacatgccggagactaattggtttgtgtaaatttctccagatcaaga

SEQ ID NO: 19745 - DNA, 504 bp, Glycine max
  Intron number 2 from transcript Glyma14g10300.1 (locus Gly ma14g10300) derived from phytozome v7.0 (chr-ID Gm14; pos 8467015 to 8467518 reverse strand)
gagagggtggtgagttttctagtacagtatcgttcaatggcgtacccgggacccagagttcagtggggacaaattatacaaattgaaatcagggggttcaaatatataaatatagaagaaataaaatacaaaaatatacgattttagttaagaaaaaatttacttgtgaatttttaaaattaagggggtgcaagtgcacttgcaccccctgaccttaatgtaggtccgccaatggtatcattaatttctgtacttgctttattgttatttttgagaaaatatatgtttccttttaaaaaaattatgatggaagttgtgatgcaatcttcagatgggtgaatctgaatccccgtattttgtgacgaaaacaaatctcactgcaatgtgtatttattagttgattgatcatagtaagtcacaaagaaaatgcgctttttctgcttgcatagatgtttaattggttggttaagtctgggtcggttcttgtaggaacgaataagacgt

SEQ ID NO: 19746 - DNA, 778 bp, Glycine max
  Intron number 1 from transcript Glyma14g10300.1 (locus Gly ma14g10300) derived from phytozome v7.0 (chr-ID Gm14; pos 8467592 to 8468369 reverse strand)
tcggattaatcggcgccaccgtcactgctttctccgtgagtttctctgttttttttttttttttttgcttttcgaattgttgtttgaatcttctgcaattatgttcctagttttttaatatgtttatcttaattgctatttctctcagaataatgatgttagggtttgcatgctcaattttaatctcagttgcaacttcgtagtatcattttttttttcaattcggttattatctcgatctcgcacagaccgtgtttttgtggtggttgtgccgtcatgtgaagaagtgataccgtgttcggattcacgttagatgatccagaatcacttaaaaataccagctaacgtgagtttaagtgaatgttcaccatttatggttcacatgtttagtccagaattgatcaagttaaaagcaagttgcttttgcattagacaaaaaatcttataatgagttttcctgctcagttgcttttagaataaaaactttcaaactttaagcaagatcaattttgcaaatgcttatccaaacatacacaatggtgcaccaaaatcattttgattttcggtggcagattttttttagtaatcttaatattctatgagcatatgcatttcctctcatgtcttcagggggtttgctttgtataagaagtttaaaaaaattcgtgtttgaactacaagctagagatgcacggcaaccacagtgaaactgatcgcatgtgctattattgaactgtttgtagctgtccaggtcgcaggcaaaaggaggcagctcttt

SEQ ID NO: 19747 - DNA, 701 bp, Glycine max
  Intron number 1 from transcript Glyma17g12340.1 (locus Gly ma17g12340) derived from phytozome v7.0 (chr-ID Gm17; pos 9345662 to 9346362)
ttgagaaggaggaagagtacattatcagactcaaggtactctttctatcaatgttttgttgagttgcgtcaagatctgtttctttttcgattctttaggattccttcaattcaatggtaaataactaaatattaaactgttaggatttctttcttttgtctggatgagtttgacgttattatttgctttttaatgaataagtggattttgctattttaacttgtccaataatctttctcgaatttagatatttttcgtggatatctgtcaattttctctctctccataatttaaaatatataggaactctttatgttgttacgaaatataatttcgattagctaagaaaattggtagatttacgagttatggacatcgatggatgacgaattttggtgtgatcaaacaaaatatcgggtttcgattaggtaatacgatgaagattcttattccaatttggaaatgccaattcgtctgtcttgcttttcttccgcacaacattatgactttctttaggccttttgattatttatggataactgtaaccgcagtttaagcttataaagtaagatctatttaactctgggttgggcgcagggtgatttatattcatgaaacagttagataatgggaagttctaatgtatattgtggttggaatctacaggagttacaagatagtgtggcccaagttaagggttc

SEQ ID NO: 19748 - DNA, 726 bp, Glycine max
  Intron number 1 from transcript Glyma15g18370.1 (locus Gly ma15g18370) derived from phytozome v7.0 (chr-ID Gm15; pos 15109328 to 15110053 reverse strand)
gcaggtgttcaaataaagttgatattggagaaaggtgttttggaagacaactttccccttgggggtggccatctgcgtttgaagttgcaattcatccttagcgatgaagagcgcgacagaattcgttcattggtactgatttcttttccgtgttacgtttgtaatgcagttatgcttatgatctttcttcaacatttgagattaaatgcctcaactcaattattgccttggtacctagctattggtatagaaattaaattgaaatgtacacaattagaatatagccacaggttgatacatacacatagtaattgaatgttattagcttatagagacatcatttgatgttggggctattagtgcttccacattaacttctcaaatcttataaattttgcagagacaatctgcattaaagaaaaaacatgagcttcttagtagcggtagaagagctgaagaaagtgatagtagaaccatgattggcgatgctgcattacccttccgcagaaatgatgaggtctcaggtttgatcttactttgctgattaaagaagcaatgaaaacttaaagcataattacaataataagaggagttaatgagtaaagcacaaaaaaacttaatagttatgaatgcggtcctacattccctcaaatgctttttcctgatgttttaagtgctccatcttctcaagaatcaccaaagaaacaacctcaacaagaagcccaa

SEQ ID NO: 19749 - DNA, 958 bp, Glycine max
  Intron number 1 from transcript Glyma18g48330.1 (locus Gly ma18g48330) derived from phytozome v7.0 (chr-ID Gm18; pos 57767934 to 57768891 reverse strand)
acttgtaagtatctcaatgtgatcaatacactgcttaattttgttttcttttttaaatctaatacccttaaagtctatgataatcaatgatggattctaaagtttaggcctcgctctcagaaatttctgagatatttctttgattagatgaagttaattgacttggaagaacaaatttaaaaaaattctgggggttctaaatttcttagtatcaaattgtcgtgattaggtacacgtaaaccaaccaacatggtgaggtatggttagcaaataatcatgttgctaatatatgtggtcagaggaggtggatccccctatctgtatgtatgaaataatatttgttgggagctagaggttaaattcttaaatgtatctttgttcctcgaggattagtctcccactcaatcaattaagagaaaaacaagagaattgctctaccattcctgtggttggagattgatgtttttccttgtcaactgtgaagtatttcattactaggagagagagaaaataaatttctctgataaacccagatcttgcatgttagtttttccctgttaaatttgctggctttcattttttaccaaaataatgatctggtatatagttgtaaattgaaaacgaccacgcctcttaaaagaatatagtcttgcttgtgaataatactatgtccaggctggctttacattggaaagagaccacccacccatgtgaccccaccactttattgcatgtacgcagcagcaaacttttaaacacaatcatgatcttcctgaaaatttatgtctctacacaaatctatgatcgaatttagaacaagacacaaaaggaaatgccaaaactcctaatgattattgacttgcttgttttttaacttaaaatatttttacatgctattcagcaaattcctttagtgttaacttttctgtctctcttgaaatcctaaggtactacaaca

SEQ ID NO: 19750 - DNA, 973 bp, Glycine max
  Intron number 1 from transcript Glyma17g13760.2 (locus Gly ma17g13760) derived from phytozome v7.0 (chr-ID Gm17; pos 10544579 to 10545551 reverse strand)
agaaattcgtgtggctttgcttttagacaatagaggttcttatcgtttgattggataataactagtttaaatttgtttataaattcctgtagaaattcttgtatttttacattcatgctaacattagtttgtagatttgtcttgtgtactatcgctggaaagatgctagtctgtggtgttttatttatgttttctttttttgatttggtttcaatcaagtgctattggttctgtctctaggactttatactcgcttgattatcatttagaattgtactccactgtcgagcctatggtttctcatcgagtcattgtgtttcattttataactgctagcaaattttccctattaatacatgactgttcattttctgacccctacatctatttgccagacagaaaaacgaagtgtgaaattgagttgccctgttgaactttcaaattgaatctgtttttttcataagggttaagatgggaaattaatgtgcatatttcgataatcctattataacagggaggtttcatccaataatggatcctcattctcgttttttactagtacttttctttttatttatcgtttgaaaaattaaaagagtgaaacacaatgcttcatgtcttccataaacttttaaattgaactaatattttgtgaagtgatagctcctgttttcattgatgagtagctcttagatttgtattgttcctcagtgctgcacttaggttgctattttaatttgatatgcttccatatgtcttgcgccaattttccaagtaatgacaagttagtgagatagggtaattttcattatttggcttggttaggtacttaggccatttaagattcttgctttaagaaattacaatatatatttgaaattgttaaatatagtttcagaaattcaagtggagtataacttgataaaatgttaatgcaggcccacctggatctgggaaaggcacccagtcacca

SEQ ID NO: 19751 - DNA, 925 bp, Glycine max
  Intron number 2 from transcript Glyma15g04560.1 (locus Gly ma15g04560) derived from phytozome v7.0 (chr-ID Gm15; pos 3179464 to 3180388)
ttatctcataaaacttctcttgattggcgatagtggtaagtcactcctcatgatttcctcgattgttcctacaggttatgaaaacacaaaacattgcaaacaaaaatgacatgatttttgtctcgaattgttgattttggattttgaggcaagtatatttaatcttagagttttaatcttttcatgatctagcttgtgcaagtatttgaataattgtttctattaccgtgatacagttaggagattctgttaagtgatgttatacagacatatctatataaaaagcactccgtcaatattatttctctctctctctcagatcatattatttatcatatctatacttttcagagtttggtgcccaccgaacttttcccaattccgttttatcatagtctgatatctgaacatattggataacttctccatcgtatatagttaggcccctctctaccttgacaatgatatgttttattgcaacttgtactaaattaatgaccactttttattttgcagcttctttagagagttttttttttttgagtgattatttagtgggaaaataaaaaaaaccaaaacatggcaacggaagttgctttttagctttgttttcttgcgtacttttaatctgtttactccattgggaagaagaaatatgaccgtagcttggcgtttcacatgaattattttcatttactacagtatatatgtcatagatattccatcctctctgtttattttctttttagaggatcaaggaatagaataaaagtattatagtaacataaagaaattaaaaaatactgtggccatagaaactgcaagagatgtgcattggtatgcaaattccttaattttcacaaaccttttttggttattcttggttgcaggtgttggaaagagttgccttcttctacgattctct

SEQ ID NO: 19752 - DNA, 709 bp, Glycine max
  Intron number 1 from transcript Glyma20g11330.1 (locus Gly ma20g11330) derived from phytozome v7.0 (chr-ID Gm20; pos 15995979 to 15996687)
gttaaggttggctgtccaatggataaatttctttatgccttatcttgatatttgtttgacagttagtacctatctatttaggttgtagaaattttaccacttgatgtgttgaaatagagcttcaattagtcaaacttttgtaaggagtatggtgtatctggtgtgcttcagctctactataaaaggatgatgaagattattataagtcatgcttgacaatgtatagtgctactcattgttgattgctagtagtggttctttcatggtatttttactgttgctgttttattcttgcaataaagtgatttggcgtttatattttatttcgaaggcaacttgaactaaactggttggtggtattacaaagaagtggcttgttgagtgctcaagttagttttggtggaatttaaaggataatgctttatggaattgaaatacacagtggaccctaagccattgtttgttaatatttacttatttgaaaattgttttttattagtgctgctggcaggggatgggggttgtatgaatgagtatttacttatttgagattgttacaaagaaggaagattttctgtcagagtgagcatggggattaactattatcataagtgtctatgtttctggcaattttcattcacatttgatagatcccactttttcgatacatgaaagattaattttttctgcgatatcactatatagatta

SEQ ID NO: 19753 - DNA, 835 bp, Glycine max
  Intron number 1 from transcript Glyma16g05800.1 (locus Gly ma16g05800) derived from phytozome v7.0 (chr-ID Gm16; pos 5185859 to 5186693)
caaagacaacttccaacccagtgggggtatgtaatattcgatgttttgatttttacctgcattaccatagcccctccccacccttcatgaaatctattggtgtggtagggttctattgctattctttatcattttgttgaccgagaatttatcattttggaaactggagagtttaaaatggcacgattgcatgcaattttatttgattttacaatgctggcactgctctttttgaaaacagtgagagggaagtctttttgatcaccgactcctttgtaattatcagtgttttttttcctgcaatttgccaggtactattgttattaaacttaaaagcagtgacaatacatctgcttgttacactctctgagttagttgattctttaattttgaagattctcttccaaattcacaaaatgtttttcttgacacagctgtctctcaaaatcatggggttgtaggttaaactattaatgttgatttaggtgcccaattaacatgataagagttattgtgcacattttatatttgtaaagaattaaaattttctaatacaatgatgtaactgggagttctgtagtttcttttacctatgcacatctgtttggttgattaatcaggtttactttgtaatagttgaatacctatgtagctgtatcttttgttcttatggttgaatttgagtggttacttaaactataggtttgattgctaaatttttatccctttaatatccataggttttacctgatctttggaaaatgataggatgatatccatctacttggctttttgctcaggtgaactcaactgatcccatactgaaagacagttg

SEQ ID NO: 19754 - DNA, 872 bp, Glycine max
  Intron number 1 from transcript Glyma20g28860.2 (locus Gly ma20g28860) derived from phytozome v7.0 (chr-ID Gm20; pos 37809654 to 37810525)
gtttcttccgacaaggtattattaatccaactctcttgtttgtttcctgtgataatcttttttctctttttcctttgttaatcagcaaattgtaccttttgcctttaagaaaatacttcttcgcttagctctgcttcgacaatttagcgcagatttcatcatgaataattatgttaattttatttgaattcaacttggctatttgtttgtgtttgtggaatatttttaagtttttatgaggaattattgatattttcgtgatttgttgcgaagaaatttgtggaaagaacaggcgccatgttacccaaaaaattccttggagttttgaaatggaaacctttaagtaacgagtaaattatgctgacacgtcaaatttctctcggacaccacaactatgctaactctgcttaattgtttgaaaaagattacaccgtgagtgtatctctataaggaaaggatgctgtaaatgttaaaaaaaaaaaaaaaaaaagctgggagttgtgtacaatcttgagaaatctcaggtggtgtcaaagtagtttattcttaagtaatgctgattatcattgttcctactcctggagaacttactttttgtctcaatgtcttatacggtattatggcattcgtgtggtgatatttctaaagccagctatctatttgaaacatattatttgctttccaattactagcatattcttaatcttgtatatattgatcatgtgctcaaactatatcaaatcagttagacgtgtacttctgctgctgctactttttcagttgttgagaggttatatgaattcttcattaagaactcccgataaataagaggatcttattatttttcattttttcataggatccacgagagg

SEQ ID NO: 19755 - DNA, 478 bp, Glycine max
  Intron number 4 from transcript Glyma18g11350.1 (locus Gly ma18g11350) derived from phytozome v7.0 (chr-ID Gm18; pos 10122765 to 10123242)
ctgacagtattgcagaggagaggtatgccatgaatgataataatcttgccataagtaaagtgggtaatgggaaggtgtttatgcattttgaaattaggtttcttatgctctttagattatcagacaaggttctataaaataactattagcaaatggcataagcattccagcagtaatattctcctaatcctcattagaatcaaatattcaattttcagttttatgaaattataatttcttgtctagaaattaattaagtgacttatctgacttcatcaaatgtatacgaaagaagttggatagaaattaggtcaaatttaaatccaaaattgatttgggaagatcttaattgtatttgaatttttaagttttgtatggtgcatgacatttggaactctttgttgttgtgaagtagctgaaaattcttacttttctttttgtagattacacttggttttctcctcgccaaggcatttag

SEQ ID NO: 19756 - DNA, 904 bp, Glycine max
  Intron number 1 from transcript Glyma18g41910.1 (locus Gly ma18g41910) derived from phytozome v7.0 (chr-ID Gm18; pos 50893813 to 50894716)
gcttctgctgctacagtagaacacactttcattgtaatggctaatcttttacttctttactctacttgctagctctgggttgtgtttctttttttctttcttctttctttatttacaaatgaatttgtctaacttaagtaaagttaaagttaaacaatcttatccatgttttaattacagaaaaatcttatataagttgcagtcactcaaaaaatctttattctacagataatcacagaaaaatacgactgatatagttgcaattacagtcacaatgttcttgcggacgttgcagctgtattttcagttgtggacaacaattttaaaatcttaaatttttggtataattgatatatacaatcaatcattttgaagtttataaaggaattgcattaattattgtgctattaaaacccagtaagaaaaaaaaaagaaaaaaatataaatatgttaggtaacataataaattgaaagaaaatctgaaaaagaaaaagactattaattagattttttaaatgttaaaaaatcaatgctatttttttatttgtattgaccggtcgcccttacacagtcatgaattaattattttgtaatcagtatgactgttatttaaccttttttttgaaatctcagtatgagcttattaatccttatccaacacattactcaacaactctgccacctacctaattaaccacttgcaataagatattaatgttggctctttcacgtccatactgtatgctgtaagcctgtacaacatactagtaagaaactaatataaaattatgcatgattctaatttctgcacaaatacttaatttaatatggataaatgtcaatttgttgaaatttcatgtgctgctgcaggttcaaaacaaggctgtcacacgcttgtgcaaag

SEQ ID NO: 19757 - DNA, 1043 bp, Glycine max
  Intron number 3 from transcript Glyma19g36450.1 (locus Gly ma19g36450) derived from phytozome v7.0 (chr-ID Gm19; pos 43735128 to 43736170)
gagggtttttgacgcaaagggccaggtgagtctgctgcttcttttttatccttctcttgaaagctaacatagagcgactatgtgcccatgatatgatgtttctgctgtcaagttaaagcagttttccaggagtgtaggattaaaaaaagtactgttgaactcaaaacacatgccacagtttcattttcgttatgtttagactgatggattggaaatggatagaatggaactaactggaatagaatcacatcaattgccattgtttggagtgtttaaaataggagatacttctattttctatccccctgtacaggatgcaattgggtggaactaagttattatgcattctccttatcattctgttcacttctatatgggctaatattatttatattccatcatggatcattcaattgtgtggtaattttattctaattcaatccacaatccacaccactctatcccattctacccatcactagatatgcaaacattgcctttgtgattccttatgcattttttttagcatttgcatatcacacaagaataaaatgtgagtggttaatgaaattctttgcaaacattcagcttattggcttgcatatcatgtaagactgggattgaaagtcaaatcctatgaggagttatcaatggaataagacaattcaatttcatggaggtttcatttgataatcatccagaatgaatgtcaatcttttgcaatatctagttataaaaccagctcagaaggggtcatatttatcactagtagttacatctccagaagatatagccatgactcagtattagtgaagccttttgaaacaaattattccatgaataagttacaacttattataaaatgctaattgagatcataccgaaggctggccaagcttctaacatcttgtacacttttgattggtatttagtgtgtgattgattactgagcaatttgcttatctgtcttgagatcattttgctaatacaaatgttccttttatataggttcttgggaggttagcatctcaaatagctactgt

SEQ ID NO: 19758 - DNA, 943 bp, Glycine max
  Intron number 1 from transcript Glyma20g22180.1 (locus Gly ma20g22180) derived from phytozome v7.0 (chr-ID Gm20; pos 32105924 to 32106866 reverse strand)
tcttcaagacctctgtgtcgccgaccttgcctcaggtactacaccttttgcatcactctattctccttttcccttgtatttctacagagcagaggagcgtgcaaattttcatgcatgattcatccaacaagttgggagtgctcctaaaatacttcaaaaaatctcttgtttgattttctactctgtatactcaataaaactgagttctgcttctgcctcaattttacatcacaattcagtttgaaagggaagaaaatgaagtttacttttgggaactcagtttgtaaaattaagttcattcaaatttaagtttttaagctttaatctaagcatgcaataaccaacctggaaaagaatatctcttcccccgcgctttttcttttaacagtatttttcccctttgaataattagatttgatcctttttctttactcttctatttttttttcttttttcccctttccttcatttggttttctttcaaccacgttaactcaacatcattctccaacacataccactcctaccaactactttagttttgctttttcctgactccagtgtttaatcatgttaactagtatattattcccactaacataattaacttctatttgtccctttcctgtttttatcaacaacacacgtgaatagttcctttgatttttttttttctttctaaaaacaacttctgcattgcccataaatcttgcatatttttctagcatgattggcaagtgcaattttgtagggtagacaatacttattctagcagttgagcttttgtgtgatgttgctatacctgtaaaaggttttatattgtcaattaataaaaaatcattattaaaaggatttttaaggtaattattataaaagttaaacaaactatactctaatgataattagtgggtgtgattgtaatggaaaacaggtgtgaaagtga

SEQ ID NO: 19759 - DNA, 772 bp, Glycine max
  Intron number 2 from transcript Glyma14g06370.1 (locus Gly ma14g06370) derived from phytozome v7.0 (chr-ID Gm14; pos 4624584 to 4625355 reverse strand)
acaagactggttctcttgccatcttcaaaatcgaggtttgtaattgactttctcctttttctcttgtccaagcaggggtatatgcctgaaaactataacatgatttaggaccgtgtcaatggttttaatcaatttttatgttacatatagtagttgaatttttcaatttacaaaaataattaataaaactcaatttcatgtcacgtgaatgaagaatgattcaaattatagtagtttgaacttggtaataatttctcatacataccagtctatttgtaccaatccaaaatcataatgaattcgccaaaatgattaaccacaagcataacatcgtaatagattggtaaagtactgttttatcttaattattttttacctttttgggctagagtcgatgtaaagctgaaactagaatcattgtgaaggaagtctaatttagttaattgaacgagatgcgtaacttattttaaatattttggcattgtcattgattcctataaaaaaaaaaaatcattttgagtatgatggtggtgggccactgaatttgataaacaaatatgggtttttttaaataccaagttaccaacttgtttggcctttgtctgaaagttctggctttagaagattgtgccaatctcttggtagttaagaatggacacgctgtgtagggagtattcaattactaatatcgcttaggatgcactcctgttaagtacttgctggttatgtttgtgtaggagccagagcacgttaccaccgtggaattctattg

SEQ ID NO: 19760 - DNA, 638 bp, Glycine max
  Intron number 1 from transcript Glyma16g08810.1 (locus Gly ma16g08810) derived from phytozome v7.0 (chr-ID Gm16; pos 8284615 to 8285252)
cattggctctgtgaagagctggacttttaccacaggtaaccacactttttgtaactcgatcagtttagaaaataaaaactgaagtaattgtttccttcaaattaattctcatatatagattcaacttatcaaaaacaccaccagagtttaagactcaattaattgattgaatagagcagatgaattgttataaatcttttagtatattattttgatttctgaagattaaaaaaacttttaaaactcatcttaaagaaaattacagtgttttaagtccctaaatttccgtcaaaattaattagtcttagtttttatactttaaaaataattattttgatttcggtattttatattattgttaattttgtccttcaccctatcatcttaattcctaagtttcataaagaaggacgaaactcatccattatcaaaaatacaaagtaaaataatttataatataagaattaaaatcaattttgacaaaaagttaatcaaggaaattgaaatacattttgtccttacgcttcttttttattgtgcaagtattactctattaattctcacatttttttttctaatgttaaaacttgtgaacaactacagaagggaaagttactacatataaggagagcattgaa

SEQ ID NO: 19761 - DNA, 534 bp, Glycine max
  Intron number 4 from transcript Glyma20g01730.1 (locus Gly ma20g01730) derived from phytozome v7.0 (chr-ID Gm20; pos 1250326 to 1250859 reverse strand)
ggactgcacacgctttgcttgttaggtaactctctattatttgttgtttaaactttaaaatgttgcttgtgttagaattttttgtgtgcatacgttaaaaatataaatccaacataggtatttgcttatatggaacctgtgtatgaaatgcattagtctgatgcagcaggtctttgcttatatcatataatgaaatagtgattatgttgtgagtgcttcttcttgcatttgcggatcagtgaactaaaaacttgtttactaaacttattatcttctacttcttggaatggaatccaaagcctagagtgtcatataaatatctagaagatagttagccaaaaaatttgttactttattcaaataaatgttcaaatgattgtaccatctgaagttgatgacagttttagaggaaaactttcttctttgatagtgtactagagattcttcctctttgtttcttgagaaagctaatatgatttctgatttggtatggttacagatattcgtgtgaaggaacccacactagaatctttg

SEQ ID NO: 19762 - DNA, 1009 bp, Glycine max
  Intron number 1 from transcript Glyma14g07740.1 (locus Gly ma14g07740) derived from phytozome v7.0 (chr-ID Gm14; pos 5855228 to 5856236)
ctcgacagaggagtgtaggtatttctcaaacaaacaacaaaaacaacttagacgctgtttttttttttttttttttaaatttcgaagacaatttcgggtttacaataactcacgcctgctcgactgacctggactcccttgacaatttgatgtaatattcaatgcaaatcttcattatgtgaattattgaattaaaactctgattctaattagaaaacattaaaagcaccgaagcggcgtgttttgtttgtcatctacaatgggcgttgcttaacaaaaaaatattgttttggtgtgccaagtgtgattttgagttgcttatattgctcatgagttgcttaactttgtattaaatataggagagagaaatagaatatttgtgagttatgcaacttgttaatagaaatacccattggagagaaaattaaatgagttgcttaagattgagtgacataaattgggttgcttatatcaacactagtggagatgctatgagaagtttcaaatttgttgtttatgttgattatgtttagtgtaaataaatattacgcagtttaattaggtaaagttctaattctaattgaaaacacctaaaaatacagagtaatgttatttttacaactatgaatcatgatacaaaaagaaagaaagaaacaagagagaagtagcaaaattattagatggtttagaaccactattgtcttgatcaatctccacatgatgcataattggatgctattagttatataaaggttggttgagactataaacacaagagagcagtatgagaccatctaataatttttcaagaggagtatgggatgtaataaatgatattgtagggagcgatagagacagaaatattgttgtatgattaacaatattgttgtatgattaaaaaatatatataagaaattagttgtaagtgttgtttgttgttgaaagtgttagatttgttatttgtatgtgaatgtgattgattgattgactgggcggtgataggtggtgg

SEQ ID NO: 19763 - DNA, 511 bp, Glycine max
  Intron number 1 from transcript Glyma18g50490.1 (locus Gly ma18g50490) derived from phytozome v7.0 (chr-ID Gm18; pos 59607766 to 59608276)
agggtaaaaagaagtggcttgaaataatgaggttttgtaattgactattgccaaagtcctaagttggagaatggagagggactcaaaattttggtgttccttcttcatgttaccacttcattattctttttaattgaccatgcttgattaaaaaataaaaaataaaaaatctgaatcccaaatatgtagttgagaagtcagcccattttgtccaaagctatgaacaagtcataaccaaagtaacccaacgtcgcggaaacttcaaaatgatcatgggccaacccagtttttaaaagcttacggcctacttagaaatatatagaaagacaaacaaattatatcaataagcaattatagttttatgaagccatataattttgaaaataattaccagcatgaattgtttcttttttctacatgttgaggtaagaaaatagatgtgtttgatcttaatctctttgctaattgcttcttttttccgtatagaataattctctgccattcaacaaat

SEQ ID NO: 19764 - DNA, 943 bp, Glycine max
  Intron number 3 from transcript Glyma14g28380.1 (locus Gly ma14g28380) derived from phytozome v7.0 (chr-ID Gm14; pos 34855419 to 34856361)
cattggaatcggtaagagacaccaagtaaattgtctattactatcggttctcttaatattacttttttcttacatggatttatgacatttatgcttataaatgaacatccatgtttttttgttttttatttttactttattttatgcagtctaaatatttttcatcttgccactatttccaatttttcgttattggataaacataattgctagctcatggaagtaggttggaaaatactttgtagcaaatgtttagtgagttttgtttttcagcttcacgatcaattttctttgctttttgcataaagaactatttagttgtggaggtgtaagactttatgcatcagtttctttgactttaaaactaaaatgctgtacttttaacttgatcgcttggatcttttgggtggccatggactcatgccatgggtgagcacagccaactccaagatcccaactcccttcaggctgggagcaaaacagtatggcctttccccatagagtttattcaagaattgaacaatgccctgtcccagagagatgcaactcaattccactcttccggcccttgtggaagttgggggacttagttatttttaggaagttttatcatcaaagaatggtctatggtatctaatgattgattgattgattgatcgatacttaaatgaacaactgcttcctttttattcatactatactcccaaatcatgttctcaaaccagtaatacaaatttcagaaaatattggcttatttttgcacaaggatcgtcagcactgagttacatcaagcattaatactagcatttctgctagctgtacataattgataatccagttcttagtctttttattttatgtttcttttctaaaatagaatgtaataatgcattcttaagttctgatgtttgtatgttgcagtttttgtcagtattgaattctg

SEQ ID NO: 19765 - DNA, 935 bp, Glycine max
  Intron number 1 from transcript Glyma18g33900.1 (locus Gly ma18g33900) derived from phytozome v7.0 (chr-ID Gm18; pos 39979192 to 39980126 reverse strand)
acaagtcttggattcaattaataaattttagttatttacatcttaatattcgtccttatgaaaaaaaatccatgattttaccattgtgcatgtctaacaatggagacttcttcatgctgaaattcactagaaatgctgatgatgaataccaaacaattctttataaccagagggatggttagtctcaagtttctgtcgttctctcaggttgtttcagaactttgttgtggcgcaacctcaagatttttaccaaaagtttggtcataccttattaaaattctacagatgtgaggtcttgattaccctatttaattggcatcatctaatttctgtcttttcaattatataatgataatctcgaatgctttgtcagatgtttgattctttgtcacttaattatgtgagatctaatctatatcatgtattaacatgtattcttctcttgggttgtgaattactactagaaatgtagcatctggtaaccaatttattttattagcatgtatagaaatattgtggattctaataaaatgtcatttgttaacatttatactgcaaattgttactgttgtctgcttgtcttttgttatcactaccattatcaaattagtaagctgatatatctgtgttgggcatcatattacattccttgataaaattagatattaatttcatttataagaaaatctaagaaaagaagtaatgaagccactgcatgtgaattcaaggattcattcatcagcatctcaatcttaatctgtgctatctttgtctgatccctccaaactatgctctccctctctgtctttctttgaaattttttctctccctccctctctccgaatgcgagcttcatcaatttctgcaacactagatctgaatatatgtgctttttttactgtatgactgtagctttgaacgatttcaacctataa

SEQ ID NO: 19766 - DNA, 488 bp, Glycine max
  Intron number 3 from transcript Glyma18g52150.1 (locus Gly ma18g52150) derived from phytozome v7.0 (chr-ID Gm18; pos 60853835 to 60854322 reverse strand)
ggaagaaggacttgttggagaaggtggaggacaaccagaagatgatggagatgatggcacaactgtttcagaggaatgagatgcagactacacttcttacctctctcacacaaagggtggagcagcttgagagagccttggcttgtgagaggttgaggaggaagaaaaacagaaaggatggttccaaaaaaaagcaaaatcatcctaagaatggcttcatctgacttgtgcaatactcaaaaggattattccatctttgtgtgattttggcccctcttttcttcccttgtaactagctttgtctttgaagttggtgttcattgtgatcattgtaattcatttttgcctaatgccatacaattttctcatgattttggaaactgcattgcctcttgttagttatgaatctttcttctatacggatagaaatcaaaatttacgatacaattcaaggcttttccattcctttgatttgactatgtagaaga

SEQ ID NO: 19767 - DNA, 957 bp, Glycine max
  Intron number 2 from transcript Glyma18g32680.1 (locus Gly ma18g32680) derived from phytozome v7.0 (chr-ID Gm18; pos 38105134 to 38106090 reverse strand)
gtggcaagaagaaggcctggagaaagaagagaaagtaatgccactttcttagagctattttgaatttgatttttcttttcttttaaggcgatgaatgagttcgtatctgccagtgtatttgcctgatctaggtttttatattatattaggcaaatagggatttcaaatggtgaccttagtagtaattcgagttaaagtcatgctgagccaattccctctttggttaagatttgaatttatttcatttacaaatttgaaatttagaaatgtgtttttcatttttgtttcttctgttcacaaccagagaagcatagaaaactctgccaatgttgtgatagatagaatctctatttcagtctccatgttaacggtctattctcacgactggatattgaggtgtttcatgaatgagcatgtgcatttatttatcttttgcaccgccttcaccttttttgctgcttggacagttggacgtgactatatattgtctgaaattttatatctcagcttccaatcctcctacataaatgatcgtatagcatgtatagttttttgttatactaatgtttttttttcttcattaagaataatcgtatataatcatattcatatctaaacagagggcctacaactatggtgagagtaagatattctctacaaagaaaactgattgtgaaccacaatagtgacatagcagctatccaatttcactgcaagctgaatacttatcatctctgcattatgaattattgttctttgctgttaaacatggctaatattttcaatgttgcaacattgtttagatcttgaatttaatggagattatttgaacctactatggattattttatatgtttcttgacattttgtttgagcatgtagctacattctatcttctatcccaatttcccaattgatacatattagctaagatattttttctggattcatataggt

SEQ ID NO: 19768 - DNA, 987 bp, Glycine max
  Intron number 2 from transcript Glyma14g05340.1 (locus Gly ma14g05340) derived from phytozome v7.0 (chr-ID Gm14; pos 3777287 to 3778273 reverse strand)
aacacattatttgtactggaaatttgtgtattaaagtatgtccagcttattgaaataattatttctgattcagttttgactgttgccatgccgcataatgtaatcaattgtctctactttatagttttcaacttatattttatgaaagcacaagggacactggtatgaaggtccgattttttttatctcgccttttgtcttttgagaatgaaatgtttttgttttaaaaaaatctcgtagttgtaagatttgagttcattcagaaaggttatctctcattacaatgtgtgtactagaacatttagctgtaggacacatcagattttgttttgtcgcactcaccttgtctgtgttatgtcctgtgtcttcgtcattgtccatgcttcttagaaagaaaattggactattgaaaatttgtaaaactgggtaatcctgggcatgtgcgttgaaggtttgtaatcctgtggccagtggtgaaaccatgttaaagcctggtgggatgctccttaatatttgtgtagcatagggcaaattgaaagctgttcattgtctcccccacactgttttcttgttgatacaatgaaacatcatttttttctgtaaccaaaaacattttcttattcatataaaactggttttcaagtttgtttatatcagggaaaccatgttatttatgacagcagaatgggggtttaataatgatttatgttgttttactattctgccattggtagcatggttactgtcacattcttgtagcataacttctgttcatgcattattttccccctttgtattatccatctgcatctactaaaaataatttagtacatttgttatggttctatttttttatatgctatttattttattcacattaacttgcatgatatggaattagatatgtttttagtggttgaatgcataagctaattacctcatttatcttcaggaaattcgtgactacttaaagactctttgtccaga

SEQ ID NO: 19769 - DNA, 508 bp, Glycine max
  Intron number 1 from transcript Glyma14g09190.1 (locus Gly ma14g09190) derived from phytozome v7.0 (chr-ID Gm14; pos 7210112 to 7210619 reverse strand)
acttctccagcttcgttcgccaactcaacacctatgtatgtatcacacacccatcatatctctcttctttttttcttttttttttttaagttcttttatcgaaggcaatcatgtttgaaacattatcaatcaatatatatgagagacaaactttgaaacattatcaaacaatatatatgagagacaaaacttagaaactttaattccgattttaaaaaacgaaacagaaagcatttaaggaattaatatctttagttttttttttttatccaagtattggtagcgcatctccaactcctagtaagaattcaaactagtccttatgctagacctaattcccattttaatctcactttcaagatgttacatttttgcatgctccaaattgtgatttaccatgttgtggtaattagtccttcaagatgttacattttttgcatgctcccaattaactaacttggctttgaattttgtttgaatagggttttagaaagattgtgcctgatag

SEQ ID NO: 19770 - DNA, 643 bp, Glycine max
  Intron number 2 from transcript Glyma18g15020.1 (locus Gly ma18g15020) derived from phytozome v7.0 (chr-ID Gm18; pos 15011589 to 15012231 reverse strand)
gacaagactattcctgctaacgtgagtaaaatttctcaaaacaatgttttccttacccaacttatatttaaaaaaaaaaaccctttttatgtcctaatttttatactcaaaatatactccttttttcctctcttttctttcttcattatattaattatcatatttattattttgtttcttttctttctactcactcttctcttttctttatctctataaagaaaaaaataaaaatgaaatgaaaaaaagtggatgtacgtttataataattatactttcattttcatgatagttgagctttgatatttccaaggaaaagtatacttcaatttggactatataagtagaaggaagagagatataaaaaaataaaaataaaagcaaaactgataaatgtggacaaataatttaatagaggaaatgaaatgaagggagatataaggaaaaaatagagcagaaatgaaatgaaagagaaactgaacctacaaacccattttacaagggatgtaattataaaaaatggcatgataccatcatttttcaggttgcaaatatcaatatatatatgacttgcaattgctgacattatctcgtttttgaacatgcaggaatcctgggcaatctgcaggatcttcaagaaaac

SEQ ID NO: 19771 - DNA, 943 bp, Glycine max
  Intron number 1 from transcript Glyma14g08350.1 (locus Gly ma14g08350) derived from phytozome v7.0 (chr-ID Gm14; pos 6395442 to 6396384)
gttttagccttcgattcgccattgttgttttcgaggtgaactctcctacttcacgagtttatgatttgtttttttttttgtgttcgtttttttgtttaattttagttcaatgttgttctagcgtctgtgtctttggattttctaagtaagctactgaactatgcttaggatctaatttgtagctgaagattgtgagtggagatttagaagagaattgatgtttgaacgttatattttcggacctgaaatatgtcatttattgtttaaatgtttttttctcgaagattttgttctctgtaacgtatatttacatgatttgatgaggtaaaaaaagagagagaaaaataagatgaagatttaggttgtgtttgatttctatttttcaaaaactgtttttagttttcaaaatgctactaaacaaggttgttctggtggatggtggtgcaaggcacaaagtcgagtgtgaaattgtgggagaggttgaagaaaatgaaagcaggagaagaatatgagaaaacatctctcagctatttctgttttttagtttttaaaacacttttttttggaaattattttcaaaacttgttagtttttggatgagaaattgattgctaagtagtgaaaaattgtttaagaaatattttttttattaaaaaaagtgaaaagagaatcaaacatgtctttagtagcttcatagtaagtaacattgagcttatcggttcaaattttgaagtttctatgttgatgatatctttgtagctagtgtttcattggcgttttttcatatagtcattgcttgaaagaaaaaattattaaattaataagttttgtttcatattgtttgtttaatatattgcttttaagagtgtaaagtgttgacagtatagttgctaaaaatggatatctattgttaattcctgcttcagattgtattgatattggc

SEQ ID NO: 19772 - DNA, 1042 bp, Glycine max
  Intron number 2 from transcript Glyma17g05880.1 (locus Gly ma17g05880) derived from phytozome v7.0 (chr-ID Gm17; pos 4143200 to 4144241 reverse strand)
tggagataaagaaaagtgccaaacaaggccaggtatggtgatcgtgttctgaacttttgctagtatttgttaccttgtttgctttagtttttttgttagagcattgtctatgctaccttagctgttctttattgcatatctataatctataatactcttctctgccccctaagtttgagggtggagtttgagttttctgctcatctgttttttcattagtcacaaagggtatcctgatgttggctgctcacttctgttcatatactttctattttcgtgtactcactttgctgtgtatgttaccaacaatatatgtggttggaaaattcgttctccatgtgttataacttacaataacaaacatgaacactagtattcacattaatgacggggattaaacttctttggttgttgcttattcttcaaacaactgctttcccaatgctgttgcaggctcaaaactatccacacttagcttccaaaatgacatctgtgaattaaaaagttgaagagtgagcctcaattcctttagaaaagcaatggatgagaattgagaagtgttctagttgacattgctgtgtagttgatatccttcttttgttaaatttagggtgtctttaatgtgtttgatacttgagttttattctcttctttcaaaaagtgtgctgtttaattttcacatttttaaacgacttacaagcgaataaatttgtcattttataacagcggctctccacttgtctctttgtctttgggatgtattggaaattaccataatgttaaaatgtgaaatttaaccacgtgtgattcttgcgggtgattgaaactggtttacacatgataaactctttccgtttttggatatatgcacgctgttttattctagcaatgtagtttggtaaatgttttgaccaatgaactgatttctatgacaaacctgattttgtctgtaattcacgtttatgcttataattcttgatatacgctttttctgatgccaaattttgtttcatttaatgttttccagggagctgttaaagtg

SEQ ID NO: 19773 - DNA, 595 bp, Glycine max
  Intron number 1 from transcript Glyma17g05880.1 (locus Gly ma17g05880) derived from phytozome v7.0 (chr-ID Gm17; pos 4144318 to 4144912 reverse strand)
gagtttcatctttggaaagaggaaaactcctgcaggttcttttgttccctcctataattcaattatttcattacattcttcagaaaaaaattaaaatttctattttcattttcattttctgtttttattttctattcaatccaatcaaacacattttcatcaccattttctattttcaggaaaataaaaacagaaaacaaacacctcttaaattttccgccttttgcttgttttactgatgtcattaaagtttgcatctaattttttaatatttccttcggcataatatcaagtttgctctagttacccatcaattttaatcacgtgtaagtgcaaactatttttgacatcatgaaaataacacattgaggagtttgtgttgtaatttttgtagctatcacaatccaaaatttattatatatggcattttatgcaaatgatgaacacctttacatagccttcagtgtgtacacttttaggttgacatgatgatattcaatttaatgtttataagctgatgcactctcagttgatatcattgtacgtgattgtaaataagctgtgattttcagaacttttgcgggaaaataagaga

SEQ ID NO: 19774 - DNA, 582 bp, Glycine max
  Intron number 1 from transcript Glyma14g36620.1 (locus Gly ma14g36620) derived from phytozome v7.0 (chr-ID Gm14; pos 45983501 to 45984082)
gggcggagtaagttctaagcatttttcacctttcgcagaatttcaattattcgtttcaatttcatatctactgcgttgaaatctgctattggtttatggagttcttagctgaatctattttgttctgaaacacgaaaactgtttcttctttcaattttgatttaaatcgtttactgaaaattgaagattagatttgatttattttacgtgttggttttgttgctgttaattaaatttagaacttggtgattgctttattttgtttatcaatcactgtatgtgtcattttgtgttgtgctcaacgaattttttttctaggttgtcaatttctagtattattatccattaaaaatgtatgttattcgtgttttggaataaactggtccagattttgcatgttgtattctaagttgtgaatttctagcattaatattcactaagcatgtatgctattgtgtctgaaattacaatctcatgtctttggaataagctagttcatattttgtgttattgttttgattgtaattttgaatggtttttggtttaggacctgcgaggtgttataggcaaattaagaacaag

SEQ ID NO: 19775 - DNA, 792 bp, Glycine max
  Intron number 1 from transcript Glyma16g00890.1 (locus Gly ma16g00890) derived from phytozome v7.0 (chr-ID Gm16; pos 544808 to 545599 reverse strand)
ctccactttcttaaggtaagatcacattcctggggtcttcaaaagtttgcatcttttcgtttctgggtctgtctctttcatccttcaattgtggttagtttaattttaattgcagaattgaatcaaacttttttttttttttttatgtgggtttgtgttattttattggaagggaagacttattgtggtattgccttggcttttgggattcccactactgtggttgttaggtgcttgttttgtgttgtgttgtgtgtgtcgctgtgtcctgctatgtaccatcttgatttcattggtaacagtaaaaggaaaaggttctttcttgtggaaattagaaaagggtcctttgctttaggacagtgaggtgagagagaaaagtatgtgctgatgatgtcttttgattggtctctggaatcttatgcaaacccatcctttccttttgcttgcttgcttgggagatagaggaaagaataggtaaaagtatgtgtgttgttgatcattgtgttttcccaaaattcctgttccaactgagtcaactttttcaattgcttttctcatctgcaacaatcagctcgattaagcatcctattccctacttgattgtctctttatatttaaattttgtaagaattctcacacttttgtctctttcttctacttcttcttcttcttcttcttcttctccttcttcatattgatcatggtttttcaagtgttggcttttcattcacttgctattgtttgttattttttacaggattatttgttaactgagtcctaagtgtaattgag

SEQ ID NO: 19776 - DNA, 285 bp, Glycine max
  Intron number 1 from transcript Glyma16g07520.1 (locus Gly ma16g07520) derived from phytozome v7.0 (chr-ID Gm16; pos 6794207 to 6794491)
ataaaggaagccccatcgtcactctatacaagaaggtttgttactgatggaggaggcatcttatactcatttttttttgaattttttttctattaattaaattaactaaattggtattatatattcttaatttttgttttttatcagcaaatattaattattaattttattagttttttttagtaaaaaaaatttgaatctataacctctctttttccttcttcctttatctatcaaatcaaccttataattatttggtattcttaatttttgtttatatgtaga

SEQ ID NO: 19777 - DNA, 666 bp, Glycine max
  Intron number 1 from transcript Glyma14g35530.1 (locus Gly ma14g35530) derived from phytozome v7.0 (chr-ID Gm14; pos 44480043 to 44480708 reverse strand)
cagtggcttgaaattgaaagtcggagatagtcttggtaagattctttggtttcatgcacaaatgcacaatgcacaatgcacaatgcacaatgctcccttgaagagatttatttcctctaaagtgtcattgattataagatcaataaaatatatcttaggtcttttaactttcggttaaaattaatctgggttttatatattttttttaaaaatgatatcttgttctctgcattttgaaaaataggtgaatttcatctctcttaatggaacttatgatatttaggtaaggatgaaattcaccaattataaaaaaaaatatatatgaataaaatcattagttttaaaatgtaggaactataagactaaaatcattggttttactaatatggtatagtatgatgaatagataattttgatctttaaacattaacttataagataaatcttcaagtctgttgtattaaataatttgttggaaaatgtcaatcttgtgttaaaaaagaaaaaaaaaatgaaaaattaagcaacttgaaacacatcttaaccaaaaattaataatttcatactttagtattcgtgtatatacataatttcagcacactttaaagcactcagatgattccaaagaggcacctcatttatattcatgtgtgacagttttcaatt

SEQ ID NO: 19778 - DNA, 928 bp, Glycine max
  Intron number 1 from transcript Glyma20g32050.1 (locus Gly ma20g32050) derived from phytozome v7.0 (chr-ID Gm20; pos 40686047 to 40686974 reverse strand)
ccgcttcggacctctcggcggagctctcggttccggtgagttttctaaacgtggcacttttattatccatttttgttttcttgtttaaaagtttttggcgcgttcacatgaattcggtgaactgctctgtaattatatcagcgcccattgtttcattagcgtcctttgtggccgttggattgcttgattatgacatcactgtttcatgtacggatctgattgtctgttttaaatgctccctattgccaacctggcagttggcaccatgcatgaaattttggttcttctcgtggggagcattgttgagtgattgtcttcacttcataatagctaagattttttttttaaaattaaaaaaaaaattgaatttgggtgatattgcaaaaataagaaattccaaaatatctagacaatagacaagggatttgtttttttcgtaaaggattgtccaagatgattttttttttaatttaaattcaaatttggggacattattaattcacaattatttaattttttcttttctagaaaaggcattttagtcatttcaaattacacttaattctgtcggtgacatgtggcacagcacatcccctcaatctcccattatttgaacatcattattgaatatcatgtgattttgcatgtgatgctcacgtgatgccaccacccacacaaataatgagcattgaaaaattggtcactctaacaacccatatgtttcatgatacccttctcagattattcaatttgaagaacttggcatatttatttaccttatttagtggaatgcaaggataggcaaatatgctataccaagtttacatgttttgcttgaattgtataaacataaaagaatagtaaatgcatttaaatttggaactgcaaaatatgattctgatgaatgcggtgatgctgttattgcagt

SEQ ID NO: 19779 - DNA, 679 bp, Glycine max
  Intron number 2 from transcript Glyma14g21360.1 (locus Gly ma14g21360) derived from phytozome v7.0 (chr-ID Gm14; pos 24870616 to 24871294 reverse strand)
ggaggtaattaagtcttttgtttcttttcattattgctttgctcatgtatatcatctgcattcattttagcatgttactattagttttaccatattagaatccatgcaatttattgtttatggctaattcttcatgtaaataagtgtactattaaaaataataattccaataaatgtgtgctctagcaacttgttatattatttctattggaataatatctttgatattaggaatattttatcagatatataaattaaaattgagttcaaaattgtttgctttcattagagtttgatgctatggaaagttcttttctattcttttttttgttttttaatagtttaatatagtcattaagatttaccaagataagtatggaagtgttttaagatctagggagggtattgcacttgggacgcgttatattagaccatcgaaattcgaaagtcacaatttgtgtttagctcactcaggataattgattgattgagttgtcattcatgagctaggtcataacctttgattttggctgcagatctacatttgttattttaattataaacatgtaggaatagattgatttatgaactactttcaagttgatctttcccatctgatggctttggctatatggctcttatatgtatttacttacatacatgcgcagatcctcttcta

SEQ ID NO: 19780 - DNA, 775 bp, Glycine max
  Intron number 2 from transcript Glyma15g42460.1 (locus Gly ma15g42460) derived from phytozome v7.0 (chr-ID Gm15; pos 49893958 to 49894732)
tcattttcttggagcattaaagcagaaatttctaggtaaggttattgattgtgctttatttttttatctttttttttttttttgcttttttgggtcaagtgtcgattaccattttgttgttattggattggatcttatggatatgaatgtggtgattgaagatttaatggtcacatggcgttattgttttgttggatcttatggtgtgcttatttagtataccaattatattttcttaactgctttattaagtagtaggtatgttttatctcgatgccttaattattatagatgttatccctttttgctaatgtattaggatgatctccgaaaacacgttgatttttgtttcaccatattaaagagtgcttggaaattgggtattgctttgctattgttgtgaattgggtattgctattgctattgttggtcttgctatatttccttctttcttttttaagagtggataatttagatcagtttagcgtgtgtttggatttccggtggggcaatttgaacctctgtttcgagaagcatcacccatgcttctgtggtgaagcggttttgggcttcatgctgccgtgactgcaccggagaaacaaacacgtagttaaaatggaggatagaatcaaattttacagctggcagcaactgaatttaaattctctcatatgtatatgtagcatcctttctgttttgtgttctttatgatgtggaagttatattttatactttaatttacatgtgcagcatcctattctgttttacccaaaaa

SEQ ID NO: 19781 - DNA, 462 bp, Glycine max
  Intron number 4 from transcript Glyma14g36670.1 (locus Gly ma14g36670) derived from phytozome v7.0 (chr-ID Gm14; pos 46018924 to 46019385)
aggacacgagagagaaggtagcaggatctccctctctatctacttttcttgctacttgtgtatttgaatttgactaaattactttgctttcacttctgtcttctgatctatttgctcataatcatatttaacccgaacactgattaggttctgtcagtgtatagatctttatcttaaatgattttatttctgttaacatttcattagggtgttctaatttgtccaaaatgactttaaactctaaaggtccatatgtgaatgaaatttccaccaggaattttgttctttgggaagtattgcagatattgttggtgctactgtccgtttgtttcctaatgtttggcatttttaccattttcctcaaagggtttttgaaaaaaataaaataatcgcattgcagctaagaggtcaggtgacattctgattgtctattttttatgtctcttcataggggtcgctttt

SEQ ID NO: 19782 - DNA, 740 bp, Glycine max
  Intron number 1 from transcript Glyma16g27680.1 (locus Gly ma16g27680) derived from phytozome v7.0 (chr-ID Gm16; pos 31645629 to 31646368)
gcagaaccttggccttcttgttgcctcttattcaggttagtttaattctgttcatttgccttccaaggttttgacttttgagaattaccaactttatttagatgggtggatacaagatagtggaatttgggggcaacctggcttcaaattttgtagtttgtagtttatttttatttgatagtatttcacttggtggttaagactatggctgttgtgttatatagttggtattggcatgggttactgtttgatagaaaaacctggaattggtttgttggttcctaattactgttttaaaattgcatggaaggtttctctgcatttctcagcaccaaatcctaaatttattctgcttattgttggtttgatctattggaactctgttatatagcattcattgaatgttaacattagtatttcgccaagagaaaggaaattttcatggttgcttattgagatactatgatgaaattaattttttcttcaaatcattgtattaaattaaattataaaatatctctattcttgattttttcttgtgtcagctttaggttacaaacggttgggggtggcacttgctgaaacctaaaactgcaacatgagtacaattttagcatgattgtttgttcatttattttttacagttatgtgctttgtttattatttcgtttggaaaaagttgattaaatctctcaacttgtgcagctgctaagacgggacagagagttgcctggttcaaa

SEQ ID NO: 19783 - DNA, 772 bp, Glycine max
  Intron number 1 from transcript Glyma19g06690.1 (locus Gly ma19g06690) derived from phytozome v7.0 (chr-ID Gm19; pos 7795353 to 7796124 reverse strand)
gcaagtctaccattgttggaaaccaatttttcacctttagatacagtcccttttaaatgaacgccaaggattttttcttcatttttaccttctttcttttttattttccccttatttcacaaattgtattagttctcgattcgataatgattttgtttaattaatcaactttttttgttctattcgcattttggagtttgaattatgatgatttttttgtttattttagcttgcaagtaattttgattagaccatattttttagaggtttgatcaattttgtttttggattcattgctagctcttcttgttgtttctttagaggagaaaaaagaaggaatggtatatcgagaaaggaatgaaataaattagaaaaaaagtaaaaaattctgaaccatcaatttaaaattgagaaaatctagggttcatattaaattttccaccatgggagacttgttatggtttcccaccgtagcctttgccacgacaatgctaacgttagaatgcttagtgcagtcaaatgaatgctaatgttagtcattaaaatattacgctcctctattattctttttctttcccaaatcccaaatctctctgaaccaggtttccttccgtcatcgacatcgtcaaagcagtgtttggcttctctggataaagcgatcaaagtgctttttccttagaatttttgtttgagaaaagtctaaccttgactgaactccaaactctcgatcccgtcaggtttcattccgtcaatcttgatcccgtgagttcat

SEQ ID NO: 19784 - DNA, 643 bp, Glycine max
  Intron number 2 from transcript Glyma19g01150.1 (locus Gly ma19g01150) derived from phytozome v7.0 (chr-ID Gm19; pos 805865 to 806507)
gaggtgctggtggagttggatcccttgttattcaggtttgatatcttccattgccattagttaacttgtcaagaagcttaaattattaagtagatcgagtctaatagatgaaatagttcaaccatttcactccttccactggattaattgattatttatgatctatttagataaatttctctataagcaattgtaataaaaagaatagaaaaacaataaaattaatttatgtataattaagttaaaagatattttttagaaaagtttttacgagataatttttataaattaacttatgtatgagttaattaatattaatttatgacaaaatctctttttattttaaattttataaattaacttatacataaattaatattattttatagcaaaactcgtttcattttgtttttctgttataattacttacggagaagtttacgtggatatgaccttattcttcttttttttcaaatcatatgatttaatcctctaagaaactaatttcacgtaccagttttgtttacacaatgtttgtagcataattatatacaatatttataaaatattaaattatttgatgtgtgtatttgtttgatatgatgtagctcgccaagcacgtttttggcgcatctaaggttgc

SEQ ID NO: 19785 - DNA, 528 bp, Glycine max
  Intron number 3 from transcript Glyma20g33110.1 (locus Gly ma20g33110) derived from phytozome v7.0 (chr-ID Gm20; pos 41722895 to 41723422)
ggtatggtccatgctcttttgtttgttggcttcaatttctggcatacttcttcggtttgacttgtgtttgtttcgttttattatgttacacgtggtaaatattgtgttagatgatttgcttattgttaagattcacattgaaaagtattgctggttacaggaaaaatttcaaatttcgaaaagtaatgaggttttcattctattattgttcttgttgttattctattgttctttgagaaagtaccgggtattgaatgatttgatgtggacagtgaagttatgcaagacatgaatgggtttgtctaaatacataatactgattttttgttttgtaatcttttattctgtaaaagttgaacaagtattttagtgaagtgtggtcatcttgtcgttgcgcttggtacgacaaagcgattcccctaaattgctgggccgtgattatcttgtattctgacttgtatcgattaatttagggagaagtcttttgacacttattgctactatatgtaggactgctgatcatactaa

SEQ ID NO: 19786 - DNA, 767 bp, Glycine max
  Intron number 1 from transcript Glyma19g41740.1 (locus Gly ma19g41740) derived from phytozome v7.0 (chr-ID Gm19; pos 47937703 to 47938469)
agacgtgaagattcacaacaatcggacaccttccggtattaatttgttgttctcgatatcgtttgagttatatgttaaattttcatacataatgaattaattaattaattaaatgatagttggattacttaggatgaacaccaaaaataattaagttcaatgatatctatcttattgtttgttgtttgatcaatttgaatctacttgaatacttttgaaagttagatctcttaaatttgtaagatatgcggggcttttttttctttcaaatttgatgggtaagtatatatagattaaaaatcttcatcatttaaatttgtacttgtaccttttgagtcgattttgtggtatatttaatctataataaaaattatttttaacttcacctatttgtcttttaggtttgagaccgaagaattatgtatctttaaattaagttcaatgatcaaatcgatccaatcttttaaaagatgttatgaaatttgatcccccatgttaacacactagggggaaaacaaggttcttcccacgatattataaactaatccttgatttggagtagcgtgtgttactggggaataaagacttaaactaactagctagaaaggtaggcagaatacactagaatgctttgcataagtggcctcaaaggatacatcaatatatcattcaattaattacaggaattctatgtaaaggtttaattaattttgtggttactttattgtgcagtatcgttagaagtttaaggtctctggttcacttaa

SEQ ID NO: 19787 - DNA, 426 bp, Glycine max
  Intron number 2 from transcript Glyma18g04440.1 (locus Gly ma18g04440) derived from phytozome v7.0 (chr-ID Gm18; pos 3195312 to 3195737)
tctgctactaggaatttctccaaaggtaagcttgtttttttttcccttttcttttcttctttcttttgttgttaatagtgactttagtccatgaaaaaaaaaatacttaatttttgtttgtcattgtatcttttgaaatatctgaactttagttcctgagcaagagaaaaagtgttaactttgaatactaaaatttgagtattttaaaaaatacaggaacgaaaattattggttttaaaagtcggagactaagaccaaaattgaggaatttgtctgggatggaaaacattattaacctttgttttgtatgttttgttcttgtttttgataaaaaaaagttgattggtttgagtgagatcatgattttgtttatttgttatggtatgtgtagggagggtgttggggagaggggcattgagctgtgtt

SEQ ID NO: 19788 - DNA, 399 bp, Glycine max
  Intron number 1 from transcript Glyma16g03220.1 (locus Gly ma16g03220) derived from phytozome v7.0 (chr-ID Gm16; pos 2768617 to 2769015 reverse strand)
tagtagtcttcatctgtgttataagaaactctcttgtaggaagagggaagagaaacaaagtctgccataatacttggttagggaattaaggattctgattgagtttcatttcattaatcaaatcagaagaaaagaaagcgtagtttgtgcctgtggtgagaaaacttgtccttccactgatgattagtgcatgataaaagcttcaatgggtttggttcatccatggatttccatgaaagccgccattgaaggattcagcgttaatagagacagaagaaggcttctggggtgacattcatggggctccatagatggtggcaagttaaattggtaacattgtctttgtttttgtcatgtttggtaggtggctcacagtcttatttttacgaccgtgaatcg

SEQ ID NO: 19789 - DNA, 593 bp, Glycine max
  Intron number 4 from transcript Glyma18g09530.1 (locus Gly ma18g09530) derived from phytozome v7.0 (chr-ID Gm18; pos 8427147 to 8427739 reverse strand)
ccaaaaaacaaggtatatttatttgattctctgtttatgccaaaaaattccaaaaaaacaagttatagcatgtcctgagggaacataatatctaaatgacctatttggtcattttatcttcttttttttttagtttagttttttatcttttgaaaagttcaatttggttatttatcttgatttttttgttcaatttagtcctttatttttttaaaaagtttatttgatctttttatcttatttttttggttcagtttgttgctttatcttttttttatcttagtttgatccttcaagtctatttaagattgatgtcattaatcattcaaaaataaattcttttgtttcagttttttttccttttccttcacttcatttttaacaaaaaaaaatcatttttaaatgattaacgatgtcaatcctaaatggatcaaaagattaaactgaataaaaaaaagattaaataaatgatcaaattgaacttttaaaaaaataaatgacgagttaaataaccaaataggttatttggccacctaatatttaagttgtctttattgatcatgctatagtggacactttggttatcacaaaat

SEQ ID NO: 19790 - DNA, 261 bp, Glycine max
  Intron number 2 from transcript Glyma16g19580.1 (locus Gly ma16g19580) derived from phytozome v7.0 (chr-ID Gm16; pos 21773110 to 21773370 reverse strand)
gtggtgaggtacacaacttttctgtgattcactaattcatcatccatttttcatgctaaggacatgcccgaaaaagtaaaaacgaaagaaacaaagaaagttatttcaaggaaaacgagagagaaaaaaaaagtattgtgccaactttgtgcaatttccacagaagaaggttggcaaaattatcaaaagtagttgtctaacaaaataattagaaacctgacccctctttctgttcaaaggtggacctggatcttggaaact

SEQ ID NO: 19791 - DNA, 462 bp, Glycine max
  Intron number 1 from transcript Glyma17g17910.1 (locus Gly ma17g17910) derived from phytozome v7.0 (chr-ID Gm17; pos 14984984 to 14985445)
atctccgcttcacctaggtaatcattacataatgatttaaagttgaagcttaatgattgtgtgataatgatgtatttgaccttcgtttataactatctagtaaatttcaattcaatgcttttttcaccccattaattaggtttttttttttttttatcttttatgaagacgacagagataataaaactaattcttaattctaaacttaatcatgttaaaaattctttcttcttccccattaacttaatgtgtttgccaattatacattcattaggttttaattcaatgctcttctattattgtaaaagttattaatattattataataagaaagtctaacttcattagttagttgagcaactcaaaataattgtaaactttggagtttaattcttacaaataataaaaaaaattattattattaagaacgaattgttgaataatttggtgttttgtgaaggt

SEQ ID NO: 19792 - DNA, 676 bp, Glycine max
  Intron number 3 from transcript Glyma17g07020.1 (locus Gly ma17g07020) derived from phytozome v7.0 (chr-ID Gm17; pos 5102195 to 5102870 reverse strand)
aagcagaggctatcttgtatgctatattgcatttcctgcatagattttcatattttatctaggctagtttgaataaaattctcaataaatacttataggaaaataaattaagaaggtaaaatgaactaagcttcttgcttaaattaaaattagcttatgcataagttaatgtattaaagatcttttatttgactttttcaaaaacaaattttaatgcacacaaagttaattttaacttataaaagaaggtaaattcattttactttcttattttattctcttataggggtttattgaaaagtttattcagacagaaccttaatactagatttacttgattgataatggttttaatccctttccctgtttttttaaaagattcttcttctaaatactatatgtttttatgtttttatttgattaattcagaaaggaaatgaattgttttggaatacatgttactgttgaattattttttttcataaaataaaaagatacgtacatacatatgatcattttatttatttttctgcaggaaaaataagtagatacacacacaacttatcattttgctcatgttttgtactgttgtttgttgccaaatgtgaaatttttttttatgcaatttatttcatatactatatactaatattttagtctcattattagggacgga

SEQ ID NO: 19793 - DNA, 540 bp, Glycine max
  Intron number 1 from transcript Glyma15g22510.1 (locus Gly ma15g22510) derived from phytozome v7.0 (chr-ID Gm15; pos 21191260 to 21191799)
tcatttcatcttcacaaggtataaaatatctatatatctatatctattcttttagttttttccatcacatctagttgatgcactattcaaacattagtttgcttaaatttctagctaaaaactttccaaagtatacatgaagatagacatagcagaatttacactagtacattagcaatatcatgctaagaagtattttgccaatttactggtcattgaaaataattgatattgggcatgtttctgtgttgataaaaacttgacaatttctgttattgtctttgggcattatgtaaatgcaatatggtgaagggcattattttgttctgtttttggaatgcaatgccaagttacaattctatttccctgcatatatcatttagcgcatgtttgattttacatttttacacaataactttccatctaaaaaagcttgctctcactattttgaagataagattttgtgaatattagattagctaattcatatttatgcttaatgcagttccccttgctctctagaagtggggttctggaaaa

SEQ ID NO: 19794 - DNA, 913 bp, Glycine max
  Intron number 1 from transcript Glyma20g33060.1 (locus Gly ma20g33060) derived from phytozome v7.0 (chr-ID Gm20; pos 41672723 to 41673635)
gcatccatccttgagccatccaagcctgtaagcatttccttctgtcgctctttctttttcatttctatttcatgtgtgatgatgtgttctgctaatatagtcttgtgttgtaacttaatctctgtgatcatgagaaagcaatcaacttttggtgacccatttgtggtgttgttatttagactgattgtgtggtattggtgatgatgtttttgattgctaaatgctgaggagtttggtggatcaagttgaaaaatgactgtgactgatgaaatgaaagacatttctactctgacaaatggtgtgcaattgatatggggttgtgctggttttgttaatcttgtcttcttttaagcactgtgattctgagaaactaatcaacttttagattgttggtaaggaatttagtagatcgagtattaaaatgactgtcatagatgtaatgaaagacacttttaatctgaatggagtttcaatttgctagtcgatttgatttggagtcaaagcaacggtgtgatcgaaatattatttgtgcttgtttgtatcatatgacaatgatatggtgctggtttttcaacctttgaggaaaggaacttgaaaaatctcaccaaatggataacttatttatttaacggaaggtagcataggtttagttttggagagggattggtgtgtgtcctttagattatttcattgtttcacatattctttttggtaaatcaaaagaaatatgtgttaagtctttaagatatggaagttaagtagtaagttttaagatcttgaaagaaagggtcaatgagtttcatgcaatttcctatagaatttttagtccatattcaatgaagaatttcagtgtttgtcaatttgggttttgattgaagtgtttgaatgcattctgcagactttttttccggct

SEQ ID NO: 19795 - DNA, 631 bp, Glycine max
  Intron number 2 from transcript Glyma18g05620.1 (locus Gly ma18g05620) derived from phytozome v7.0 (chr-ID Gm18; pos 4223324 to 4223954)
gtccctggatcacgtaagaacaccaattttactttttttggtttttgattctacaagtgcttttaactatggagtatacttgaaaatatgatgccacattgatgcttggattgaccgtcattaactatgaaaggagggaaattctttcatgtcatatccaaattatgcgtgtgtgtctgtggatgttttcatatattggaagccattctatgtagaacctccagacaaatccctagccacctatgtttgagtacctaagctaagcctatgtggctaaaataaatgtctttttatgtgcttgcaccatggtgattctcacttctcaagcatgaattgaccatttgcttctttttttatttggcaatcttggagctgacagttgttaaatgtggtaaacgggtttcttcgtttccatatattttcctccctttacttttagtgtttgggctctggtgataggagctccaccctttcaaatgttataatatgaaacaatggtgtaaaaaagtagtgtatgatcaacaaaattgctgcaatgaaaatcatcaacatagcgtcaaatgccagtttataatgtttcagccactttgtaactctgtccctatgtatgttttggacttttggtagattc

SEQ ID NO: 19796 - DNA, 1047 bp, Glycine max
  Intron number 1 from transcript Glyma18g11100.1 (locus Gly ma18g11100) derived from phytozome v7.0 (chr-ID Gm18; pos 9954163 to 9955209 reverse strand)
aacctctctactgatacccgtaagttccgatcattttctcatgcgggtttttttttttcttctgaattttaattgcagaaaagagtttttttttttttttaaatttctgtgtgagtaaaatattcaatttagtgcgagaagatggtagttgaatccatgcattgctttgtttgttccccaaagtttttagtgtatgtgaaattgcaatttggttccttaatttgttgtgaacttgctaacgagttgaccccttcggttataattttgacttttgacaagaacttcatgactatgatacaatgtgtaaagtaaatctaaaaattagaatataataaaatgttaaatcgcaagacagaatttctatttaaaaaatggacacgagtcactgactcactttagccatggcgaattcgtaggttcaattcttgttagatgcacgccaatggaaatcttattggaactgtcaagttcatcattggaaaccatatcacatccaggatatgatgaaataggatgagacgaaacagaatattgtaaatacataattatcttgataaaattcactatttctttattttccaatgccctgaaagaacaaaatgtttcagtataacgcaatttatattgttcagtgtcagaccaatcaaaaaccatcattttatatgacttgtagtatggtagttattgtaaaagttaacaaacttactatacatagtaatctgtgattggatcttttagtgtgggtactgcattgcttaactagttgactgcattgaagtgtatttaccctttgatagactttcatgttctctgttggcaaactagtatagtaactgcttgtttgaactacagtatatgtattgggcctagttgagatgccttttgcattttggcagagagatgcatagggagaaagactatattgttttcatgaaacacctttgcaatttgcattgctatttttatctttatccaaatcttatgctgccaattgatttttcattgattgcagggttaaaggaagctgttcagactgaaaaagcccca

SEQ ID NO: 19797 - DNA, 967 bp, Glycine max
  Intron number 1 from transcript Glyma18g03740.1 (locus Gly ma18g03740) derived from phytozome v7.0 (chr-ID Gm18; pos 2543392 to 2544358 reverse strand)
catctttggctccattttcccacctccttccactgtatgcatgtctccctcccactttcttcttcttctttttttttttttatgtacatgcatgggttaattaattttgctcaatcttaataattacttacacaacatccttacatgtttttgtttttatttttatttaatttgagattggcaatatggcatagttattgtttctgacttgaccaacaggttttttcgggaatatgatagctttagttagttggtgtaataacaaaataattactaactccaatggtttaaggtccttgattcatttgagtcagtatgtagcattagcacctttttacatgcatgatagttattgaaaacattatggtcaaactcttctatctagataactaactataactacatgtcttaaaaaaatcatttatagctgatctagtttttaccatgatatattctttcacaaaatggagtaaaataatttgtagatggtatttgagcgggtagttagaaaatataaggctgatccagctgaatggatgcaaaagggtgaagggagagagtagaagtcaggggttcaaatctctcgttgatatttttaacaaaattaacaaattaacatttgtcagatcaagaaaaaaaaatcagctagctaggcagctagcaagcaagaatcctgatgagtatggttttctacaattcttttggtctagctcttttatgtgtcgtctaaagtttaccattaatcacaactttaagcatgaatgaatatgttcttgcatcagaactattggactaaatttaactatcatcagctttgatctctgagcgatatatatagcatatactgctttgtgaaaaataactgacataacacacatatatatacttaaccctgttactactctttttgtgactgactatataactttaggttggagggagagattcaacaaaacaggacacggga

SEQ ID NO: 19798 - DNA, 651 bp, Glycine max
  Intron number 2 from transcript Glyma15g01190.1 (locus Gly ma15g01190) derived from phytozome v7.0 (chr-ID Gm15; pos 719897 to 720547)
gacgtgagattccaattgttcatcgtgtaattgtaagcacctcttggacacataaattgtcttttggatgggaaattaggattccatggagggatccatgccatttaattagtgagttgctgaaggggttcctattcaaactgcaacaacataaattacataacaaattgtgcttagctagccagtttgatatgactacaaactgaattctatacttgggttttatctacataggtaccatctgtttttagttctccttattttatatgacttagtcatgaggggtaaggattatcatagtaaaatgctattataactttcctccttcactctctgcccctcttttgttgcttgaactatttctatcattttattgtaattggcaacattgtgaaaactggagagcatcacgaatctcaggataatgtatatgattgattacttaggactcattcttccctccaaaaagagacttcctgaatccctcaaacacacacatacatattcactggtttaacattctttatgcttttcagaaacacacagacacacacacattcactggtttaatattctttatgctttctgaaatttatgataattatggttgccctattttagagtctcaacacttgatcattttgtaggtac

SEQ ID NO: 19799 - DNA, 578 bp, Glycine max
  Intron number 1 from transcript Glyma16g23050.2 (locus Gly ma16g23050) derived from phytozome v7.0 (chr-ID Gm16; pos 26708874 to 26709451)
gaaaagttggcacacacctagctagtgcaatagtatgagatttttttatcgtgtggtccttgacgcataataacaaatatgaaatatgtttcatgtaaatattttatgtttttttaactaccctaactaggatttttaaattttgggtgagacaaaaggaattctggcaaactttttcaatcctttaaataagttatgagactaattcttgattttttcttacaaatatcatattatgggggattgaactcaaattattttttcgcatgaactcaaatcattttttattttacaaattttatgtgtattgtcaattgaaaaaatgattagaatatattcaaagtggaaattttgtttaaacttgtattcgatcataaattgtaatgtacttagggtaagattgttaaatgacttataaaattttaaatataataaatatttttacgaatagtgtttaaaattcttatcacgtacttataaacacaaaaaagaaaacctttttttagaggaaaaaaaacctactaataataatacaactttattaaccatagtaagttttttctttctttcttagcaaa

SEQ ID NO: 19800 - DNA, 704 bp, Glycine max
  Intron number 3 from transcript Glyma18g09430.1 (locus Gly ma18g09430) derived from phytozome v7.0 (chr-ID Gm18; pos 8337468 to 8338171)
aagagtgcagcagcttctgccaagaaggaaggggaggtacaacaagttgaattgaactgtgtgctaaatgctaatacatgtttgtttgttaagtacagtttctgttttagatgctttccaagatgaatgctgtgctgtgatattagaatagcttttgttgttgctggttgttggaaacttggaagcttgaatcttttgctttattctgtggattatacttcaatttcaataatgtgcattgcgcactttatttggttttgatgcacttttttgtcattccactaattctctatattatataagaatttattttatatgcactactttttcacacaaacatccaatgagatttgatcattttaccatgtcatctttttaattaatatgatgtggtgacaccgcgacatgataaattcctgttggatgtcgatgtaaaaatgttttagtgtgtctaattaaacgcattctgtaagttttgaattattcaagggctgtaaagtttttatgcagcaaaaaaatctctaaaatgagttcgggaactgggttgctaaggctatatatgaaatggtttttttttttaattagaataaggttatcttttttttatcagctgtgattttctttattaagttctgtttttcttgcagtttttatgataaccttagattgtttcttccatcattcagtatttctgtttcaacagg

SEQ ID NO: 19801 - DNA, 976 bp, Glycine max
  Intron number 2 from transcript Glyma19g30120.1 (locus Gly ma19g30120) derived from phytozome v7.0 (chr-ID Gm19; pos 37787087 to 37788062)
tctggcacccctaaagcttcttctgttctgtgcaggtgatcctcatctgggtttcattcgtttccgttttgctcttgtggttttgcattttctttttatggaactgggtttcattcaatttttctctttgggttaaattctatgttcaattagaggttttgatgatgccccagattttattttggagtttcgtgtcctgtgaatgatgccttaccaatcaaacaagtaattgtttttgtggggtgatttgtttcgtgttagattaggattattgagattctcggggtttcattttgcccatagggttttgctgctgtggttggctctctcttttgtttcaaaaaataggtttttcgatttttaagtctttttttttaaaaaaagaaattggttggctgagaagtgattttttatttatttaaatcttgtatatatctagggttttgtggtaaatgagataattcaggttcgggagctctatttgagttgttgtgtttttttataacaaaaatctatttgtggttttccccccttgcaattgggtgtacaaattttctaactttctcttctttggtatgtataagtgtctgcgaacgtgttaaccttagatgtctgtgtgtgtgtgtgtgtgaatttttgttgattatttgttgtgtaaaatgagtttgattcacaacttattgttgattatttgtgttttgttgatttctcatagagaatagctgagaaatggattagtggttttaaaaaataatggactaatttaggttatttgagattcttgattcatgtcttgccttacaattaacactgaacggctattttacaaccaatacttccctctagtgctgattctattgtattttcttatttgaatcccatgtttgtgcataataatttgatacaatttccactcatccgtgataaaaaaacctctgcaggcagtttttctttggtttggttgcatcctttgatc

SEQ ID NO: 19802 - DNA, 650 bp, Glycine max
  Intron number 1 from transcript Glyma20g37610.1 (locus Gly ma20g37610) derived from phytozome v7.0 (chr-ID Gm20; pos 45455961 to 45456610)
ttcagatctgtaatcctctcattccttaacctaacatcatttcatcttgtctctgtattggtttcataaacaccccaacggcgacgacgaggtctttctaattatttctttttctttttttcttttttcaaattctaatattatttgttttttttttctttcttttctgctgcttttaatgcaatctctttgggattcatgattgggctctgtctgagatagaatagaatgtgggataattttatttttttaagaaaatgcagtatgaccatggaatggcattatcgcaaaatcacatggaaatgcttggtttgattgataatctcttcttttcttataggggaaaaaaacttttatgatttttttgttgcaacaacacatggttaaaagggaaactattggaaatgtatgtcatacactgaagattctgtttgcgtatttggcatttctgtttatgtgactgtcaactttacttgtaaacagtcatttgacagattctgcttgggttgtttagggcatttaagggattataatttgaatgtgatggcagctaaagaatgggtatatagcatcttcaaagtttgacatatttgtaaatgggtattttttcacaagatttgcattcattgtctttcagtagtggaattgct

SEQ ID NO: 19803 - DNA, 893 bp, Glycine max
  Intron number 2 from transcript Glyma16g19420.1 (locus Gly ma16g19420) derived from phytozome v7.0 (chr-ID Gm16; pos 21335101 to 21335993 reverse strand)
aaagttgggtgggtcctcgtgcagaatcttcatatgtaagttttatactaatgaatgcatttgagacttattttatgtttattttaattataatctcaactaactgcaaatattggcctatgtcaatgttgtaatttgtcgttgttgtttagaaattaaatgtttgcccgagtaaggtgcaccaaccaaaagattaataataataaattgagtacatgatgagtattattaaaatagaatttattactctctagtctctatatctatagtcatgtcttcaggatttggttttcacaattaaaaaaattgaacttaagatatcttagaaattttctctcggtattttacattgattaatttttttggcatttgattttaatgcacatgtagtgtttctattgccatgctaaaacctttgacaattatatgagcacgcttaatatgtttatcttatttcgtgtatgttatttatggttgaggtccccacgccaaactgagtatgccactatgccagcaattagcttaggtcttagaataatatatagcattggtacaaagtgatataacttcttttatggtacatttcattgtgtggttcttgaagggataaattaaccttttattactttaagccaatggcacatttgggtatgattagtctgatgggatacttgcagcgctccatttgtcgtactactcaaacatcctgactcgcgatacaattaaaaatagttgtatttgccttttatttttcaaatttataatacttgcttgttgctataaacctctagtatgatgtcaatatttggtctgaaaagatggtattttactcaagctagtatgttacttgttatgtaggataaatttgaacagaggaagactgagttatcttc

SEQ ID NO: 19804 - DNA, 727 bp, Glycine max
  Intron number 4 from transcript Glyma20g02370.4 (locus Gly ma20g02370) derived from phytozome v7.0 (chr-ID Gm20; pos 2025523 to 2026249 reverse strand)
tacacatcccttcacccaacaacttaagcttttaggttagttgattcatgcacctcaccttacttgacttgctggattagtttgagttattaagacttgccaaattctacttgtcaatatctttgtgtaatcaacttatctgcatgagccatgagtaaataaaaatctgaaaatttgtaatttgcaattcatttctagatttatttatttttctttaggaggaaaggttgaaaatagtgaaagagaaggctgaagcttgttctaaagtctaaacatgtagtttacactttacattttaaacctatataacacagggtactgtagcacacacaaacaattagcattgagaccaaggggaatagttttactcaattgaaccattatactgttgaaaggacaccaaaaaactttaaataaactacccatagatacaccaaaaaaccagttagaacttatccaaatcatttttcccctagtgatagttgctttatttataacaagataaaaggacaaaaaattactgccaagtgctaacatctatccacgttcttcgtttgaagattgtgatgtaatcctattgttcttgtttcatgtagcaatccacccctatactttagctattgtatgttgggtttggaatgcactctttgtttccttcacactatggttaattctgctgttgatgattgcagctacatattgttattaataaactaaaatcttcttc

SEQ ID NO: 19805 - DNA, 571 bp, Glycine max
  Intron number 1 from transcript Glyma14g35720.2 (locus Gly ma14g35720) derived from phytozome v7.0 (chr-ID Gm14; pos 44786039 to 44786609)
atcccccttactacgagtggtttcagttcaacaaggtttccttctcattcaacttttctattttcttttttcttatttaggatacaccctttatagtgtatttttggattaaaagatagaaagatattcgtaaaaaacctgatcaacttttttttcttttctctcgaacacatacttaagattttgcttaaaagattcaaatctaatttcagttgcactaatgaatttcgtattgaaaagaagaatgagagtttgatttttatattgaaaattttctttcttccacttttcctcaattctatttttattttttccccagctgctcaattttcatccatggttccaacaacgactactaagaacagaatctatctgcagttttataattggaattgaaattcgtattaaaaataagcatatgatatcagtatgaaaattataattatgactagggtattgtaaagaattcttaggaaaatttttgtttgtttaattatctatttttcaaccatctaattttttttatggtaaaacaggaatttacagagtacaccaactttgacgagtgcct

SEQ ID NO: 19806 - DNA, 744 bp, Glycine max
  Intron number 2 from transcript Glyma15g14390.1 (locus Gly ma15g14390) derived from phytozome v7.0 (chr-ID Gm15; pos 10881306 to 10882049 reverse strand)
cagcataggaacattgttaggtatatcatctaattccttctcctttcattggaatgcaatgtgttgttgtcgatgatgaaattggagggttaataatgttgtcgccgcactctatttgtcgtgaatttgtgtttctgcttaaccttggaatttttagctattatatgatgtatgaatggaggtggcttcgtgttgttgttgttgttcatagggtttggatgtgtcgaacaattgataacctgattttgatactttaattccaatcagttgttgtttatgtttggtgaactggttgttgtatttgatagattgtacggctgtgaattgttcatgtaggtgaggtggctgtggctgtaggatgtgcacacagttatgccaacactttcatttttgagtcatgctttttgtcttactgaattctatcaatgtttgtatagatttatattagagagcaaatactgcatgcattgattgtatatagggtttttacactatcatgcaaacacaaattgtcatgtatgataagcttgttgacttttgcaataactaagtcataccaaacgatgatttctgattggttgacaatgtaatgtatagacattaaaatctatatatgccctgagcccctgacttattggccatgaaaatgttaatttgctgtgtgctgttcttcctcttattctgccttttagtcaattcattattgagttatgcttggtggttgtgtggatgacaggttgcagg

SEQ ID NO: 19807 - DNA, 861 bp, Glycine max
  Intron number 2 from transcript Glyma19g44970.1 (locus Gly ma19g44970) derived from phytozome v7.0 (chr-ID Gm19; pos 50244509 to 50245369)
cggttacaaaggttcttttcttttcttcttttaaaaaactatgtttctcaaggaaatataaaccacctttccttcctcttaaaacacctttaataatagaacgcaacttgataattaatgacaacgttttcagaaattcacttctccatgaacgtggaaagtagatattcctgtttttgaggtcgtaccacattgcactgcatttttgttattcatgcatgtaaagtagaaccgtggacaaaaaacattgaggttctgtatgtatctctaacttcatcacaaatatagtaagtcaaacatgacgacaacaacaaaaggataaaaccccgacagcgttattttcgagagatgtggatcaaggtaacaacactcgttaatcaggggaaaggaacggttagagagggtttctgaacttaaaagttttagaggtttgatctaactggctatcaatctgctttgatccgcttactgcttcatgtgatcgttttccagcatgcccagcttagccaagtaatataattcacgcgtgaattagcttcatgaagaacatgatccaccttcacttggtcataagaaaatcaatcttcaaagtgctcactagagacctttcgacctagaagcttaattttagttaaaaaaaacaaaaacaaaaactaatcacaacgtacatgcattaaataatgttttttttttaattaaatataatgggtagctttgctgcatgaaaatgtgtggtgtttgatttatgtattgtgtagtgtaggcacaagctagtgcgtgaaagatgaatttacctttgagctcaagatccttatgaacttcttaatggtaatttcttacatgcagttgttgcattttgtg

SEQ ID NO: 19808 - DNA, 740 bp, Glycine max
  Intron number 2 from transcript Glyma18g16710.1 (locus Gly ma18g16710) derived from phytozome v7.0 (chr-ID Gm18; pos 17343531 to 17344270)
agttagtatatcactgactcctttttcacttttaactcatttgttcctaattttaaaaatcatatataattttttatgaagtatattatataaattttattacgggtaaaatgcaatttagttagttatctgttaaaatttgtcttaattcttatatattaaaaaggtttaaatatttttaatcattttaagttaacgtttttattttttgttcttgtaattttttttttgttttattctttgtaaattatgtctctactttattttttgtcctttaaaccatttaaatagcgctttgaataatgaaaaaataatatttaaaccacttaaagaccaaaaaataaaagaaacatatagttttgcagagactaagactatgttttttttcaaggaaaaaaacaaaaaaaatttactaaattagaagaagtaaaaaagtatttaaacttattaaaaataataattttaattttcatatttttataataaatgaatttcgtcactcttcctaatatgttaagttctatagaaagggacaaattttctacttataaaatacataaggactaaaatcattatttttaaaatgtagactcaaactaacttgggctcaaaattaaaaagcttaaaacacattttactcttttattatttcatagtaacaaacaatttctagaatttgggaactgattactatacataaatgaaaacaggaggtatctcaacattaccaagtgcaggga

SEQ ID NO: 19809 - DNA, 835 bp, Glycine max
  Intron number 1 from transcript Glyma14g10070.1 (locus Gly ma14g10070) derived from phytozome v7.0 (chr-ID Gm14; pos 8155555 to 8156389 reverse strand)
gaagtggttagttagggaccctaaaaaaaattgaggtttgtttttataaaattccagggtcagttgatgggaatttgatatgcttttgcatgctgcaacgttcccgtcgatatactttaacagtggttgtgcacttgttattttgtttgctgttgtcattattattacatgcagtaagatgtcgtacttttttattctgtggcaaatgttagtttgttagaatgttagttttgttagtagaggggatcaaacttgcgacttttcttctcttcccttctcccttaaccattcaacctaccttatattccgcaaatgtcggtccacattttttagttttttttttgtaagataaggagaatgagagcaattagtttatagcatagcactattacacaacggaaactgatactggagagtgtgcagttatagtgcatgagtagaggttgaagggtaaaatgagcccaaaaatatgaataactaattctgttttctgtaatggctgccttcagtcatccttttttcttttctcttttattgatatagtaaatacttagaatgctagcaactatgaacaattttcagtatgtgtatacatatattatttttttaccctaatgaccatctgctctttatggaactaggaagcgaaggtataactctgtaaaatgctatgctgtctcaaaatattcattttgtgtacaaactttttttttttttaccatgaattacaaatacattataatttagcaatgtaataagtcatcaagatgcaattgtttttttgtgccactgactgatgcatccatttataattttcaggaactgtttgtgttaa

SEQ ID NO: 19810 - DNA, 895 bp, Glycine max
  Intron number 1 from transcript Glyma14g40260.1 (locus Gly ma14g40260) derived from phytozome v7.0 (chr-ID Gm14; pos 49227045 to 49227939)
gggcacgtggcgaggccttgatcaaatcgattaaggtttgttgagccgtttcgattttgcgtttgtgctcaactctctctgcatgttgtttctctgcataaaactgccaccccccctttttgcgcttgggttgtatattagtgccaaacgctgccgttttaaatgtgttttgatcgaaccctagaacccagatttggccatgttgtgagcaaagatctgttgccccgcggtcattctctaaaacttttataatattatttagggttttcttttgggtaattagtaaaccgaaattgttttgtgagacctagaaaaagggtttcggtttttataaggattttataatgcatgcagttcttccaaatcactaacaattgtttttaataattggtgggtgtttttcacctatgttgcctaaaaaacctgaaatgtttttttttaaaccaataatctctgttacgtaaatggtgaattcaaatattggatcggttttttgtagttaggatcacgttaggttatataatctgaggtataaagatgcgaaatcatatgaaactcgttcattttgattagtgggtgattgggtaatcttcgattttctcactcattggtagaaatgactcaggttattttactattttgtggcatgtgattgctactctcttgtatatatgaaataaaatgtaaatagttattgttcttgcaattgttgaaacgattgttcttgactaccaaaagatttgtaaattgtaaagagatatgaaatagctctagttcttgaattgcatggtgaagcaaagattgaaatgcttgcatagcatgtttgtttctttggacttcttccctatcatctatttgaaaatgttattctggtgctttaaagctccgagaggag

SEQ ID NO: 19811 - DNA, 424 bp, Glycine max
  Intron number 2 from transcript Glyma14g09830.3 (locus Gly ma14g09830) derived from phytozome v7.0 (chr-ID Gm14; pos 7902992 to 7903415)
aaaaaaggtacccttttttttaaatatatagatgagaaaaggtacttgtacttacataagtttccactttccaattataagggtttagcattgcaaattgccattagagctaatttgattttaagactaaactcatgtcaactattcagaaatcattggtgatatgatttttatacggtagattgtgattgaattgaatgataatgtagaagactttttatacagtcaatgcatggattatttattcttatgcaaatgctaaccacactgattaaggaagtagaatgagaaaagtgtttatcgggatgtttaaaaatatccccccctatgactttaagacccttattggcttattcttattttaattttgtctgtttttgggaataaagggattccacgagggagagagcgttgtcagtgatca

SEQ ID NO: 19812 - DNA, 813 bp, Glycine max
  Intron number 3 from transcript Glyma14g09830.3 (locus Gly ma14g09830) derived from phytozome v7.0 (chr-ID Gm14; pos 7903439 to 7904251)
cagcatcagtttgtcgacaagaagtaagtatctatcatttatttttttaaacatttctcagttttctgtcattcaaccttctgggtatattccattataatgattatgccatttacctagttaatttccttatgtgttacaacttgcaaaagtaacatgaagataattgatatgtgtgatttgtctaacctaaccatatatcttgtaaactgtggggtgtggagtgttccttctttggccttcagtggataactttgactttgagttgaactctattttgattgcataggaaagatgaaatcaacttagtgcctgtttggaagctcaatttaggtctgaaagcactgaaattggtttagcagtgtttctataatgggtgtggctattggcacttccaatggctattcacattccacactgaccacttttaattgcaaattctaaatctatatttctctcaactaaataatttatttccatcactaaattgcaatttagttggcagaaatttaggaaattgtgatgaaaagcatttagtggagagtatgaataggtagttggggttccaatagccccacttttgtttatttcttgcaaaatttaagagtctgccgaatgtattgaacaggaattcttacccatcccggtggttgctagatacattttcaatgtcaaacagtattcatgttaagtacagagatgttatatcttacccatctgttcatttatctcattaaatatatggttatcataaccttgaggtcctttcctttatcagatttgctactttattacatcagtgccttgctttaa

SEQ ID NO: 19813 - DNA, 937 bp, Glycine max
  Intron number 1 from transcript Glyma15g26390.1 (locus Gly ma15g26390) derived from phytozome v7.0 (chr-ID Gm15; pos 28185063 to 28185999)
gggtatttttagtcattgctatgaataataacttttagtatcattttattgttgatcactgtaactctgtcttatagcaatatttctactaatagagtgtttgctttttcttgaacaggacaagaacttcaattccacaccaaagcgtgaaacaaacctaaaaactattggtgtggtcaccacaaacatcaccaaatttctctaaataaatagctatttgatttatttatgcttcaatgaatcaggtgtgaataataaacaaaggacactgtctgatctggagcatgttgagaaatctttaaatattgaaggagatcaacatttaagttaatggtcttttctattatcgttgagtcactacattttgaaatgtcagtgttgtttggtgtattaagatagcctctttgcatagtaatgtggcatcatattaacacaacttgctcaatatacataaaatggtctcctttcttgttttggattgttttaggtgcttttagctgttgttacttacttactttgacatctccatgttgggtaacttatttaatagtatgaccaataatttacatgttatggaaatataattgataataggtatgcactatttggaaagtttactctaggaaaataggacttaattttaataattgtaatggaacttagttttaacttttaatgactgccatatggcagtttatggagcagttatgtattttcactttatatgctcactttatatgtttatgcatgttctgttaaatatatgggctggatcatattcttatagcagttagttgtcctatgaaatggacttagcttgttgatgtcttttgggtatacaactttgctttagtgttttttttgtaattctatttatgatttttgtctttattttttggaaggtaatatctctcgagcccctaagttgtgcaacttt

SEQ ID NO: 19814 - DNA, 812 bp, Glycine max
  Intron number 1 from transcript Glyma20g23600.1 (locus Gly ma20g23600) derived from phytozome v7.0 (chr-ID Gm20; pos 33424791 to 33425602 reverse strand)
cccggcgaaattcctctccttttcgattgtttcaggttctattcttcatttcatcaattgggttttgttattttttttttttacttttccttcttggtagttggatggagacttgcttacttggttcacctccttaaaaaaattgaggtgttaggtgtgttttttaaaggttggtgatttggtatgagctgaacaaatctctgggggtttaacttaaatgtggttataaaattcgtatcttcagatgatagggtattattaagttagcattctttgttgaccctttgatttactccaaagttaaacttataggttatatgttcatgtccgaggaatgagttgcctaaagcatgcatgataataagaatatagaggtcgtgtttgaattaacttctcagtacgctaaagttaacgtattcacttcaggttttggacacgttagatgaaaatcttctatagaataagttgattttaacttatggaagaaatttaattcattttagcttttttttttctttctataaatacttattgtgaaatatatccaattacaacatgagttttatgtgctaattgttcattgaatattttaatcttatacacacacacacacagaaagagagttgatttctaacggcttccacatgcacggctgtaaaaaattcagatgaaatttgttaaacaatatctatgtgtaaattgtggaaataaaaatcaaccaataaacagatatactggtttttatgtgcattaattgtcatcctgctttagtcaagaatctgattcctttcttatgtgaagccaacaagaag

SEQ ID NO: 19815 - DNA, 717 bp, Glycine max
  Intron number 1 from transcript Glyma19g41410.1 (locus Gly ma19g41410) derived from phytozome v7.0 (chr-ID Gm19; pos 47687789 to 47688505)
tcttcaaggtatctcaattaatttactacctaattaaataaatgcatgttttttttttgtgtgcacgcgtgtgtagtgttttttttttccagatataattaaatgtattaattttatatctcaataaaagaatgatattaattatattactttgaagacaattatatgaaaggtattcaacgagtgaaaaaaagaatattatgaaaatattttttccaattattagtttgataatcaaaacttattgtcttacttgcaattaacctcctttaacttctttttttttaatgaaattgttttttttaagccacgtatatatgaaattgtcctgtatccctttcttaaaaaaagtcatgaaaacaatgtaaattttatatcatatttcatggttaaatgtgtttttaatacttactaatatagtaatatttgtttttagttcttcaaaaataatttgtctcgtttatgaaaatgtattatgcatagtacgtctatcaatgggagacaaaaaaaataaagaatatattttgtattgacgtactaattctttgggcgaagtggaatgatgatatacgaaactttattatatacaattttactgtttgttttacaaatttgtgtgtttatttaaatggtatttcaattaatttggtgttctttgatgaactctatgcatgttttgtagggattggattttgtaatttcagaagcaggaaaaaa

SEQ ID NO: 19816 - DNA, 930 bp, Glycine max
  Intron number 1 from transcript Glyma19g36020.1 (locus Gly ma19g36020) derived from phytozome v7.0 (chr-ID Gm19; pos 43426158 to 43427087 reverse strand)
aaacgacacaccaggaggtcgtttttcattctcaggttcgtgtcttgagatattactctcgtttccctgattcatttcactgcactcaaatttagtttacttcttctatttaaaaaatcagagagatagtgagactattgtgcaattcgattgcttctctaatctcgcatagaatctaaaccagattcaacgaggtttaggctctctagtgaatgcttaacaaattgatggtttggtagatttgcatccattttaggttctgtaattgttattcctgcaccattcttttttactttatctggaataaaaaaactcatggtaattttgcagctaagaagcatatacgcttctaaccagtagttgtgtcatcggatacgtatccatgttagacgcacggttgcttcaaaagcttttagttatagttgtacttttataattttgttattttttacctttttaacattggtatcaaggttttaaaaaacagtctacagccacaatttcagccacaacctcaaggtttttgaggtctctgcggccacaaagcaaccacaattgcagccaaattggctgcatttatccacaatctcctgcaatactgaggatcgtgactgcaatttaaaaccatcatttatgttttgcatgttgcattatggtcatgccatgtcttatatttttaattttaaaatttaccatattcctgtttctgtgttgtattgtatctgtttcctatgtagtagtcatgctttgtagttttgcaggaactgaaatgttttgtatgatctgtttagttcttggattaattttgtttaatcatgtcctgagccacagtctccataaagctttggagtgtggacacaagattatcatttcatatacaatttgattgtttactattttttctgtaggttttcataacaaatttttgaa

SEQ ID NO: 19817 - DNA, 889 bp, Glycine max
  Intron number 1 from transcript Glyma18g07950.1 (locus Gly ma18g07950) derived from phytozome v7.0 (chr-ID Gm18; pos 6685627 to 6686515)
ttctccactctcaaattcatctccgtcctcgacctgtcagtttccacttctcaatttttcaattgctgccgtttcctttttcctaattcatccttcattttttttttttgtttttgctttcgctgtgtttcttcccgcacactcaattcggaggattctggaatatcgtttcagttgattttccgttttcttttttttggttttgacttttggccagtgctgtggtgccaggttttggaaaacgatgttgaatttgtgatcgaaggttgtgaagtgttgttagaagttactgaaagtcttaggagtgtgagattcatggttttgtgagcagtttagctgattaagtgaatggaaaaatagtttcagtgattaaattggtttaaggtgttttattctgcttaattacaaggaaatgatgatttttcttcttcttttctttcaaaacaagttaataagattgagtaatttctttcgctgtgtgttctgaagttatagtatgctactatgcttacttaactctatcagtgattttgtatattgtatattaacttgtcgaggttgtgtaatactactgttattgcttgcttcggtgtatgttatccagtggaatacttttgttaaaaacaaggtattaaaatggggtcgcggttgtggtttcgtcgtgatcctttacattgtgggaaaccgcagacaaatgtggtcgcagactgttttttaaaaaccttggttataagtaatggctctgtttttgcttcctaaactgcgttataagtagtggacgtgagtttttttttttctcactcatggcttgtatttagatggagttggtcgttggtttgaaatctaacttttttacgtgtgttgtgcagtttcataaaggcaaaaagtg

SEQ ID NO: 19818 - DNA, 414 bp, Glycine max
  Intron number 2 from transcript Glyma17g07390.1 (locus Gly ma17g07390) derived from phytozome v7.0 (chr-ID Gm17; pos 5387134 to 5387547)
ggcgaagttgtctccaccattccaagttcgtactcgatctcctttacatttacctgaatcttaacgtctactcttcgttttgcttctatccttctagcatttttggttttgtaagctaccgtctaccgagcgatcttgttttgaattttaggttccttaatagtatctgatttaattgaatgagctcgcttgtatttataaataatataattctttgtgtccttgattaaagctgttctgtgtgttccttggttaaaaatgtagacaaaattttgcatgctgtgttattattatcagttgttttttcctcgacatacatgtacgtgtatgtttccactgcgtggatggtatttgtgctcttccatatagtgactgattgatttatttgattttttgatgcagcaattgggttta

SEQ ID NO: 19819 - DNA, 207 bp, Glycine max
  Intron number 1 from transcript Glyma20g29770.1 (locus Gly ma20g29770) derived from phytozome v7.0 (chr-ID Gm20; pos 38596918 to 38597124)
tgaacattacccccacattgttgccttagagcaaggtatatatgaatcacatttggaagcaacaagttgtattatatttgaaggcatcttcattaatgttcctatgatgttttttcttttctttgaataatttgctttgattctttttctacttcaaattttttggatatagtgacacacggtgcagaagaagaccactttgatcat

SEQ ID NO: 19820 - DNA, 568 bp, Glycine max
  Intron number 2 from transcript Glyma20g29770.1 (locus Gly ma20g29770) derived from phytozome v7.0 (chr-ID Gm20; pos 38597284 to 38597851)
gctgaagacccacaagttcataaaacaccaagtatgttcttttctaaatcatctggaattagaggatgagtattagttcgccataaagtgaaataagatccggggttcaaacaccttttcagatcattatgattaaatttgattttattccgttaattttttttcctattgattatgatcttcataaattttaaatttttaaaaaataattcctattatcattcaacaataacgtgacatatggtgactattatgagataacatatgatgtaacatgtttgaatgcatgtgacgttatcaataaaatctatgaggagtaaaatcaattggaggagtaaaatcaaaattaatcagggataaaaaacatcactaaaaaatattaccttagaatttgacatttactcgtcatagatacttttctaatttttcttcaaaacagaaggaactcagaaccatttcttttttgaaacttaaaaccgtttaataacgggaatttactaataataaaaataaatctgatttaagttggactatgtacttgaatgttgtgcagttcacgaaagtgaag

SEQ ID NO: 19821 - DNA, 666 bp, Glycine max
  Intron number 2 from transcript Glyma18g02280.1 (locus Gly ma18g02280) derived from phytozome v7.0 (chr-ID Gm18; pos 1432621 to 1433286 reverse strand)
gtgctccattgtcatcgagttactattccaatctggtatgaatatcatacctaatctatttttttctttgatttctcttactatgtagagtaaactatgattaagcataacgaggtgtcacattagttcttcaaactaaggaaaatttaaaattagtccagggagtttctagttgtttcatcttgagattttggtctcttaaacatatgataatattatcattaagtcacatatttttttataactttggattaatgcgattggcggattgcagcttcagggacttttttgaagtttcttagttttggggactaatgtttatgtgactaggctttatactttcaggaactaaaatgttggtttactctactatgtaacttgtagtctcaatatcttaaatgtaataaaaataataaaatatcggattatattagcttgttttattgattgtttaacaaatagttaatcatgcgaattgcaaatccttgattggataaggtttcaattcgagtttaatgtgacactaacacaaaacatggttcctttctgagtgtaatggttcaatgaggtttagaatctataacaggtttagcacttatttccagtaattgattggcaggtgctccttcacatatggggcatctattatgcaggatagagatctga

SEQ ID NO: 19822 - DNA, 940 bp, Glycine max
  Intron number 2 from transcript Glyma16g26340.1 (locus Gly ma16g26340) derived from phytozome v7.0 (chr-ID Gm16; pos 30480921 to 30481860 reverse strand)
aattttgcagtgactgacagaggagagacaatcacgtatgttactgtttcattcttgtattgtgattgttcttgcttgctttagggtaggtttagttgttggaagagaaaaaattggaagagattgagaagaaatatttgaattatagtagaaagaggtgtggaatccatgctatttttttgaaaatttcttcttaaatagtaatttcctctcttcaacgaaaccaccccttagatttttcttggtacctttctttcaatctatagttaggaagcaaaatgcatcatttaacccttcatgaaaagaagggggaaaatggacttgtgaaccaaaactcgaacaacatttggaaatttcagtggttttcctgttatcaaagcttctcacatgaattaagtatgcttatcagtgtaatttaaaaatgaagcctcaaatttgtttttgagaaagtaaagcaaccatgttagttcctaataatagaaagagtttaattttcttgcactagagatttttacttattgttattataaaagtcaacaaatttatcatgacaaattgtgattgagtggcagtttctttacgttctaatataattcaaagtatgaatcgtttaagtactggatacattagttgttgaaaaatgaaactgacatttgtggtacttattagaaactggcaaaaaatttgcattttgaacatggtttgtgttatcaaaatctctcagatgacaaatgtggagatacaattttcccttctttttttgttattcttgtgagatttccctgattttatatataatgagaatagtcactgggggtgcaagtccatgtcttcctcgcaaatgcttccttgtgagcaagttaaaatgttaaacccagtttatttttcatcactaatttagttgaagctaatagctattttaccttgcaggtttgaagga

SEQ ID NO: 19823 - DNA, 532 bp, Glycine max
  Intron number 1 from transcript Glyma16g26340.1 (locus Gly ma16g26340) derived from phytozome v7.0 (chr-ID Gm16; pos 30481913 to 30482444 reverse strand)
tctggtctctcatcaaacgttctgtcaaatccaaggtgatcattcccatgttcatttcttagtttttgttttaaaatcacttcattttacttgccccactttatatttcatgatttccgctcgaaattttgtaactttaactagtaataataaggagtgtgatagagattgtattgctagcactacttgtttctgtttttgttttgatggtggcttttttctgttgctttgactgttttgctagaaaacacattcttaggaacatgctcttttattattaattgacattattagaaatcaaataaacctcagtcgaggtgaaaaattgatttttgtggtgctaacacagaaccaaacatacacacccaattaagttttaactaatagcgaagaatgtgttagaggtggtgttgttctccttttggttttagttttgttctagggttttttcctgttgttttgactattttggtgtggtttggtggatggggaaatagattgtgcagaagacgtttataggtgaaggtgaaaa

SEQ ID NO: 19824 - DNA, 463 bp, Glycine max
  Intron number 1 from transcript Glyma16g33030.1 (locus Gly ma16g33030) derived from phytozome v7.0 (chr-ID Gm16; pos 36116633 to 36117095 reverse strand)
agcttgccaagtggtgtaagtcccccaagttatgtttgtttcaactgttatgtaacttatgttaattcaacctgtgttctttggaccatgtagttgaaggaagacaaatactagggtgtttggttttgagaaattattatatgatccaggactatcatgatcctgactaatcttcacttgacatgtaattgagtattattaacttttttctcaaaaataaaaaatctcagttatatgtggcatgaagattggtcaagaccatgaacacatgatggtttgagatcatatagtaatttctcttttggtttcacatccattgttcctttaacattgatccatcttaaagttactctcggtagctttaacattagcgagtgttacacgtgctaactagttgctatacttattttgttctgtttgttttgcaggtcctgacagaaggatcttcttgcctgagggtctc

SEQ ID NO: 19825 - DNA, 248 bp, Glycine max
  Intron number 1 from transcript Glyma15g06450.1 (locus Gly ma15g06450) derived from phytozome v7.0 (chr-ID Gm15; pos 4556124 to 4556371)
cgtctcgttcaattccgagttggtcattaacaaaggtaatcccgctcctttctcaacgctagtttatttgatttaagcttccccgtttcctttatgtctctgattttatcaataatagcgttaactatttgcaattgttagttgtctctctaattccgtttttttgttatttatttcgtttcatgatttgaattccaaaatgtcaaattggttgaaccgtattttctttgcaggtttggttgtgaaag

SEQ ID NO: 19826 - DNA, 439 bp, Glycine max
  Intron number 1 from transcript Glyma17g11520.1 (locus Gly ma17g11520) derived from phytozome v7.0 (chr-ID Gm17; pos 8666046 to 8666484)
tcaccaaaacacttgattctcttcctttcatcttggtaacttcatctcatcaaattttctgtctttttcttctttctgggagcatagatttgattctgttctttttattggttgttgggtatttaatatcttatagacaaacttgatctgagataaaatcaaaggaattatgttggaccaggacttgttattcgagaataattgtagtatgagtatcaaacattttcaaacttgtgtgaaatttagaatccttgttattattattattattattatcatcgttattattattattattatttcttcattcatattttttttttcattgtatttttgattcatttagtaatggctattaatagtattgtttgttaagctgtacatggagttgaaagggcctagttaattatcacctctttctatctatggtgttacagct

SEQ ID NO: 19827 - DNA, 706 bp, Glycine max
  Intron number 1 from transcript Glyma17g36050.1 (locus Gly ma17g36050) derived from phytozome v7.0 (chr-ID Gm17; pos 40034138 to 40034843)
actatctccaaggattgcaggatcgcaaagacaggtgcgtactacgctaccttcgttagtaacctacgttacctacctcgctcacctaccttttcattcctattttcactgttctactgtttctttctctcttgcatttaatcttttcgctctctcaggatcgatttcgcggtggagaatttaataatagtacttccgatttcaatgcgaatcatcaatcgtttattttccgttctttttcctctgcctccgcatctcgtcttcgaatttttttttccttcgccgacaacgtgttaggcttgtatcggaatttctccgtttgaatgctgtttttgacaatagagaggctcgttgctcgtagcagagaaattctcgtgtttatatatgcacgcagcatttaataattttgatgttgaatttccatagattttcgtcgaataattcttgttaagtggagtgagtttatgttgatgatactttattgaacaacagctccattaaaacgtattgttgaaacttgataagttaatgttaattataatattattactatgaatgtctatataatttggtatacatgatcacttgtaaagataatatgacatgatttgaattaattatggtgtaagtggatacctagcttatacatttgtgttgctttctatttcagacgcagagcacttcagaggaaagtgcaagaatctca

SEQ ID NO: 19828 - DNA, 507 bp, Glycine max
  Intron number 1 from transcript Glyma16g04290.4 (locus Gly ma16g04290) derived from phytozome v7.0 (chr-ID Gm16; pos 3628476 to 3628982)
ttgagatcctgaggtgggtactttctatgccaaaatgcatttttttggggggcgggggtacatgtttttgttgcttggattcagtttttgtaagttccaatcttcacaactttgattgaagggtgctcagaacggaaaaaagggggtgggtgttggaaaatactgagaagaaatatggggtgttcttaattttggttttaaattttaatgattttttttgaagttgtattaattaaatcaaaataaaacaaagaaggacaggtcagggtataattttttaataagttcagctgttagtggaaattgtgctgtcacggactcacggtgcattaatctactttcctttttttttttttaccttatcttagtcaagcaaagtaattgaagataaacttgaagtcttctgctttaggatttgaactcttgtgtatttttccttttcctttttgctgagagaagtcaaattcaatatgattgcattttgtgtgtctgtttgttgcagtgaag

SEQ ID NO: 19829 - DNA, 484 bp, Glycine max
  Intron number 3 from transcript Glyma16g04290.4 (locus Gly ma16g04290) derived from phytozome v7.0 (chr-ID Gm16; pos 3630097 to 3630580)
ctgagaattctgagaacgtctcctcaaatattgaggtaaaacccaaaatccagattaagaatttgcatgatccatttctcttgatgagctgttcttcatgggaattttcagttggctaaaaagtagttgaaattatttttattatacccatggctttgttagtaaatttgagtgtgttttgaatatattggattattactttagcattgcaattctgaaaactgttaaaaaagaaagtttcaatcatgatattttgttttaagcaagttatgtcaataacaatcttaactactttttggggcttcttgccattgtgtcaatcctgcatcacatgcttacaatcttaagcagtgcattcttttgattttgtagctaggcaacaattataaactgttcacattttgtttttctgattgagctcatggtctgctatactatttctctttcaggaggggatagccagccccaccaatagaagaatcta

SEQ ID NO: 19830 - DNA, 638 bp, Glycine max
  Intron number 3 from transcript Glyma17g01330.1 (locus Gly ma17g01330) derived from phytozome v7.0 (chr-ID Gm17; pos 790091 to 790728 reverse strand)
actccattgtcatcaaccttggagatcaacttgaggtatattattattattattattttatatttacccatcccctgctccctctttcttaatattactcaccttatcaaaatctcacatcttgttgcctaaaaaaaacatttgttttgcaaaatttgtttgttttttttctttaaaatattttagatgatacattgaacaataaagtgttttaaatagtgacaaaaatgttgtttaaagaacttgtaaatacgaaaaataaaataaacatattttataaaattaaaacattataaaaaaaaattacaatggtaaaaaaaacactaaattaaagagacaaaagaaatatttaaactgctaaaatatcatacaataaataatatatatattaatatagtaaaaaaattatatgatcatttaattataacatcatatatactaaaatttattaatttttaaaataattatcttaaaagttatattaaaaaatgatttttgaccgattgataatagagaaacttttaaaatgtcatattcaaagaaaaggtggcatacttggggggaaagaatgtatgtaacattaactttcttcattaatttaacagcttgttgtttctggtcaaaacaggtcatcacca

SEQ ID NO: 19831 - DNA, 835 bp, Glycine max
  Intron number 2 from transcript Glyma18g51570.1 (locus Gly ma18g51570) derived from phytozome v7.0 (chr-ID Gm18; pos 60426796 to 60427630 reverse strand)
ctgcttccctttcgattcgcggtgaggttttgcttcttttgcatggttccgttatttgaattggtggatatgctttgaattggaagtttggaacttcatttgtgaaagtaaaaatgaaattgcaacttaagagcgttggtggattgattgaggtttatgtcagcttctttaattctagatttaacttttgataggttcttcagtgcaactcagctctacagtgcttatcagtagcaagaaaattttacagtatagtgtagcttacgcctcatcggataggcctttaagtccaattttgtttagagttatcatttgatattttcagttcgtgcttgacttcaatgatgcatcacagaaatgttgtttgattcaataatgttacaattttgtttaatatgaccacattttttattgctagtttatttggcgaaaacaattcttgactaggctttgcttagttctcggccaaactccggattagtgaccgtccctttcccccgatgaaccaaaggattaaaagacaaaaaaaaagtcttctagataaaaagaaaaaaaaaaaagagcaacaaacaaggttttaatacaagtataattcaatatcaatgaataacataacttagataagtaaaaatacgtaaagggaaataacaataattgggtatgtggtagatgcctatttgttgctatctaaatctaaaatggttcacaaaaaaaaaactaattaaagcttttgtagtgaaattggatctaagtcatgtccaagtgaaacccaaaataaaagggtaaagtataatgtgacattcatgtaagcaaactatagctatagtagtacctg

SEQ ID NO: 19832 - DNA, 596 bp, Glycine max
  Intron number 4 from transcript Glyma17g05960.2 (locus Gly ma17g05960) derived from phytozome v7.0 (chr-ID Gm17; pos 4196349 to 4196944)
gcattactatctactggtaagctgacatatcacaaattctgttcctgaagtgcactgtacttgtatggtgtattgtggtttaacaatagaaaagttagcaaaaagaatggttaagtgaattaccaactaccaacatagttatgatgtgtgattaatttgattggattaatttttaagacattaatctgattggttagatcttttagacctggaagctctaatagtaatgacaagggcattgtcatattaaactgtgtttccatgtgttaataattaaaatagttagaatagtgtctattttcccattaatcactaattcattatcacgcagatacagtactgatattattgttttatgagtttcctgcaatgaaagtttagttacacgattgcccatgtttcaggatttttgctattatgccaatacaatatttttgattgatcttcttttttactcatcaaatgagaagcttttcatggtttgcttttcttttgcggaggtaagagcattatccatggtaatttgactccttggccaaagaatgattcatcagtcaattgtgtcttattcaagagcttttgcaggggccattagc

SEQ ID NO: 19833 - DNA, 994 bp, Glycine max
  Intron number 1 from transcript Glyma17g28740.1 (locus Gly ma17g28740) derived from phytozome v7.0 (chr-ID Gm17; pos 30839566 to 30840559)
ccgtaaccacgttggaaaccaaaaagaggtaaaataataatataataataaaaaatatcttttagtaaaataaatcaaaaaaatcaatcaggcgtttttctttgggatttctctttcttaatcgaatcaactaataaccaaagtgaaactaaggctaaaatcaattcataaaccaaactttttgtcatcgcctaaaaaagccattttcaaaggtccaacgccttgaaatggtctttttcgcttttattggtttagtgtagatttctaaaaggcctaaaaccaatatgaggtaaatattttcatttgatgcacacaaacaccaacactatttgcacacacggtgatttgaaaaaggggccctatacttgggttcgtgggaacataaggagtggaggtgaatctgtgatcatgctaggtctccgacttgcttgattacagtgaaccctcatctagagtttttctctttgataacatattgttgatagtagtccctactgctgcaatatgttcttcgaagaggatgatacctctagagaccatcaagagagatatgaccaccttggggattatcactaaaaacccttttagctctctcccatataggtcctttgaataggggcacgaagcggacatgctgcgtgccattttttcacactgccatgcataagtgtcatgtacccttttgcttatattttgtgaatattgtcatactgtacactcccgtgttgcgcctttcacatatgcatcacgcacagattatgttttggtcccctctctttgtcaaaccaacggagggtccgggccaccttcttaaatacatacgtcgggcactttgctaccccaagacgttgtatctaagaaggagacaatttctcgggctcccgtattcataaattgcatctgcgttatatgcatttcttcatgcattcatccatttcacccatgatagatatcagagttttaattcgcacctatttttgttcgttagtaaaac

SEQ ID NO: 19834 - DNA, 734 bp, Glycine max
  Intron number 3 from transcript Glyma19g33870.2 (locus Gly ma19g33870) derived from phytozome v7.0 (chr-ID Gm19; pos 41498266 to 41498999 reverse strand)
tccacaagtcatccacaggcatgtttctttttttgaattaaagatattaactttgttaagtatccacttacagttgacatgaatgatgtttgtgtttaaattttatcctctgcacccgtctgttgttatcttgaactaagaggcaatttggataaacttatcagcacccacagaagtagaaagtaaaatgaattaaattacttgtataagttaaaatcaacttattgtcttatacacttcgacttatgggaaagttaggaggggaaaaagttcaggtgcataacttgattcattttgttttcttctgctacaagtgcttcttgagatgtatatccaaactagctatgattgacatttgattgaacttttttggttttcctcactttacttcctattatttaatgcctaagaggtttcttttttcatcttgggttttgtggaagaaatatatagttgtttcttgcagttctctattgttggttttagtttctttatttgatatgtaatttttattacaaagtgttacagtcattttacatggtttctttgttttatgaataatagtttatattttgcaccaatgctattttttttaatgtcacataatggttcatattggcacatgaagtattagcaagagtgtaagaccatacatcccagtacaatattaaggccttaggttctagggcgatacattcctagtcttcatcttactgttacttttgcttttgtag

SEQ ID NO: 19835 - DNA, 952 bp, Glycine max
  Intron number 1 from transcript Glyma19g27690.1 (locus Gly ma19g27690) derived from phytozome v7.0 (chr-ID Gm19; pos 34998902 to 34999853 reverse strand)
gcttgtacaaggtaattctttgaaaatcttactcaaatatgtttttcttcagtgattggattttcattttgacaaacatatctgcatagagagcttaacatatcaaatcttaatttttaaaatgttaaatttgaattctcacacttttgagttaagactttgatgagtgagtactttctcaatactttcaatgtgccgtgtttttcttctattttaatttcaaaagtcttgactttttaatttattcctatgtaaattttttaatgtctcgtcactttgatttctatataatgaaacaatatccacattattgattgtgaaggcattttttattatacttgattccttgttgaggtatatttcattgttgtttaacaacgatcctatatatatatgttcttactttttaatttatattttaaattttaaaacaattgatggggaaactaactagttgatgcttaaatattggcattttttattcattcatccaacattttgtgttctaatttaagatttgattagttagcttttaagccaagttatttgtttttcaaccagtgcattttgatgatacttcattgatatttgagataatctcatcctgttaatcaaagtcaattagtaattagtattaggaagttttgataatttgttgtgagaaggggattgatgctttattttcatgatttattttggcactagagaagagttcgtgagatgagctagcagctgtgttgaatttcttctaattcctattttattgtagttgtcttcattgtggcatttgctctcgtctctaatgttgaacattttaattgctgataaaaaatgattctgaaaatgggacagcatttgcatgcaagttaagggttgtacttcaagtgttttgtgttttttttttgtttgtattgcaggttgtcaattattgggcagagaagggaatatctgg

SEQ ID NO: 19836 - DNA, 602 bp, Glycine max
  Intron number 1 from transcript Glyma17g34400.1 (locus Gly ma17g34400) derived from phytozome v7.0 (chr-ID Gm17; pos 38360550 to 38361151 reverse strand)
gcatcgtttcaggttagttatatattcagttattcacgttttcaattctagcactttttcatgaaatcacaatgtgccaaaatgacaactaaaactcctatgactcctgaattatttcatctaggaaagaagaagaagaagaagaagatagaagagagaagagagagatgccaatttggcagcacaacaggcagagaggactatgaatatatggctgcatgaggtacatccattatctttctctggtcattcacatgtgattttgatgtttgctctgagtgaatttatgtcctgacgggattgtatcatgaaatatacttcttttgtgtttctataggtttttctgcttataaaagtgtttaagttgaatttgaatatttgatttatagtttttgaatttttaccttgatttttatacttgcatgtattgagatctcagttggatgtgatatatatatgtatcaagcaaataaaggacatcgttaaaggtataaagaagcagattggaaaacttcttgcactaactctaagcattggaggacttaatttaagactacctttagttttaaacgcaggaagggaggaaggtctcggaaagggat

SEQ ID NO: 19837 - DNA, 382 bp, Glycine max
  Intron number 2 from transcript Glyma19g43950.1 (locus Gly ma19g43950) derived from phytozome v7.0 (chr-ID Gm19; pos 49519692 to 49520073)
gaattggcattcttaacgacactggttctcagtttgtaagtctgttgctattatttatttattcctcttaagtatcttctttgggaagtaattctgatagaagcaacattaaacactagatgatgctattatattacatgtatcaacactcacttttgggattcatttttcatgcactgagtgagagcaataaaaaaaattaagcgcctttaacgaaaattaaagagttatactccttatttatacaatattttcttacaaaacatgggtgcaatcaaatttttttgcataaacttattgtacacaaataatatcttccaaattaaattaaaatgcagggcaatgacttcattaattaattatgcagctaaatataatcaga

SEQ ID NO: 19838 - DNA, 749 bp, Glycine max
  Intron number 2 from transcript Glyma19g06800.1 (locus Gly ma19g06800) derived from phytozome v7.0 (chr-ID Gm19; pos 7933902 to 7934650)
aacggtggcaaaagcctgttctgcgacgtttgcaggttagactttagaacattacaattaatatattgtttgtcactgcatatttattgagctaaatatatgtgatttgatatttatcgcttctatgattcaatttaatgatagtaccttggactgatttgtttagagatgtataattttatgttttggcttttcttctagtatgcataattactcatgatatgatatcaaatttgttaagagattataattacatcttttagaccgtttcctttactggtttatttttgtattatttttgttatgttattacacgtttggtttaactctttttggagtttgctagtttcctgaaagaacttttgaaaaaaaatgattatttccctgaaaatactcttaccaagcatgcagttggtgattttgcagattgcaaattttcaaattcttagtgccattgattttggcatgatttaactgttcatctcatgcataacatagttttcttcattctggattccttcttttcaaaatcttcctgtaatttgctgctaactataatactccatttttgtttttattatttttgcctttgggggcgggggggggggggggggggggggtggttgctatacctattcttgtttgcctaagtattatgagggacaagctcatcatgaagaattttgacaaggtgaactgcatttttgcatacagccgcctccaccagttaacgacaccaacccgtataa

SEQ ID NO: 19839 - DNA, 444 bp, Glycine max
  Intron number 1 from transcript Glyma15g27770.1 (locus Gly ma15g27770) derived from phytozome v7.0 (chr-ID Gm15; pos 30397285 to 30397728)
ttgcttcttgttgttcaagatctctctcacctcaggttatatcttttatttctcaaatgaaagttaccgttgtgttttataaaagctactaaatctctaaatatttattaatttgtttcgtgaaagatactttgttcgtaaatcatttggacaactgggagagttgggtaataccattacattacagaggcaataatacatttggtttctggttactaatacaataaaatgccttcaatacaatattttgtaagtcttacgtatttaagcctattcttgccatcattagaaatctaaacaaattatagtaaacagaaagcaaagaatactattttgtaagtctttgagtttttgaaagtatcagaagactagaaaaatagcttgtagaatatcatagtttttgcatttattgtaggacctaaatctcctgagaaggattgctgg

SEQ ID NO: 19840 - DNA, 940 bp, Glycine max
  Intron number 2 from transcript Glyma15g27770.1 (locus Gly ma15g27770) derived from phytozome v7.0 (chr-ID Gm15; pos 30398049 to 30398988)
ggtaagctttatttcttctacatagaatcgattgcataatgtgtactttgtaggtcatttctaagacttgatcaaattgataatactgaatagggaagacaagggagagttgaggtcatcacgaaggccatttaggagggagagttgaagatttgaccttaagaattatatatatctttcacaagtctctaatatgtcatagactgagaaaatataaatggaccttaacttaaaaaattatgctttgtcacccttttggccatttacaacttcatatcaaatgattaaataacttgatgacattcaacttaatcacaaaaaatgggatggcaaggataaaattttaaccgcctggtaacaccatgtgaagtataaattctctcaaatgtttaagctattaggtgaaggctgattaattgttttatatctcctacaacattaattgatctgtaaatgactgctcatgcgatgaatctgctaatttaatccatcgcttagcatctgcttgtccaattgagaacatcttataggaatacatctcatcatacaattttttttcttggcccaacagttgctaattaaaattagaacacgctcacgtacacacaggatgtatctagtgagaaatctaatcaatactagagaattgctagctacacactattggaattttcatgaacgctatagaaaattatgcatgtcacttgatcattaatttagaaaatgtaaataatttatatgttactgtttatttttaaaagatcaaatgaccatgatgaactcgtgtctttctcgaagttagctttgtcataagatacgtatcctatgtaaattgtcacaaagaaagacaaacacttttaatatatactatactttaactaaaacagcgatcacatttcttgtagctctggtgataatagagttgacgtgaaaccactgc

SEQ ID NO: 19841 - DNA, 251 bp, Glycine max
  Intron number 1 from transcript Glyma14g36540.2 (locus Gly ma14g36540) derived from phytozome v7.0 (chr-ID Gm14; pos 45875090 to 45875340 reverse strand)
ggcgatcggatccagctacagcctacaacctacaggtgcggattcttgtttttctttttcttccagatctttttgaatccaccagcatcttagtcttagggtttttgtttccagcatagatgtttgtttcttctgtgtgttgttgtcgattattattattgaaaaacaagaaatttattgatggattactactggttttgtgacttactagttttggtttggtttgcttgattgaagatcaaggaaggaag

SEQ ID NO: 19842 - DNA, 860 bp, Glycine max
  Intron number 1 from transcript Glyma16g17150.1 (locus Gly ma16g17150) derived from phytozome v7.0 (chr-ID Gm16; pos 18482860 to 18483719 reverse strand)
ttcaaaccacaccaccccttcttccttttcatcaggtcctcctagtgaccttcattctctccatatgctttttccttattgttttcattttttctactcttttgatcatttcttgttgtggggttggaagaaggaggttatgttttttgtttttattttgggctgtagaaaacataaaaaaagttattgaatattgctctatagtaaactgttgttaatataggtagtgttgaaatgggaccagtgttttgtttctaggctataactataatccatgaaggttttgtgatgttattatgatcatattcagatctaataatgcatggcagtttgtggtaatttcattgtatctaccaatgggttggggtgcctcatttaacttgcattaatattggatttttttttctgggctagtttattgaatttgcttaactttctggttctaaaaagaagaaagagttcgtaattctgttattgtggaaaagatttgaagtatttcatctgccttttccaacaagaaaacaagtcttcttatctaagaaaacaagtccataattttcattctatgatctctgttttctttctcttttttttgtgtatattttggtctttattttcttgcatgacgagttttgaaatgatactctttcttctctattaaaggttctccacagtaattaatgaaatatattgttattaattaatgaagctcttgtttttctttttgaccagccaaaataataattttgctttatgtaaattagttatataccatattgattcttttacataaggcatcctgtgttccttgttttctatgcacaggtttattccttttcttttggttcaattttgctgaa

SEQ ID NO: 19843 - DNA, 783 bp, Glycine max
  Intron number 2 from transcript Glyma14g38620.1 (locus Gly ma14g38620) derived from phytozome v7.0 (chr-ID Gm14; pos 47768928 to 47769710 reverse strand)
cagtgcaggtgagcttctcgatccctttctctttttttcttcttttgttgggtgtatgaaaaacaagaattgaaggagtttttgtttctacctttaaataaatttcgaaggataaaaaccacatcttggtgctccgttttcttctttttgtggatgagttttgtgcctatgcaatttttgttttgttttaattatctgttttccttggtattttaagtatgttgtttgtgaggttccccccattagattttagattctagattgatagctgattcagaaaatgaaaatgaaataaaggtgtaacgtgcttaggtgggtaataagatgctaagtgttcttaccatttattattttggtcgattatcatttatgcaaagtgcttggggtatcattaattatgcatccttgatagatttgttgaaaataactcctttaaagtgaggggttcattattagacaaaaatgtagaggtaattaactgctgagattgtgataaatatatgctcttgtgtaataaattatgaaattgttaactccattgaatttttaattaatggttatcatttaatgtgaacttctcacattagaggaggtgaatcttatttgatgttttgcttccaactatttttattaagtatacatatgtattccttaagttattttgtctgttctgaattgtaacttcttggttggttgtttggtgttagcttcagtgtcccctctctatattttcaataacttttgaatactttgttgtttactttaggccctgtggctgaggac

SEQ ID NO: 19844 - DNA, 711 bp, Glycine max
  Intron number 1 from transcript Glyma14g33410.2 (locus Gly ma14g33410) derived from phytozome v7.0 (chr-ID Gm14; pos 41280285 to 41280995)
cccgtcggcgaaatccatctcaaggtcgattcctcgtttcatcttccttcattctcttccgtttgttgcttaattcctattcctatttctatttctgtttctgtttattttccgttttaatttcgcttcggtttgggttacgacgctgggagaacaccggttacgaaattagtaattcagaggttttaattagtaagtctttacttgtttatatatgaatctgaatatccgatttatgtatctagtgttcgttttttttagtgatgatcgatggaattggttattaacgaagtttttaaaattaaactcgatggagacatttgttgttcacaatggttctacttggttcgagcaggattgcttcttgtctaggatatgtgtggtttcataaacgaaaaagttttgaattgaagtggagatttagttgcaatccttgatattgaagaaattgaggacaaatgctgctgcagttgcggttgtagtcgtagatattgtaaaaccttgacatcatggtggtggactgttttttaaaattggttattaatttatcagatgagatgttagttaatatatagaaactttgatgggggtggcatggtgtttttttcctttctttttctggtgttgtgagtgaggagttctgtttgtttttgttacgttggtctctgtgtttgtgtgtgtaggtttcgactattcgagagagcagatcag

SEQ ID NO: 19845 - DNA, 893 bp, Glycine max
  Intron number 1 from transcript Glyma15g10940.3 (locus Gly ma15g10940) derived from phytozome v7.0 (chr-ID Gm15; pos 7979311 to 7980203 reverse strand)
cttcctgatcagagaaaaaaggtaaagttacttaactgatgtacatgtagatgtgtgtgtatatatgtagcttaatctgtgttttgttgtgagttctgcttctataagatatggatagtgtttgtattcttcatgattgaaaatttttgttttcttatcccatcgagtgtggagctcttactcttctctgacactacttttttctctcctttttgcttgtggatatgagaaccgtttctagttaagaagaaacaaagtgtcttgcaaatgtctatatttctctgccatatgcctaagtctgtagtgtttggtttgtgagagactctgcagaaatttttccgtcgtttaagatttggttgtctactattttggtttccatggtgtctgcagactgttgcagttgattgttttagcccccgcatctccccttttgtgtttcatttcattttaatattactaaattactaatatcgaatttcgtgtcttttttcataattcatcttttatccctctgaaatttaattataccttgcaaattctacatgtgggatttaaaacctccaaaaatatgtttgttttgattcattacttttagagaggatcaagtcaaatttacattccgtattttttgtaatacgactcttatcttatgtttaacggtaaagtaacagtctcatctttaaaaacttggagctacctttatcctctattattcatggttggatgcaaacattagacactaatcttatgtttccttcattaaaaatatggatgttgcagatcattttaaccatacgtatggctttgagtttgcttagtatcttcattagaataatttggtttgttgtgtttttgcagtcatctgtagaggtggacttctttactgaatacgg

SEQ ID NO: 19846 - DNA, 609 bp, Glycine max
  Intron number 2 from transcript Glyma19g31520.1 (locus Gly ma19g31520) derived from phytozome v7.0 (chr-ID Gm19; pos 39298020 to 39298628)
cattctatcaacggaaggtctttcctaaattttacattcttctttattttagttttaaggtttatttttccttttgaaaatgtcacatttggagtcagtttcaaaacttaaaatggttaatttcagaaacattcttttggttttggttacaaaaattatatataaagcttctgctttagtttcaattgtaatttgcttgtttttcacttttttttatcttgtaataaaattaagtagatagcttcacaagaatttatctttgtaaacaggattaatacaaactaaatagtgaaaatttacatggtcatcttctttctacagctcaggttttggaacttatttgaattttcataatgataccaagataatgcttcttaaataagtctaatgacgtactgtatttggatgttgtttatgctcgtttatgtgtatctctgttatgttgagctgtggcaacttatatgtgtatctcatgtcatatgttgcctatgtgtttacattgtttggtaatcgcggtaatcatgggttcaaataaggtttctatctcaattaactatttgttaatttcctgcagggttttggtcatctattgtttctagaactaaggaa

SEQ ID NO: 19847 - DNA, 622 bp, Glycine max
  Intron number 2 from transcript Glyma20g37370.1 (locus Gly ma20g37370) derived from phytozome v7.0 (chr-ID Gm20; pos 45282969 to 45283590)
aacgagtctatcactgctcttttgattgtaagtcttcactgaccttgagcttgtttgccataagctgttgttctaaagaatcggttaaattaaatgtttacaaaatgatctttgttgtttgccaatgttgcaacaataatagatttagtctctatactttgataatatattctcttttgtctgcgtatgaaacaaatttacattattatttggctccaacataaaaaactctttgcattttggtctctacagctaacacacttttttgatttagttcctgttggaaaagtattctaacaccgttataatgttaacaaatggtggggagtaatttgcaaatttttcccatgtagggaccaaaatgtaggatttttttcatgtagaaactaaaatagaaaataatgtctaagtttaaggataaaatttttaatttaacctaaagaactgagctcctccaaatatttttccatcctttaagaggcaattatatctgtgtattgatgctttgtttgagcaatagtgggtgcagcttttctttttcttgtttctattggatgatgattaaatttcatttttgttgttctcagggtgtttgcactggcatagtcattttgctgtttag

SEQ ID NO: 19848 - DNA, 407 bp, Glycine max
  Intron number 1 from transcript Glyma20g25540.2 (locus Gly ma20g25540) derived from phytozome v7.0 (chr-ID Gm20; pos 35207804 to 35208210)
cattttttccttttggtaggtggtattattaataattctattaacagattcaaatgttctccatttttaggattttctcaaattgttgttatggttgcctttttggttgaacgcggtattcttcgaaacataatttgtcattaaagtacacaactattgtctgtcccagctgaaggggttctagtgagattttatatttatctccctctctgctcttttctcatgagtactatgtgcgaaacctgaattttttgaaatcctgaggtgtaaagaaaacatatcaaatttttgttatggacctttgttgtaatgtaacattaggttatattgattctgctggacttattagtttcgtgctataaatgacatttaatttgttttcagatttctgaaatttcatccttatt

SEQ ID NO: 19849 - DNA, 885 bp, Glycine max
  Intron number 4 from transcript Glyma20g34920.1 (locus Gly ma20g34920) derived from phytozome v7.0 (chr-ID Gm20; pos 43231838 to 43232722 reverse strand)
gcttggttatagaaggtatgctcattgataaaaatatggttgaatttgtatgttactcctcaatttacacataataattttgaaatatttccattaaagcttaatggcatcttttgtttttaatgtctcatcttctctgcaccccacctccctactcaaaacaggaaccattgtgtttttgctcttccttaaatacctgcttttatatgtttagcatgattattatgccaatgccagacattggtcacatattgctgcctacttctttaatttgattctgttactgttgtatttctgaagttagtacgtcttcctaagctcaaagcatttgtatgccaatatggtgttgctctggaatgtggtacttggaaaatgaatttcctcagtgtattcttatttttcctaccataacactgataatgagtttcaacgcatgggaaatgctaaatgtattctgcagcagttattttattatttaacttttaaaaataataaaaatttcataggtttatctttgacacaaacaaattgaagttttaataaactagtattcattgagtgatagataaaatttaagcttcttagaaaaaaaaacacttcatatttctctctgattttattcatggactaaaccaaaaatgtaggcagcttcctggcattgttaagtgttctaatacattttgaagatataatgaatcatttcttaaatatgacaaaataatcttttgaaaaattttctgacttatgaataatacaaatggtattacatgactaattctacttgtaagtaaaatatcctaactattttatctgcattgcatggtaattaaagtgtgaggctggtttgcaggaagaccttggagtacagtcataaacaaagttaaa

SEQ ID NO: 19850 - DNA, 736 bp, Glycine max
  Intron number 1 from transcript Glyma20g14970.1 (locus Gly ma20g14970) derived from phytozome v7.0 (chr-ID Gm20; pos 20347073 to 20347808)
tatataaagcctaatcaatcaaagccaaatgtttagttttttatttgaacaaaaaagcctttttcccaccatatgggatgagctacattaattaaattatgacattgtgttggaacaaaaactgaattttaagaaatgtcatttaaatcaaaatgtttttaaacggaaattatttttttaatatatattttaattaaattaatatatattttaattagttattttagtctaaggacattattgttttttaatccatgctcttttttttcttcaattaacattagtcagaaataggatattagaaaattaccgttaaaatacttttctaataatttaataaaaaactgaaagattcaactaaattgacattttctttaacatttttatttattttatattttacttgtatttataaatacttgcaaaatatatgagatagttattagtatcaaattaattgtgtgaattcattcttacgtaagaaattaaaattcttgttcttgtgggaaagataatctctaccactttcgaattcttaggccccagtcacgtgtcataatagttgatagagctggattgcatttcaaacagcaaaggcacgtagaaccggtcccaatgaactctttggcacagtatttgggattgtcgtccttagcctaacgttagatgtagtaccaacaactgacttcccattctattagcatttcaccaaaaacttctttgctacactctacac

SEQ ID NO: 19851 - DNA, 909 bp, Glycine max
  Intron number 1 from transcript Glyma14g12980.1 (locus Gly ma14g12980) derived from phytozome v7.0 (chr-ID Gm14; pos 12032438 to 12033346 reverse strand)
agaaggtaaaacatggttaaaaaagcttgtttgacagtgatatctaagatatgattgaatcactctagataaagtcacaagcactatgggtattcttacattcctcatttatcatatatgcaagacaaatatgttctgtttgctttattttaatcatttctaccactcgagtttcaaccataatattttgatgctgtatggactatggagcagaatgttggcctataaagacagtcactagaagcataaactattaaacttactgttgcatacataagaatgttgtggtagatgagtgtacatacaagatagaggataaaaaatgcatacattagacagaaagtagggtagcatctatcgagcaaaagaattaataacttgcctaaggtggtttggccttgtgagaagaaggctaatacaaacatagtatggactatggagtgaaccagttgctggatagccatataattagatgtaggactaggagaccaacaaaggtctaggtgaaaccattaaaaataaatctataaatggatttctaaggattcatgatagaacacatggcataatttgatttctatagaacctagtgggaaaaaggctttggtggtggtggttgtaaatttgtgtgtgtggttttgacctctttcctctcttcactcatacatttgtaaccttaactatctgaactgatgattccacataatatacagtagctgctttgtataatttacaatggaacttgatcaattagtgaaccatctgaattatttttattttatgtctgaataggttgtgtcacgaaaataagggctgatgatcgagctgccatgcaagatttcattcttagtgttaagaatacatcaaataaaaggggaagaggctgagagaggaagtgaagcaattgag

SEQ ID NO: 19852 - DNA, 748 bp, Glycine max
  Intron number 1 from transcript Glyma15g28370.1 (locus Gly ma15g28370) derived from phytozome v7.0 (chr-ID Gm15; pos 31036171 to 31036918 reverse strand)
ccgctgtctccgttctccaatccctcgtcattcccgtaactacttacttccttaaacgctttttttttttgagaggaaatgattctgtcgtgttgaattctcaatgaaaaacttatgtgcgtctctctcttcttagaaatgagataagtagggtcgctttagaattaaaatttttgtacaattagaagagaggtacaaaacttccatgtgatagttcttagaatgtgatttagatgtaactcaatcctacaaataagacttctttgtatgctgtatggtgagggttgccctctcactgttatattctaactttatcatattagtagtcgatgtgaaatctttaattgtttaataatttaactgagaagatccttgaacaaaacttagatctagtttcataggtaattctcctggcgttgttccatactcgttgtagaaatagggtttcacctccacaatttagttatatcacctctaatgaaaactttgttgttcatattatgaaagtgaaactaattttgattagagaaaaattccaaaaccaactataaacctggttcaagatccatttccttccttgtggaatggggaaaaattgaaatgattgactttttggtcttctatagaaaataagagatggtggttttttatttgactattgatgtaatgggtcagcattatttttttttgtgaagagagttactgatgtgaattctgttgtgggtataggctgttgggtttgaggggg

SEQ ID NO: 19853 - DNA, 1048 bp, Glycine max
  Intron number 1 from transcript Glyma19g27260.1 (locus Gly ma19g27260) derived from phytozome v7.0 (chr-ID Gm19; pos 34547286 to 34548333 reverse strand)
agctgaagccaccgcacacaacgtctggcacaaccgtgagtcttcctagctactctatttcatcctagttcaagatgaaactctcaataaaaatagcaaatttagtccctatttttacctttgtctttcatataataccatgaattagattaatcaatggtgtcaattttaataaaacattggaaagaccaaattttgggtgcagtttgttatgtatttttggtttggtgtacggcgtaccaattagaattagaattttcttttagtaacctatactgacctttaagaccaacctttattttaagaattattgatgtgaaactttaattctaattcgataaatatcatgtagccagttctagggatcagatttcctgtggtcgagaaatctaccgcattcagctgatcgcaaccgttaaattagattggaaccactcctattttatctcgataaatctaatttaaaatatcattattcattcgaaggctgtaattggtgaaagtgtgaatgcagagaattcatttcccaattttagaaagtagaaaatcaattgttacacctttcaattataaaagtacatgtttaaatgattaatatttaatgagtgtaattcagtttcgcaacacattgaatcctggaaagagaaatcctcaagtttgatttttgtataacatatttttaaagaggtgaggaattttaaatgtaactaaactttgaacagagtattaatcttataactgttccaaaaacaccaatgctaatggagacgcaatggtcataagtaaggtagttaccaaaaagtacatgttctaatataaatttgtgattgagaatttgaggttaacagttcaaaattctcttaaaatcaattgtatttaactataaaacaaagcagcctaaattattgtttcgcgaaactatctagactaggccttaagaaaaggtgtctaaatgtacctctcttttttatttcacatgatgtgattgttggtctgttaaccgttatttgcagttaaaactggtccatcagtgtcttcagctgcactg

SEQ ID NO: 19854 - DNA, 726 bp, Glycine max
  Intron number 2 from transcript Glyma17g03080.1 (locus Gly ma17g03080) derived from phytozome v7.0 (chr-ID Gm17; pos 2069364 to 2070089 reverse strand)
tcaaggcaattgttgttacaggtattgtcatttgctttagagtttaacagtttctaagcttggagattatccaaatgattgggaagggacgacacttaagttttttcaatttaacaagacagactaagtaattcggtaggatttgacttcgaaagcagtaccatggtttggcagtggacagtggagaattaataaatttatgagaagtcatttgttccaatgtaatctgaaacttttgaaataagaaaaagagaatgcgatagatagccaccgcttgaatcttttaccgaaatcctcaccctccacgatcacggtagcaatgaccaagtgccaacttaggatcttatctaatgaaatagttatgcttgatcaacttcaaaagtcacccagagtcaaaattcataattgttattaccaatcctattatacaaatggtaaggtcactgatatcttccaaaccatctagagtagtcatcctaactcctcaactagactaactcctatgatatgattgtcacattttgataaacactgaagtttcaaactgtaaagaaatacgacataattaaaaagaactagaggaaaagaaaatgaagcaccggcatagttttgggcttcaccaaagatatttcttggaccaactagcttaaagctacagtatcatgactgaatcttatgttacttttattaggtgcaaagggaaaattttctggaggttttgatatt

SEQ ID NO: 19855 - DNA, 262 bp, Glycine max
  Intron number 3 from transcript Glyma19g43320.1 (locus Gly ma19g43320) derived from phytozome v7.0 (chr-ID Gm19; pos 49010056 to 49010317 reverse strand)
gtagagtacggccctacgttagtcaagtcctcgtatttttctccttattgacttacaaacagttttatctttgttttgacttttgagtgaggagagcgagatatttggttcatgaagttgcatagcttgtgaaaacgagaattaattttacagtgaactagatagactctaaaaacgggctaccttgttgtcgttatgaatattattatgtcaaagaagattctatcattccgtgtgttggtttgttttgatatgttgcagt

SEQ ID NO: 19856 - DNA, 793 bp, Glycine max
  Intron number 1 from transcript Glyma18g50150.1 (locus Gly ma18g50150) derived from phytozome v7.0 (chr-ID Gm18; pos 59362394 to 59363186 reverse strand)
cagaaccaccacataacagtgcttttcaaaggcggtgagatctcaagttcacaaatttctttcaattttcctatttccatcataatttcaccgtttttctctgaaagcttgtctggttcattttttcccgcaaccccttgttattgggtttgttgcggtaaagatttgatttttaaggtccgcaagagttctttttgtttaaaatacaagtgggtattctcaattttgtttctgattacttttttatgcctttctagtttgtggccttttctgcttagaattttgtggcgtatctattgcacatatgaacatggattaagaataaatagagttttgctgatgtagtgtcattctagtgtggcaaagttttgggtgcaaagggctattataagtttgtaattttaattgggaatgaattgcttctaataatgatactggcagaatttatccatgcctactatgagatcatcgctgctgttgagtgaggatacttttttccgcacctaggacccaatctctagtctatctgccaagtggattggatcataaaccacacagacttgatgctgtggagagtagagttcaatcacaagtccataacctttaatggtcacttttaattttgtgctatggttaatttgaaattagattgcaattgtattaatgattctttataatgtgtaagaatgtgaccgggggtggaacttttgtatgctgaagagcacaagttatattgaacagttaatatactgtatgaactttttgccgtgcgatgcttttgtaggtttgagca

SEQ ID NO: 19857 - DNA, 981 bp, Glycine max
  Intron number 1 from transcript Glyma15g29900.1 (locus Gly ma15g29900) derived from phytozome v7.0 (chr-ID Gm15; pos 32813111 to 32814091 reverse strand)
tcctttcaacgttttgattactggctcaaccaaaggttaatttactcttatactagcaaggttttaaatatctgtcacggtcgtgttccggtttcgtcgcctttgttgatatcgctgcaaatgaggccatgcagttcgaattattgtcgcgtttcggttgcagacagttaaaaaaagcttggtgttgcgtccaaatcacggagacagatttttacaaccttggcgacttttagtataaattagaatcaacaacttagaatcctcaactttaacctcactctctttgttggacattcttagtattctcttttcttttctcgatgtgcatttcacacactgtccacacaattgactaaaaatatctcactcaattacttttttttttttacaaacgaaaatcgaactcaaacctaatgcatctgccattatagattctacactaacttttcactactaagccaacctagtaggttatctcactcaattacctcatactaccttcttttttatctgtacttgtatatttatttatttaatttttataaccgagtattgtttcaatttaaaaatagcttgtaatttaaattattcattatcatttaaattattatttgtatatttgaaatatttatttactatgaatttgataaatatttatcccatgctaaaatactaatttatttatttatttttggagtagaatgatgttcttgtaagtagctcgcaatttagtggctaatttacttgaaaatgaaactacattgttacgtgcctccatctaagaatttagttgaaaatgtaattttcttgaactttattttgagtttcgaatttatgaattggagctctgctaagtagcctgtgtctctcaaatacatgtatcaacatgtacatgaacatcataatttatatattttttgtagatattttctaacttattctctgttggtgttataattttatatgattcaggaatagggt

SEQ ID NO: 19858 - DNA, 949 bp, Glycine max
  Intron number 1 from transcript Glyma14g24930.1 (locus Gly ma14g24930) derived from phytozome v7.0 (chr-ID Gm14; pos 30123195 to 30124143)
gaacaaaaagcgaggacgggaattagacaatgttggaggaatgatggacatgcttataactgctgcaaatactctgaattctgaagaggacttaaatgcaatgctgattgactcaaagaaagcattaacatgagggcgtgtgtgctaactgctaatacctaatgttttctatttcctgcatttgtttaagtctttagataactgattttgttaccgttggagagaaaggattatagaggccaaggagcaaaaagcatcaatagaaaaaaaactgtgataagtgaagtatgggatattttgcaggccagatactgatgcaatatgtggttgatatgaaatttaataggttgctttgctccctgcagtatataatgttttggattgtcatgattacttaagcgaagacttcaaattagaataatatcgatttccaatttgtggataatcaaaagggatgatgttttaccctttagatttcaatgtttcagtgccaattttgcacaagccttgaacagtattctgttcttgattttcttatccgttcaatgaatgactctgggagtgtttgaaagagtttcttcaattctcaatttagtttacaaaaataaaatgacctttctgtaaactttttttcggctgatttccaatttttcataagttgtacggttaagtttatgaacaagttcttaccacttttttttttatattttaatttttttaactttgttttcctaaagtcttgagtagaatcacgtctcccttatgttttaacctcttttctaaacaaatttattttgaaaatttatttatttaaaatgacttcaatcaaataaaaaatgaaagtcaagttttaaaacataatctttggaatatgacttttcatctatttatatataatttaccctttcttgtagttttgcatagataaaaatacaaaatttagtttctg

SEQ ID NO: 19859 - DNA, 340 bp, Glycine max
  Intron number 2 from transcript Glyma20g28290.1 (locus Gly ma20g28290) derived from phytozome v7.0 (chr-ID Gm20; pos 37221544 to 37221883)
tcttcagcttattagtgctactactcctgatccaggtcctcttgattttctcatcatcatctttgcaaattgcaattattaaactactattgtaagacaatgcttgtacacaaaagaaattatttttgtaaatcacgagaagtagaagagtacacagtaagcaaaggatttaaaatttgttctattctaacagtcaacttcaaaatcctaagtttccgagataaatttgtttctagtattgatgtattaatttaacagatcaaataatgaacaaagttattcatttatattgtgtggtgttatagcaaaggggttattgagagggaaggtggcaaacttg

SEQ ID NO: 19860 - DNA, 694 bp, Glycine max
  Intron number 1 from transcript Glyma15g24080.1 (locus Gly ma15g24080) derived from phytozome v7.0 (chr-ID Gm15; pos 24647496 to 24648189)
ctcccaacgccttcaccaaacttgccagttattgggtttgtgaattgcttcctctcatcattctcttgttttgtttaagagtgcgtttgtttcactgaataaccattcatttgtttatttgtagttttctttttactataaaaaaattgagtttttttatgtgtgtgtgtgtgggcgcgcgttttattttggccatatcattatctccaactccccctcaagccgaagacctgatactaatagcgtgaattttgcaagactggacattaataataatcactatgatagactctgataccattttaagatttggatttaagtctaacttaatcccaaaagctagctttatgaggcaaggttgtctcctacttctgtacaatattttggccggatcactagtcaatgtggaatcaacaacaaatgaattaataagtaatttgagttctacgtgtgttcccctgaggtatttactaattaactttttgttttttttaatttttggtatttcaacatgaaaaccttgaatacatagtttgtatgctagttatggtattgagaaggctaaagttggttccctcattcaaaatcttgctattttaatgtgcttgtttgtgaataggtgttgttttgttttctaattattggttttcattttgcagtggaaaacaaccataatacgaggcatcttgccaag

SEQ ID NO: 19861 - DNA, 1047 bp, Glycine max
  Intron number 2 from transcript Glyma18g14860.1 (locus Gly ma18g14860) derived from phytozome v7.0 (chr-ID Gm18; pos 14832159 to 14833205)
aggatatctaaagctaattgaattagggttacaaggtacgtatcaaattagatagcaaacaagattatttcaagaatgaggttggatgtagtctttttctaatcatatattttatgcatgcatgaaaacccaattgccactatcacaaagtgaaatgaaacttatatgcctttcctcatttgctcctgttatatattcattttattcatatttttacaagctgttaaagctgcctggttttgttttttatttatttatattatttagtttgattttatcaccatctctgtgtttgtaaatcttgtaacctatatgatgaatagagtcctctctcttaaaaaagagttatgtattcagtaacacccaaacagcaaaaaaaaaaaaaacagcagccctcttgtcctattcggtggtttcttctacatggatcgatgtcattagactttacacgaagccaaatggtaaaaacatttagagtaaggctaaatattaatgctttctattgtttggtctttttctacttcagattctccattggatccactaatctcactctcttggcctttagacatgactaaaccatcttaagcatctctgtcattttctcactaagagctacttcaattttctcttggatacatttaattctaatcttttccttgtattcttctactcacccacattggcatattcatcctcaccatactaagtttggctcatgttggcatttactgctcaacattctctgagcgggacttatagcttaactcccaaaccctttgcagttcatgtcacttgaagcagggaaaaagtatatagaaccaattattattaccaatattgtttttatgatatatgataaattataatgttttcaagaccataatttatttctcttaaattttgtatgtattgtgccactaaaattagcttatgcttaatgttggaggaagttaagcttgctgtgagatactattttcttttataagttgttgtttaaaatgtgctgtatatattcttctttgtcagactgtctggagcaaattg

SEQ ID NO: 19862 - DNA, 539 bp, Glycine max
  Intron number 6 from transcript Glyma14g13380.1 (locus Gly ma14g13380) derived from phytozome v7.0 (chr-ID Gm14; pos 12783173 to 12783711 reverse strand)
tcccacaaacaggtatacatgggtaggcttggctatgttaatgaaggccagtgtaatgacaatttatgtatgaaggatgaaccaatgtttctattgttttcatgccttgttgcttcaagatatattgaattaaggacttctcctttgtaattattcatttgttttataagagatcactgtcctaagtaaaataagaagttgtgattatgcttttagtttctatgggagggtaagccttagtggaatggtaatgcaatgccttttgatttgttccaagttttagctgtggaagaaaacctctcttatagcgatgcaatgtaaatttggccctcccaatatcccatgatggtgaattcttgtgcactggtatgcttgtggctaaactaacataatctaccactagtctcctaaaagcaacttatataattgttagcatctccatgaagtgaccatatagtttttttccttcaaatatttatatattcaaaatcatttgtgtctcagttgcattcattggagacaactctagcgggtgcttt

SEQ ID NO: 19863 - DNA, 517 bp, Glycine max
  Intron number 1 from transcript Glyma15g03030.1 (locus Gly ma15g03030) derived from phytozome v7.0 (chr-ID Gm15; pos 2123956 to 2124472)
gtctctccagcttattagtgctaccaaagctggttccttttcttctttcttatttttcctaattacttcatccatgcatgcatgccttcaattctcacctatgttgctcatcaactgatgccaacatctattagtgttttcgtttaacggtgtttcatttcaatctatcctctcacatacttctccgttcaacggagtttgaattcgtgtaaaacataaaccatacacacgctagatgtttataatcatgacgcgtgtcctccttgtgtgtcttcattatttgttatatgagatttgaatatgttattaattattagtatagcatgtgcagcattctcactctcttaccaagctagctacgtttgcacgcacgtctataaatgtttaattttttgtttatgtgaaatgtgaaactaagtcatggtagaacggcttcatattggtttttacttttgttttcactctttcttttctttgggtagccaacggaaaagggaaacttggaaaggctaccttt

SEQ ID NO: 19864 - DNA, 643 bp, Glycine max
  Intron number 1 from transcript Glyma16g01160.1 (locus Gly ma16g01160) derived from phytozome v7.0 (chr-ID Gm16; pos 850727 to 851369)
tgtaagaagggaaatcccaatgtttgacttccttttatttccttcaatttggaaggaagacccaaaaagactataagagaggttatcaaaaaggatctcgaactcaatggtttggatagaagtatggtacttgatagaacattatggcggaagttgatccatgtagccgaccccacctagtgggataaggcgtggttgttgttgttgttgttggattttgtgtatcattgttatccaccgctctacatagtgttattcttcctcaattctactgtaatattggtattgccaattaaatgggacctatgattatcattgtcctctatagttgttatacctcttaatgccagaaaactatagtcattcctgcaaaagtgaacacataagaatattgttactgtttcttttaaattataatgtgtgattgaatagctttgatgttactttgctttttgcatatttatcatacaagtctttctgagggatttgggctagatattgttcaaaagcagtgaaaatcagttgggtgtggtaaatcattctgagttttcattggaggtgaagctgattttgtattttgtgcaaatttgtgtggcctgacactatttatttcttgtagagaaacttcttgtattgctgagag

SEQ ID NO: 19865 - DNA, 393 bp, Glycine max
  Intron number 2 from transcript Glyma15g37120.1 (locus Gly ma15g37120) derived from phytozome v7.0 (chr-ID Gm15; pos 42731756 to 42732148 reverse strand)
gggcagaaggtggtgaagggaaatccatatcccaggtttatacttcttcctgttctatgatctcatcaaagtaactattttaaatgatttgcttcaatatcgctttgaaaggaataattttggattcagccatgcattgccttgatgatcttttgacttataaatactgttgcaacattgtagttaagggatgcaagaggattctaaagtacaccctgcccttatcttagtctcataggtttctaagatacaataattcctggaaattaagaactcaattgagtttgagttcctattcaaataactactgatcactagtgtctgttttcattctcctatttcataatgttttgtaacagcatcaactaatttgttttgcagaagttactatag

SEQ ID NO: 19866 - DNA, 1005 bp, Glycine max
  Intron number 2 from transcript Glyma19g33170.1 (locus Gly ma19g33170) derived from phytozome v7.0 (chr-ID Gm19; pos 40791670 to 40792674)
tatcccccaattcaccaggtgcagtgcttgtaatttcttattttgggggtctgtatgtttgaaaaactttttcttgaaatgcaagttgcactcatgaaatagatagaggcatatgaatagtggcattatgagtttttatctccatagtccttgtaggatggctccatttgaagataatatcacttgggtacttatccttcattgcaaaggctgcatcatgcagcttagtgctggtgcatattaaacttaattttcataaccttaatttcctggacaatgtgggataagtttagtcattgatcttgaatgaaacatggagagatgtagtgatcaggatgaatctttggggtttgatgaaattgtcatagctatctattcaatttttttgtaatgtgagttgcatgatagttatccatccaaatttgctcctcatcacttgtcattcattttatcatttatttaacataagtggatattttggagtataccgagcaatagctaataggtaaaaatcttaataagtttattgccttttatagtcactttctattttaatttgaattggataccctgcccatcctgcaaaaggaagttcaggaatgagacttgctgattctaagcctatatttataaatattatggttgaatggcttatgctaagggtggtggattttaattgagatttaccctcaagtgggtaggaaggagaagcaagaagacaattatataaaaattgactttagtgttgctaatttagtattgttattgttggaccttttcaatgaaggctatgtacatataatccacatgtattgcggagcctattctactgtctgagaggactgttggattatggtatatggttattaaaacccgctgaaattctgaaactctttaatcattattttcacttcacttgattactgtgaatttatcctgtcttgtaactttcttattaatttttaatatttcgcacatggttgcattgtgtgtttcagtgcccaa

SEQ ID NO: 19867 - DNA, 506 bp, Glycine max
  Intron number 2 from transcript Glyma17g04130.1 (locus Gly ma17g04130) derived from phytozome v7.0 (chr-ID Gm17; pos 2713947 to 2714452 reverse strand)
cccgtaagccctgggataattttattttcatgttaattgcagcaagagatggatcttttagacttccagggtttgttaggtttggaggaaatggaagggagtgttatttttttcatttcatgcatatattctttaattaatttttagaatgaaaggaataaaatcataggttattatgaaaggaaaccttccaataatttttataataacaaataatacatgtattacactgtcatcctattacaaactgctttatgtatgataagtttattgactattataattacttaaagagttatattaatagtgaattatgattagttgtgtaaaaagttacaccgatgcctattaaacttcttttgtaaacattatgtaactcttaattcaaaattgtaagttttaccctcccctcttccaaaaaaagtgtagttttatggctaattagaattttaaaaaatgcctgattttcagggaggagaggttaaggttttggtctgatcctgaaa

SEQ ID NO: 19868 - DNA, 516 bp, Glycine max
  Intron number 1 from transcript Glyma17g04130.1 (locus Gly ma17g04130) derived from phytozome v7.0 (chr-ID Gm17; pos 2714772 to 2715287 reverse strand)
atcccaagacactctcgcacactttaacgtcgctggtaatttgcaattaaacactatctcttctacaagtaatgtgttttcccattcaaaaacctttgttctcaatttcgttatatctattatgcgtaaataacagtaacgacctagcgtgtataacatttcaggtttatgtcctttttttttttgtttttttatcggcaaatgttgtattaattatgaatttaattaaattgccctaaataatgtcatcgaatcattgtaaataaaattcatatttagataattttgggaactgccaagtaacgcaattgcagctgtgacagccataatttcctgcaatatcaaggattgcaatgaaattgttactgtaagtttgtaactgcaatttaaaatctcaggagagtgtatatttttaaggtgtaataaaattgaacactttaattgtttgtttgaaagcatgtggttgaggatacggtttttattttttatttattttatttgttgcagaaggggaag

SEQ ID NO: 19869 - DNA, 466 bp, Glycine max
  Intron number 2 from transcript Glyma20g28380.1 (locus Gly ma20g28380) derived from phytozome v7.0 (chr-ID Gm20; pos 37302857 to 37303322 reverse strand)
ggcttgtcttgcttggagagagagtgttatcgctggtatattccactacttgttcttgtttcttgtttcttgtttcttgtttcttcttcttctccttctccacttcatccccaccctttgttcctttttcttgcaaaagtttttcccgttgcgaaaacaagccgacttctctttttgttttctctcgccaaagaatcttgcttttcccttccctttgagcggaacaagcgttaaagtgaaacgcacaccccaccagtaatcattaggcccctcttcttttttcttttttttctttctcttctttagctgtccatacccccaaaatatcactcaaaaaatgagtacaactagtacttgtattttattaaaatttctgttaagttttcttgtttttattgaaaccgtggaatgcaaaaatactgattttcatagatggttttttttaaaacagatcacttgatagcag

SEQ ID NO: 19870 - DNA, 1032 bp, Glycine max
  Intron number 2 from transcript Glyma15g14430.1 (locus Gly ma15g14430) derived from phytozome v7.0 (chr-ID Gm15; pos 10903117 to 10904148)
tcaagagatctccatctttgaatcccccaagtccggtaatcctatattccctgaccccattaaatactcaaatgattatcatagtcaatcatgtatatatgtatatgttatactttctactatatgtggtgttcgtgttttatttaatatatatcttcataaatattggaatgactgaatgagacttgaaggatgttgctataaatctgatagacatgtaagtttaatttcttatttatgaattgttctttttaactggttggtgtgagagaaatgagttgtcaaattttatttgattgtttagaatgatagaagagacatatattgtgccatttataggtttactgcatattgatgccttttgtgttcacggaatttgattgaaactcaatgtgataactgtatggattgttttgggggccaatactggggtgcaagagatgggacttctagagtcatactgtcatagtaatctgtacttccagttgagtttgataaaacttgctaaatatatataagtttctatttttctacttgcatatggttaatatgtaaatgttgataaagctttatggatgattctaatttccaataattgttgtctgatatatttgtttgttgtctttttatggtttttgacatatataaaacttctgtatagtttatttggccgcttattattctactactgaaagatagcttgaaatggtagatgaatcgttgatagagattatgagctatttttactgtttatcaaattaaagaataatgaatcttgcgtgtgcttggtttggtgtttgcactttgcaagtgatgtcagatggatataagaaagaaagaaattagaataaaaaaatgaggatttataagggaaattttgttgaacaaatgttattttctgtaattttctaccttttcttgttattgtttgtatatgtaaattgactgttatttttacccttttgttctatttgttgattattttttttgggtgcttttttcagttttccatccgtgaaccaggtgtcactc

SEQ ID NO: 19871 - DNA, 587 bp, Glycine max
  Intron number 1 from transcript Glyma18g08780.1 (locus Gly ma18g08780) derived from phytozome v7.0 (chr-ID Gm18; pos 7530526 to 7531112)
tggtatttcaaattttcattttttgtttatttattcattaatgcaaaatgccattcacttgccttttgtatttatttaaatttaaatacttggaggcagaactttaccgtccatggtgattctaccaagaactttcacttgcctgtagtgttgttttgttaatgggtaatggaggtaaaatgaagcaatggagttaggaagagtagagttttcattttggagtaaaagccaccgttttaatgactaaagatatgctagtactaaattaacagcttttgtgattggatcatttcagtttgtgtagtggttgattttattgaaagttttatattgttcataggaagattcggatcatttttctttttgcttcatgattttggtctggtttggtttctgctaattgaaacttagaaataatagtttgaaaattgtgcatttgcttaaacaggccaaattgcctttccatttgggggattgattttgattttggcttgtttagatatatgttgcttttgattttttggggaatgactaaggagctggttcatgtgattgtagcccaagcaatccacgtcttctggggttga

SEQ ID NO: 19872 - DNA, 697 bp, Glycine max
  Intron number 2 from transcript Glyma18g08780.1 (locus Gly ma18g08780) derived from phytozome v7.0 (chr-ID Gm18; pos 7531269 to 7531965)
aacttagaaaggttctttttgtcctctgatgttattattatcgatggaaaatgatctttagattttttgccttttcaaatgcacactctttgcattatagaactaccttgtggattttgtgaggtctttatttgtcatattttctttcaagtgtattttttagctaatatttttctggttaactcaagtttatgactttctcgatacacagaagatattagcacatgaatttcattggcagggttcctattctatctaaggatcagattgttatgatctacatgtaccatactgaaattcacagattgtcaattttaattggtgagaagatatattgtcttttgagcatttttataagctaagattcccatcaaaacaatgataataatagaaatgaataattaaattaaataaataagaaaggaaatgtaatagaaggaggacagaactttgttttgtagcaacttatccccaaatgctggtcatgctagaaactgcaggttgctaacaagacagaagacatttagaatcctctccatgtaacattatcttttgaaaagttgaaatgttggttcactggtacctatgattgttctaaatacttgtttgcagctgtgaatttttaagaagaaaattatgttctgttcttagtaagttataaaaattatttgtccttgtttgttaatcatgcatagga

SEQ ID NO: 19873 - DNA, 395 bp, Glycine max
  Intron number 1 from transcript Glyma15g06120.1 (locus Gly ma15g06120) derived from phytozome v7.0 (chr-ID Gm15; pos 4337900 to 4338294)
tcctcggtcagtctctttttcctcacatcttgttgcttgctatacactgccaatatctgtttttttatttattcaactttttttttctctctatgagatagagtgttgcattttcatttctgggatccattatcaaaaacctttttggctgtatcatgcttctttgatccacaattttatgcaagatccctctttttgtgttgatttttaaatgggctctttataaaaccatgctgctgacagaaccttttccagtgatacagaaatataatggatattatatttctttctacctctcttcttcttgtgtgaaatgattatttcaaatttcagtataaaatatgttaggaatcgcttctctgcttgtttgattttaatttagtctcggtcaaatt

SEQ ID NO: 19874 - DNA, 522 bp, Glycine max
  Intron number 2 from transcript Glyma19g01660.1 (locus Gly ma19g01660) derived from phytozome v7.0 (chr-ID Gm19; pos 1270601 to 1271122)
ggagcaagttcttaatcttatgtttttctttcattctcattcttttttaacgttaatatgaattatatgataggtggaaaaatcttcagtttctgatttattttatagtttttgaaatctgccccgtatgaatttaactcggtttcagagaaatcaacataatgtttgagtcagtcatatgacttgaatgtcctgtattaaaacttgtaaactggtttccttgaacttggattataagcatttggtgattaatttcctttgttgacgaatttataagatctgcatttatattttattgtagccgatgcaagtttatagctattagtgttttgatggttgcacatgcaatattggtttctgaactagtataaattattgcactaacaaatggattgtaatttaacttattgatgataattgtgtaagctatatgatgatatcttgtagaacttgtcatttggcagttttcaatgttttggtataattctgtctcattaacaaaatatttgttgtttatagaca

SEQ ID NO: 19875 - DNA, 815 bp, Glycine max
  Intron number 1 from transcript Glyma20g36100.1 (locus Gly ma20g36100) derived from phytozome v7.0 (chr-ID Gm20; pos 44318868 to 44319682 reverse strand)
aacttcacagtaagaattacaattatgtttgaaccctttttaccatcttgaagtgtttctcatgcttattttctttgtgaggtttcttctgatttaggtaattgttaacttgtccttcaattcggtattggtaccatatataaaaacattgtgattatgatactgaaatttaatggcttattggtacttaatatggttctatttaaacaagattataatccttttttttttctcttaaggtgattcggtttaattagttaatgaaacattatcttattgaatgtatcatggggatgttaaattctgaattgcatttaatttttctcttttctgctttgactttttgcatttttatgttattcttgttggtcttttttttaatattaatataatacataataggcacttgtataaatatacaccttgtaataaacgtgtaaaatagttgatttttttaggcttgtttggaaaaaacttctccataagtacttacagaagaaaataaaaataagttttttccataaactataattagcttatgcgtaagttaaaaggaaaagctaaatgaaagagattctacaaattagtttatccataagctaatttgagatacgtttatttctatttacttcattttttctgcatgcttatggagaagtttatcaaaataagacctagtcatgagcttgtattgataggccacatgtttattctttttcttgcttcaaaacatatatattcacatattttgattgtgaatgtgataaaaacaagtattaaatggactggtttattatttaacagctcactctgac

SEQ ID NO: 19876 - DNA, 414 bp, Glycine max
  Intron number 2 from transcript Glyma18g13580.1 (locus Gly ma18g13580) derived from phytozome v7.0 (chr-ID Gm18; pos 13096160 to 13096573)
tcactggctttagcatacttgtatgttccctcctttcctatcctcatttttacatacaaataatcgagagaagttagtttcttaaataaatttatgtaatttgaaggattagtcttaaaagataatatttttattcttaaaagataaatcaaagtaaacaagcagtcaaaacttactagtttctacaaattctcgtgatggaaaaatattattttttttgctaggactctgtgatctctatatgcttaaagaataaatttaacgtcttccattcagcctcgtgagtaattttatatattaataaatgtattgcttatttttttttggttaaaattgtaaatgtattactttgaaatacttacatatgttttttgactagttgtatagcttatatattgatctgacatattttct

SEQ ID NO: 19877 - DNA, 803 bp, Glycine max
  Intron number 2 from transcript Glyma16g24310.1 (locus Gly ma16g24310) derived from phytozome v7.0 (chr-ID Gm16; pos 28161492 to 28162294)
tgggacccgtatgtgtcactacttgttcctcattcgtgtagaacattagaaacttacgcgttagtgttttttttttaatttattataattcggtttaattatcaatttgggtaaatggccactttttggactgttacaaaatgacaggtcaaattgatcctgaactttatggcgacaaaatggtccacaaaatcttaaaccgcaacctaatcgttgcacgttttacacagtcagggactagactaaatcaaaatattcgttctttcaggactaaattgtcagcatgttgcactttcaaggacgaaagtggtcatttactcttattaatttggttcttatgcactttgctgttttgaccctgtactgaaaatttgtaagtttttagttcctggataagtaaatttaatgcattttggtctctactattgacaccgttgctaatgttgttgttaagactgcaacaaaatttttctggtggtgtagtagaactgtcagaagtttcttccacaattgaaaattcttgaggttttacactgctagaaaaaaaattgtagtagtgttacagtgaccaaagtttaaggagttagaagataactgacaacagggatcgaaatttgaaataccttaaattagctcgtctaaggactaaaactgactatttttacattaagggtcaaaatagtaaagcacagattagtgtagagaccaaatgtgtaattgaatcttataattctaatatatctctaaatgagaacaatgcatgttaatgttacagttcttgagattactttcgcaagaattgg

SEQ ID NO: 19878 - DNA, 838 bp, Glycine max
  Intron number 1 from transcript Glyma15g11910.1 (locus Gly ma15g11910) derived from phytozome v7.0 (chr-ID Gm15; pos 8813911 to 8814748 reverse strand)
gattctcgcgtaagctaccttcttccaccaattgctgaaaatcgcttttttaacttgcttcttttctttatttctttctttctatgcgctttcttaattccaattaaattgcatgggcttttattgaatagaattttagaaggtttctactttcttctatggcttttgttcaattggatatttttttgtgacaccttcttttagctcttcaattagatgctcgtgcgaatggaagtgaatatccctgcacctaattttaatgaaatgtttagttttcttttctcaatacatctattacgtaacttaatatataatttttagtttgttaaataccttcaaggttcgtccaagtatagcgattttttttttttttttagttcttgtatttcttttagtttttaatccttgcaatgttacttgttttaatttctgttgtgaatctgccattagcaacatgttttatgtccatgcaaatataacagattaacagaatatgtaaattgtaactttttttgtttttagtctgtgtcatatgttccagcaaaatataataattttttgtttttagtttttacattacagtggatattaaaacaagtgatgtaaacattacagggatcaacaagtaaaacacaaactaaaaacgaaaaccttaaaacgtaaaacataaacatatttaagcctgtttagttttcttgcatggtttgtgttctttcccctgcaatatgtgtagatgcagggtagagattgtgaagtttttaactgaaagttaccaactcatgggtggatttgaggttccgcaggtatacatcctttgcaggtttattcccattgttgt

SEQ ID NO: 19879 - DNA, 956 bp, Glycine max
  Intron number 1 from transcript Glyma19g01260.1 (locus Gly ma19g01260) derived from phytozome v7.0 (chr-ID Gm19; pos 874975 to 875930 reverse strand)
aaccaccccatcattctgaatctcagaacaaccatgtgagtctcttaaaaatttgattttttttttttttttaactttagatgctccttgtttcacatgaatgatgattatgctcatctgggggttggagatgtgatgccccattagcatttttatttttttttgtttaacattcttcagaatgaattcatttgggagatgaagtttgcaattgcattttactattcttttttcgttcattacatgtttgagtataatcagtttgttgaaaaataaataaatgagaatggtagaactgaatttcacaaggtaaaaagagtgtaagttctatacatcacagtgtggaagataagcctcaaataaggcactgagagtgggctaatgacaagggtttgagtagtttgaaaggtttaaatttctcttgtgctattataccgagagagtggatatttgggacttgcatttgccccaaatgcacttaagttacttttttttttttttttatcagcaaaagttagttgttattcgttagtttttttgttagaggggaaaatcgaacccttgacctttccctccctctcttctccttttaccatccaaccaaccttgcacttaagttacttgagtcaagtgtttcagcctagagtttaaagcatagtaagcaaaataatagtgtgccaacagctgcactactaatgacttactgtgcttaaagcttcaatttacagttttgcttgtcaatgttgaatagttaggaatcatatgcttttgctaagtttctaggttgttatctgtatgtacttctacttttatgttctttccgatttaaatgaatcagtttatgtactttatttgttttctcttgaccttgtgttcttatgtttacaatgcgactttagattgctgcaatatatgattgctgcaccaaagcttattgagttatattttggtgcaga

SEQ ID NO: 19880 - DNA, 461 bp, Glycine max
  Intron number 1 from transcript Glyma19g43470.1 (locus Gly ma19g43470) derived from phytozome v7.0 (chr-ID Gm19; pos 49120525 to 49120985)
cctccgggtaacagatttaaatacatttaacagacttttcaaattagttcttgattaattacaatatttttaaaaatctaaaattacaaaaaatctgattaaatataaattcaagtgactgctactttcaagaaaagaaaagtataattgtgattttgtattaatatcggtgaagagattagggttcatatttttaaacttatgtttaatcaaatttttaaaatttaaaatagttgtaattttaattttttttaaactaatcaaaaactaatttgaaaaaaaaatctttaattaatgagaagatttatgacattggtaaccttcacagtttttggagcatgatacaaactcttcatatttaattattatatatatatatgtggttgttttggggaaggaagatgatgatgatgatgatggatgtaggtgacgaatacagggacgggagcgaacataattgt

SEQ ID NO: 19881 - DNA, 487 bp, Glycine max
  Intron number 3 from transcript Glyma14g07410.1 (locus Gly ma14g07410) derived from phytozome v7.0 (chr-ID Gm14; pos 5621798 to 5622284 reverse strand)
gacttatatacagacgacttcgtcggagaagcaatgtaagtacttcagtgacttcatgttatgccatgattaatgttgctcttgtggagaaataagatacacgatttttattattaatttattgctaataatcattcgatttattaactaacttaattgctactaatttgattatatcaatatgtttatttcacatatatgcaacaacaaaaattgcaaaagaagaaaataggacaagacccaatttccatacactatttaggcctagctaccattgggcctagcaagaaataaagatatccgtgacttaatttgaaattatcatttgtgtaatatgagaaaatgaatcctaaccccagaccctaggagtatataataatttatattgtaaatagaaattattatctataatcttaatcaagtctaattttttttagcttgttcacagtttaaaagagaaattgttttttttgtgtgtgtagaatcc

SEQ ID NO: 19882 - DNA, 640 bp, Glycine max
  Intron number 1 from transcript Glyma15g19840.3 (locus Gly ma15g19840) derived from phytozome v7.0 (chr-ID Gm15; pos 17326172 to 17326811)
tggtacgactccttaaactccgaaaattttcctttttttctttatttttttctttttataattttctctgaaaattttggatgttgcttagttctataggaagtggtttattgtaggacgggggaaatttggaattagatgggtatttttttgagatgggggaaaaattagaatcttgatgggtacttaattagatattcttttcctcttggtttgtttttgaaataaatgaatcctaggtaggaaggagaagcagtttatgggtctttcaaagtttgctcctttttcaaaaagagaaatattaaaaaaaaaactattttttctgagcatttttaggcttgagcctctatctcaattcttaggtttaatttgttgccctgaatggtttttcaaatttcgtagatctaatacatcgctccaattttgcccctctaatttagtgaaaaagtaaaaatgttataagggaaggaaaatgatactaggttttaatgtttggtctcttttagtttcaaaacggggctaatctttcagatatttttgcctcctttccttttagaggttatttttgtttcttcctttttagcttaatgtgaaatattttacagggtcacctgagacatcttgtcaatctgctacaacc

SEQ ID NO: 19883 - DNA, 1054 bp, Glycine max
  Intron number 2 from transcript Glyma15g15560.1 (locus Gly ma15g15560) derived from phytozome v7.0 (chr-ID Gm15; pos 11956502 to 11957555)
ttgacgaccaccaccctatccaagccaaaaacggggttcgttcctttctccacaaattaacacccattgttactaatttttggtttcatgattacttaatttggtgtttgtagatgcaaaaagtttaacttttagggggtgtttggtgggagatatgttttttcatgtccggaatcatgaatccggggaatcatgaatcctaagaatgagtaaaatctttttgatttttagataaatttctaggatttgaacagttatgagttatttttactggttattttaattatttatcacaatcaataagagtaacattatatttttattgtagtaaaataacccacatggaaaagttttcgtggaaaactttttaaaaaacattctcagaaacattatatcccaggaaaatttttaaaacagataccaaacatgggaacccaagattctaatgaaactcaaaacttttggcctaccaaacgccaagttcattcatttttaaaaaaaaatactattttagtccctactcatgtcagttttaatcattttagtttctacacgcaacttaaatgtggtgtttttaagtataggtattaaaaggtaaattttttttttgtaactataggaatgaaatgagtgattaaaccttcttttacagattgaaaaatttaagcaggtgtcatgtggagtttagtcagagctacatacatgtggtatagacatgtggtggttttgaagtaccaattaatttcccttgtttctgtttcttctttccaatacccaactaccaacacaaccttttaaaataatcaaaattaataatcagagtaaaaaataaataaattgtgtgtttttattactattttcaattcctccaagtgcctaagctagtaagggtgagtgagtgagtagagtaggtatgcttggttcttgaacaacaatatgggttttctttgatcacattacatttttttaaccagtttttgttttgtgcccaagcttatatattgttattgtatctttaggtgtgtcccatttgtgggaagaaggtgggagtgga

SEQ ID NO: 19884 - DNA, 519 bp, Glycine max
  Intron number 2 from transcript Glyma18g05180.1 (locus Gly ma18g05180) derived from phytozome v7.0 (chr-ID Gm18; pos 3914637 to 3915155 reverse strand)
tgtgctgaagtgagtctgtttcatcatcctattttataataaatattataaatatttactgtttattattgtttttgaatattagtattaatttgattctcatggttatatcatgggggataatggctagctgtaggatatttgatcctaatcctagaaatagaagactttgattatggccctatttagataaacttatttgtaagtattcatgagaaaacaataaaaagataaaatgaattgaatttttcacaagttagctcatgcacttacaaagttgtaatggctaggtggagctttattttgaaagagcttcaatttccttttcctttcctttgcagtccacggtggatttaggaatcacgtttgtgaatttagaatttcagatcactaaatttttctttggtcctcaaagtcatcataattggccttgcaaatgtgaagcaatatatatattttaatttaggctgtgcccttatgcagattattgagcagtttcaaaagtgtcatatagaacat

SEQ ID NO: 19885 - DNA, 891 bp, Glycine max
  Intron number 1 from transcript Glyma15g05620.1 (locus Gly ma15g05620) derived from phytozome v7.0 (chr-ID Gm15; pos 3964784 to 3965674)
ctccacggaccacccctactgctctgctctgcaatgtaagcctccaagcttctctctttctttcatttctcatctgctatatctattctttttctttgattatatatgtcctcgcttttcaaatctagggtttcgaaatttcgctgcaattttccttcttttttatctaggcctttcctttgttaaccgattgcaataatgggctatttagcgcacgcttggttgccacagattttgtgtggattcgaacgtcatttgggggttctctttgaatttgattgccactgatgttgtttgttgctacctaattcgtgataaatagtctatatattcggtgtttgtgttgaaatgattgctcgtgttttgatttactttatgttgtgtgtgggataaattccttttaaaatgatgctttgaatgagttttttgatggtcgggtgctcgattcaataaacataatctcttaggataggacccagacaaatagagtgacttgaccccttttcattggtaagttctctcttatccgtttcatatacctggttccctgcacttggttgcgaaagctttgagttttttttttttcttttcccttgtattaatggttttgctagtgccgatttaaagttgccacattaataattaatgtgtcaccaattagcttgtctgcttatgaaaagtttgccatatattggaatttggttggtttaattttggtacttcaatgtaattgtggagtcacggtcaatagcttctgctgcctgctgagttcttctgcttgtgttattttcttttttatggcattctctcctatttattgcatttcatttatgtttggattttgtcatgattctagggccgacgaggaacctgttgatcagaagagatatc

SEQ ID NO: 19886 - DNA, 270 bp, Glycine max
  Intron number 4 from transcript Glyma15g12950.1 (locus Gly ma15g12950) derived from phytozome v7.0 (chr-ID Gm15; pos 9643328 to 9643597 reverse strand)
ggtgctgttactaggtttacttcttctaagttttaaccagtttgattttcaatggttttagtaataattctttctatatgtacttctattacatgttaattgtacataaaccaaaaaaaagactcctcaagatggctctaaatttaagacttcaatgctgggtgttaaaatatacctcatctattctatgtgtgtaattataagtcacatatatgagaatctctagtatagttatttctcactttgctttggtgcggtgtagccttcttt

SEQ ID NO: 19887 - DNA, 462 bp, Glycine max
  Intron number 1 from transcript Glyma18g52810.1 (locus Gly ma18g52810) derived from phytozome v7.0 (chr-ID Gm18; pos 61289196 to 61289657 reverse strand)
ttgagcgttctctctcttcgttcagctcaatctggtaattcttccaaaccatcttcatcttcttcatcttcgtctatgaatcttcgattcactattctccattcccttcgttcactattttaaaaaaaataaatatatgaataaaattaatgatcgatatggtttgactctgttctgaccaccattgcttcttcagtttttgttttgtttcctgccataatgtgtttctatacactaaatcaatcagtggtgatgaatttcctttattccatgctgatggtgaaatcaatgttttgaatttgacaaaataatattcattttcatttgttttgaatgtatgtgtgtatgctgaatgacatgattccttatgtgctatgtgttgtttaatgtgaacaatgtgtgcaaattctctgtgcttcatggcagggatacgaagcttgcaatagctgcagcatctgaata

SEQ ID NO: 19888 - DNA, 522 bp, Glycine max
  Intron number 1 from transcript Glyma19g06020.1 (locus Gly ma19g06020) derived from phytozome v7.0 (chr-ID Gm19; pos 6748690 to 6749211)
agcaccacatcttcaaccgcatcaactgaggtaagtcatttctactcttctcttcaaggcacctacctttttgttgggtttattgtcattttcatgggtttttggtttgtggtttttttgctatctgtctgatgcacgtggtttgggggttttgtgcaatgccgttggtttttgttgtgtcattttcctttctttctttttcaagtttgaaaacaaaactggatttgaaggtgtcaggccctccttggtcatttcttttctaacttttatgtgcatggctatcatttttgtctttgttttccactttcgttttgttctgttgttgccgttgttctattttttcgtttaatgtctttgcctttgatttggtttcggtttgtatgtgcattagtcctttccgctgtttttcttttttggtgttttgtttacaaacctttacattgtgcatccctgtgattttacaattttcctttagttgacaagtttcttttggcgtttgcttttatatccctgcaattgcag

SEQ ID NO: 19889 - DNA, 461 bp, Glycine max
  Intron number 2 from transcript Glyma15g02860.1 (locus Gly ma15g02860) derived from phytozome v7.0 (chr-ID Gm15; pos 2003372 to 2003832 reverse strand)
cactcaaggttagtttataacgcttatcgtgttttttctttgcctaattgtcataaaaactttacgctgaattacgtttaatggccttttctccttctgtattagatagctaaatttgttaagcatgttgatctgatttgattatgagaaaggctttgttgacttgagagattcaaaactcaatttggtggtatttatgcctccaaagagattactctgtgtaattgcctttttggtgcaaaaattattcgattacaatggtttttttatatctttttcttcatatggggctgtgaacctgttttcaaatgccaaaaggaatccatcatttctcaatgaatacaatgattacaaaaccatagtcttactatatctcagatgtgttaatttcatgggtttgccatatttattttgtgttgtactgtgtatgcaggacaagctccagctcctcgctgggcaac

SEQ ID NO: 19890 - DNA, 815 bp, Glycine max
  Intron number 1 from transcript Glyma17g02870.1 (locus Gly ma17g02870) derived from phytozome v7.0 (chr-ID Gm17; pos 1909883 to 1910697 reverse strand)
gttacggtattgccgatctcttgctttttctcttttgctgcatcttccccagtttaagtgctggatctactctgtcacatctaattgccactaatatttcttttctttttttgggcttttcaattggttttccgtagtgggttttctttactctttgggtttacttccaaagctttgttatttttccatttcgatgttgacatgaacaaatgagtggtgggaaacggaatttgggttctccaggttcaattaagttttattgatgagaattagtgaacaagtctttactttgggacaaacatcttgtgaatgtttcttgggttggacttaggttgccatagaaacgcattggttttttgcatggccatgacggatgaaacaacagctatcagttccaaatccctgagcctaactctttattagttaaactttaaccaaccatgcaatctttgatatgttcgacttccaattgtaacctgacccgacatttggacttctaattttcaagggaaaaaaaattatgaggtcactattcctgtttttatgtatttccttgtaatttgaactggtttattgggttgcgggtttggataaaaagaaaaaaaataggagtgttcatcacttcattgcatcgctgattttgagactctctatatctgttctgttctgttctgctgcgtctttgtagttacactcaggcttactgaaacattgagttgcactctgatgtggattttcgtcgtcttaatgttttacatctgggattaatgtgaattgcagcttactgtgttgttgccaaggaatctgttagcaaa

SEQ ID NO: 19891 - DNA, 827 bp, Glycine max
  Intron number 3 from transcript Glyma18g08070.1 (locus Gly ma18g08070) derived from phytozome v7.0 (chr-ID Gm18; pos 6815722 to 6816548)
ggtgtctggtgctggcgctggcgctactgcttctaggtatgacctttcatttatttaaaattgcactgttatgagataagatggggaccctctatttgaaaacctgtaaatcgtgccatcctgtttatgccgctgtccaaaagtactcaggtgttagttattatgcctgcacatagtctagttgttctaggtgttaagtgaactgatacatgatagaaatttagaatttaaagaactgggagattctctttgacttgactatgattgtgtacttatgctggcttaagaagttgatatttcacaattgatatagtttgtggagtctctgataatttttgttttgtgataggacaaaatctaggttgtagctcagcttactccatactcctaacattttactcactaatgtgttgttgaaaaaattaatctaaattgagtgccatttgtaaaaggtaggggctaagaaaatcaagtgatacttttgcaaatgaggtattggaagtctggaagatgtttagtgggtatcatttgaaaggagacttaccggtctttgtttctatgagatcagacactatttctataatttcatatatttctctcatttgctcagcattcttgtggtatgaataattaaatgtacaaatagtaaaagaatggagagataaccattgcatgctatagaattgctgggttattaacacatgatgcgtgactgtggactttaactgttatataattttatatcaacttgtttcattgaattataaagtatcaatatcttaatatactttttgtaataaatttaaattatttcagtggatctacga

SEQ ID NO: 19892 - DNA, 357 bp, Glycine max
  Intron number 3 from transcript Glyma16g23270.1 (locus Gly ma16g23270) derived from phytozome v7.0 (chr-ID Gm16; pos 27002096 to 27002452 reverse strand)
ggtgggtaacttgacataactaaggctttgtttagataaaattctctatgaaaacttataaaagttgagtttctccataatttaaaattcacttatctacttaacttgtatataaactttcatctaatttctccaaaagttggcgttcatttgttgattttaacttattggagaagcttgattcattttacctatctatttgtctaagtgtatggaaaagtttattcaaacagtgcatgaatcccagactaaattatcttccttcaaaaactcctcccttggtgtttgtttttcattttttttatttgttctttttaatctttcagtgtctaaatggaaaagagtgacaagaagatc

SEQ ID NO: 19893 - DNA, 817 bp, Glycine max
  Intron number 1 from transcript Glyma20g18290.1 (locus Gly ma20g18290) derived from phytozome v7.0 (chr-ID Gm20; pos 25639608 to 25640424 reverse strand)
gaagctccttcccctgccttcgatcaggctcaacagtaatccctgtcttcttttaattttttttaattatttttgtttgttctttattaagataatatacgctttttctgtaaatgggaagaaatcttttttgataattgttctgttttttattttatttttatgttttgatttcatgagatgggccactgtttaaattttgtgatgttggtgaaagtttcttaatttttgctcgaataagtgattctgtaattggaatttgcatgaataaggttgtgttaagataaatttctccataagcactagtaaaaggagatatgatggtaaaatgaattgagcttctctcatatgttaaatctactttatgcatctcagcttatggagaagttagataagagaacttttgtagaagttgagtgcataggttgtttttaattcatgggagaagttcacttaattgtaccttattttcttcttctgtaagtgctgatagaaaagtttattcaaacaggacttacaaatgggaatttgaaacagtggatgaaatattgtgtatttggttttaagaaagaaaatatttgttttccctttagttaaatcataaattatacccgagccgagttatggaaaaggattttggggaagtggttgtgcccaatttgacaatttctttgcattgaaatggattaatctctgattttgtaagggggaaatccttttagcggaaaaataagtctatacttgagtcgacaatatgatataatatggtatccttgtttgaagcaacgatgttttgttttagtccattgtttgttac

SEQ ID NO: 19894 - DNA, 867 bp, Glycine max
  Intron number 2 from transcript Glyma17g36380.1 (locus Gly ma17g36380) derived from phytozome v7.0 (chr-ID Gm17; pos 40347110 to 40347976 reverse strand)
ctgagtgcattaaacaactggaacaggttcttcccttagtttttctatatgtggtatcttgttgcaaaatatggctgtgagaaaacagtattgagcttatggtaagaatatgccagagttaacatcatataacactttttgattgaccctactaactacggctctacaatttttattggagttaaacacctaacactgcaagttaacttctaatgtgaatgggacacgaaagctaatttcataaatgttcaggaaaagttggaatgttatagttggaacatagccggaatgttgttttgacccttaatcttttataatatcggcaatggacttttaagtcttaacttatttccatcttttccccttgtcaagttttttttctgtaacttacatcatgttttccaattcattgttctgataactagtataaataatccaaaatttgatttctaaagagaaaagcaaagtaaggtaaatagaaaccaatattaggatgataagtttgtactgaagtgatattcaaataggggtttacaagatgtaccttgtcacctagatttgttttctagaactatttttgctcttcaatcaattgctctgtcactgcagttcactcatgcttacacacagtactaaaatttgttttctgactgaaactattttttttggtctatgatgctgtcgcagtttctgaagaacattgaatttcaatgcatatttctatttctctagatcattatatttccttttccattgtgattatgttttacttttgcacattcgccaaatggatgatgtttagattgttatgcttaaaagttccttgttccaggaaatcaaaattctcggtcaactacaccatcccaa

SEQ ID NO: 19895 - DNA, 1035 bp, Glycine max
  Intron number 1 from transcript Glyma20g37330.1 (locus Gly ma20g37330) derived from phytozome v7.0 (chr-ID Gm20; pos 45243644 to 45244678)
tggcggaggctctgtcgaggcagtactgggtaaggtcttgcgctcttgctcaattgtcgaaattcacttcctgcaatgttgctctttcgttgtgattaattcaggcgatgctgtgaattgctattgatttgtacttttagtgaattcagttgtgtgtttggaactttaatttgttcttttagtgaattcatttgtgtattggaacttagatttggggctttatatgtgtctagggctagtactccggtgaagttcgaaatctgtttttgatcagcgaagtaaaatttggtttctgctggaaacagacggaacttcgatagaatctaaattctgatttattgctcattagcagaagttgttatgcccagctctctgtttatattctggagtgatttgattgggcaaacagaggttaaacgatattgaagatttaagtgctttttttggaagttcaatgtatctctagaaattagaaatgtggatcgctgatttagaatcatcgggtgcttatttgtgtgcttgatgtcgaacaaaaaaacaaaggaatgtttatgattgaattgttaaactggtgcagtggcaatttggcaaacatttgttcacacagtttacatttttactgtatgatgagatgaattttctgccacaatcagcagttgattgttttacagctgttgtgtctgtgattgactttctatggcatatcttttttaagaagattgtataaatgtttctttatgtaaacttattattatttcacactcacacacttcatcatatggtattgtttaactctgtcattgtcttacacattgtcatctgcagtaagtgaacatgtaccatttcatttattttaatccattgagcatcaagaaagaaataatcaaattataaattatatttagtgaacatggaatgctcatcacttgtttcaactacatttatgcttcttttacctattccgtttaatgaccatttcttgaactgtacctgttttgattatcttgcatttctattttgttgaccaggaatata

SEQ ID NO: 19896 - DNA, 523 bp, Glycine max
  Intron number 1 from transcript Glyma17g35990.1 (locus Gly ma17g35990) derived from phytozome v7.0 (chr-ID Gm17; pos 39989715 to 39990237)
aggcttaataagactcttgttcaacattctaacaggtaattcattcaatcatttcttttctcaccatttatctatgagttatctcgtatgtttcaattctttgaactaattatatatataactaatatttggttcagagtttaatcacaattaaaaattcattattcttttccacgaaaatattcagcaaaaattaaacttgcatgtatcttttctcacaggctcatgtgtgtattgctacgcgacgtccattgaataacttaattaaagtttgttaaacaagtccccccctacttatatttatataagttgtttctataatcaaagagaaaattatatataattaaattatattttcatataagatgtaaatcgctttcataagttatcataaatactttataagttgaaaacattttatatatgaacatatatcataagttattttcaaaagtaattttgttaaatgttaagtctttgcatgcatgtgagaaataatattatgatttgtggtgcaggaaag

SEQ ID NO: 19897 - DNA, 983 bp, Glycine max
  Intron number 1 from transcript Glyma17g01460.1 (locus Gly ma17g01460) derived from phytozome v7.0 (chr-ID Gm17; pos 897216 to 898198)
cttataaaattgattttggttaaaattaatttttttaagtaatttatctttggatgttaaaaacgattttgctataaaaaaatttaactcaagattttatatatatatatatatatatatatatatatatatatatatatatatatatatatatgatatatgatataatagcaagtaaaaattgtaaaaaatattatacaaatatttttttttactgaaatagttgctaattatttttgaacttttatttttatttcttactatatattttgttaagctataaatattttaaaatgtaaagaataatgaaatggtgcgtgaaaaagttgcacgtgtgtatatcagcggaatcacaaaaccctactactatatatagtatatactatatacttggttgctcgtgctacagtaacgtgacgtaagtgcatgttcatctttattttattgccaaatggccaactcttaaatccaattcgttccataaaattgtcaaaattgtacgtctgctagctggaaccgaacggtggtactgtaacggtttcttggtttacgactttacgtacgtagaattatacaagaatactgtttctgattaagattatacgacggatattattaggaactaaactaatgttaatctttatccttaagcaaaaaccagaatagttcttccaattgtatccaatttcaactgattagtatggacgaagtttgaagttgttgccaaacaagcctaacaagtttagaccacaccgcattaactaatcaatacgtacagggacattctttcatgaaagcaatttatgcaaaatatactaccaactccatgaacctactcgtctataaatacttccaccatctttgtatatcgtgtctataaaaaaacatatatacactctttaacttcatttgacttctttttatttgtcaacaaattaaaaaaaataaaaatgaagtccttgaacaccctcttccttctagcc

SEQ ID NO: 19898 - DNA, 959 bp, Glycine max
  Intron number 3 from transcript Glyma15g01360.1 (locus Gly ma15g01360) derived from phytozome v7.0 (chr-ID Gm15; pos 830612 to 831570 reverse strand)
aaataaaccatcccgtcggcccttttggcacaaaggttagagttatcactttttatataatacatatatgccagtgtaatgtttgcattgagttgttaaaaattactcatgtcatggctgtgcacattctaattactcaagacttaagagcgtacaagtctttcgttgttttagaccacaattatattttaagtcttaacattattgtttaaaacaaagtataatttgaatgtaacactttaggaaacaggcaccaacacaatgtataaaattggcataatctctacacctaaagtcattcacgtactttttttttattacatatttaaattgtaaaaatatgcagaaggataaagtgacagaaatgtctgtcgggttgggaccattactaattactataattaatgctccaatgcctagtgagtttaatgtagaagcaatcctctggagctattgctcagactggatttgtgaagggaaatatatatatatatatattggtgtcttgctagcatatctattctttagaagcaattaacaatcaacacaaagatttcataaaataaacttataaagcatgagggtgtttgtataagtattatggctttccacgagtgatagaggtaaattgttagtgtattggacaaactgctatccttaaacaaaacacacacttaaactatgagtagaattgttgctatgcaacttggatttgaagtggggaaatcctcttcattctctcatatcaagggatctgatgccctaggccttcctttctttatttcattcttccttttttcccttttttaaagtagaaatattagtttttttaaaataattttctttagtcacaatgctgtaatatataaccattttgaagtatgcttgatatacgtttgccttgttgtttgttttggttgataggaagcacctgctgttgttaaatcttactttgacag

SEQ ID NO: 19899 - DNA, 891 bp, Glycine max
  Intron number 2 from transcript Glyma17g36710.1 (locus Gly ma17g36710) derived from phytozome v7.0 (chr-ID Gm17; pos 40658309 to 40659199 reverse strand)
gttttagggaaggcagttttctccggccagaggaggtattccactctgctgtttctggcagctccactaactgacattcttatttccctgttgttttcaggtttcttttatatatatatatatatatatatatatatatatatatatatatatatatagaaataactaattccctaatatttgtggagtgatatacaccactgtggtttgattgcatttttaatagaaatattatttcagtgataacggaataataaatttctataaactgaattaaattaattatggctcaagtgtttcattcatcaaatattcaaattatacatgagccgatcttaaaatgacattgaagtgtggtttgattgtgtttttattggaaatttatcatatcactgataaaggaataagttttttgcaaactgaattaaattatggctcaagtatatgatttagtatgtgatcagatcaagtgtttgattccaagaaaacatctgtgaagataagattagtttttacttttcggtgggaaataatccatgtttttaccacagaaattacttgcatttatttctcataaatatattattgttgttatgaatggcaagaaattaatgctaatttagtactggaaaaagtcaaaacaaaataaaaaaagctattcttaaagaaaatatttgtgagattctcttatagtatcttcttggccatgattctctgcagtcacaagcccacactgactgcagtcacagcatgcacaggcctaaaaaagaaaattgaaatgcagaaaattctggtccccttaaaaaaaaaagtgataatgtgggtgtcagtagaagctattcaatggaaactgcagttcagtttttgaattatagttgcagactgcagagg

SEQ ID NO: 19900 - DNA, 541 bp, Glycine max
  Intron number 2 from transcript Glyma18g35940.1 (locus Gly ma18g35940) derived from phytozome v7.0 (chr-ID Gm18; pos 42212380 to 42212920 reverse strand)
attggtatgaattgtgaaatggaatgattgaggttttgtttgtgttatataaagagttggtatatgatttgatttgtaaaaggtgctgcttgtgttccactggtgcttgaaacaagttttcatttatgcaaattagttattggagggacgaaatatttgcaaagttgatgacttagtaggaaaacttgttagcatgttgacacttctgaagattaggtacatagatgtgcattttcatgaaccaataaagcaactgtagtgtaattgtaaaatatgtacttctgaaaattggggcagatagagaatgtaaatgttaaatataccaatgactcttgaatattcaatcatgctgatgttggtgattttatggtgggttaaaggcaaagattaatcatgctgatgttaaatattcaatcaacctgttatataatgtaggtccatctttgcttgtcaggtcaggaatattttcttatgtatcttttgaatagtatcaatttgaagtttttgtgacgatcatcttgtaggaattttcgtgaaattg

SEQ ID NO: 19901 - DNA, 770 bp, Glycine max
  Intron number 2 from transcript Glyma20g31460.1 (locus Gly ma20g31460) derived from phytozome v7.0 (chr-ID Gm20; pos 40068547 to 40069316)
aagagggtggcatcttggttgcgagtaatgacctattcttatttgtagctacattttgttgtttatcattctcttctcacatgcaattgccattaaacttatgttttctccaactgctaaagataatgtgagttgtaatgtgcactcactggttgtggcaaaatggttttgtatagattagagattcatcatttaaagatcgagctggctattaattttacattaattgtgatttttgtaaccctaaaagagattataattccattgagatttctgtaaaagaaattaattaatatgatgtcacttggaagacatgtattagggattgttggttgctatcttatgttaaatggaatgctggagaaacaattgtgtccattgttctccctagtggcaattttctttgtgaccattgaaattgggatgtcagcaatgattgaacaacagtctgagactttggacaaacttttgatgtattaggggtttatgtgtagttgatggaatatattatcaaggtaaaacttttggaaaggatgacaacctatacaaaatgtatgagcaaaaaatagacacttgtccagcatatgaattatatagtaaaagaatggctattaaagatagataacttatccttgaatacttttcttgttttcttgaatataataattgtatatgtttccacacacctacttcatattttgggaatttctaattaacaattcttttgagtttcagtggcaggaaattctgctggtataagaatacacgct

SEQ ID NO: 19902 - DNA, 634 bp, Glycine max; identical to SEQ ID NO: 19629
  Intron number 2 from transcript Glyma16g33160.1 (locus Gly ma16g33160) derived from phytozome v7.0 (chr-ID Gm16; pos 36174480 to 36175113)

SEQ ID NO: 19903 - DNA, 620 bp, Glycine max
  Intron number 2 from transcript Glyma18g16270.1 (locus Gly ma18g16270) derived from phytozome v7.0 (chr-ID Gm18; pos 16676565 to 16677184 reverse strand)
ttcgctgcgaaaccaagacaaaggtttcttctcaaaaactaaaatccacaacgaacacaaagaatatgattagctttagggggtgtttgatcttagaattcaatcaaaatgtaggttttttttttttttttacaaagtgttgtaatcatattttgtcatgtgcggtaagtttattggcttttttagcaatgtgtctgactaactagtgcccttagtggtcaaggaattcaaaatagaaagtttttattggaatttacattgagaatgtattggaaatcacagtagagatacattaatgacactttctaatgaaaaattttccattttttatttcttaaccagtttcttgttagcattttgcctataacaattaccttaacagttatcccaaggattatgtctggttggttggcagtgtaattttttttatagtagcagtgtaaaaacttcttgatcttatggcattcctagaagttccttttagcttatttgagtgaaggttatgaatgagttcttatgttatgagctcttgataaatgcttgctcaattaagttggttaataagcgtgcctttattttttgtgattgcttattttatcttgttacataccatcaggaca

SEQ ID NO: 19904 - DNA, 956 bp, Glycine max
  Intron number 1 from transcript Glyma18g46920.1 (locus Gly ma18g46920) derived from phytozome v7.0 (chr-ID Gm18; pos 56559190 to 56560145)
tttctcaggtagttgttttgtttgttactctccatctctctctctctagttttcattgcatacttatgagttatgagtaatgagacaacatgtggaactggtttggtgattttggtctctcactcagtcactgtacttgctttccagtggttgtgtgtttctgttcactcatatcatgccacgtttacaatagattctccatgtcttatccaatttattcgcttcatcagccgccaaaagtgaaaagaattttggaatctgatttttttaaggttttttcttctttttttgtcagtggggttggtttgaaaagctgtctggaattcttggtatagatcttattcttgggataatttcagctgcgaaattgtgatttttgtcatgaaactcagttgttctgttttgaattttgttgaaatcgttttattattctattctgctgtatgatactgatagaatgaatcatagacaagtagaaaagaaaatgttaaagagaaaactacattaaagtttccctaattttttttctgaattgtacaacatgccccccttattttgagttgaatagatagggaagagacggatagaaaaaagaaaaggaagagagaaaaaaaaaaactgacaagtaatatgatgaaaaatgaagaaagtgttaagaagaaaaatggggtggaaaagggaatgaaagggaaagttaacctacaaatataaggtggcctttgttttgagccttttctgttttctaattttttgtttcagtttactaggttttcaaaacttgaagaagaaaccattttgtagaataacagacatttataatttattttgttttcttttcttttttaccattttctttattggagaatatattccggtgctacttattcaattcttatctgaagttgaacaattcatttttcagctcattgggaggactccacttgtttatcttaaca

SEQ ID NO: 19905 - DNA, 913 bp, Glycine max
  Intron number 2 from transcript Glyma18g07530.1 (locus Gly ma18g07530) derived from phytozome v7.0 (chr-ID Gm18; pos 6236964 to 6237876)
gaggtctctgtctaagaggaaactgggaattcaaggtacatttttcaatatgctacttactttttattttatttaaccgaagagatgcttcttcttttttaatgaaattgtggtatttagattcagatggatggaatattcagaaaaattagaaaaggaaagtggaaagtctctttttgttttattttgttgctttgaacttggaagtgtgtttaattcaaaataaagtagagaagtgtatgacttttgttcgaattgattcttggatgtgaatggtttggcttttgggaaactcctgcattgcgtggttttgggtttcagaagctccttcaagctaaaccatagttaagtgtgtgtttggttgaagtgtgaactgtgaagtatgagaaataattttgtctcaaacctgattttagtatttttagatgaaagtttgtaaaactgattttcaaatgacatgatttatgttgggattttttttttctttttttctttcaaaaagctaattagtagtgaaactcaatataatttttttcattcaatgtagagctaccttgaggtacttcaattctgaatccaaaattaatttcttggcatagaaccaaatatgtgaaattttactcaaaatcatattagttgatattttaatgtaattttggatcatctaacgtgaatccaaacatgccaaaacttgattttaagtgatagaatagaagtagtttttgcattaggttgcaaaatttacagtgttttagatcaaacttgcttttagagtaaaaatatccaaatttgtgaaatcaatctgacaaagtcaattttgtaaattctggccgaaacaaacattaagacttgctagaagagaaaatgaatggaggatctcattctccaaatttgtgaaattctatctgcagca

SEQ ID NO: 19906 - DNA, 593 bp, Glycine max
  Intron number 2 from transcript Glyma19g40340.1 (locus Gly ma19g40340) derived from phytozome v7.0 (chr-ID Gm19; pos 46779783 to 46780375)
tctccaggtatgaactttgatcattcaattttcattttttcttttgcactttgtggcataacgttcatttcattctgttttattaagttataataaaatttgatttcttgatgccaatcaatttgttttttttttcttcatttttttgtaaaaagaaaaaaggaagaaagagttatccgtgtgtacctaatttttggtgtcgttgttatggtgattgggtgtgctactgcttccctatctgattttgacatggaaacgataacaagttcctttcttcctttccccttttgtttattttcgaactgcagttgcttttgtgtttgtcttttgcttaactttgctcagtattgaagtctctcctaattagtatactatttcaatatcaacacgtattggtttctctgaaagacgaactttctcttatttgtcttttttagttttcgttttcatttggtactgtaggaaaaaggggactagaattttttatttttatcatacgtgcaatgaaccgccccattgcatatttatctatttggtactgtaggtgtgatgatcgcaaattgataatattattttattgtttttgcagcaat

SEQ ID NO: 19907 - DNA, 452 bp, Glycine max
  Intron number 1 from transcript Glyma14g36980.1 (locus Gly ma14g36980) derived from phytozome v7.0 (chr-ID Gm14; pos 46295421 to 46295872 reverse strand)
acgggtggagccgagccttcgccggaatcgtccaggttctcgcacaccgactgtttgatgaattgactctgctgaatttctgtttttagctgctgatttgtgagtttaataggcatgcagatttactgtaaaagttagtacactctcaactaatcagaaatcatttatggtgtaatttttaagagaaaataagttatgcacccactatataagttatgcacccattataaaataagttatgcactcactttacaatttcagtgcatgaccattaaacttaatttttaatatttataatagaagataacaaacttaccatatgagagtttacaattggatcacagcttaaaacctttacagtgcaagtgcatgtattatttatttgagtttagcgttggatggtttgtggtattgcagtcatcgtttctgtgggggtatctggtttcccctat

SEQ ID NO: 19908 - DNA, 1021 bp, Glycine max
  Intron number 1 from transcript Glyma19g30550.1 (locus Gly ma19g30550) derived from phytozome v7.0 (chr-ID Gm19; pos 38166923 to 38167943 reverse strand)
ttcttgcgcaacacctcgaacagcaaaagatccatgtaatccacattaaaaactctctccttttccttttatgcgttattttccttaattttgaattggattcgaaacactccaattgagtttgattatgtgcaaatgtttttcatcacttaactattttaggatttgtagcctgtggactttgaaggactagtagtaatgggttactgttaaggtgtttttttatttattattattcgagaatattgaggtttttgatagctttgtaatttttatgcagtttgccttctttgttttttcattagggattcgatcagtaactagagatgaggaagagagtgtaaattactaggttttctattggttaagctgaacttttttctgtgcaatcaattgaaaggtttctggggattcagcaatttttatgaaaaagaagagtttagttttcaaatcaaacttagtagaagaactccgtctttagaaaaaaaaaacctcagttactgttctagaagaacaattacaactaacagcagaaagtgtctctgaatattatttttgtttttcagcataaccttagcctgtgtttggattgatggtagatggtggattggatgagaaagtcgattgattgtttcttttgtgaaaaactaataatagatcgggatgggacctgattcatcccattccatttagtccaatttttattctctctcaatttggggtgtaggggatgtagctaatcttttaaaataaaaaatccctattttgaccagctaaataaacgtaatcctttgaaagtgattggggtaatatagaaactatcgagttataacttatttcgttctgtcttttttcctaacaatggaatggaatctccattgcattctattatagaatatcctaacagtaaaataacattttaattcattccatcccattattttccaatccactccatatctaacaacctactatttgctgtttctagtattttgaacatttgaataatatcttttgtagg

SEQ ID NO: 19909 - DNA, 613 bp, Glycine max
  Intron number 2 from transcript Glyma20g31860.1 (locus Gly ma20g31860) derived from phytozome v7.0 (chr-ID Gm20; pos 40461818 to 40462430)
tccaccaagtacaagagttctgctcccttacaagggtaagctaactcctcaactacctacttacccttttgtcatgaattttgaaacttttctctttttatatgctcacaagggagctagggaactgggtagtttttgtttcaaggcttttgttctttttttaattaaaaaaaaaatggaactaggttgacattggtaagaaacacccatgacctggccaaaaggttgttaattggagttttgaaatgttgtctaatagagctgaggggaaatgaagtacattatgctgacaattaatacaataggaatacaaattcagtgttgccaactatgagatcattgaactgaagatatgaattctcagtcagtcggtgcctctatttggatgtttgctggcagctttttattggggttgatttattggatttgctgaggtattggagagctattttcatgaatttctctttttttcggagcttttttggtttttgggaagattgcctaccctcttattgtgtttttttccgctttaatagcataattattcttggaaatcatatgtactgattttttaacagttggttgcagcgaataaaaagtgggcaggtttgat

SEQ ID NO: 19910 - DNA, 985 bp, Glycine max
  Intron number 2 from transcript Glyma17g29510.1 (locus Gly ma17g29510) derived from phytozome v7.0 (chr-ID Gm17; pos 32171745 to 32172729)
aatccgagtggcatcgatacaatctcaagcgcaaggttctctttcctttttctctatttttataattaatcgatttatttatttaattttgttaaaccctagtttttttttttgtttgaggtttgaggatatgcgattaaataaggtttttatgtcctccttgatagaatgaactagcttcgttaattatgtgccttgctatttcatgtttctcagttagaattgttattttacaacttgaatcctgtggaaagatctgtttttgtattgtgttatggaatgtgtagaatataaacaacttcaaatcaattgtgttaagaacatttcatagagttattgttgaaggtatgttaataagaaggtcttagaccctgtttgaataagcttcttaaggcttgtgaaaaaagtaagaagttaaaaaaaattgagtttttcttgtaagttatacatctcagcttttggagaagttagatgagagagcttatacaaaagttgagtacatgagtcgatttgatgttatgggagaaactcaattcattttactttttagtttatccaaatagcgtcttataatattaggacatgggaggaagatgttgttaccatagaggcatatcaagtgagatgaaagtggaggggtaaatttatatcatacaatcacttgaaaaggctgaaagtttgagggaagcaaatttcatccatataattgaaatcaatgactaagattaaaatgcattgaaataatttttaccatctttgtactaagaattaagatatactcctctcatactttcactatacatgacccttctatatgtgtgtgtactcacatgcatgccttgttggggagggggaggatttggtgactatccattttttttaagaacttggtttatttccttgaaaatattaaatgaatgtctgttttttttaaaataaaatgcatataggtggctggggttcctggggtgaccgaggcgctatt

SEQ ID NO: 19911 - DNA, 679 bp, Glycine max
  Intron number 4 from transcript Glyma15g08620.1 (locus Gly ma15g08620) derived from phytozome v7.0 (chr-ID Gm15; pos 6102242 to 6102920)
ggttggccattaggtttgaagttgttaccaaaccggtgagcatctctctctgactctcttcaattatcacttatgtgcatcttatgttgtcatcttactctaagacacacttgcctcacatataatctatattaatatcacaggcaagaaggatgaaagaaataaatagtagaagaggagagttgattagatgataacgaagaattgtaacaaaggcctgaggaatatctatgtattgacattcttgccaaaatctttaacaaaggcctgaatatccgataatactcaacaaaggaaatgctttggctatgattatgttgtttcaccagatacctttacaaaaaacaataaaatgttttacaatattcaccttttaaaacttttttggtatgaatttacttatgttgctgagaacaagtgtgcccactttgggacaatttattttacttcattttaacaagttaaggaagaaaggaaggagcaaaatttaatggcaatttctataaaacaaaaatgtcaacatttttgcagttattttttttttatttttggtttctttgatttgattttagcagaatgcattcattttgaagagtcatgttttaccctagattttctttggattacagtttctctttggccttctgatagatgttttactggacttttcagttctggt

SEQ ID NO: 19912 - DNA, 816 bp, Glycine max
  Intron number 1 from transcript Glyma19g43150.1 (locus Gly ma19g43150) derived from phytozome v7.0 (chr-ID Gm19; pos 48890154 to 48890969 reverse strand)
tgctcggataaggttgtgctgcgccgactcactgggtgagccttcccattccattttcttactcgctacactcaattttccaattgcattgtagtaaccatttttatttttttttatctttctcactttctctcttccgcttttgcttctgcttctgctttgtatctctgtaacagttaactcctttttctgtatgctttttatccgttttttcatatcctctgcctcaaaatctttagcgcttacattgtcagatagatacccgaattttatgtacctttctcctggattagtttattgatgatcaagtgtttttaactctgttgacctctgattttgaagcttgaacttcgcttcaggggttcatctatttatcttattcttgctacatatttgttttttctttcccctagtggatcgactcatgacacacgaacaagaattctagtttttcaactagtaataattttgaaacatgagtacaataagtttcccaggtcaatctgaggcgtgaactattttgttttattttctatctgatccccaccctttactatagaggtcatgttctgtttcttaattggccagttttgatgtctttggtatttgtatttacgggaagaaagaaaataccaatgcaaatggaattctaaatggaaaattgcatattcttgatgatctgtttttcgtcacaggataagtcaactcaatcaatacaagtcaggataaattgatttatgatgattttatgtctttctgtttgtaattaccagaatctttgaaccctttttatgattttgcagtactttgcttaat

SEQ ID NO: 19913 - DNA, 538 bp, Glycine max
  Intron number 2 from transcript Glyma15g02710.1 (locus Gly ma15g02710) derived from phytozome v7.0 (chr-ID Gm15; pos 1856754 to 1857291)
gttctggtaagtatgatctcatttcaaattcttatggttatgtttgaataaacctctcaacaaatagaaaaacaaaataagaatgtaaaacaaattaagcttctctgatgagttaaaattaatgtatccataaatcaatatattaaaactttcatttagcttctcctaaagttaattttaacttatgcataagctaatttagaagaaacttaattaattctctctttttattttctttctcagtgcttatattgagaagatatattctcttttgaaaaaaagtctttttttttgcttaatccgcctttactaaagatgaaggagtacacttgtttgtaatccaactaataagggaaaggtttaagattacatataatttaactaatgataaaaatttaaaacaaaagttttaatatatcaggatccttaggaacccaaaacaaaatttactaatttatcatagacatgaaacatatataagccttgagaaatttttccaaacatgtgcaggttagagatccacaaacagaaatcccac

SEQ ID NO: 19914 - DNA, 685 bp, Glycine max
  Intron number 1 from transcript Glyma17g06540.1 (locus Gly ma17g06540) derived from phytozome v7.0 (chr-ID Gm17; pos 4678032 to 4678716 reverse strand)
ccctaaaaaagtttcgctctgaagcgcaattcgaggtcagttatatagctgagttcaaacttgattttgtgaaaccttattcctatgcttgataaacttttagtttgatgttaatattaatattagtattggacaataggaatgtaacgttagacaatgcttttccttgcatttttttattaacggtataatgtttattgatccatgcttgttttcagctcgtacaacgtgattttgattcataaaataatttggaatgaataggatgaggaaagtcccttgttttgtttttttgaaccatttgagaagaaaaacttctttcttggattataagtttgccctcagaaattattaagtacattcatatgctctgtctggataaggacgacataaaacataggacatcaaggaattttatcaaagttaagtgcataagctgattttagcttatgggaaaaactcaattcattttattatcttattttctttttctataagtgcttatggaaaaatttattcaaatgtgaccttaaaagagtaaaagaagtatgccgtgctgtcgtattttgactagaattccttgaagtcctatgtttatgttttccttatcactgttgagtaacaaatgtgactggatctttcttctgttgttttacattgttgctcctgcttgtgatgcagaaaa

SEQ ID NO: 19915 - DNA, 821 bp, Glycine max
  Intron number 1 from transcript Glyma16g26490.1 (locus Gly ma16g26490) derived from phytozome v7.0 (chr-ID Gm16; pos 30601067 to 30601887)
accttttattagcatcgacccaacagtaagtgagactacatgatatgcttttttgttgataggtttaaatatttttttagttttcataattttacatacttttcaatttggttcttatagtttaaaacatgctaattttgatctttatagttacatttttctatttaatttggacatagttgtgaaatcaccatatgtcgttttatcaaccatagcatattgggtctttgaacttctttcctttgtccttgacgacatattactcattctactgttcattggcaataaccttttacaatcacaatcaacaaccactcaaaacaattgttgcaacacaagaatcataactccaccaatgccgctcaaggcattgcagctgaagatccacaccttttagggattcttctctaagattgtgtttgatttagggagggagaagagaaatcttttgggtcctattcgtcacaaatgcaccttgctcgaaactcaagcgccatggaaagtcatgtctacaaaattccacagtaaaaagtctccgtcactcatcgaacaaacaaatgacattaacgtgatttcatagcgagaggccaaatagaaagaaaaaaacaaaaagaaaacgcgataaaaatcaaatttacatgttaaactgtatgtaccaacttgaaaagtaagggtcaaaagggtatgtaaatcttgttaatacatacaactttttatttatagaaactaaaagtaaataatttgcttacgggtaagccaaaaatttgaactttaatcactggtggtgtcttttcaggtatcagaagcaaggcttcacaacc

SEQ ID NO: 19916 - DNA, 700 bp, Glycine max
  Intron number 3 from transcript Glyma18g05830.1 (locus Gly ma18g05830) derived from phytozome v7.0 (chr-ID Gm18; pos 4460551 to 4461250)
caatccattctgccctaacggtatgcatctaatattctttccgaatagcagttttattgctgctgtttctttacaggtttgaaaggcgagatttgtaaaacactatttttattgtggcagatattgattaattagattgcttatcttaattttgtgggccttataatttcacgtagattttgtgctacaataaaaatagtgttttacaaatcttgtcatgtttgaatcacatatgaatcatgaagccaggactattactagctaatggagggttatttgttgctgattgttgcattaaatgtttccaaacctatcctagatcttcttcgtttatatgaaaaagagagaaaaggttccttcatgagatttagatcaaatagcatatggatggttagcactatccactccttttcttttgtttcccatgtttgatgtttcactaattagctaaaatggaaattgttccgctgtgctaaaacctgattgcaaattcaggacttctggtaaagtagtcattaggataaaaatttcatgttctgatagacttcccaaaggacaaccatgtagctaatactgcttgtttttgtttcctttgttctgatggctttgtgttgcttgtctatttcttttattgattatgtcctgtttactaaaatatcaatttccctccatattgcctgtacaacaataaaagggaggg

SEQ ID NO: 19917 - DNA, 863 bp, Glycine max
  Intron number 2 from transcript Glyma16g09740.2 (locus Gly ma16g09740) derived from phytozome v7.0 (chr-ID Gm16; pos 9549902 to 9550764 reverse strand)
acacttttaagagaagaaaataagaagaaaaaaatgtaagaagcttcttcataagctaaaattagcttatgcataagctaatttgtagaagttctctcatgtagtttctttaaacaagttaatttaagcttatagagaagctcatttcatttttttttcttcttattttcttctcctaaaagtgcttctgaaaatgttttaccctaacagaaccgaataggacttgatcattttacctcaacatcttttacattaacatagcttgggccaagggtgaattgttattagaactctgtttaattatgttttatagtgactgcatattaaattaaaactttttatatgtacattttaatgtaaagtagaaacttgtgtttgtttggttataattataaaagacatagtaaatgctaaatgaattcttaaattaatcagaaatctgttttttcttttttaatttttttccaaaagcttaaacgaattcgatgaatcttttagaggtttagtgttttttcatgacaaaatgctgaaatgaacaggctctgaaccttttgctatataaaatgatttctgtttatttcttttgagggtcatggagctttattatgttgtagtgtttactatagttaaatgttatttgcatagtggctctagaaaatataatggtattctgtcatatttgaattatctgcatggtatataccccttagagactcagacaagtgcttataacagctttgtaacatcaataagattttatgaggactatgcttgcttgaatgtttgtgagttagtcattatcaacttgttactcattgtctgtcatttgtgactttcctatatcatagagacctgctgctgag

SEQ ID NO: 19918 - DNA, 982 bp, Glycine max
  Intron number 1 from transcript Glyma18g00300.1 (locus Gly ma18g00300) derived from phytozome v7.0 (chr-ID Gm18; pos 48506 to 49487 reverse strand)
tgaaatcgaaaagggctcttcgttgaatttggtaggttttcattcactctcaaatctcaaacttttacaatacaatttcacgggataataattatttattgtgcaattgtccttctgttttataaatttagattgcgtgtcaaatatgttatatgatcatgccgctttgcagtttctgcggtaagttcctttcattgtgctgttcgtcgtcaatattatacgagggcggtgatgtgttctcgtcatgccaaatcgcttccagatccttcttttaattctctgaattttaattatatttttacttaacaattcctctcaagtctcacctaccgacccgacttatcttttagctgttcataaaacccttctccgacaacttgtagctgctgctgctgtttctctttcattttttttttgctaaggtgataattctctctccctctctctctctctctctctctctctctctctctctctatatatatatatatatatatatataatttcttttcctttatttcttcacctagtgattggtccgtggggatctagatttgcttagattagtgtttgggtcttggggcctgttttttaccatctggtgattggtgccactgcatatctgtctggaatacagaaacttgcttaatactctttttaacagtgaatgaaaggaaataaatattaccctttctgttttctggtttaagggtttcgttcaatcattcattgccctcgattgctagaataaatatagaaaaacgcaggttttgttttgggtttagttcagaaatggcaagatttgatcatttctggaatctggatgaattcatcgtgtcgactctgacaactgtgagtcttcagttttttgtttttctggcttttggttcaaagttgtactggcttgatgtttcaggactcaaggaatacaacatcctgatatttggaggacagattaaagagaaacatcgtggaggaaaca

SEQ ID NO: 19919 - DNA, 414 bp, Glycine max
  Intron number 2 from transcript Glyma14g12710.1 (locus Gly ma14g12710) derived from phytozome v7.0 (chr-ID Gm14; pos 11573526 to 11573939 reverse strand)
gccaagaggcagcttggagaatcaactattcagaagtatgtctcttttctctcttctacttatcctcctttaattttctcattctttcctcaaaagggtaggactgtacatgaagttcataaggtcatttgttgctgtatctctgattatatcaatagtaactcacccaaagtcaaacatgattacaagatcaagctgaataatgattatcaaatgatttagatttttggatgttctgttccatatggtcaagcacacctaattgtttcaaacctctatgttttctttggatactgatgagtgattacaaattgacaatccatcatattaatgcaaaaaatttggagtcttaccataaaccaaggtttaataacagcttcttttgttctaatacgaacagaatactctgccgcc

SEQ ID NO: 19920 - DNA, 347 bp, Glycine max
  Intron number 1 from transcript Glyma18g10040.1 (locus Gly ma18g10040) derived from phytozome v7.0 (chr-ID Gm18; pos 8838529 to 8838875 reverse strand)
caggtacccccatcacatttttctcgcacccttttgcgcaattttgattttttcgcgggtaattcgtcaccccctttgtggatttcgttgcaatgcaaagacccggttcggtttatgtgcaaacgatgaaacccactttcaatattattatgtgaaaaattttatatttgagggaaaagaatgaaattcagttaatggggtggttggaatgtttgaacatgttaaaagggttgtaggcattgatattattgttgctttgttggtattattgctaatactactgcttgagtgtggctaatggaggtatgggtttgttgtttattttgtattgaacaggagtcggtaaa

SEQ ID NO: 19921 - DNA, 995 bp, Glycine max
  Intron number 3 from transcript Glyma14g07470.1 (locus Gly ma14g07470) derived from phytozome v7.0 (chr-ID Gm14; pos 5659068 to 5660062 reverse strand)
ctggcccttcagaggtatgaaaataaaaaattcagtgtctcaaatgattcaattaaatctacattaattttggttcactgagctatgactgaatctttttctagtttagagatcataacagactctatatcttaatgttataattaatgttcagttctcacttattatttgactatggaatcacggttgagatggggtttaagtaacctttatgctttgctttctaatatattttgttgaaatctttgataatactgatattttgctatggttttttgataaattctcaaatgaattgattcatgcaattttgtttcagtactggcctaatggaaaatggccaaagcttaaaggtttaagaaaagaattagttttgaatatcaaccactaactaattttatgaagatggtaactcagaaagaaggcaaagtgactaaaacatttcctgttaagtgagctagaggttttcctgtgactctttatttccttgctgaatgatggtgaagttaaaattattacatgtagttattgccttttaggtgtgcaattttttttcttactcgtaccacagtcctgtctttcaataattttgtggtgtaagtgcactttaaccttcctaattataactaaaatgacatctaaaatggattgattagaattttttttccctgatgatttttttattattaacagttaagagaaagttagaaatgtgagaacctagaggataaaatccctaataactaaagaaattaagaccaagaaacacacaacacaccatgccaatttctctttaaatcttatgacacactcctcttaaaaaaaaaccattagcagaatttcaatgagaatctaggaaggccacttcatctgttaatcaacattcatctgtttgaccttgtttgtggttaatttgtatgccaaaaaatataagaaaaatgtgacacagtgattatgtggtttggtctcatggccatgcaggtaattgttcgtaa

SEQ ID NO: 19922 - DNA, 799 bp, Glycine max
  Intron number 1 from transcript Glyma17g05640.1 (locus Gly ma17g05640) derived from phytozome v7.0 (chr-ID Gm17; pos 3959625 to 3960423)
ctcgagagggaaatcacttttctcgaggtgggtttttttcttttctcgtttttgcttccttttcaattccacttccctcctttacaccgttctggaacttcaactctcgggttttgagaatgttgaggttttgaaatggaggtaatgtgactgtaacatgcctttttgtactgatcagagatggcgaattggagtggcattttcgtgatcgctacttagctttcaccatgaaacatagtaactaatgagtttatctctgccagggttcctgagtagttagttaggttatctatgactgtgactttttttttcttttttgaatttggaaagaagtgtttgaaactttcaactaattcataacctcttccagtgatcttctgcctttggaggttttctaacggtttgattttgatcattaatttactcatttactgtggttaatgtaaggtggtagctaaccctcactgctaaaaatgttatttttattggcagaatcttttgtctgtggatgctgattgattgtttggaaacaataatgaagtggcatgggtggtttttcactcacatatgcgaaacatttttgtgtaattattatttgttctcatcccctctcagtaattagatgttagagaagtagcaacttgtaacatgatggcaccgtgattgtacagtcaaacatgccaatttggattaagtttgtgcagtttctgtctggcatcttttggtattaaaatcaagtttactgacaattttgcatctagcaggaagaattaaaatctgttgagggccttcaaccagc

SEQ ID NO: 19923 - DNA, 537 bp, Glycine max
  Intron number 1 from transcript Glyma15g42960.1 (locus Gly ma15g42960) derived from phytozome v7.0 (chr-ID Gm15; pos 50383994 to 50384530 reverse strand)
gtgtatggaaactttgacttcaaaatattacattaattaacaaaccgcaagattcttcttgattttcatgtacacataatacgtttttcaacttttaaaagaagtatagattttttttatgaccatgatacatatatacttaatcttagcctagtattaaccggtatcccttgtccttttttataaactgtattatcaactcatcatggactactatttgttcatgatctcaactaatatgtagttatttacatgacacaaaagtatttaagtttttaaaattatgaaaaataaaataacactttattatgcattatgtatggattgatgggaactaaaaatcacatggtggtctcgaattacttaataatttttttatttttttcataaaaaaatattgttaaattgattgttatttgaaatcaatttcattaattttatatttttatggcttgtgttacttaattaggattgatttttggaatgctttattgcatgttagagaacattatttaagggaaagagttgtttttttaa

SEQ ID NO: 19924 - DNA, 498 bp, Glycine max
  Intron number 1 from transcript Glyma15g10470.1 (locus Gly ma15g10470) derived from phytozome v7.0 (chr-ID Gm15; pos 7588312 to 7588809)
ctcggagggccgacacttttgagaagattgataaggtaaagagcatctagaactcgatgaatagtacacttaattttgtttccaattttggtttggtgatgttgctgaattctgatatggtcttgatgtctagatttgattttttgacaatgttgagctgttcttatgttcttcattgctcctttccttgaatggaggatgttgatgttattgtgtttctctttggagttttaacgtagtatgaggggtttggctctaaaaaatgactttttgttgatgttgtatagttttttgagtgcaagctatggcaacacctaaaagtagtaatgtggattttagactttttattttatttggtggggtttgtgattaaaattgaaaagccttccatcaaaatgtctaaaagttatttctcctggcgacttgcctggctattattaaatctcttattgatgcttctgttatctttcaatcagattgggcaaggtacatacagca

SEQ ID NO: 19925 - DNA, 728 bp, Glycine max
  Intron number 2 from transcript Glyma17g16000.2 (locus Gly ma17g16000) derived from phytozome v7.0 (chr-ID Gm17; pos 12694286 to 12695013)
ttgcaatcaaaaggctcaacactcgtggcttccaggtatatatatatacatactctcactcgtttcaaatataaacaaataaaataaaaactaagaaagttagttaatcagcttagttgtatcaatcttaattaaaaattaagtttttttccacttatccttgattgaaacttgatattaagaataaaaaggaaataaaaaggagttattagaaccaacacctcaataaaataaatgatattttagagataataatgaagtaaagttagttaatattttcttatatttgagagaaaaaaaaagagtgctttttttttttctttttatatttgagatgggagggagtatgatatacttgctttgcttctttttatccttcttcgatttctcttattgtttgctgttgtgattgctttgggatccattactgatagtagttacttaacaagttaacatgttaagacttaagttgctaacaataatttacagttctgttcaatgagtataggaaatgttggaagttatttgcatctacattgttgtatttgggccatcaaggataagatgattcttaatttctgcatatgacttaaatggtcctgaagcatatcaaattctcggcattgttattacttgtttgtcactgagctgtcaaaatattgtattatgctttaaaaatatacctgcaatcttatggtgctctcttttgttgtaaagggtcataaaga

SEQ ID NO: 19926 - DNA, 720 bp, Glycine max
  Intron number 1 from transcript Glyma15g04870.1 (locus Gly ma15g04870) derived from phytozome v7.0 (chr-ID Gm15; pos 3441877 to 3442596 reverse strand)
gcacaccaatcacaacgagaaacatactgctgctggtaaatttcgccaatggatcttcattagttaatgttctcatgcattttactaaagcagagatgaaacaggttcacccatgacccattgtttgtgatcgcgttcaaccttcaccattattattaaaaaaattgaaatttgggacgtgggtttgtcctgaattgatcaagggtctttcttttcatcgatgcaaattgatatttttttttccattttgtaataattttttcaaggaaatattgttacgttctgacatgtggaagaaaaatatgaatttggttttgatttatttctgtttaataatgcaatttttttcgttggtcaacaataacgttctgcgtcaccgcttctggaaattttagaatgagttttgaacgtggattgaataattttgaagggactcaaattgttcgtgttccataaaccaaaatatgggacttttttttcaaaaaaaaatttgttgttgttgttgattgaatgatccgatctataatccaaagtggcgcttgccattttgtgttttttttttcttttaaattttgatggctgtagggtttttattatttatggtattggtatccttggatgaatttacgtgacgttttgtttgatctctctccctcacgtgatattaatattgtatgtatgtgtgtgtattttttgcagataaggtcaaagttgatttga

SEQ ID NO: 19927 - DNA, 529 bp, Glycine max
  Intron number 2 from transcript Glyma14g21490.1 (locus Gly ma14g21490) derived from phytozome v7.0 (chr-ID Gm14; pos 25060082 to 25060610 reverse strand)
gtatccctattgaggtttgcaagtgtgtaggaatctgaagttaagaatatttttaagaatctaggataagaagactactgttgttgttgatgctcattttaatatataaataatagagtattttatactaaggaatatttttcataatatctttatttgatcaagagttcagtgctaatataaaagggttagtgctttggtctataatatctttagttttgtcaggttgagccagccatcttctctcttttcttttgtccctaatctaaccccgccctaaaccaataattctcaactagtcctcattcctaattcatgttggagtgtctatcttcttgaagtaattttgaagggatgatgttcattttcatttggtttttaactgatccgaatgacatgtcggatctatgtagccgaccttatctattgggacattttatttttgttattgttgatgtttattttgactaatatcatttgtaaaatcttgttaggtgggttaatcatcttgatcctactattaaaaagg

SEQ ID NO: 19928 - DNA, 1004 bp, Glycine max
  Intron number 1 from transcript Glyma17g21260.1 (locus Gly ma17g21260) derived from phytozome v7.0 (chr-ID Gm17; pos 20601662 to 20602665)
agaccgaagtgagtgacaaagattaattttaacttttttattttttattttgttaaagctaactaaagtgatagtaagtgataatttcagggataaaattaacccattagagaagagataaacacaataacaaattatgactcaaaataataataaaaacaaaacagaataaaaatagaaatgagaagaatgaaaggcatattcattgagaaaaagaaagtacagaaaagaaaataattttacaataattacataatcacgcaaaaaatgaagagaaaaccagaaaacgaacttgtaataatttagaagaacaaaaaattggttcacaaaatatacaaggcctccaaaaaatgcgcaagctacttttacttacgttcccatattttatcctcttgattgtgttgccaaaccgaagtgccaaaatgcaaattataaaagccaatttaagctgaaatcaacttgggtcacctctatattttaatcacaatccttaatcccccagggctagtgattgagtttgcaactcggttaatcctgtgcaacctctgcaatcaagactttctaaaatacgcaaatcccccatcttcttaggtaacttagtaaggcttatgcagtcagagacgtcaagaaattttagtttatgaaggcttgtgattgagtctggcaactctactaaactagtacaacaagtaagccttagtaattccaaattcatcaactttctaattattttagggagcacagaaagcttatgacagtttatagtagatagcttctttagggaaataatatcaaagagaccaataggcaattccaccatatcatcacagtagtcaatgttcatctccacatttggcaacacttttgaaacttgaatggtgatattattgaatgcttcatttagattgtgttcgaaaaagagaaagttataggaagtattcaatgttgtgtttttcacaagttcgaaagcgtcctttcgttcacttgttctcgcttacccactc

SEQ ID NO: 19929 - DNA, 839 bp, Glycine max
  Intron number 1 from transcript Glyma14g05550.1 (locus Gly ma14g05550) derived from phytozome v7.0 (chr-ID Gm14; pos 3966702 to 3967540 reverse strand)
tgctggtaattcatgtccttttcaacctatatatataatggaactatatatgcatgctttactttttcaataatatctctatttttttttcttggcttacttatttttttccccttgttttgcttcaaaggaaaataaacagagatagataaaattttgaaatttaaattaaaacaaaaataaatttttagttttttagagatcaactttgttctttttattattattttacttcttttttaattaaaaaagtatcatcacctatttttttttcttttctctcgtccaaatatatcacaatttttatgatataatttttttatgaaacacctctctttaatatttgaattcaatcttattgattatatttgttttcactcttataagataagaagatatattttacataataataattaagtttacgactaaatacatataattaatgtaaaatatttaaatttaagaatgaattctaataaaaaagtaattttgtgaaaaattaatctaaaaaaataatgtcactttcaaaagaatatatttaaatttgatatacaagattgtacatatgtagggttacatcacataattttttatcaatcttttcagctatctccgcactgctacttcctctttgcctctcctctgtttctcttctcttctccgtcaaacaaataggaaaaactaaaaataattactaatatgttgtctctcctctttattttttttcattattttttttttgttaaaatctgaaatttaaaaatgaagcttatgagtccattgtcaaagatataattatgcaaaccatgatattggttgcagtctgtgataccact

SEQ ID NO: 19930 - DNA, 564 bp, Glycine max
  Intron number 1 from transcript Glyma17g08360.1 (locus Gly ma17g08360) derived from phytozome v7.0 (chr-ID Gm17; pos 6199265 to 6199828 reverse strand)
ctcttattggccaacctagcaggaactatctttgggtatgcctatatcttctccttttttcttaaatatgatcatttctctttcgttccaaaatgtatgaacaaaaattatgagaaattgtggattgtagcacaattacggttgcagacaccccaaaatccttgatgttgcggccaaaattgcaatcaaaaaccaatttttaaaaacctgcgtatagatattgatatatagatgaaacaagtatggtgtatggaatgcttggtataaccatgttccaaaaacatgtggtctggagttttgatcccaagaattagtcctttgttaaaatgataaaagatgatttagtatgtaagtgctctacatatagagcttatttctaacaagctaatattactcttaacatccttgactcggatggaattaggttgtgtcaaaaaaaaaataaagatatatagatgaaacaagtatgttgtttggcttgtgaatgtcttgtttgtgatttgctcatttcctatcataatttggggtcattatggtccctagatattgtccaggaagaaccat

SEQ ID NO: 19931 - DNA, 468 bp, Glycine max
  Intron number 1 from transcript Glyma19g36480.1 (locus Gly ma19g36480) derived from phytozome v7.0 (chr-ID Gm19; pos 43755472 to 43755939)
gcaaaaccgttactcaggtttcccttaaacctttgcgatcattcttactgttattggttttggggttgtagagacttgctttcttcaatgctcattatgcataatctaattatctatctttttacatagtctttcttcgtgttttgattcattcattcctagggttttccttgttattcattacattcttttcttatattgactcgttgagttccgattctttcttctgaattcaatcgtgggaatgttggcattctgggatgagttatttaccttggcattcagttctacttgttattttattgtcttttagttattttgtagaattatttctgggaattctctaatgcttttcctgttgttactgtttattgagttaaaatggaacttgtcttagcgtatgagtgcgttgtcggtttgattgaataagcaggtaaccctggcacatctcaaggacaagcctgcgcc

SEQ ID NO: 19932 - DNA, 1003 bp, Glycine max
  Intron number 2 from transcript Glyma19g33010.3 (locus Gly ma19g33010) derived from phytozome v7.0 (chr-ID Gm19; pos 40680699 to 40681701)
tttgcgggaagatcgcgtatcaaaatccgaaggtgactgtctagaaatatctctgttagtttctggttgatttggtttagtggttgtgaagtgataacgggtatttttgggtgttctgaagtaattttctttgaatgtgtatcaatggatttgcaagatgactgttgtgcaacaagtatattagaaatttgttttacttgttctttcattcttgcagctgattttgtggtttttgttcactcttaaatttggattaggacttctaccatatgttccgtaataagtgtgaaggttgctctgtgcattagatatgatttggtatgctctgcatgaatttgatactgaaatgtatatggaggtatctgcatataacatgctttaaaatgttatgcctataattttcattctttgaagtaatttttgttttcacataatagttaatgaaaatgaaaaacaaataaggatttggaggagtatcatttgtttagatgttctccaaaaggaagcatggtcactttaaatagtagctgtacttgtatcaaatgtgtatgcatgtcggactcttcagaaactcctgcattttatgtttttttttttacttctgttttttgaacttttataattccattacaattagataaaaacaattaatgtttcattatgtttacaatgacttatgctaactttcaaaacatcagttttctcttttgatttaagatttatgtttttatactatttttatcaggctttgttgttgaattatttttgtagtaatttttgtgtttattaatgtttaaaatttgtcatatctctgtgtcatgtgtcatgtctgtgtttttaggattctctaacctttgtcttctggaaaagaattgtataatgattgtatgttgtttgtcatagcatttatttcattccttcaattgatacatgactaattactttgttctgaacatgacatgattttggatggcaaagtaggtagttggctgcctcattgaac

SEQ ID NO: 19933 - DNA, 785 bp, Glycine max
  Intron number 1 from transcript Glyma16g13570.1 (locus Gly ma16g13570) derived from phytozome v7.0 (chr-ID Gm16; pos 14653357 to 14654141)
tcctttgtctctacacaacaagagtagcaaaattggtaggtgacacattctttcttgtgttatggaacagaacataacactaatcagttattcaaaggactaaatttaagggcaattttattaggtaatttggtgggattctccaattaaaacttgagtctcatctccataacccgcataattgaggtcaacattaagatcaaactctaattttgattaaagagtagcataaaaaaaatacttgggcctgatttgtttactattttcaaaagtagttttctgttttctaaaatttgtttgtacctacatttgaaagtatttgtctctgaaacattctgatttcgtaaagtttgtcttttgagcacttgaagaaaacaaaagaggataagaaaatataaatcagttttttttttaaacacttgttctgtaaacaagttttaaaacctactagattttggatgagaaatcacatgtcactaaagaatggtatcttaattttatccttcttcaaatgcatcatatatatatatatatatatatatatgctagttatttgcctcttttttcattttctttaagagggttaatttttttctacaaaatggaaataaagaaagaatgtctggatcatttgaatgttacaagaaagtaaagagaatttttttttttgtctcatttattcctctaattgtaagagtttttggcagtaaagagaatgttttatatatgcacattaagcatggtgatctaattggtgaactgttttacttatccagaagacagtg

SEQ ID NO: 19934 - DNA, 1042 bp, Glycine max
  Intron number 3 from transcript Glyma18g46140.3 (locus Gly ma18g46140) derived from phytozome v7.0 (chr-ID Gm18; pos 55913626 to 55914667 reverse strand)
ccagcttggcacgaaaagtcttccgtctttttaaggttaggttctttttactttccaagttttgaaacatgctttttcatcgattcattttttttttcttttttgtcatttgggcagtggcagttttttttaatcagccaaataaaataaatatattcataaacggaacctgtggtactaatagtcaaatacacacaccctcataaacagagaaatccccacatatgtcatcatggttaaaaaaatatttatgccctaatgacaagcataaataaaatataaccaggatttgcacaaaagagaacccatctagtcatctttgatttgttctcataagatataccccaggacatgtaaatttgctgcccttatcctactgcatacccaatagatgtaaataactatcatcaacaaataggataaccaatgaatccctgacctcaaaatctgtgtcccaacaaaaaaagtgcaccatcagagagcatcaatcctgcttgcacctcacctcttgacagccattgaccacgtttttaatactcacacacaaataatctagcacaccataaaactccctaccaaaatctatcctgccaaggtccactcaccatgtacaaatgcaccgttctcatgaccacaggccacatgaattgaccaccacctctgcacttctgcatctaggtagtggcagtttatactgatacttctttgctccattttccttatgtgtatcccctttgattgatttgtttataaaagatgagaaatctgaaatatgcatattttcttttttctttctttgggttctgggggacataattggaaaagggataaatcaaagaaagtcaaatacttcatcttttggcataaaattttgtgaaaggtaggcccgctgtggtggtgccacaaggtgcaatggcatgtttatatggaagaattttggccttctaccatgttctgccatctgccactgataacactgcttgcatattaattaattcatgcaatgaccatcactcttcactctttaattcgcagtttgtca

SEQ ID NO: 19935 - DNA, 676 bp, Glycine max
  Intron number 4 from transcript Glyma20g02150.1 (locus Gly ma20g02150) derived from phytozome v7.0 (chr-ID Gm20; pos 1722840 to 1723515)
gccgaagcaattgtcccttaataaagttggccacggtgagctttttatattctgatactaaatgtcttattttgaagtagaaatgaattaaggacaaagcttacatgcaattgtttttttgcttttgatgttatcctcaaatcagaattagattttcatctcaataattctcataataatgaggtgtattaaaggttagtatagtgaaacttcaattctaattggaaaacaacactataagaaactgcttgtaagttttgaccaagaagaaatggggtactctctgttcatataaaggttttaaaatgcagttgtggttttattgtgatccttcatattgcgggaaatagtgaacaaatgaagccaatgtggtctcagaaacttccaaaatctagatgttatggttgaaattgtggttgtggaccgttttttaaaaccttggttcacatagcatatagtagaattagttagtttatgacagtgggggcgctacttttctcagcgtaaactttttagtcttttaactttaatggagtggaaccacctgagctattgtgctgactggtgaatgcatgagcttgagagtagcattgttccttctgaattaatcctattattttttaatctattattttttttgtggctggggatgtgctgtgattttgtgcagctcttc

SEQ ID NO: 19936 - DNA, 826 bp, Glycine max
  Intron number 2 from transcript Glyma17g16740.1 (locus Gly ma17g16740) derived from phytozome v7.0 (chr-ID Gm17; pos 13535161 to 13535986)
tgagccttctacctttctttctttcttcaatcaaggtaaattaacttctcagtctcctttcccaaacatgcacatcactatctgcttgtatttctccatcatcaacgaattcttcagatttttcataccctttaactaattctgatgttttttgatataattcgaaacaagattcaaataatatctgcttgatcaaaacaatatcttatcattttgatttagtttaaggttctatttcaattttaggaaatcaaagagtttttttatctttcaattcttccgaggttttgattgtctcctttgttcgacttttaatttttcagtgtctcataataccaatatccaattaatttctaagcaagcgaggtgaaggatgatgcaaatttcgtcaaacatgtacatgcctgaatttgtaagcatacacaaccttaatttcaagcaaactaataatcacaaaatagatataattacttaccaatttttcttcacattaacacagggaatggaggaccccactttgtttcatcaataccctatggattcttcatcagcattattccagctcgaagatcttgactttgagtccttctccgcatccccaaagaactcttcctctcacaataagcgattattcaactcagaaagcacacaaaactctttccacaaaagtcctcatgaacaatattctgttgccccaccaagaccaaccaagcaaaataagactgtgatgagcactacttggagtgcttacaacgctcatcaccatcatcatgacatggtggctccgaaagcttcttcttcttcgtcctccaaaatcatctctttt

SEQ ID NO: 19937 - DNA, 1009 bp, Glycine max
  Intron number 1 from transcript Glyma18g45040.1 (locus Gly ma18g45040) derived from phytozome v7.0 (chr-ID Gm18; pos 54794660 to 54795668)
cactctctctgcttcttcgctttacctcactctcaggtcattttttttctcactcttctcacttcaacccacaatttttatgccatctcacaccgtaaaaaattcgtccttttcacttcccccacattgttcccattcttgtcgacgatttccgccttctgggtatttcgtaattgtagcggtttagttgtgacgattcgaatacatgataatagtatatatatatatatatatatatatatatatatatatatatatatatatatatatatatatatatatattgcttccttggaatgtttggcaatgcactttagattattccggagttcaaaagctttccactttctaccaattatatgcatttagagttaggcatatcatgaaaaggacctaaaattgaatgattgaactagttagcatctttctgccactaattgtgtgagcggtcataaacttgattttgagcgatcttgattttaggtgaaggggaatttgaagtgaagtgatttatgattggaagtttttattttggaagtaattttgtagtgaaagttagtatcaaaatttcaacttagcacagaagttgtatatatattttttaggagcgaagttaatttttaatcattgtaactaaatatgcaaaagtttgccaaaattatgttttgttccatgcaaatctgtgtttcgtgagctgaaatgctcccccatactataagcaattgcatgtgcttgcaatcggatttgatacttgattgatgctccgcctatgagtatattctttatgagcttaacttacatgatttgataaacttggtggtcttactggtctgttgggttaagttgttcttagggtagaatggtcctagtgctaagtattactatttattattgtcttgttaatgcttaatttagattccttgttattggcattttctggcttgtttgattgcctgttttgattatatattattgtctttggtaatttggattttctctggggtttcag

SEQ ID NO: 19938 - DNA, 462 bp, Glycine max
  Intron number 2 from transcript Glyma17g00440.1 (locus Gly ma17g00440) derived from phytozome v7.0 (chr-ID Gm17; pos 142174 to 142635)
cgcccatatcaggtatataatttgaaatgaaatgcttaaaagttatatgggtacctaagggtgcatttggtttgctttctgtcatgaaagtatctacccttttcaaagtatgtatctgttttcatattttgcattgtaaatcctttaaaatgttaaataaaatgaaactaaggtagcttttttttgtaattattaattaaaacatatgagctgtgaatgaaagcaataataaaccaaatgcaccctaaggtgttgtttggtttattttttgtcttaattgtcaattcatatttcccccctaataattagaaaaatgtttttttatttttattttgtttctgttttttaagatttaaaataaaatgcagaagaaaatgttatcttatgttttgttttgccatccttctaatatactttcttttcctatgtttttattacattctgcttatcaaggttccggag

SEQ ID NO: 19939 - DNA, 693 bp, Glycine max
  Intron number 1 from transcript Glyma19g02020.1 (locus Gly ma19g02020) derived from phytozome v7.0 (chr-ID Gm19; pos 1735277 to 1735969 reverse strand)
caacaacaacattctcatgtaagttgggttctcttcaaaatttgaaattttcttctcaaatgaaaaaaaaagaagaactaacctaactacctaacgtcaccgtcactaattgccatctccgtcaccgtttgcgccgtctccgatgactctgttgtgtttgctgttattcaaactgacccatgttctcaaaatttgaattttctgctgctatattgttagttctgattttttggttcttttggtttttatttatatacaaaacttagatacagtttcttaactgtttttagccttgttctctgattagaattagaatttgactcttgacaatttgcgtgataaaagtttgtatcaaaatgtcagcttaactgtttttagtattgttttctgatcagaatgaaaatttcactctgatgattgtgtgataaaggtttagattaaatgtcagcttaactgtttttatcattgatctctaatcagaattaaaattttacttttgacaatttgtgtaatggaagtttgtaattttgtattgaatttccgcatgggttaccgatgattctgattggagaagagtatggaaagtagctttcatattgtatctaagtttggtgttttgtgtatttatgtttatgagattgagttttgatgattgtggttcttctagtaagggtgtgtttggttgttcaggaa

SEQ ID NO: 19940 - DNA, 815 bp, Glycine max
  Intron number 1 from transcript Glyma17g34980.1 (locus Gly ma17g34980) derived from phytozome v7.0 (chr-ID Gm17; pos 38941101 to 38941915 reverse strand)
attcttcttctaacatagttcctcccccaacccaggtgagtcttgggggttaattttgtggctttatgcttcactcttttagttgtttgacctagaaaaatgttttgtgtttggtttagttgaatttagcaattttaggggattcttaattaaacccttttttttttttttatgttctgcctggagtttgttgtttttatttaatataaattttgtacaacttgtgttgctttgaaccttcaaacaaatcgttcggtttggtcgagagtcaaagacttcgactaatctctcgaggtactgagatccaattaagggactgacatcttccgacagatgtttattccatacatacagacctgatgagattgaacttctgaccacatggttagagactaatttcttgaggtactgagatccatttaaagggcccacatctccctacagatgttatttcatacttacagacctgatgagattgaacctctgaccacatatgcttaatggacatggttatctgctgattgtaccaacttgttgttaacaagtttacccttccaaaaccatataaataatttcatccctcccaaggataatttgtatggattgtttgttaactcttgttgtattcttaatccaacttttatttataagagtggtgtggtgatgactgaagtacttaattgattcattgtgatggctcagttagtcagttcccatgttaatgagtaactatgctgaaaatttaagctgtttggtgaaggtttatgaatggatttatgtatatttctaacatgaattgatgtgtttgcagggaa

SEQ ID NO: 19941 - DNA, 462 bp, Glycine max
  Intron number 1 from transcript Glyma14g13490.1 (locus Gly ma14g13490) derived from phytozome v7.0 (chr-ID Gm14; pos 13048297 to 13048758 reverse strand)
tctgcttcctctccaggttctatgaaaattcttactttttttctgatttattttttggtttttcgcatttatttttttcggagacaatcatgtttgaagaactgtcacatactaaatgtagatacttttctcaacaagaattcgaaccggatgctattcttacgtgctctctctgtcacactatctgttgtttctttcttatgatggagttggtactcaacagtttcaaattcaatacaagcacttagtgcagataatctatagtaaccatttttttaaaactcatttctggtactggtctaatgtgttttattgtgtggatttggatcctacccttttgcttaaactctattaacttgccattaatggtttgaaatttgaatgaatagtagtacgtattttgtttctatgtatttgatttgatgcttagtgccatatactgcatattgatcaggaattgtg

SEQ ID NO: 19942 - DNA, 963 bp, Glycine max
  Intron number 1 from transcript Glyma18g44580.1 (locus Gly ma18g44580) derived from phytozome v7.0 (chr-ID Gm18; pos 54311970 to 54312932)
gagggcttcccacttttcttcttgttgatcgtggaggtgaaattctcgttagtgctttttagattcttcgccactttgtaaaggaatgaaaaaaacaaatggtagtatatgattgtgttaactttgaatgtgttgtgcattggaattgctttttgttactacttattgcatgagatggaaagttggggttagttatgcgatcaattgaataatgaatagccggttatctagtattaagtttggaacattgaggtttatttaattgttggtactagactctaacaagttcactcggagttgttgcaaaagatgttgcaaatgttgcatttaatgttcaagccaataatgtagaattcctttcgtctttgagtttatgggcgtatttgatttctattctcaattgctgtttttggttttaaaaaaaaaaacaactaagcaaacatatgcttacaccaagttcataccttataacatgcagcaccattccagatgacccatacccttgagctatcacaaaacagaagagaatgagaaaacattttcctactgtttttgtttttttatttaaaaagcttgttttgaaaacaattttaaaaaattaatagattctggatgagaaattgattgccgagtagcattaaattattttagaaaaatagtttttaaaaccgagaaataagaaggaaatcaagcaggccctaagtttcaccctccctctcttttttgtcttgggtgtggtgatgccgtagcaataaagtacactattgtaccagaaccataacaacaaaaaaaggacatgttttctggtttgaatacctatgatatttctagagtgtatggtgccacgctaatgacatctatgaataggttgttaggaacactaccacacaaaaatggctcagcccttaaattttttttttctggtcattttggtagattgctacttcactttgaaggcgtgga

SEQ ID NO: 19943 - DNA, 638 bp, Glycine max
  Intron number 1 from transcript Glyma18g01420.1 (locus Gly ma18g01420) derived from phytozome v7.0 (chr-ID Gm18; pos 752311 to 752948)
ccttctccactcccgcagaggctacttgttgcgacgtgagttttttttttttttttggtttcgtaatctcaactttttctgttttttttttgttcggttggttactgagaaatggtgttgtgctatgtttggtttttggttgttgagagaatgagagagagagagaggttagagtgtccgtaactgcattttgtttcgattttggaattttagaatttagaattgcgttttctgctgcaacttaactattcggttaaaaacgttcatataattataccatgaactgaactgaagaacttctcgccgccttcattttttttttcattccgatttatcgggttatggattcctttgccaaagttctgaaaatttctataattcaaactcacgttgtttttgtcgaggatagcaatcacgcatgggtttcgatgtcgctggtaaattcaccaatgttacggatacttttttttttttttttaattttaatttaagatttatatcaatattacgattttgcagtttcttctccgttgttgagtctgtggtgacttgttatatatattggtatttatttatttaattttaaattttctgtgattccagggtaaccctattcgtgcgcttggagaatctatctc

SEQ ID NO: 19944 - DNA, 358 bp, Glycine max
  Intron number 2 from transcript Glyma19g06340.3 (locus Gly ma19g06340) derived from phytozome v7.0 (chr-ID Gm19; pos 7217604 to 7217961)
gattccttgcttggaattcgagttggaggtcaatttcttgcaaacacttttggtttaatcatagattttcttattcttagtttgtttcaacttattttcaagaaataatggcttctcttgctagtgtgctaaaagtacttttggaaacaaaacaaaaaatggttgtgttccaaaatttaaatttatctaacagatttttctatttgagagttatcaatatgtatcaaatctgttcctatctctgaccaaattttattcttccaaaacaagcacttggttttgagttttgatggttgatctgtttgtttgcagcacggtttcgtgtaccgtgagcacaacaggtcaccaggatactacg

SEQ ID NO: 19945 - DNA, 720 bp, Glycine max
  Intron number 1 from transcript Glyma18g42520.1 (locus Gly ma18g42520) derived from phytozome v7.0 (chr-ID Gm18; pos 51650552 to 51651271)
tagtcgagtgcaaagtgaggcactacaaattcaatgtaagtaagccattaattcttttttggcctcgtggggatatatatgctttgtttcatgcttttagagtgcaggataatatacaatatgtattcaaaatgtatatgcaatttatgatttattcagcttttccgatcaaaatatgtatagttttacttaatttaatacaaagtttatatcaagttctatatttaacctggagtatatgtgatgtgagagctgttagatcagggtattgacattaatgagttcaactgcactgtctatatttgtccattgtcaagccacaaggcctacaaaagtaatatcttatcataatcacctagaaatagtgtatgatcataagcttgttggtaaaggtggtggtaggcataagccgtttctcttgtagtgtgaattcaattgcaccataatattatttatcttataaaacattatgaaaacataaattctaattttctatttctagatatgtgcagtcatttgagtattcttaattattagtcgtcttgaagctacaattttcacctaaattcagtcttgcatgaatattgaatacattcgaagtcacttcttccaagttccaaccactataaaattttactctagacagatggttcaaagggcctaggcatatgcttgattttggtaatggatgcaggtggtactgaagaatactactaggtt

SEQ ID NO: 19946 - DNA, 354 bp, Glycine max
  Intron number 2 from transcript Glyma18g42520.1 (locus Gly ma18g42520) derived from phytozome v7.0 (chr-ID Gm18; pos 51651385 to 51651738)
tcaccatccactggtgagacttcatttttaatttgcttcaagttacatgcacgaactgtggaaaaacaagaatagtttaatttctctctaccatttgcataatatttttttacattatcaatcaaacagaaataatcattaatataacttttaaaataattatcataaaaattaataataaatttatcatgtattataatttgtgattaaataactgtataaaaactttttacactatatgtgcatgtaaaaagtaaaatacaaagatatgaaacatattataaatatattaaatgttgtctatacaaaataatcttgaatgctaattggaagactacaaccatcttggcaggc

SEQ ID NO: 19947 - DNA, 948 bp, Glycine max
  Intron number 2 from transcript Glyma14g10260.1 (locus Gly ma14g10260) derived from phytozome v7.0 (chr-ID Gm14; pos 8428396 to 8429343 reverse strand)
ggtcttggtgcctctggcatcattcaggcgtgtgggtacgtctgtttcttcctttcatggcattaatacggaataagttggattcggatttgttccagtcaacaaattgaaacagatgaacgaaattcaatttgctcatattttatctttataaatcaaacaaacttaagtcctccaaacttcattcaatggtatttgtgaatgtgtgaaattgctccctaaggacatggtttatagtagctgaaatcctattttacttggtgaaaaatgagaaccataagccatattaaggagtaagataaaataaggtagcaatcaaataacggattaaataagtttgggtaaaatatgtttttggttcatacacttttagctaaactttatttttttaatgtttgtagttttaaatgatcaatttatttcctatattttaaaaaataggtgcatttagttcttagacattaatgaccggggaatcaaatgaggattatttacttttttaaaaaaaatacaagaactaatgatcgatttgaaattatagaaattaaaattaaatttgattgaaaataaaggaaccaaaacatattttacagaaacctagcctaacccacgtcaacccaatcgagtcaggtcaaacaagtttttttgtttttttttcagattcttgtatttaggagttcaactcaactttaattactagtggttgggataatgggttgggctcaaatggcccgtttgtcttctaaaataattgtttttggactttgttctctaattcttgaaaaatatttattttgttctaaaattgaacttttgttttttggtggtgcacatgatgttgcatccacaaattaatagtttacattcatgaaatagttattgatttgcccttcccttacctccactgtatcagattcactgagatacacctcagcattgtcagtgggg

SEQ ID NO: 19948 - DNA, 466 bp, Glycine max
  Intron number 1 from transcript Glyma14g10260.1 (locus Gly ma14g10260) derived from phytozome v7.0 (chr-ID Gm14; pos 8429459 to 8429924 reverse strand)
gtcattatcggtaattataattctcattgttttttgcttcattgttttcatggaaggaatcaaatcatgtcgtaaatcgtttggaaattggaagtgtctcttttttttctctttcttttatttgaaaagttgatttgagaaagaaaaaaaaattgaaatcaatatttgaggtcaaatattgactttatagttccgactttaatatgtaggcccaaatagatatgcccacgctaaagttagacactgggctggaaattaaattgatgtaggaaaggattgggacatattagaaaaagattaattcgaaaaaaatatagatttttttaaaaataaattattaaaaaggagtggttgatttgcagaaaaatcaaaggttatatgatttaatgaggaagttttattataggtgtttgaactttgaagattgaagcaaacattgacaaaaattgttgtgttgtgacaggtg

SEQ ID NO: 19949 - DNA, 893 bp, Glycine max
  Intron number 1 from transcript Glyma14g08880.2 (locus Gly ma14g08880) derived from phytozome v7.0 (chr-ID Gm14; pos 6910703 to 6911595 reverse strand)
ccaacgcatcgtcgacgaatccgacaacgtttcctgtcagtcactcaatcctattcaattccattcccaactcattgcattacttcttacaccttccttccttcctttttttcttttctttatcttggctccattgttaatttgttagtatttgttagcgaaagatattcgaaccatgacctttcttcctcccttcttccttccaccaccaagtcaaccttataaatctcacactttcttatctttattttcttaaaaatgtaattaagtgatatttttattcatattcaaattaccattttccattttctaatataacttatatttatctctccttggagcgtccacattgggagctgcttaatgtgttgggtataaaaaaaaaaatattacattagtgtctcacatatgattttgagttgtttaaaatgggtgagagttgcttaataagcaactattactcatgagttgcataactttgcattaaatatagaaaagagaaagggaatatttgtgagttaaacaacttgttaatagaaattctcattggagaaaaaattaattgagttgcttaagtttgaggtggcatatattgggttgcttatttgaagaccattagtcataattgtataaaacgtggaggacataacttagaaactgttagttaggtgcttgcttgagttgtgacactgatgttagacaaaattggagttttaactctgttcgctgataatgcacaagtcgttgagatacttcaattttgactgtttaatttgttatgatttatgagaatttgtgtgaatttgcagattgataatgcacaagtcgttgagatactgcaattttgattgtttaattttttattattgatgagaatttgtgtgaatttgcag

SEQ ID NO: 19950 - DNA, 572 bp, Glycine max
  Intron number 1 from transcript Glyma19g30150.1 (locus Gly ma19g30150) derived from phytozome v7.0 (chr-ID Gm19; pos 37815652 to 37816223)
caaattaataattattggtttaaaagtagagtttaatgtgtatgcatatattattcttacttaactaaaatttaagggtatggtagaacctccacgatccttgcagccaacactaatatactaccagtcaccagattatctcccaatcattcctggaaagaagttaatcaccaatccagttttttttttactatcacgaatccagttatatctaccaaaataactggaatagaagtgttttttttataatcagcaatcctaaatctcaactttcaacccacaacagaaagctttgcgagattctttgaagcagattaaaaatcaaatcagttgagatatcataaacagaaaacaactaaattatctctaatttgttattttaatttctaaattagtttgttattttgtgttatctccacccttcttcctctataaatacaagttaagtgagaaacacttgaaatcgtacagacagaatgcaaacaagcatgtcccttcctattaagatttgtcttctttacttgacctgcctcacagtttcctgctttgcagagcaaacttcaaccttaatt

SEQ ID NO: 19951 - DNA, 679 bp, Glycine max
  Intron number 1 from transcript Glyma20g27560.1 (locus Gly ma20g27560) derived from phytozome v7.0 (chr-ID Gm20; pos 36700781 to 36701459 reverse strand)
acctcctttcgctgacacttccccagaaccagaaggtacttctcaatatacttaattgcctatagtgtaataactacagttgagcttcacaaactgaaacctcaacatgactttatgatctactttgatcattttcctctttgtggagttttgttttccttattcattctattcaggtaaaattaatgccagtgtattagaggtgcttatatatgtatgttgtctattttctctgtaattagtcattagactttttgatattttattatccttaatccttgaaatgtttaacccagcataggattcttgtttttgcagaaagtggcaacacaatagtaattatgatctccatagttgtgccaactattgttgtcgttttgctcatttgtctctgcctatatttaaggaggaggaaggctaggaaaaatcttgtaggcaagtccaactatcaatttactgtgacctttttatttccaacttcttcctccatggtttcaaagaaatataaatatagagaaaaatctttgtagaaaaagtatatatgatgtatcataatttagagtaattctaccctataagtaataattgaactacatacaatctattaaactgacaaaatatgaaatgtttttaataattcctagtacgagtaagtcaccgccaggaaggtaagaaattg

SEQ ID NO: 19952 - DNA, 767 bp, Glycine max
  Intron number 1 from transcript Glyma20g23790.1 (locus Gly ma20g23790) derived from phytozome v7.0 (chr-ID Gm20; pos 33536301 to 33537067 reverse strand)
ctgacctcgctctcgctcgaacccttcaggaacaggttccgtctcctcttctcattccttttttttttctttcaaaaaagaataaattttatgcacgttttcccgtaaggaaaccgaaattaagtgaactagtataaggtttaccaatccaatttggacagtgatttgatttgtgaatttcgagtaatcgaaattgttttctgtaatgatagctgcccaatttggacagtgatttcaaactgcttaaaccctatattttgcatgtaatgatagctgcccaaggacatgcagataccaggcgttgatatccctgacccacgttgttggcctttcacaaacagctgtgtgtgcatgccatgaagctgtgtagtgtaaaacttatgattctctcccaaactgtttcctcttgaaacaaagccgaacttcacaccaggaaccaattttccggttgattttatacatcagtgccatcatgtattggatcagttttgctgctgaccaagattttatacccttggccttgatgttgataacacctagatatctatggacgagagagagagagagagcattgaatgcaacgaatgaatgttgttgtataatgagatttactattttgttttcattgagctccttgcctccccatgtttgtatttacaattatatacttatactaagtataaatacatatgttgatttttgttttttattttcatattcctcttatttatattgtgtcatttattaatgaacaggaaagggcatat

SEQ ID NO: 19953 - DNA, 762 bp, Glycine max
  Intron number 1 from transcript Glyma18g22880.1 (locus Gly ma18g22880) derived from phytozome v7.0 (chr-ID Gm18; pos 26113285 to 26114046 reverse strand)
aagaggctgttgaggattggaagaggaaaaagcaggtaatgttctgtgatgtttgtctctgattttgcttcaaatttgtggttaagatgttgttctgttctgttctctatgcaaagtgaatatggttgattgaaagttttgaatatgcattactttttcagtttttaccacagatattttgtgtattattttaagaattggtttttggaaaattctggcgagggttactgtggtaagggagttgtggtgggtaaagtgccttctgtgctgaactcacgcctattctgataagagttattttaggaatgtctacatgtgagtggatgaatgcaagatgctgatggctttgattctcttgtcttttctaatatgtacatacttgcagcccaattacattatttttcatcttagcatatgctgaaattctgctgagtaatgctcgcaatacactttattttggcttaaatttattggtgcttaagaaatcatgtacgagactcactaaatacaaagtgagacttgattttgtgagtcgtaatatatttcagtcaataagtgtgttggaaagagtttattagagagcgcatcattagcatttcttattttgtgaaagagagaagagataatagtagtgtgtgttggtttttgtcaacttttcctttccggaaaatccttttggttgctcttttttttttttttcgtgctcttgttaattattattaggtctgtaatttagtcttgtgatttcatcaggatatagat

SEQ ID NO: 19954 - DNA, 890 bp, Glycine max
  Intron number 1 from transcript Glyma20g32800.1 (locus Gly ma20g32800) derived from phytozome v7.0 (chr-ID Gm20; pos 41427949 to 41428838 reverse strand)
cgaagctattcagaaccctcgcgaacggctttcaagtaggtttaccttcgaatcggtggaagacatttatttataagcttttctgagagaaattgctactttgttaagccctggtgaattataatagactccgaaggtcttggattactttttttgggggtgttgtgtgtgtgtagactcgattagtgccctaaattgtcattaaggagttgatttaggttatgattactgataaagttatcgggttgcaattaagtacactgcttgtggaattttacatttgtgtggtctgatttgagaaacaattatagcatactctctctactttcaagtttagctatcatatgaaaggatttgcgtctctaaagtgatagattcttatttaaattgaaattcatctcgctctctctgtcccccttctcatcagcagatataattccttaattctcacctctacagtgaatgcctcatttcagaggatccaaatcccatatgaaagctctaccaagctgcctcctgacagtgattttgagtttgaagcgtgtgttttgtatgtctggatttgttgcataggcctttccctgttccttccagatttagagttactattgtgtagatatttttttggggggagattaataaccccttcccaaaatcaaaatagaggatgcaaaaaacaaagcttatttaaaatttgacgcttaaatgttctacagttattatgtgatgctgtttcttgcgagttgctacttttataatggatttattatgcacttatgcatgcattatttgtatgttatttgtttagatctaataagctttatgttcttagattgttatatcttgcccaactgattaaggcttctaatttgataaattcagtcttgagg

SEQ ID NO: 19955 - DNA, 452 bp, Glycine max
  Intron number 1 from transcript Glyma15g36110.1 (locus Gly ma15g36110) derived from phytozome v7.0 (chr-ID Gm15; pos 41104027 to 41104478)
cctttttcgcactcaagcatctgatacacaaacaggtgacacgtcaattgcttttttcttctataacaataataaataatcactttcttctatgataggaataatctatagtttacttggattattacatgtgtcagattataaagtaattattaattcttgttttattttttacagccaaacaaaggggtgctagtaagtcaagaataatattgatcattggcttaagtgtgctgggggcagtagctttactgtgttttagtgtttattgcttctggttcaggaaaagaactagaagaggaagaggaaaaggtgatttcctggatcaacacatgcttgaatttgtttaatatccagttttgcatttccaaaaaataaaaataaaagaatatgtttaatatagcttatttcacatactcaaatatgaactcgaaaacttgtcttctctgcag

SEQ ID NO: 19956 - DNA, 396 bp, Glycine max
  Intron number 1 from transcript Glyma17g33500.2 (locus Gly ma17g33500) derived from phytozome v7.0 (chr-ID Gm17; pos 37399183 to 37399578 reverse strand)
cctccaatttcaattcaatcccttccgatatttcggtacgtgcatatgaaacaatatctatctgatgagaaatcttaaataaattttcatattatttgactcgtgtatatgaaagaagatcttgtaagaaatgctaaatagatagatttctcagtattaaggatgtctaattcaattaattaattgagtaaaatactcaagtttgatttcttctaataaaagagaaataatctttgactctggcttgtgaagtatgtttattatcatcgttttttgtcattaaattcctaaattaaacaaataacatgaaaattccttgtacctaattaatataaggatttttgttatacaaattttgtgattgttgatgttgttgtgtgtattacaggagagagc

SEQ ID NO: 19957 - DNA, 362 bp, Glycine max
  Intron number 1 from transcript Glyma16g34290.1 (locus Gly ma16g34290) derived from phytozome v7.0 (chr-ID Gm16; pos 36926284 to 36926645 reverse strand)
ctttgccaggtactatatgtcaacggacaaaactttacagacagttccttagtgtacttagtattgttcttcaatcaaaactacattgaaatttcacctcgataacttgtataataaaagttgcattagaagttgacataaattattaagttaaagctccaattcccatcggagaacaatatcaaaagcacctatagaattgtattagttttttcctaacacctatgctatataggtcatagcagtcatactcaaatgagtttcatattttttgtgttccaaactttggctctttcatttccataaggtttttatatgggaggaaaatgtaaaacaggtttgttgcaagtgggaaaaggtta

SEQ ID NO: 19958 - DNA, 973 bp, Glycine max
  Intron number 1 from transcript Glyma16g04800.1 (locus Gly ma16g04800) derived from phytozome v7.0 (chr-ID Gm16; pos 4100950 to 4101922 reverse strand)
gcgcttcgtttccctgcgcaggttctttcgttgcttcttccctttttgtgtccaaaagggtttttctctttttctctctttctgttttctctgttttgtgttgcttttaaataaacttttttgctgtcttttttgccttctttttttctttttgatcttttgaggatgtcgtggtgggtggatgagtagataaaacttagatacaggttgtgttttatgccgtgtctggtttgggtggacagaaaggaaattttgaaatttgaattggagagaatgtgaaaagagagaaaattttggggccctttactttggtgttcattccttgttttcattttttgttttcacttttattttacaaaactgatatcttgttatcaacattgtttcttgtacaaatctttgaaaataaagtagtaactttgtaaattcaaagtgaaaacagggaatgtaatcaattaaacaacagtaaacatgcccttgaatttttgttttttgaattatttttttttcttttcactttctctctaattaaacaacacaatacatgttatttggcttttcttttctctttattttttttcctcatattcaaacataccattagttttgttttctgatcagaattgaagttttattttagtagtctgcctaacaaggatttgcattagagtttcaacatgagttattgaagcaaaatttttcaattttgatgggagaatagtaccaatcatacagttagtgttattctttctcattagaattgaattttcattttagtgataaggatttggattgaaggatcagtatataggttatagaggttaaactttgattttgacagaaaaacagcaccgaaaatgcctaaggaaatgcttcaaagttttattctgatatgaattgtgcaaggaatatttgatggatggttgagttgtgaacaggcagctggtgctgcgggcggtgcactggcaattat

SEQ ID NO: 19959 - DNA, 698 bp, Glycine max
  Intron number 1 from transcript Glyma16g08120.1 (locus Gly ma16g08120) derived from phytozome v7.0 (chr-ID Gm16; pos 7369707 to 7370404)
atagagacgagtgcgtggaaagtagcaaaatatcggtaactgagttatttcttgttctctttatcattttttggttccgcaatttggatcaatcatgggaatttgtgtattcatgcattggtatagttgtggtaatggtgtttatgtgcgtatcaacattggttatttgtcctctacagattactgattccttggtttttgtttattttttaagtgatttaatctaatgctgttaattcattgttcttctttgacttctgtagttaaactaggatgattggataattttggataaagtgtttttttgaagttgaatgagccatagtacatggctgatatatgcttgtttggtttctgtagtagataggaaaccgtttctattttcacctttatttcagtattccagcatcttctaaactattattggaatcattattatctggggtgaaacagaactataacagaaactcgatttcttgccaggtggttggagagttccaagtgccctattttgttagtgattatctatgtttgataaatgttgataactaattattttcaatgagatatgaatttgattctttttaattgttgggtatataattctttacaagatatatgagttgagggagtatgttttcatattcctgatgttgagtttattgcttttctacagatagttgattatttcacagaca

SEQ ID NO: 19960 - DNA, 488 bp, Glycine max
  Intron number 4 from transcript Glyma16g08120.1 (locus Gly ma16g08120) derived from phytozome v7.0 (chr-ID Gm16; pos 7371217 to 7371704)
tggagtgagtgttttgttttttcctttttctttttatttatattgggaatggcttgcaaaataaccattctcaaagttccttcattactagtttaattacacatgctgattcatttagttgttggtttttaactgctgcaggaatatattttaaaatcattttattttgtaccccaagacagaaaaaccaattaattttcattttgcaagtaaaatacctatcaagagggtttatggtaggaagcataaggataggaacgatgtattaaaaatactttcattgtattcttcacttacatcaatgttcttgtatcttcctgatacaaaaataggggttttggaagtgccagtgatatatttcctatttcttgactctaattctgaaccagtcctattaatcaaacatgttatagacaagactcacatcaattaatccacatacctgtacattaggttgctagctggggtggtgacttgctggatcgtgg

SEQ ID NO: 19961 - DNA, 943 bp, Glycine max
  Intron number 1 from transcript Glyma14g11700.1 (locus Gly ma14g11700) derived from phytozome v7.0 (chr-ID Gm14; pos 10241972 to 10242914)
tttgttcacacttctcaacagttttaaaaaagaaagtaagaaatttaaaagttttcctcatgaattgttgcttctcggatagtttttttctatttttttcttttcccactttcaagttagaatacccagaattatgagttgtgaaatcttattattcatttaatgttcatatgatcatctgggtctttcttgattatggattctaccgtctgtcggtctgttgattaatcttgatgtttattattttctatacatttcttagcacaattgaagacataacgaatttccaaaaaaaaaaaattcttcttttggtcaatattacgcatcatctttattacctatagttggaattctgtttgctctgtctcttcatattttattttgtgttgaaattcttcgttcttccttgtgttgcatggttttagatcattctgtattcattgtcagctttctttttttaacctcgtcactgagaaaagggaaagaaaaagtaagagtttagatgacttcttctatgattggagtcttcttcatagttccatgcttgaaaatattccctcatcattatctttctttcttcgttattttagtatctttcttctgaagtactattgccatgtaatagaattgcaactgttacttatgcttcactgtttccccatttaagtgtgtcttgcagttgacattttcttttactctttctactttccttttgaaaactgcatattcttaatttttaatttacacattaagatttgtgtttgagcatcatggtattacttttctttgtttatgcagcatttaaaaatgcgtggcatatttgtaagagttgttacaaaatgatatccagattttcttttcaattatttgttttggtaaaattttctttaattttcatgcttagagtaaaatactgatgcttatttgttttattcaaatagga

SEQ ID NO: 19962 - DNA, 302 bp, Glycine max
  Intron number 2 from transcript Glyma14g11700.1 (locus Gly ma14g11700) derived from phytozome v7.0 (chr-ID Gm14; pos 10243030 to 10243331)
cagtaagtaaccactagaaaagttgctagtttattaaattgataatcttgtgtgcaatgaataccaaattctgtccacatagaaaaaagaatttaattagaatttttccagttgcattggaaggaatggaatttttcacaccaggatttctttttccaatttgttgtaatgtatataccattagttatgcttttaatttagtattttgcaatttattttgacttatttgtgttgcttagattgctgttagttaaaccattaatatgctactaagtttcttcattctcttttcttttgctagc

SEQ ID NO: 19963 - DNA, 410 bp, Glycine max
  Intron number 1 from transcript Glyma18g52900.1 (locus Gly ma18g52900) derived from phytozome v7.0 (chr-ID Gm18; pos 61352065 to 61352474 reverse strand)
tctccgtcaaagaattatttttttgggttctcaggttctctctctctctctctctctctctctctctctctctctctctctctctctacatatatataaatattttgggatggattttgttgttttcatattttaagaatagccttggtctttctggttatgtttttaaggggaatttgcaaacttgttcatgtgggttcattctaaagcacgcccacaattacatgtttgatgctgtttattttgagaaatgtttggcttgttaatgtgggttcattctgaactgtgggatgccccaatatatcaaaataaagaagaagaaaataagcactatgaaaagggaatgcaattgcaaagagtgagacagtatctgatggtgtgttggtgaattgttttgtttgatcaggtgg

SEQ ID NO: 19964 - DNA, 810 bp, Glycine max
  Intron number 1 from transcript Glyma18g12240.1 (locus Gly ma18g12240) derived from phytozome v7.0 (chr-ID Gm18; pos 11283496 to 11284305)
agcataataagaaagaggtacacgtagtaacgtagattttcctttttccctttgctagctttgcatgtatatatgcagttgttaatttgttatatatgattaaaaaatagccataagtgtttttaagaaattcctaacgtgaacaaaatagttttcctttgctagcttttgccttttggatcaatcatgtttctttgaattgaaaaaaatgacgttatatttttattttgttttctgttttaagaaaaatgtatatatgaaaaatgataataaatagttgttttataaaaaaaaattaaaacatgaaacagaatgaaagtaattaaggtaacatttttataattaaaattaaaaaaagtaaatattttatcaaattaaacgatataccaatggtatataaatttttcatctaatatagaatatttacacttcattttagaaaattaattttgatgaaaaataaattcaaaataaatcaattattagataagatttttgagaaaaatttccttaaacatgtagttgatttgatatttcttttcaaaatttaaaaatataaatatttaaaaataaatacctttctttttatttgtttcttacttttaaatgtagtttttattattattttcaccattttgtatataatttttaaaaaataataaaataaaaagaacataagatttttaatttaaaaataaaaaacaagaacatttttatccaaatcaaacagaatttcgtttaaatagatacaattctttttctcctggtcatttatttgattatttatcttttcataaaaaatgttgtaga

SEQ ID NO: 19965 - DNA, 638 bp, Glycine max
  Intron number 1 from transcript Glyma14g11000.1 (locus Gly ma14g11000) derived from phytozome v7.0 (chr-ID Gm14; pos 9254050 to 9254687)
agtattttcatcctcaccaagctttgtgaatttaattttagcattaatgcttcgtaagtttactagtttatctgttctgttctgttctgcttctcttgttataccactgataagtctaatccttttctttcttcacttgacatgtttttgctgattataattggaaatggattcttcattatgcagatccaaatggtaagcccgtgaatttatatgactatcagttatttggttacctccccagctcatcatccataagagaaaatagaaactgtcatgttctcttatgttccatttgaaacttgatttctttgacttattaagaccctctttagataaacttttcagtaagtatttatatgagaagaaaataagaagaaaaaataaattaatttttttccataagctaaaatcaacttatgaacataacttctagaaaatccctcatttattttctccaaaaacttgactgcataagttgattttagcttatggaaaaaactcaattcattttttttccctaaaagtactcacggagaagtttatctaatcgtgacctaagaattcatactttgttaaagcaacccaaactataataagatgattgatcttaatgttgatttaatcttccagggcct

SEQ ID NO: 19966 - DNA, 961 bp, Glycine max
  Intron number 1 from transcript Glyma18g04660.1 (locus Gly ma18g04660) derived from phytozome v7.0 (chr-ID Gm18; pos 3444538 to 3445498)
agacactactgagaaggtgatcgcagagtacatatggttagtctctttctctgtttctctgtctcacacagtttttttctttggttctatacgaacacaaacaaacacaacaacatgggagtatgttatgtttgtgtctgcatgattttttacgtgtgcaggaactttttttctgggatgaaaaaaatgtttctcatgttgtgtgtggtttgtttttactaatcttttatttgatcagtgacacttgttgggtctaacggaagagattactctgtttctctcgtcacatgaacagaacaaagtttgaaatttttctgatggaaaaatgcgaggaaccaaaaaaataaaatcttttatttgatcaatcactccactctactctatactactacctgcttttgttccaacccttaaaaaatgaccctagagaagtttgattccagagttctgaattcatgatatctctcttgagtattacaagagtggaaattattttttcttctatgatttcccctgttttttgtttcttttttgtggttgttccaattttttttacctaccttttctgtttatgagatgtatgttattctctctcaaattttcagcctccttttttatatttttttgggggtagttccccttttgaaggggtaaatctaagagtgtttcctctgttttgactctgtctttggtggttatgctattacttggttttgtttggtatttgatcacttcaaagatgactttgcttgtttgataggaattaatttgagaaaggaagagtctttttccttttttctttctttgttgcttgcttcaataaaatacatcctaaattattcttcatgctcactaccaaatgaaagcaacttgtttgaccttttttttttgggatataaattttcccttttgatgaattctaacattttattttcaccatggtaggatcggtggatcagga

SEQ ID NO: 19967 - DNA, 1029 bp, Glycine max
  Intron number 1 from transcript Glyma16g08380.1 (locus Gly ma16g08380) derived from phytozome v7.0 (chr-ID Gm16; pos 7728984 to 7730012)
gccattctcgctcccctcgcttacatccgcgaaaagtaccattctttctttttgtcccttcttctttatgcttctgtcatcaattttctactttcctttcattacttcttattttctatcacactttctaacattctttctgatactcacactctctctactcttggtccaaaactacaaaattataagcataataactcagtaaatagtctcacaaaaatttgtcattttttttaatagatttcagctaacaatcaaaaaaaggtgtgtgtgtgtcattggcatttctcttttcttaaagctatcttaacatatcatatttaactgttctgtttcttttccccgaatgtatttttattattattattattattatcggcaaatgttagtttcttagtttttttgttagtgggagggttccaatgcaccacctctccttcctttcccttctcccttcatcaccaagccaaccttatatctccttcttttccccaaatgtcagtgttattggtgtggactaatagagagtttttaaaatctcctgggctctttctgtatcctatgtttagtgtctctttgtttgtagggtgtgcccaaggttttaaatagtggttgtgttgcagtttccttgcgacaaattgcggacaaatgcagccaatgcagtcccaattgtggttgcgggcagttaaaaaaccttgatgttatggcccaaatcatggtcacagaccgttttgtaaaaccttgggtgtgcctaattggatgaaattatacagcgatgtagaatgcctaatatctacactttttcttccttccatacttttggttaattatttgcctggatgactggtgattttgctgctggtagcatagattatactactttctttgctcatataactgtgccatactgctatatattcaaactttagaaattaaattttaatttgcaactctattatacccatttttcaccatcttttctttatctctaatgcataagtatccttataatgtcttgtttgtaggcgt

SEQ ID NO: 19968 - DNA, 751 bp, Glycine max
  Intron number 2 from transcript Glyma16g01220.1 (locus Gly ma16g01220) derived from phytozome v7.0 (chr-ID Gm16; pos 895691 to 896441)
cagcttgtggaaaacccctgcattaagaagtctaggtgtgtcattgcttttttttatatattttttttctgaattctaagccaaaaaagtaggaaaaactgagcttaatatttggggaataatttagggaatgttcgacttctgattttttttattatgtaatttttttcatcattaatcctggttgaaattgattatttctctaaatgaaaagcgtgtattctccatttctcctaatctaaagttttttttttaaacataaaaaaaagttttgagaaggttcaaaatgaccctcagcctgagtcttgtgaaatacccacatagccatgctttcgatcaccaaatattttacatgtggaattaaaggaggcatatgctatgaatggtgatacctctttttttctatcttgaagaatatgcaagaaaaatttgaccaacatttgtgcggatctcaatcgtctctagttgatgtcgatctttgtcatgaggaatagctttatgaaaaagaactataaacatgttgaagttttagaaccattagattaggactggacctcatgcggttgaaaattttgaaccctttatccccatttgtgcctagatctgtttggtttatgggcacgtgtatgttaaatcattgttacttcacctaaaaaatttgattaggttcatgtattcatattcataatgtttttgttattattctcttattgtagatcacagggacctgaaactccccaattgacaatat

SEQ ID NO: 19969 - DNA, 962 bp, Glycine max
  Intron number 1 from transcript Glyma19g37070.3 (locus Gly ma19g37070) derived from phytozome v7.0 (chr-ID Gm19; pos 44315514 to 44316475)
gcgctccccctcctccttctccaaccctacttctggtacttcttttttttttttgtgaatttccttctttcacgttctttttagtctttcttgaatttgttctggctatggaatttaatcgttctctttgtgggtttcttgtttgtttttattttcttttgaattaatcgtcaactgttgactgcaaagctagtgccgttcgtgcaattccccaattgaattgtcatgttttcgtgtaataagacgagcaattctaaatgaaatcattaaattccctttcctccttccttggtcagagggagtgtgtgatttcttgtatatgtcacgattttgtagatgatgatgtactttttaaaaatttggtgcggtggtagtttgttagcaatgtggttgagctgtgaaataactatgtgctttgacaaggtgtgtgttctgacaaaggaatgaaatcattgttttgttagaatgctaatggcttgtgcatactgaaattatttttaactgtttgatttcaatcttccagttatgtgtatctgtgttggaggatattatttgcattgccaaataatgaacacttgttgaatttagctcattgatattgtcttttgtcatttacaaaggtcatatccgaagtcacatgcatcaaccttttaaggttgactgcctccattgaactttgttggagctaatttcatacacttggtactctaaatctttgttgttgatgttgccaagcatggaggtttggcctgtagtttgttctccatcttcaaacatcttactatgtgtaacatgtgattcaaattgaattattcattctgttaggatttaaattcagtgtctgtccttctccttcataagcaaactttgattgaattttgttgaaacatatggctgatctttcttctgaccaattctttcatgcaggttcctcaccaggttcatcttctggtgaagtgagg

SEQ ID NO: 19970 - DNA, 624 bp, Glycine max
  Intron number 1 from transcript Glyma18g18230.2 (locus Gly ma18g18230) derived from phytozome v7.0 (chr-ID Gm18; pos 19612670 to 19613293 reverse strand)
tatcaatatcatctccaaatacgacgtcgttcaggtacaccttctcaattctcattatgtggttccgtttcgattatatatattcccaattaattagtttttggtctgaattttttttttacaaacttcatactataaggacctttttttcttaattattttagcgttgtgattttagcataaaaacagaataacaggattcaagagaataacagaaaaaaaacaaacccaagaggtgtgtttcttgtgtacatcattgttttgtctttttgtattcctgttgcttgttcttgactctgaatttccatatttttttttcttctaatgatatgaaattgcgtttcccattgggaaccttcgttgaaaagcctaaatttgaaaatcagggaatgacaattcattgcaaagggattgaaatgaaaaacaagtgtttggtttggattaaattttgaggaaatgattattgtgtagatttgaaagctttttcaagaagctcacaaaaaaaaaagtaattgaaatgagcttaaactaatgtgagtgaattccatttctcaaactgagtaattggatatagtaggattatttttgggtgtgtgtggtgtcaggttggggttttagcacaag

SEQ ID NO: 19971 - DNA, 545 bp, Glycine max
  Intron number 2 from transcript Glyma14g07710.2 (locus Gly ma14g07710) derived from phytozome v7.0 (chr-ID Gm14; pos 5839565 to 5840109)
aggtaaacctgtagactttgtatcattgaattaaacagttcttttctattctgttgatataattgccctgatctgaccccagttcttttgtgtttcatatagttggtcgtctaatttgtgttacacaattatttagtgtatgtttagtttattttgaagtacaaagctttttttttttctgtattttatctaagaactttcaacacatacttttttttttttttctaatcttgtatgttatttttttcccagaaaaaagtatgtgttgaaagtgctatatatttactaagattcccaatacactactgtgagttgttcacagagtaaatactttctccgtggttgatcttcagttatgcaatttagttttatgcaaatcctacattagtgtttgattgaactgtgtctacttagatactaaaacaaagatagtactagtgatgacggtgatgtgatgagagtgttaactagtgacttaactcttaatcctttcttttgctcttctggcaggtggataaaagatacagacagtactgccaccaaat

SEQ ID NO: 19972 - DNA, 734 bp, Glycine max
  Intron number 1 from transcript Glyma20g01470.1 (locus Gly ma20g01470) derived from phytozome v7.0 (chr-ID Gm20; pos 1003271 to 1004004)
aagggcattataatcaatcccttgtagccacacaggttcatcttctttgttcaccatgaattttactataatttgattccaaggctattgtccaaattcctacttaccctgtccaaattccaaggctattatattaagacaatgcttatacacaaatcataggttaaaggaagtttaacttaattgtttgtgtaggatacgtgaattattgtaaatcctttgatattattttttattcttaggaataaaaaaaaaagaagcaaatcatagatgtttttggtagtattgtctaattaaaattagaatttcaccttgttaactcataaaataaatagacatttaaagtagacattgaatatcaagcggaggttctaattttgattggagaacgatgctgaaagtacttaaaaaattacacttacattttgtcattattattaataataataaaaacactatgattttgtcaaaaacaaactcatccgtgagactatgaagtttcataagaaaatcatatgttgtctcaccatatgagttcattgtggatgaagtgaaaaaacgaaacacagtgactctgtttaccaaagctaggctcccccaaaagtaaaaactatcattaactaattaatatagacatagatttgacaattagctatattcatattgtcattggtgcttcttcatttgaaacggtattgttggctaacctcaaaagtttatactggacatgacag

SEQ ID NO: 19973 - DNA, 797 bp, Glycine max
  Intron number 1 from transcript Glyma15g19600.1 (locus Gly ma15g19600) derived from phytozome v7.0 (chr-ID Gm15; pos 16957080 to 16957876)
gctcgcagggccacaaagagtggttggtacgtatgctactttgttttcttccgcataattaaattagtgtcaaatacgcggcttatctggttttcacagtggagaatatatgtgatctaaatcaaaaaatacgcgcccatggtcttatattgagtgctttttgagatatttgcttaattagaacgtccatagttgagataataaaagtgcatggcttgttattctactataaatattttcacatatgtttcaatacattcatcataaagcttattaaaagctaatgaaggttaggtagagggttggttattcaaattttcgtaaagagaaatactttcactttttacttcatttagtgtttgactctatctaaattgtctactaaaaaaatacatgtagaaaagcttattacaaataaaaaagttacttaaattccattagtcctcatacaagttatatttgtggaaacacttaactaagttgtttatcaaaataattaatgtgtcatgtttaaataaatacttcaattaagtatttacttaatgagtaattattaaatgaaagtttctttattgacttgaaggtaaaatgtatagaaataaatttatatatttaaaaaacactaaatcatttaagtaagttaaaaaaatgttttacatgaatgtcacaaattattttataaatttaaataataaggtctttaagattacgcgtctttgatcagttctgaccttttggttttctaacttgtgctgacgacagactgaagttgtttttctggggcaactaaggcatcc

SEQ ID NO: 19974 - DNA, 935 bp, Glycine max
  Intron number 1 from transcript Glyma17g05910.1 (locus Gly ma17g05910) derived from phytozome v7.0 (chr-ID Gm17; pos 4165101 to 4166035)
ttgtggggtggcacctttggggaattgtacaaaaggtacctttttctttttctgctatatagggatttgaatgtgtttcagtggcgtatttgtttgaattagttatatgagaaaaagtgcttgcatgttgtattacttgattgggaagtaagcaagtggcgttttacaacaatggctaagtttgtgtttgggaaatgactgggagtaacttctagtgagttggaatgaaactgacatgctactatttatcaactgccatgttttcttatgttgaaaaatgaaaaagtactatttttttctttgctggatcctgaaaactgccaatgcttttgttgtaattcagaaagatatagcggaaagtatttaggcaatattctctccgaagtacctttcttgtattcttctgccatagtgtactgatttttgttaggaagcatgatggtgtaaataacaacattacaatctaccattatctatttgtcgtgttaggatgacatttttaggcatttcctctaggtttgtaatctgtacttttcctatatatatatatatatatatatatatatatatatatatatatatatatatatttgtgtgtgtaataatacgatcatcatttggtagagggaatgaatctaatgtccttagtatcattaattgtaaggcagaatttttacacacacacaagttgattttgggctgaacctttttcactggcacttattgaagtccatcagtctgacagagtttggggagtttgattcaaatgttcaatgattgtagccattccaacatttgtcttgcagcacatttatctgtccttttttattggcaaatatatttgcatcaagttcttgttttgtggatgtttaataactcctatagaatttagctataatggtatatgatttttattttaccttctgcagaccatt

SEQ ID NO: 19975 - DNA, 769 bp, Glycine max
  Intron number 2 from transcript Glyma16g31260.1 (locus Gly ma16g31260) derived from phytozome v7.0 (chr-ID Gm16; pos 34678077 to 34678845)
ttcaaaattaaagaaagctctcttcaagctcaaaggtacactttgcataagcagttcttttagtgttggctttttggggtcgtcctttattttctggaggctatgggttgagtttgtagacatgggccattgcatggcaacagttgtgtgaatcttagcattttatttgggctttgatttccaaaatcccatgtgcattcctcacttgctttggtaagagtagaaccatgagtcaataatttggtacaccatatccattctggggtccatgtagacctccctgttgggctccatttttcttcatgcaaaggtggctcctctgtcacaccttaaccaaatgacattatttgtcatcagaaataaaaatagcatttctataggcttacagttacaacaaatgtattatctttttttaagaaactgaaccttcacattcttatttttactactgctattattatttagtaatctaatttcgaggtaaaagcttgcaagttatacacccagaattatttcattacttttcacaatgtgtattatgttacaaagaaatacattttttttcttaaaaagtgaggtcaagaaaaacatggcatgatgagctctcattcagcatgaaaataagcatgcccaaaagcaattaaaaagtaccataaagtaacttttacataatccaaattgggtcaccttttagtcacatgtatgattaagttagttgcatatttgtatgcaccatgttaacttttgaatgtgtgatatgcaggagtag

SEQ ID NO: 19976 - DNA, 628 bp, Glycine max
  Intron number 1 from transcript Glyma18g03810.1 (locus Gly ma18g03810) derived from phytozome v7.0 (chr-ID Gm18; pos 2618514 to 2619141 reverse strand)
atatcaatcatctttctcacccttgtatatacggtattttctctttcttctccttcttccttctgttaaaagaaaaacacacaaactagagcttcatgtgcctaacacttgccatcatcacgtggaagacaaaatagattttgcaaagttcagattaaccacgtgaaactttttttgaacttctaagtccttttttttgggtggttgttaattttactaaatgggtatggatggctgttctcaaaatttctcattttactttgcatacgatcctagaagattatgtaaagtgtgtaataagatataggccatgtttagataaagctaaaattcagtctaggtagaatttttataaattagcttatggagaagttaaatcaaagaggttctataaattagtttatgtgtaagcttgcgtgattcatttcactttcttattttcttttcttatggagaaatttatccaaataaagtcacaaccgacttgataagccaaattcgatttataatatgacttaacagttgcggttctaaattctaattgaactttttttttttttttgtttttgcaatttggtgggaagcaggggactttgtttcttcatatacagagagaaagtctggtttt

SEQ ID NO: 19977 - DNA, 732 bp, Glycine max
  Intron number 1 from transcript Glyma18g03520.1 (locus Gly ma18g03520) derived from phytozome v7.0 (chr-ID Gm18; pos 2383364 to 2384095)
aaacaagaaaaacggtgcgtttttgtcaggttggttttctccttcctcgctcgcacttcttcgttcagcatcagcatgatctgattgtgtttcgtctcatcccaccgttccgttttcagatttttacaaatcttcttttcaaaactaactcatttctatcttaactttgttccacttttattgaaaaaaaaaaaagatcatcatactttttcctcgttgcttttttttttttttatgaagatctaggattccgcatcattctcaatccttagttttgtggcattggctgaatgttgtgattttgttatttgaacacgattcctttatttttttgtctgtcacgtcgtaaaatgtttgcacctgtttctgttaattttttttaatttgaaatatggtttttgaatttttagtaggtgcagtgcactcatatttctttaaatttaattagaaaaagtaatttaattagcgtatatgagtgaatttgaggtgttccaagccaacaactgattgcaaaattgtaacttgtgagtgagatgttgttatgaaccaccaaccttcagttcatgaaaagtgatgaatcatgaaactctttgataataagctctcttttaagctccctgaagatggaagcatactcatttgccctgtaactgtcaatgactaaggtgattgtttcctattggattagttatgtgatggccacagggttggatttctttgcaatgcagggaa

SEQ ID NO: 19978 - DNA, 728 bp, Glycine max
  Intron number 4 from transcript Glyma19g30960.2 (locus Gly ma19g30960) derived from phytozome v7.0 (chr-ID Gm19; pos 38666173 to 38666900)
aagttccaggtatggttaagctcctccattattcctcctgcactaccttcctgtataattacatcattgtgggtgttgttgtttttatgtatcattaatgaacactaaattgttttttacagttatgagtattgcaattatgactttcctttaaaaaaaatggcaatctcattatttcagttagcttcattgctgacattagtattttattaaatgatgcagttgtaattttattgtttgataatactaacaaacatgaagcattttgagttttggactggataattagaatctccaacaggatttaccttgttacttttggggattcttaaattttatatgaaaaatatctcaccaatagatttttggatatttaataaacaaattgatatatttcagttgctacttgcattttggccctatcaatgcatgtgagatgtttgttttggttttataatcaggtaaaatttacttgaataatatgcatggatctatgtgagagtgcattttctaaatgagtattcacagaataatgattttaataactcatgctgataaaattcgttttaacatatggcatgtaatgctcagaataatgagattcttatcttcaattttttacttgtactccatactcgatcatttttaccttttccaacactaacaagcagatacttgttcataactttgcagggactactctggaaattggctgtcattttcctttt

SEQ ID NO: 19979 - DNA, 619 bp, Glycine max
  Intron number 3 from transcript Glyma19g29060.1 (locus Gly ma19g29060) derived from phytozome v7.0 (chr-ID Gm19; pos 36621335 to 36621953 reverse strand)
atttttcctcacaatattggtcttggagccaccaggtatattgatatcgatcatgttagtctcaccccttaaaggggtttgaaataggccaaaggaagagaaaatgtgagagatgtgattaaaaaaaggaagaataaagatagaatgatagaagagatataagggaaagtgagggtgaaagaatcaaaaccccattgatattagcagcactcatatgtcttagcttttcttaaaacaaaatgtagacctatacctgattctgttatttaagccatgatgttgaaacaattcagacattagtcatcagagattgtaaagtaactcggacatgcataagtttgtatcggacttgcacggcctaattcgtcctaatgtagaaactgaatataattattttatctggtttatacccaaaaagctgctttcctctagtatgttattgtcataatttttttaattgatggagaatttgggtatgtaagtcattcaggattttcccttagcacaaattattctattcttattgtaatcgacacatttcatgttacaaagataataatggatattcttattttgctggttagggaccctgaactagttaagaggattggagctgcaa

SEQ ID NO: 19980 - DNA, 332 bp, Glycine max
  Intron number 1 from transcript Glyma19g29060.1 (locus Gly ma19g29060) derived from phytozome v7.0 (chr-ID Gm19; pos 36622447 to 36622778 reverse strand)
tcttaggcaagcttccctttccacatagactcaaggtatgaataatgactactagtattatacagcttagataagttttataatgtttctctgtaagtctctgactctgagtctcaaagtaatgcattgatggggttctgtcagcattcagcaataatgaacagtgtgtgtccaatgtagtttctgtgctggagattgtgttcttcatcattgaagggttaatgtggggcatttgaattatgtgcaaaatggaccaagtttttctatagacattgagttttgcatattgtgttgaatttgctttttcagtgcctagtgggggtgtgaaggaa

SEQ ID NO: 19981 - DNA, 938 bp, Glycine max
  Intron number 1 from transcript Glyma15g07770.1 (locus Gly ma15g07770) derived from phytozome v7.0 (chr-ID Gm15; pos 5472252 to 5473189)
gtaggtaattctatttctttaatcttcgttttttatgcaatcgggtgggttcctttaagtattttatttttttgggttttggttttggttttaattttgatctgctgataaattcccaaatgtgtgtcaataaaaattaaaattaaaaaataaaactctagtgggactttataccttgtttttaggactttggtaagataacttcataacgatcatagggatgcatgtaaaatccagggctgtttgtgtaatttgcaacagcggtttggtgtttaatggtgaatcttttttccagggcttagatgccaagtcttatatcagataggtgctttgcttgatacttgagtatgtaagcaattttactttcagacactcactagcaattgaacatgcaaaccttaaatcctctctaacagtctaattattaaacgagaaaccatcggtttgtgtcttgtttgcagtcatgttctattaatttatattgtattattgactacataaacattatttgtttagaatttaataggcatacgttgagtttttaaaggttttttcactaatcactattatattatgtaatcatatattgtcatataattggaaatcattgacttatctaataattactactttaaagaaaaattgctcgcaactcactcttttgaatacactttttattattagttgaaaattattagaaatcacaaaaaactgtgggtcttgcttcttatttaatgagcttccctcgtgattttgtaattttcaatcaattttaaccaattgtgaaaagtgtgttataaggagtgtgttggtaacattcatcttactttaaaagtcatgtctaagtagttgagaatataaaagctttttttatttattctattaatagggaccaaaactaagaccctatttgattgtctttggttatcattttgcag

SEQ ID NO: 19982 - DNA, 474 bp, Glycine max
  Intron number 3 from transcript Glyma15g05900.1 (locus Gly ma15g05900) derived from phytozome v7.0 (chr-ID Gm15; pos 4193588 to 4194061)
cttgaaccgtgagtatgaattaatttacttacaagactttgtgtattggaaattaaagtacattcatatttcatgtgtttgttgctttgtaagtttcttagcaagtactgcattggtgcatttgctgtcatatctcatgtcaatgtatagatataagtttttaagggtgtttctttatcctcaaacttagtgaatagagtgttagagctacatttttggcttttctttggtgtttgtatgcttcaaaggagttgctagcttagacatgttgattgagaagctttactgcattcttcttccctgttcttttttatctaataaattgtagataacagtttttaatcttaccgggttgcaactattttgctgcatcttacctaatttgagttttcaatgttcatctacttaaatattttttgtcttacaattaatcagaatatggttttcttgttatttttcttttattgcagggat

SEQ ID NO: 19983 - DNA, 1040 bp, Glycine max
  Intron number 2 from transcript Glyma17g35140.1 (locus Gly ma17g35140) derived from phytozome v7.0 (chr-ID Gm17; pos 39142231 to 39143270 reverse strand)
ggacatcattcacgccgcgctcgacggcttcaacggtatccaaattcatttctcattcgtttcttgcatctactaaacatttcattatattaccactaaccaagtggatgaactttcgttttaaatacttggagagaaaactttgccactcataatagtcctacctcactcaaacaaggttcctccgatggaggtttagataaaaaaacattttattttattaatacacttttcctaggggtttagcttagttggagtgtacgagtatcgtaaaccccttggttctattgttttcgattccattgataaaaaaaaaaatcaattaaacacttagtcttagcttagctcaagtggtaactaactaaacagtgcctattgccgagcattcagattatggtatgctttggtggtgtatcgactttgagtctcagaagtttttttttttaaaataaaaaacacgtaaaaattgatttttgttaaaattaaggttaaactgtcaatttggtattttttttataaaacaaaattagtctttgtagaagaaagttatcagttttagtttctacacattgcataaaaatttaagttttagtctgagttaactgaaaatttgttctacggtgtaaaaccactgtaaagaagttctataaactgttacaaaaacctgtatagggactaaaacttataattttcttgtacaaggactaaaactcaaaattgggacagttatagggatctagtgaatagtttaaaattaattttgaagtgaaatggtttatgttttcagatgtttttattctgaaagtaaaactcattatcaaattttttattcaattgtttcggctcaaaattgaatttctcaacggactaaatgtgtgaatatttatttaaaattactggtatttcaacgtgattttggatgatcttaggtgaatccaaacatgcacttagtgttggaatttattatttgtaatatctaaatataaatgctgatttgttgagattatgtcacatgctatgctcaggaactgcatttgcgt

SEQ ID NO: 19984 - DNA, 769 bp, Glycine max
  Intron number 2 from transcript Glyma20g29990.3 (locus Gly ma20g29990) derived from phytozome v7.0 (chr-ID Gm20; pos 38765628 to 38766396 reverse strand)
aggaattgcccccacgcccctcagatcgtaagggggtaagttttttcagttctttttttcaaatgtgattcagttatatgtttgcacctttttttagattgtaagtggtggtgttggaatcaaagtgtcatccaatgcattgtctgtctttttagaatacgtggttgtctttctaattagaatgatgacagaggcatttatttaacaaagaggctatttgggttttacaactttctgtcccttctattgtatatatcaagtttctgattaagtttagttactttcttatgagtccaagtccccctttttcactacaattactttgtctatacattagaaaaaaactgtgatacagcagcaaagatttgatcttcttttttttactttcagttcttacttcaggtgttgtttgccagtaagcactcaaattttgaacccatattttcgtcgttttttcttccaaactgatcccaatctttggagacctatatcctctttcttttataaatgcgttgacctttaaaatgactattaagattaaacgttggaagcttctaatggatctatgttaaaatgttttaaatcatgccgtgtgatggataagatgaaagaatgggaggaaaaactagatgggtaattcatcctcatccactatagaaataattaagaaaggcatcagaaactttgtttttatatcttatatgtggtcataatattatattgattcaaaacagaaaacaagcaagagggtgcactttgtgaggaacct

SEQ ID NO: 19985 - DNA, 184 bp, Glycine max
  Intron number 1 from transcript Glyma17g14620.1 (locus Gly ma17g14620) derived from phytozome v7.0 (chr-ID Gm17; pos 11363187 to 11363370 reverse strand)
gtatcaccagctgcacaaacggtacaaaccccatcttattatattccttttctatggttgtttcgtgatgattatccctgttttgagtgcacattgttaaatattaattaattttgctctgtttgtttttttctcttccgaattttcagggtcagctccagctccgggttcagggccaccacca

SEQ ID NO: 19986 - DNA, 938 bp, Glycine max
  Intron number 2 from transcript Glyma17g10000.3 (locus Gly ma17g10000) derived from phytozome v7.0 (chr-ID Gm17; pos 7458007 to 7458944)
gcgtgagttgtttttcttttttttttcatcatagattccgtttctctgtgctcttaactttgaacctgattcttctgttatctttcgtaaagcatgttttgagattctgacatatttgtttgcgcgtgctgtctatttttttttgtttgtttgttttttttttttctaattattgaaagtggctttcggtaaattctttccttttaggtgctttgacgtgacaaaaatattctgctgaaaaataaaacttattatttaaccgattttaattttatgtttaagaaggcatgtcgaggaaactaagggagatcagggggaaagaataattggttgtttaattcactggccatgcctcataattttgaactttgaatttaattattattatttttgtttatcttagggacttggggttctaatttatgaaaatgcaatcgaaggttttttttttacctgtggcactaattggattggaacctttgatttttcccatttgtaagttgtgactatttcctgatccgggcttggtactttatagactttttgatagttcttttaattctatttatggctcctgatgttataaacttataattttaaaattttttactgattaaatatgtttattttcttttttgatcaagaaactattattcatttattaaattttggagcgttttgtaagtaacactgcctgcagtcaactctcaacaacttttgattgaacaatgtgggtgttatggataaattaaatgctgtattctgacatcacgtcaatttgttgaaatttaagtaactactactacttccctgggcttatgttgttgaaaatatgaccaagatatacggtttttctttttctttctttaatttgatgagaaatttggtgcaattctgatgcagctgaggccatacttcttggttttcaacattatctt

SEQ ID NO: 19987 - DNA, 849 bp, Glycine max
  Intron number 2 from transcript Glyma18g05690.1 (locus Gly ma18g05690) derived from phytozome v7.0 (chr-ID Gm18; pos 4335439 to 4336287)
gcaacacttggtgagtccaactgacttaaactgtttttggtttcgacactgttcattctgttgctacttatatgattatatataaaaaaatgtttccttcctctgggaggtgcatgctacaaaatctgtttcatttaaattaaacttacataaaaaaaactcctttttgtatgagttaattacttctgattcagatttctgtttggatgaacatctgtaccttttgctcatgcttaatgtaaaccaacatgaaggaatcaaatttgatttatggtttaatcaaatttctgtttgggaaactaaaaaggtattattgttttgtaaacgaatatcaaacaaaatttcctaaaatgagtaggctttcttatttaccaaatttaagaaaaggattcagcttttggttatagctgatgacaggttatttgcagaattttgaaatgatgacgggcaggtttagaagcatatttttttcattaaaccataaatcaaaagaatgctgcagggggttcgtctgtatcttcccctagtttcatacctcagaattgacaacatacagctttttgtcatactagaatcaaagtactttaacttaactttgttaatgaagtgatgaataaaaagtaaactttaagatattgaagtatacattcaagtgttaaatggttagaatcctactacttttgacatcacatattttatagtactttatagtttaagttttcacgaacttgttcccttagaagcactaaaaagtatttgtacattgacatgcaaaagagtacatgatacattgaactaatctatttcgctgcaggctttcaggtattaatcacagctgtacaacaacta

SEQ ID NO: 19988 - DNA, 808 bp, Glycine max
  Intron number 1 from transcript Glyma17g16350.2 (locus Gly ma17g16350) derived from phytozome v7.0 (chr-ID Gm17; pos 12999362 to 13000169)
tcactcaccttgctgctttgatttggatcttgaaggtgaaatagtagtataaatgactttttgagcattcttttctttctgggtcgtttctcaaatgatattttcatgctgctgttgcttctttttttttgtcaacgtataagcattttatttggttgtgttattgttattatcatctttattatcattgctaaagtagttggatttagtttgcaacctttcagcttgatttgttcatcgtttgagcttgttcacatttgcactgaaaagattcaattttcatgagcttttctttttggtggatgcaattttagatcttcagctgatccagctaaaacagttgagatttggggttgggggagtgttgtgccatgcaatacaattatactaatgagattgtttgaaagtgggtattggattctatgaagatcagacaatgtgacaccaaaaactctgtttttaaaagtttctttttcttcgtgtaaaatcattatcaaatcacatgttagtgttagatccgcttgcatgttcgtgagaagaaaaaataaaacaaagttcggatgaaactatggttgaaagagagttaagctcgtttattataaggtcttctcctgctagaaattgtgcccccaaactaccttatagattctaaatcagtactagtacctttttttgttaacatataataaattctgtgtacttagataattattactactttattaattttggtagtttgcttgattttgagcctcattagtttcagtgtacactgccataggtttgagagggtactgccatccaatta

SEQ ID NO: 19989 - DNA, 727 bp, Glycine max
  Intron number 2 from transcript Glyma17g16350.2 (locus Gly ma17g16350) derived from phytozome v7.0 (chr-ID Gm17; pos 13000780 to 13001506)
gttctgtcagaacagcactggacactggttgtggggtaagttttaatgattaagttattcttctgatagtatgctctttttctttagtttaaggatatgtagtaaatagtaaaagctcctctaatatggattaagatcagaaagctgtataagtcaattgatggatgcatacacctttactttttcactttaaaaacaaattccctttagaagatccttatcctgaatgcctaatcaagttttataactcagtttcttttcttttcccatgatcttataccactaagggatttcagattggattcagaatgcttagctaaagggtcacttttttttttccttgttaaatgtgtgtatttttaattcataattcttgtgccaatgtttttttgaagtctttccctctgaaatatttatagctgccctaagatgcaattaagcagaaagaaatttaagaattacttctgatggctgctgcttgggaatctcatgttgaccatttacttatatgatgttcttttgtctattgcattccaaatttctcaattttcatgtaaatattttgaatatactaggaatcaattgccattttgtttttgttatgcttggttgcacagattactttttttcaatagatacctttcagttggtttgtgattgctttatcagtgtaaacatggaaaattatacaggttgcaagctggggagcctacttgctaaagagaaa

SEQ ID NO: 19990 - DNA, 336 bp, Glycine max
  Intron number 1 from transcript Glyma15g14840.2 (locus Gly ma15g14840) derived from phytozome v7.0 (chr-ID Gm15; pos 11284406 to 11284741 reverse strand)
atttatagttgctgtataagagttgctaactatatgtatgttggtattttattttgtcaatgaaatagtccttgttatgcaccatagatgtttctgcttctgcttgttctgttaacaatcagagttgattaacatgctttttgttcaattttgttttaaaatctaaaagcaccgcaccctctgttctctcttcctttgttttcttttttcctctaggatctttcccactcaaaaatgatggtggttcctttaaaataaaccattctgatagcggtattgtttactattttttcttcaacagcagcatcgggagaaaatctctcaaaggaccacgag

SEQ ID NO: 19991 - DNA, 291 bp, Glycine max
  Intron number 3 from transcript Glyma18g01350.1 (locus Gly ma18g01350) derived from phytozome v7.0 (chr-ID Gm18; pos 706349 to 706639)
atcttttctagcaaatctaactgctcagctctctggtaactaacatccctaatttgtttcttctgtcgtggttcttttttcatctcttggaagctgtagagaaatgacaataagtcattgtttagttgggaattatttgttttggattaatttattcgtagtataaaagttcattttaagaaatggttttgaatttgtatcattttttagatttccttgttttttgcaatgctttgttagcagttcagttgtggtatcattgttgatcattgcttttgaattttgaaaaga

SEQ ID NO: 19992 - DNA, 863 bp, Glycine max
  Intron number 1 from transcript Glyma16g29760.1 (locus Gly ma16g29760) derived from phytozome v7.0 (chr-ID Gm16; pos 33457799 to 33458661)
acgtgttccctcacgacccagaagccttcacccaggtcaaccttttttttcttcgttgtttgagttaatttacagtttaatccgtgaaagtgttgacttttgtttgtgtagctttagtacctgatcgattttgtctatgcaaattagttctttgagagatgaacttgataatttaaaccgatgagtttaattttgatacactgattgtgtgaaaattgttatactgttggtcaattagaaatcaatctatagtctagatattacttttgaagcaattgttaagaaattccatgattttattatacatgacaatctatgattggattacagtgtacactgtgtattcgaactaaattctaatgaaactgatctgcatagatgccccacttttagttacaaaagcaacacactaggatcgaattgtatatgagacctcttgaaaaaagccgtaaggatacggaaaatagtaaattgtaagattttataaaatagtaagttgtaagattttattagaaattaatgggctacttgtaagtctagtggattttcagttgaatttgacagaagttgttggcttctgcacaaaacgaagataagaaatgatataaaagcaagactaaattcagtgttggattcaagaactttcttggatgatcaagaacaagtagcacatagtcttcctggatattgtgaatattgagctttatgctaagagagagagagagagagattgtgaaattattgaagtgtgcactgctttattgatgaaatgcaagatgttgatttgggtattatttgatttgtcgcttatggagaagaaaaatggctctgtctcttgttttgatttcagggccttgtttaca

SEQ ID NO: 19993 - DNA, 467 bp, Glycine max
  Intron number 1 from transcript Glyma18g49140.1 (locus Gly ma18g49140) derived from phytozome v7.0 (chr-ID Gm18; pos 58523953 to 58524419)
gtccagagatagaagagaagagagttacaaaggtatatgctactcctttcccttccctaatctttcttcttgtgcatcctatactgtttctgaataattttctctatcttatattcatgagtgtctttaattaattaacaaggtatatagacagctttctaactttgattgaatactgatatatctcaggatttttttaattacatcacatcaatcaatctattaaatttttatttacagagtttgacgaaaatatagaaagatttctgttcatgtaaagcaaaccttaactaaccaagcaattattcaattgaatgaacaaatcgcatgtagtttggcatgaaaaatatggaagagtaaagaataaaacaaaagtttctcttcaggaatcaaatagctgattaattgttataattactgtttgttttgaaatacaggaagataaattcaaatctgctaaaactgaa

SEQ ID NO: 19994 - DNA, 755 bp, Glycine max
  Intron number 1 from transcript Glyma15g05530.1 (locus Gly ma15g05530) derived from phytozome v7.0 (chr-ID Gm15; pos 3914584 to 3915338 reverse strand)
gctttcattgctccacttgctttcattcttgaaaggttcttcttctgctcatggttttacgttacggttattcaaatgatcgatattacagacaaatatcattcatgatcagctgcaaattatatatatagaatattcttgtagattccacatgcttagttccttattttaactggttcgtcttttgtatatataatactatcaattttttattttatgattgtgcatgttttaattagctatcatatatatatatatatatatatatataataagttgaataaagcaagccatggatggcaacttttactctattattacttttttcttctgtaaaaaatgaaaatcatacatatggagaatgatagaaacagaaagaatgattatttttttcagtcaaatagagagattcgataatgattgttttgcttttacttgtagttaaaaagccttagaagttttagtggagactgctatttgagttgaagaatataatcaacccacttaagatgcatacatacataggagttgagaagtttatttgtatgacgtgtcttttcattttcatgactgtttgacataaattcagaagcaatagcaatggtagttaaatggtacctactcgaagaaactaagaagatgtttaaatgtcaaacatcatgaaatgagagagagagaaatagggatgaagataaataataataaaatcgatgtggtgtttgttgacaatgatttgcaggaagacgaggacaaag

SEQ ID NO: 19995 - DNA, 953 bp, Glycine max
  Intron number 1 from transcript Glyma18g02450.1 (locus Gly ma18g02450) derived from phytozome v7.0 (chr-ID Gm18; pos 1543749 to 1544701 reverse strand)
agagaaactgctcctgctcttgcctccaaggtacccttttaactctttaaccatctgaatcattaattccttttcaattatggattattcctctgcttactgtagtttcaattgataaatttgttgtatgatcgagactcaagtgaaaaagagagaaaaccaaaaataactgaaaattttgctccttgtttatttcattttctttcatcatcacatatccttgcattgatattttcaacacaaagactaatggtatctttagacactcaatgattaaagaaataaaataaaaagtatatgataaaaatacaagggcatgtttatttctgtgttttcattttctgctttcacttttagtttacaaaactgatacattgttttaaattgggttcttgtttcagagatttttaaggaagggaaccatgaaaacaactttttttcttttttctgtacaaacatttgaaaacagaaaatggatttaaaataatgttatagttttataaattaaaagtaaaaacataaaataaaacaggaaattaatgcagaagtaaataagtacttgttgtattaaaaagaaaatgtttaaccaacatggttggtaaataaccataccccttgattatgtggttaggagtttgatcctacgatctttgtgtatgctagaacacatattggaagatgtgaaccccttaaatcaatctttttatctcgaggaatagtttctgagactaattttattaggaaagacagtttgtattgcattagaaacataagtgtgataaatgttttctttcttaataaaatcctgttacttttggatgtttagaatcagcacccatgttaacaaaactaaattttaaaccataaaaagtatgtagtacttaatttttttaaagtaattataaacaattgataaggtgtattaaacatgatttatccatttttttcaggat

SEQ ID NO: 19996 - DNA, 729 bp, Glycine max
  Intron number 2 from transcript Glyma18g12670.1 (locus Gly ma18g12670) derived from phytozome v7.0 (chr-ID Gm18; pos 11889961 to 11890689 reverse strand)
caagtaagttactttcataactttttgttcaatgttaccaactatatatatctaatatacactgaagtatgtaacacaaaatgttttttttgttcctatattttacactatccttagagctaaattaaagcctttgacctgaaacgaagagaaagttgtgatatgaaataaccaaggttgtatataatatatcgatcctaataatttctcacatttttttaacacttcttgacagagtcacctttgctctttctttctctttttcttccttccatgtcacttaattagcagtgtcacatatgataagggtataaggagaggtatagaaaataagctattatatgttatttttataatattttttctctatatttctctctattatatgttcacacttcattcttattaattatcgatctctcttcttatcaaaaaagtattgtgaaaattataactggaaataccagtactctatatatttagcattttttccccctaatatttatctttttctttgttttatttatcacatcacattacttgtcatatctataatttttttctctatctctttttatttcatttgtttcctctcgacatgtatacacttcaacaaattaatcagaattttttttaatatatattggttcaagtcatataatctgatggatcttttcctttaatcttcatcagctactggaggaatcatcctgcaatcatctggggaat

SEQ ID NO: 19997 - DNA, 464 bp, Glycine max
  Intron number 1 from transcript Glyma18g12670.1 (locus Gly ma18g12670) derived from phytozome v7.0 (chr-ID Gm18; pos 11890964 to 11891427 reverse strand)
ggaagtccccccacaggtttctccgattctctgtgtaatcctctaactgaagttatctacatgcattagtccaatattcattcaaaaagcataaatagtgtacattcctagcaactttatgagtgaatataacttttcataacataatactgtcttttatcctttttataagaaacaagtgtagtgtaaaaatacttataaaaagactattattagttttttattcatacgttgcatgaagtttgaaatgaaccaacttacaagtttatgaaagattcagtgtgtttggttacacgtgtcagatgcggtttttgacctttaataaaaagctaatagttataactttcacagacatgattccttacttctcaatgagtttccaaacaagtgttttgatgatatccattgtctttttgttttttcttcactcattgcaggctcacacaatagtagtcctccatctc

SEQ ID NO: 19998 - DNA, 953 bp, Glycine max
  Intron number 3 from transcript Glyma19g39710.1 (locus Gly ma19g39710) derived from phytozome v7.0 (chr-ID Gm19; pos 46302463 to 46303415)
gcagagaccccctattccttccctgcactcccaaggcaaatgctcctcaatctgattttttttggaatacacttaattattatgccaacaattgaattaatcttgcatgcctcttttctgtgtgtttggtaaaactagcttataagctataagctaggaattgaaagccaaaagttataaactaactaattgacttgaaattgtttgcttagattagctaataagctaactgatagatataaaacgacataacagaacatatttagttatttgtggcaaaaagggatttcaaataaattaatggagataaaaaggaaaaaaaaaaaaactaatagcttataaggtagcttatttcataagctacttcaactagcttatgaaaataacttagaagctactaaaataagcttgcataccaaattataaatgatttatttttcttacaaatcatgaatgaagaacgaccattttggagtttggatacttagattagaagggatgaggggggtgggggggggactcaactaatgtatcaaaataacctgtcattaatgtgttcctttttttccctgaggtgtcccctcctattgactgaaattattggagttgggattatttttttttcaaactttttgtctttgaagcataatttttacatgcgaggtagctttagctgagacattgttgtttgatataacggttttatcctatgttgttcaatgtatatatgaaaatatttaaccctattaatcatttagaacaattttgttggatatattcttcattattcctaaaagtgagagcctttttattgttactaaactctttgttctaattttttctttttcttgttttgatttaaatagcttttacggatcaagattgtttaatacaagttagcttttgaaatagtttctcaaaatctcatttacatttgctatttgtatgcaggc

SEQ ID NO: 19999 - DNA, 924 bp, Glycine max
  Intron number 1 from transcript Glyma15g13930.1 (locus Gly ma15g13930) derived from phytozome v7.0 (chr-ID Gm15; pos 10512488 to 10513411 reverse strand)
aaaaggtttgctgttgcaatgtgttaccctttctctctgaatttttctactgtttggattgaacctgacacccttttggataaagtttaagtatttagtgctagcttgtaccagagtttggtgggttgggtttcattatttttcagacatcttaattgtttagttacagcatgcttttggatgttttgaccaaggatgaaaaggattgctattgcaatgtgtttccctttctttttgaaattttcaattgtttggattaaatctgacacccttttggataaattttaattatttagtgctattgtgtagctcagtttgaagggttggatttcaaacgtcttaattaagtgcttattagataagtactcatcatgtgactacttgtgtaagagttgttttataatcaaagaagaaataggattaaattgttttcatatatgttgaagggtgttttcattaggagagtttattcgaataagttgaaaacaatttatgaacatttaagagaaaaaaaaaaagtaaaatgaattgggtttctgtttctcccacaagctaaaacaacttatgcacttcagcttttggaaaagttaaatgggataacttttataagagtgcataagttcggttcattttagcttcttattttcatcttctataagagcttatgaagaaatttattcaaacagagcctttcacaagtacatatatcatatactctctttttgtctgaagtttgcattggtatgttgccctgcaggctctaggagaggcttgtatggatagattgatggacatctaattgagttccactagtgttgtaaattgtttttggaatgtgcattttacttctgttgtcctgtttatcagttattgttatatgtgctgtttcggcaggtggataaagcatataaagtttttgaggac

SEQ ID NO: 20000 - DNA, 597 bp, Glycine max
  Intron number 1 from transcript Glyma20g17020.1 (locus Gly ma20g17020) derived from phytozome v7.0 (chr-ID Gm20; pos 23990668 to 23991264 reverse strand)
tccatctaagccaatcatcaacctcaactgaccaggtaaactctagtttgttcccacctttttaccctttctttatgcttcattcttttacttttttctctttctctctcttctagccaccctactctctaatttattcagctcatttctggtcttactagtttctgatttgttctcttatgccattttttgtttcttctttcaaaggggttactcttgaagttctataaagttcgattctttgttcgtttcactaacttggatgttaagtcttacttgcttttggctattttttatttttattttcattactttatcccttctttatgctaatatcaatcattagctattaaatattttttaatcttcttctaaagataaaaagattttctttggatggtgttaaatctttgaatttattaaaaagattttctttcatgtccaagatatctctccttttgttggatggtgttaaatctttggatttattgctgcttggggcaaaaaatttggttcagtatatggggtttgacttagatattcattaacaaggacttgaagttcatattcagatcttgtattttgtgttgacaggtg

SEQ ID NO: 20001 - DNA, 519 bp, Glycine max
  Intron number 1 from transcript Glyma20g32530.4 (locus Gly ma20g32530) derived from phytozome v7.0 (chr-ID Gm20; pos 41146771 to 41147289 reverse strand)
gcctgatcctctgcttcaggcacatactcccgcaggttctacctcttctcaccctttttcctttctttctttttctttccaaaatatcccaacttttaaaaaataatgccgtgtttgccttctaagaattactgggtattgtttaatttcttccctttttccacggtcctgaataaagtttttgcttttccccaaatctcagtggatgcatccgtcttctgattgttggatctttacttgaattcgattatgggggtttctattgatgctgattgtgtttttatgaaaaaaatcttgcaatggatataacataggtctcaatttttagacatgttgaaaatttcaaactttatgacttgggtttttgtttttgtttgatgttttgaagttaatgataagatttggatgatatagctatttctgattgtttctttatggttttcatcatatttcataacttttgattttgttttattacctggaaattgatgatacccttgaaactggatattaggttaa

SEQ ID NO: 20002 - DNA, 589 bp, Glycine max
  Intron number 3 from transcript Glyma16g30200.1 (locus Gly ma16g30200) derived from phytozome v7.0 (chr-ID Gm16; pos 33869324 to 33869912 reverse strand)
ttatagcaccagcattttctcctcttaatttgaaggttcatctctttctctctctagctagacatatatactactaacctagagaacatatttaatcatgttaattaagacctagtttcaacttgcaatcgctgcatgactttaattttcaacaatcaatttagaccattgtggcatcctagcgaaaattgtcgacacggcatcatggtgaagtttgaaatgttttgtatacaattttaaatgctgtttgtccttgatacgatcttcatgctttacatactaaatatagaaacattacccaatttgttgtttaactttaagactcctttgccacaaaaaagttaaataaagaaagccacctaagtaacagcaccttgtaggaacctactatgactagcccactccaaacaaattccatttgagagagttcatcacaaaatttccttctttaatttaatcaaaaattttaagggcaaatttgttttcgtgatattatcttgagtgtcaccaattgtcaagaaaagaaaattagttatctttttattcttctgacacgtgtatatttttattgtgtaatatgatataggca

SEQ ID NO: 20003 - DNA, 767 bp, Glycine max
  Intron number 1 from transcript Glyma19g38270.1 (locus Gly ma19g38270) derived from phytozome v7.0 (chr-ID Gm19; pos 45222747 to 45223513)
tttttcttgttcaggttaaacttttcacttttttctttattgttcattgcaacatatatgacttccatgtgaatgtgataattgagtgttattgaagtactttatacataacttcttaataagaacactttttaacctttaggtgaaatgatttctcttaggatttggtctttaattgagtctaatgacgattggtaattcatgtagctgacctcacttgttatgtgtttggttgcatggtgagcaaccaaaaatcacagtatcgctgaaaaacaggatgcaacccaatgttgttttactttcaccatgaaaaaaactatttttttttttatcatagtgctgcagctccaaacattgctattagtaggataaggcttttgttgttgtaatcatgtagccaacctcactttgcttgttgttgcaatccaattcgtcttcatttctcccccccccccccaccgttttctctgaaaacggtaatagcaaaagatattggatgttgcttgcttttgagaaattgtgatacccgttgccgggacaaatttataatgactcacctgtaggctgtaggttattttgtttcttttgaggtttgatgtgaatgtgaattgcctatttctctttattgcgtgttttaatgctatgcccttttctattacccatgagaatcgattatctttatatgtaattgatgaaggtatacgtcatgtatgttgctgatgcctaatacagatacaacatccaagatttcaactgaataggtttga

SEQ ID NO: 20004 - DNA, 571 bp, Glycine max
  Intron number 1 from transcript Glyma17g14970.2 (locus Gly ma17g14970) derived from phytozome v7.0 (chr-ID Gm17; pos 11710278 to 11710848 reverse strand)
ttgattttcttctatttctcgatcgtcttcacgaggtttagttttctgaactatataccatcaaattcgtaaaccttgaggtttgagtttcgaaaaaattattaatcgcccagcaaatttccttcgccgataaaaagtaaattgtcgcaaccgtcttgtatctctttccctgttttttaaggaaagattgtctgcaatcagaggtttttcttttttccttgattccgttgcttggaagagttgatcggaaattccataataaaattttctttttaattttatataacgaagattaatgttctgttgcatactctttttgttaaataagaattttaggtgtaggtccatcttcaatcttcatcttgtttttttgtgattattgctgggtacttgttttttttttttttttttgctgtttctcaatgatgcccccctttttttttatttctaaaacttagtattttttattttatttcgagtgattaacgaattatttgtcctttgttggaagaatggacgatgcatcatcttagttttgattgacttttgttttatgctaattccaggaaga

SEQ ID NO: 20005 - DNA, 436 bp, Glycine max
  Intron number 2 from transcript Glyma14g40160.1 (locus Gly ma14g40160) derived from phytozome v7.0 (chr-ID Gm14; pos 49136771 to 49137206 reverse strand)
tactgggtggatttgttctctacgaagaacaggtaagtttatttaatttcttttcaactcctttcttccttcaattcatataacataaaaacagttaatagaatgcctgaattatcctaactctcagacattattttcaattccactgatcacaaaatataacataaaaacatctttcttgtcatgatcaattccattaattatgtgcttagatatattttgcattattttgaggtatgttggaagcattaattaatcaatattaatttaagcttctattgtttgctttccttttttttctcaattaaatgcttgttttgattggtaaagtaatattatccacataatttgctccaataattagttagctagctaataatgaagttgttcctttttttgttgtgcaaattatataaacaggtagatcacggaagga

SEQ ID NO: 20006 - DNA, 824 bp, Glycine max
  Intron number 3 from transcript Glyma17g03140.1 (locus Gly ma17g03140) derived from phytozome v7.0 (chr-ID Gm17; pos 2116357 to 2117180 reverse strand)
ctaggtaaccaaagttgctgttctactttgtgcgtgtaggaatgatggtgctacattatgcatcaaatttatatagatcaattattaggcttcttacacttgtagggatgttgttgttgaaccaggtgaaaaagcctattagtattagccatgattgaacatttttcttaaatgatttaattagagaaataatctgaaacaaaatgcacaccatataacctgaaatattggaaattaatgagataaactctttctctattattagaatgggagaacatgggtagcaattaagtgaaaagagattaagagagagatgattaatttaaaaaatattaagggtaattttggaagaactgtaggagctcaatgctagtgttataaaaggataaatatttagtcgtaatactatttagaataatttgccttatccttttggatcttttattatagttttattacacaaatactactgattttgcataatgttatttattcttctttggttaggtgatagtactagtgttataaaaggataaatatttagtggtaataattcaaatatgaaaaatgtacattttaagaggttattttataatgccatattatttggtactccatgttataatgtcaagtttttttggcattccttgttactttggtgttggacttatatgtagttgttttgtattatttttattcgttcgtaatggtgtctttttcttattgttgaatctatgtattattttcttttcttttatcctgtttgattttaataggccaaatgaaaaaactgatatctctgcaatgcagtaaatcagacttgg

SEQ ID NO: 20007 - DNA, 635 bp, Glycine max
  Intron number 1 from transcript Glyma20g32520.1 (locus Gly ma20g32520) derived from phytozome v7.0 (chr-ID Gm20; pos 41128462 to 41129096 reverse strand)
ttttatcgtaagtttatatgttattaatgatttaacaataaaaagtggaataaatatagctatatgaataagaatatttagagtacttttataaataggtatattcgatgttgtttattgctatatataatcggcagcggtaagaagagataagatcgaggataatctttaaggatagaaaaaagggtgaaatttaagggtgcttatatataggtgctaattaatagtagggttaaggtactgtggttttcattggtcaaataatcttctaggcttttgctttccactatctaaaagctgttatgtgcgctactccagtcaaccaattcgtttgtgtgttcatactataaaactatgatctcttattctctatctattttcttagtttccttcgtattcatccacacaaataataaaaccgctcctaaaacactataaggtatacaactttaatatacacgtgctttattatctttgaaatctttcatcaagctgaattaacggattttaatttggtttgtgcacacaatattaagattgatttgttatatttttcatttagtttgattacaactaaatttttttcacaaataattttagaggtgttggatcaaacggcgagttgcacaacggcc

SEQ ID NO: 20008 - DNA, 725 bp, Glycine max
  Intron number 2 from transcript Glyma18g32910.1 (locus Gly ma18g32910) derived from phytozome v7.0 (chr-ID Gm18; pos 38475092 to 38475816)
tcccttgctttcatctcactcctcacctgctctcaggtattttttgatcatcactggctattgttcttgtttaaaattctttgattttcctcaaagtttgttttcaggtgatgctacgtttttggtataagacagaaggatgaaaaataataatatactgtgtatttttgtttgattagatttataataatgcctaaaaagtactatatattcattatttcgtttttctttttaatatttctgcaaaaggaaaaaagagtgtataaatgcatagaagaatatacgttttgtgcaaacaaaaattttaaacgtgcattatatttatcgggagatctctttatttatcaatgttgtcttgcaatttgaaaattatatatttaaatgtttctaacaactttagtgattggcttttcaatttgcaagtgcttgttagggcagaaaatataagctgccaagaaaacataattagtgtctgtataccactcaatgaccaagggtagtataatatacatgccattttggcattttaggggaaatttgcaaaacttaactgtgcatcttggttcagtaggtgcactacattttttaaggttctaggattaaagttaattcctttacttctttatcctctttttgccatcacttggttgacattagtatactaatagttacttgttgatgattttgtgatctccattgtttcagggataatttgggcttgcagg

SEQ ID NO: 20009 - DNA, 911 bp, Glycine max
  Intron number 2 from transcript Glyma17g29520.1 (locus Gly ma17g29520) derived from phytozome v7.0 (chr-ID Gm17; pos 32176761 to 32177671 reverse strand)
agtggctcttcaaggggtagcagtggttatcgcaggtgcatagacttttccttcttttttcatttttgctcttactatacagtaatattaatgtcatttccatctcatgccttttacttttactttactttctaggttgttaagctctgacaatttcagtagaagactttgcaggcagaatttgttcactatttttttttgtatcaagataaacagttttctagcgctaaagctgtatttttctaaacacaacattctaaacaattactagtttctactgttcctctttctagatgaacatgattatgtatcagtatacactatacagcttactagaatcatactctttttactatgcttcgatgtcaataatctaactagtcatattagtgaatggtgtttcatgtgcattactgtaaagcataatattctgatttgaaaaagaaacatgatctcactcattatttgctagctgatttattgtggttcatttcaatgtatatcatacttaagaagtggttatagttgtaaattttgtactagttagcttttgaaagttattattcaatagttctttacttgctattgtattttaagagaatggtatggttttcttactgtttttctttttactgttggtcttaaaagatacttccctgggccattaatgatgagatttcatctgattcaagtgtttgcatgttctaccattttcgaatttattcagtgtgataagtaatatggctatcgaaggatcctatgtgattgactatcataggagtgacttagtgtatttgatttagagttatgtggttatttgatgtttgaactttgagttagaatgattttcttcagttgtctttagaatttcgatatccttatttcatttatgttattcacagatcccatag

SEQ ID NO: 20010 - DNA, 771 bp, Glycine max
  Intron number 2 from transcript Glyma19g38640.1 (locus Gly ma19g38640) derived from phytozome v7.0 (chr-ID Gm19; pos 45504862 to 45505632 reverse strand)
ccgtgaggtaaagtaaattaaatttggcttaacttgccatttctgatgggcaattaaagcccaattcattagggaaatcttcaaagcttgtaaacaactgaaatctcctgtagcatctgtagattaagacattaagattagcttaacagtgaggagtttgaatgagattgtaggtttaaattatgttgcgtgtattattatgcaaagagaatgatgcatagatccaactagtacataggtaatggaacacggctttaggtaaacatcacatctctggaagttttaatactagctgcattggatgagtgctaattggttagtctgtgttttggtttcacaataggaagcatcaaaataatacgtaatactaattatatctctgaaagctttaatactagctgcattgaattagtgctaattggttagtgtgtgtttggtttcacaatagtaaatgttaagagttgattttgcctcctgtcaaacatataagattgattttgccttaattttgatctgattagaagagataaaagtagattttcattaggttgaaaatttacaagttttacataaaaaaatttcgagaataaaagcatctaaaccctcaagtgttatttcaatttttcaaaattaattttgtgaaatcaattttggaaactctcacctaaatgcaactattcttcaaccagttgctagtttagtgatttgtttatggtctactttaaattggtggcaggaagagtttctgcaaggatcttgagcttgaacgtt

SEQ ID NO: 20011 - DNA, 674 bp, Glycine max
  Intron number 1 from transcript Glyma15g05570.1 (locus Gly ma15g05570) derived from phytozome v7.0 (chr-ID Gm15; pos 3947488 to 3948161 reverse strand)
aacttcccctgtaaatcgcgtttcgtttgtgcaaggtgcgtttcaatcaccaattctgtgatttgtgcttttcacctgatattttggatgaatttttgtgcttacatgctgtttttggttactggatccgtaaacttctgttgtgttttctggatcgaaattcttttgacttcgtttgctcttgctgatgtggatctacttcgtagctgcatcttgtgtgtttaggtttcggttgttgcttaattttgtggtgagatgttttctgatgcatcggttttgattttcggcttgtttttatgcgatttatagatgatcaaattggaagatgacattcttgcttagcttgttaattatgtgtgtatcttttatttttatttacgagtcttgtggatatgttctgctatgcatgcttccgatctttcgagtgtgtaaaaatctttttattgcaattgcatgaaaatgatggtattactcgttccttttcttgattgaacgaaaagtgaaataattgtgagtagtagttgatgtagttttgcataactgagtgatagtgaaaaaaaaaaggcctctctagaattttaagcttttaattgttgcatcatattttctttggtttcgttcttttttatttcctaaacaacttctttcccgttctctgctacaggttttaaaag

SEQ ID NO: 20012 - DNA, 612 bp, Glycine max
  Intron number 2 from transcript Glyma18g05050.1 (locus Gly ma18g05050) derived from phytozome v7.0 (chr-ID Gm18; pos 3793739 to 3794350 reverse strand)
gcgattcaagtatgtaatatataagtttctgctatgttttcctttgatgtgaattctttgatgattgatattttttttatgctatactgtcatctataaagggtagctgagattttggttcaatttcaatgttgattgtattcgttttgggtgggacatgcctagtactatttgttaaagaaaggtggaaaagagagaaacctttatggtttttggttttgcctatttcaaattccaaatatttttagatttcacatttcagaaaaagggttgaatttacactcctaaaaaaaagtttgaatgcttccctttgggaaacagttattagcagaaaggggcctgcttaaggattatgaataacacttgttcttgtctttaccaaaggagttgtttcactggtgttttctttttcttcttccttcaaatattttcttgggtgtttttgctacttgtcttcatgtggagtgaaagattcgcctgaaaggtgtctgattccttagtggataaataatttgtggtctggttggccattatatattaaaattttgatgttcccttgatgattataattcattatatttctttgctctttgaattgaatgtaggatcaaa

SEQ ID NO: 20013 - DNA, 825 bp, Glycine max
  Intron number 1 from transcript Glyma19g04970.1 (locus Gly ma19g04970) derived from phytozome v7.0 (chr-ID Gm19; pos 5206127 to 5206951)
atcagcttcacgatcttcttcattgagataacgcggtggaacaaccggattcatgacaaaacgttgcagtttatgcgatttgatgacaggctcaacatgctgtcgccaatggagatagttcgaatcattgagcttctcagtgatggaattaggaaaggaccgagagatgaaactcaaagatgcggaaaccatggatgaaaggatctagaacttgtgaagagaagagcgcttcgaaaaattggctctagataccataatagacagattgagagagaagttttgtgtaacagagagagaaactgatattattgaatatcacaaaagttatttacagagagatatttatagaactctgaactgagtacagctgttaatagcaaggagggaggtgctgttagcaaaaacagaactgttttaacagttatacatatatataggtgggctaggggtgaccacatttaaggtagctttccaacagaattcatatcataaacacagcttaaatgttcttgaggtgttctaaagtctgtagtaattgaataatcctcaggcaactcttcttttcaatttgatttttgggctattcaatattgggtatgttttcaatatagttaagctgaattacagataacgttatattgaaagaattaatatatttattctcattcagaccaagaatatgttgtttttgaaacaaaatataaagtttcatgattaagtttccatagactttttaattctcttattcttctatgaactttggtgtgaacttagtgaactcttgttccagggttgttagccaggttgaatatccctcactggttg

SEQ ID NO: 20014 - DNA, 639 bp, Glycine max
  Intron number 4 from transcript Glyma16g04330.1 (locus Gly ma16g04330) derived from phytozome v7.0 (chr-ID Gm16; pos 3670553 to 3671191)
atttttcctcacaatattggtcttggagccaccaggtatattgatgtcaatcatgtttgtctcacacccttaaaggggtgtgaaataggtgaaagggagagaaaatttgatagatgtgaaaaataaaatggaagaataaaaatagaaagagagaagagatgtaaaattaatataggactataagagaaagtgagtgcgaaaaaaatcaaaatcccattgacattagaggcactcatatgccttagcttttcttaaaacaaaatgtagacctattcctgattatgttatttaagccatgatgtgaaacaattcagacattagtcatcacagattgtaaagtaactcggacatgcataagttagtattggacttgcacggcctaattcggcctaatgtagaaactgaatataattgttttgtctggtttatacccaaaaacctgctttcctctggtatgttattgtcataatttttttaatagatggacagtttagatatgtaagtcattcaggatttttccttagcacaaatattctattcttattgtaattaacacatttcatgttatagagataataatggatattcttattttgctggttagggaccctgaactagttaagaggattggagctgcaa

SEQ ID NO: 20015 - DNA, 517 bp, Glycine max
  Intron number 1 from transcript Glyma19g39570.2 (locus Gly ma19g39570) derived from phytozome v7.0 (chr-ID Gm19; pos 46203088 to 46203604 reverse strand)
gccaattctcgtaaccactctcactcctctttttttttctttcttttttcatcactataatctctgtttctcttatttatcagtataaatatttttatttatttgttttcttatcgatgtgttgaggaccgagaaattatattgaatccgaagcttattgttgtttgcaatattatatttctaacttgagcttgcactgtcggctatcatttccattgaaataaattgctttctagtttgattgtatgtaattttcattaattttgtcttatttgtgattgatatttaaagtgctcttaagtggactagtgaaactgaaacttgtctgcagtgtcaagggttttgcgtgtgaacaattgctaaggttattattattattattatttttatttttaagaggtcctttagttgaatctaatgtttactctaatcctcaaatgttttgcaacacaagggtcttgttaataagcttggtggtttttgtttgcagggcaaaacatcaggaagttggttaagg

SEQ ID NO: 20016 - DNA, 892 bp, Glycine max
  Intron number 4 from transcript Glyma18g16160.3 (locus Gly ma18g16160) derived from phytozome v7.0 (chr-ID Gm18; pos 16493715 to 16494606 reverse strand)
tttcatcctaacagtgagtacaaaactaccctgcaattccactttggagttagaatgacaatcacgtgaaatttttgtacaatcaatacctgagggttatccttacttttaaaccaaaacttcaaacagaaggggaaagttgttttttaaatccacaacattcatttagcttttggaagttattctcgaaacggcttctgtggtgattttgtcttcctggaagctttcttcaagaataatatatctaaaaattaaaatatgcataatgcattattttatacttcagttcaggtttggcactttggttctgtagaatgtagacagtgtgcatatgttgtttgcccttaatatttagtccttttgtaatgttgttctaaatttattatatttggttggaaaaaaaaacatatatattttggatatttaaatgcatgctaaacttttgtaagtaaaagaatataaaaattcatgcatagagggtgaatgctgctttctcatatagctatttatgtcctgcagaaactggttttgggtattgatttgattaaaatagtaattttgaaaattcttgcataaatattaatttgtcaggatattttaaaaccgctctgtaaggatcttctatcatgtaataacttaatgtagaaaattattttaagcgatctgaccattgaattgtacatagttaacaatttaatgtgttgatcttaccccaaacttttgaaaatttcaacaattacaggaatgtgatcaagtggtgaatattttcatttgtttcgaaagcatttcctatgttaatttaaattgtggtacaaaacaattttgtatatgtttgcatgctaatacctttgaatctggttctaagcccctctttacttggaaattttagttt

SEQ ID NO: 20017 - DNA, 621 bp, Glycine max
  Intron number 3 from transcript Glyma18g16160.3 (locus Gly ma18g16160) derived from phytozome v7.0 (chr-ID Gm18; pos 16494648 to 16495268 reverse strand)
gaggtacaattatatctatcttctaccttatagataactgagactttgtatcttatttcaatgtttccaaatgttatgatagtatttgagtttctagtattctttaactacgtggagataacatctgtcccattaagcactttatgaattatgatccacatggatatgtagaggatcaagatcaactgatttttgttcaaaagtaaatttttatagagataaaagttgaggtggtgaactgcacatccatttgtctattatgtatatgtatatttgttatgctgtaatattaataagctttttcttatcgatttaaaagtgttttcttgtgttcaaatttattctagaaagtaggacaattcaaggtgtctattggaagtgtctaatatggtgttattcttatttgattgatacaaacatgagttcaccttgtgggtgtgtcacacaaggtttagtatttgatgtattttaggtgcttaaaggtaaaggtttaaattcacccgtttgatggtaatttagttgtgcctaggtacagtgttttctaatttatgaatttttatatgaacaatatccttgtcttttcaggtacgtttaagttgacacttcagtttacagaggatt

SEQ ID NO: 20018 - DNA, 687 bp, Glycine max
  Intron number 1 from transcript Glyma18g16160.3 (locus Gly ma18g16160) derived from phytozome v7.0 (chr-ID Gm18; pos 16495546 to 16496232 reverse strand)
ctgcacctcccctcacacccttcctcattcgcaggtcagaaccctctctctttctctttctctcttccgatttcgcttaaaaatccgctttttattttctgtgcatggctttttctgaaattaacttatacgcagatgaataattgatttggaatttgtttttaagaatcccttgttttgtgggtggcttcctactttgtggtggaattggagaaatcgatctggggtatctgctaaaaatcccaactttgtgattgtgtgaagaatgttttaatgggtgtttggaaactcttgatcttctgttttcttgttctgggcttttaaaaagcttgaattagcatgtccccactttgttgttttagtttgtggatgaaatgaatccttttttaactcactgatgcttataaggttgttcagttttgattttatggaaaattctggagttttctcatatagtggcgtgataattgttaagctttgagaatgcaaatttagctctattgtctctttgtttgcattcgctgaacctttgatgtattatctgatatgttatcgaagattttcttgtttactaacttactctccctttatatctcaattttttatgtgtgcacgtgagctgatgagcatgccaatgactgattactattgtttgaattttacttgattgagatataggaggtgaag

SEQ ID NO: 20019 - DNA, 632 bp, Glycine max
  Intron number 2 from transcript Glyma18g01250.1 (locus Gly ma18g01250) derived from phytozome v7.0 (chr-ID Gm18; pos 646387 to 647018 reverse strand)
ctctttttgctactgctttggttctagcttgtattgtatgtctttatttcttcaaatcaatcaattttttttttgtagatttcatcgagggcttgatagtttttttgatacaaaatttgatattagaactaacatttaccgataaaaaaaaataaaaagtgtgatattatattggatattctatctatattctatttttcatctctgcacttgtaggaatggacatggatgtgatgtttgcatgaatgatgtttggattgatagaaaatatgatggaatggaatgaaatggcactagggttgtttaaaatagaatggaatggtaccaggttctgttgtttgggtttcttaaaatagaatggaatgacaccgatggaatacatttcaatccatgtgattcaatacgcacgagttggatcctgtttttgttccaccataaaatatccaaacaataaaatggtagctttatttcattccatttcactcattcatagatattcgaacagtcactgttaagaaatgatttgatgtcctaaaaacaactaggttatacaatgagaaactattgttaatgactagcttatgggttatatggtcgggcgagtttctgataggggatattgctggcaggtg

SEQ ID NO: 20020 - DNA, 629 bp, Glycine max
  Intron number 2 from transcript Glyma17g37200.1 (locus Gly ma17g37200) derived from phytozome v7.0 (chr-ID Gm17; pos 41019288 to 41019916 reverse strand)
caaaccaccccgagtgagtcaacttataattttgccttcaagttttcttttttttcatgaaaaaaaaaaacacaaattgttatgtgggtgttaattggattagatgcccaacttgaggactataaagggcactgttttgtgtatccctggatgattttttgctgcattataaataaatactatgaaattgaaaacttaaaatgtatagttgctaagagcatctcgtggtgaataataatccctcctccatctttaattataagacatagttgactaatttaggcatattaaaaaagttggttattttaattattagcattaaatttatagtattttttcaaatttattcttaattttatttggaacctattcatcttgttcgatctccattggagagagaaagagataattcaggatattttagtcaaaaaagaattaatgcacaagagaggtgaaatgaagtcttacaataagggtcgaacaaaaaaatttattgactatgtcttcgggacggagggagtagtatctttgatgattgagtcaaataagatgtgtgatccatgtagttgataccaaatgggatatggcttttgttgttgttattttgcagtgtggacgtcctacaagta

SEQ ID NO: 20021 - DNA, 545 bp, Glycine max
  Intron number 1 from transcript Glyma18g02230.2 (locus Gly ma18g02230) derived from phytozome v7.0 (chr-ID Gm18; pos 1392516 to 1393060)
ccggtctaacccttgcaatcttcgctattccccaggttcacctactatatgaaattaattttatttttcttcacatatatcattagtgccaaggttttttagaaaaagtctaactgtgattttgaccaaggttttaaaaaattattgttgcagtcatagtttcgtcacatttgatattgagagaaattgcagacaaacgtgaccaatatgatcacaaattgtggttgtaaacgctccaaaaaccataacgttatagccaaaaatacaactataaaatcctaattttgatcacaatgtcaaaatttttggtatccccacaatcacaattataattatattgatttgcaatttctcataatatcaaacacctggaaaaaactgcgtcttcaatttaaaatcatggttaggacataaaacattataacaaaggatgaaaaagtagcatattaagaaagatattagcacttaaaatttgtaattaggaatatacatgatataattacggagtcaatcaaaattcatgcctttaattggtgttgcagtgt

SEQ ID NO: 20022 - DNA, 622 bp, Glycine max
  Intron number 1 from transcript Glyma18g46440.1 (locus Gly ma18g46440) derived from phytozome v7.0 (chr-ID Gm18; pos 56184522 to 56185143 reverse strand)
agttctcccatcacattcgtgcttcacccttggaggttttcttgtatacccttttgcttcctttcatacattattgtaaataaccaaatgggtagctccttgatccctctaaacattaaaaggctcacttttttatttgttttttttattaaagcttggattttttttttatgcctgttcataaactaagctaattaattaatgggtgttgggtttagcggaagggctaatcttacacaacatgatgaatcaaaggtttgaattctgcctaggagagctgctaacattttttgggtattgggtttagtgtctcacagtttttccaataggatttgataaagttcaaggtagagagatagaaagaagagaaaagagacaccgagtattactttagataatgctcaaaatgagcaaatcaatttttatatgaatacattaggtcttatatagctaaacttgtaactaatttgtaactaacttgtaaccaactaaactaatttttaactaacttgtaaccaagtaaacccatatgggtgattgtattctttgggggttctgtggagtatgtttgttggttctagttttaagatagtacttggtggtgcaggagtgggaagggaga

SEQ ID NO: 20023 - DNA, 635 bp, Glycine max
  Intron number 1 from transcript Glyma17g08560.1 (locus Gly ma17g08560) derived from phytozome v7.0 (chr-ID Gm17; pos 6339662 to 6340296)
gtcttttcttcaggtgcatcacttcacatcatggtcttttctgatttttatcttccgcttcaatactgatttgagaaaaatggatggaaaatagcggggaagttggtcattctgttattctttatttttttggctattgcttggtaagatgatacaaaactgtgcatatgagatcatggggatgcaagcaaaatttcaactatgatttcactttagagcagataaatactaaattgtggagccgtgcttcatcacgaattttgataatcactttagttttgtttttattcaaccattctcattagggcctttggcttcctagtgggacctcaggtatcccgcaagctttagtcctttgagtcgactatgagattaatttttggtctaggacttagtcacacttaaggttatcgccctctcaagaagtgtattttgcggggaccaaacctaggtcctcccctacaaactcagcgtctgtgttagcagctgagctacacgcctacacccattgggtataatcactttagtttatttccatttaattggcagtaggatttgtacatttgtttcttttaacttcttaacctttcaattgtgttttcttttttctttttcttttttttgcttaagcagcc

SEQ ID NO: 20024 - DNA, 607 bp, Glycine max
  Intron number 1 from transcript Glyma15g03380.2 (locus Gly ma15g03380) derived from phytozome v7.0 (chr-ID Gm15; pos 2373701 to 2374307)
gatcacaaagataatccaactgacatcacgaactggtgagttttatatagttgtgattaccattttgataacatgattacagatgctttttaaatttaagtccactgttgaaatattctgtgtttagaacttctgtttctcaactactcagaacttatttataaacatacatgtagttatgtttggtttttcattttgggtttaaaaatgccttgttaatattatgatatttctatgcagcactagcctaattacttacccggtatgtacataggctgatttaccattctctatgtgtttctaactgatcttcatagcctttcacgtcaaactacaattactattacagcatgctctctttccttttttattcttttttagtttcatttgtggctttatgtctaaagctacattacgacaaaagaccttaggcatataagtagtcgacatatacctaaaacattgttcccaagtataaacattgtccctttacttcatatggccttaaaggccttatatttcctacatgttttaatcattttgtattttctgtacaatgattttgtttgcagatatactggaataattgaaaggggtaccatttgag

SEQ ID NO: 20025 - DNA, 255 bp, Glycine max
  Intron number 2 from transcript Glyma17g16240.1 (locus Gly ma17g16240) derived from phytozome v7.0 (chr-ID Gm17; pos 12923734 to 12923988 reverse strand)
cattgtcggccgcgactttcttcccaggggatcaggttcgttgttcttatttctttaaccgtttcttcgattatttatttatttacttattttgatttatgctgtttggttgtttaattagtagtagaagaaggaaattgaaggttcttttgagtagtgtaaggaaaataaatccagcgaaattgattttttcttttttaacgtttcgagtgatgtttagggattgtgacgcggaggcctttggtgctgcagctg

SEQ ID NO: 20026 - DNA, 489 bp, Glycine max
  Intron number 1 from transcript Glyma15g35760.1 (locus Gly ma15g35760) derived from phytozome v7.0 (chr-ID Gm15; pos 40475495 to 40475983)
tctccgagattctcgctctccccaatcttcttcaggttcctcttttgtcactctctcgacgtttcattcattttccccctaattttgttttatttttctgatttctctttcagtttgtcgctgttattttttgtttaattttttgtatggatttttcttttcatgtaagagcgctggtttattattgtacagggaagccaaaaagtaatagtgttttcatcggtttatgtttttttttcataaaattattttactgcgtttcctgtaattatgaatgatcctagtagtgtattttgggtaatgtaaaaaaatgatggtgatttatttatggtggttattttttttaaattatatcttgttaatgatttgttttgttaaggcgttttcggcagcaaaataaaattttgagggaatatgaaagtttctaatttcgactcgtgatttcttcttgcagcttgaagctactgagaattctgcttatcttgatat

SEQ ID NO: 20027 - DNA, 717 bp, Glycine max
  Intron number 3 from transcript Glyma20g08040.2 (locus Gly ma20g08040) derived from phytozome v7.0 (chr-ID Gm20; pos 11174323 to 11175039 reverse strand)
ataaggtattcttttccccttctttttttggtcattcactgtgctggaaaccttgaaaaatttatgaacaagcaaccgttttttggtgtagtttcttatgatctttaaatgtggctggaatctggttaattttagttgattataatctctgttggtattgtggtgtgtcaagattttcaatttgatcctttaattgctatattatttaatgctattccttctctgatatttttttaatgattttagatttttatgaagttacttactgaatcagtaaatctcttttttgcaaaaaattctctagataaaagtgaccatgaccatatgaaagacaccataataaattggcactaagttagaaaatgacaatactttgtcaccaatcagtgaattgaactgtcactctggatactttttattccaaagctcaagtacttcattgttaaactcaaatgaataaatatatttattgaggattcttaatgttcttggactgtcacttgctaaacacaaaaaaagaatgactatacattcaaatgaaaaatttaaaagaacttttaacttgctgttgttttccatggttttcttgtttttagattttaatattgatctgcatgaggtatttttggtgatatgaatactagagatctgtttggtaacattacaattatttgttacttagaaccttgaattggagagtaagcgtcggaggtcggc

SEQ ID NO: 20028 - DNA, 490 bp, Glycine max
  Intron number 1 from transcript Glyma18g31550.1 (locus Gly ma18g31550) derived from phytozome v7.0 (chr-ID Gm18; pos 36631059 to 36631548 reverse strand)
gaggaggtaccacaaccctctttttaattgttatgcattgttagtgtaatcaactaatcatgtgtgattgaattttaacctaaattcttagaatttttcttgtaggcacgtcatattagtaaatagagtcttaactaataaaaaatcatcgttaacaaacttatcatacatggcgatgtgtgatgggaagaaatgtaaaaactctttatactggtagtgcatttaacttaaatctttggagtttatcttacagtcactttgtattagtaaatagtgacaagataaagggatcaaatgttaatggaccaagtgtattttatactgatggtgtttgtaaattaaacttttttttttcttttgatgctgattttgtggaatcttagtgggatgaggtttttgttgttgctgacgatgttgatttttttaaaaggtttgttgtgtgaaactgcatgtaggttgagggtcaaactgaggaagtgatctttgatca

SEQ ID NO: 20029 - DNA, 661 bp, Glycine max
  Intron number 1 from transcript Glyma18g07900.1 (locus Gly ma18g07900) derived from phytozome v7.0 (chr-ID Gm18; pos 6645756 to 6646416 reverse strand)
ccgccctagatcccacctccgacgcccctccaagggttagggtttctaattcccatctctatttttttattcccaaatctctctctctactctgttgctctcattgttaatctgactcgacgtccattttcgttgcttcggaaatgtctctgatcaaattttcgatttcaattctagggtgggttttgggtttcagtaatgtactgattggaaccgcagaagaactataagcatgtgtgaaataagttatattattttgtgactgtgatagtgtcaaattttcaggtcaatttttgcattcctccggatagggttttgctgtgatcatagatttttcatttttcattttaggaagcttgaaattgtactgttcttcagtttttattggcatttgatctggtgtacgtgtatagatttatttgttaatttaggcttcaatatggcaatccatgattttctgaaacccctttttctgaaacccctttcaatatggcaatcctgtttgtactatcataccatagctcgggtcatgttcaattgtgcaattttctgagttctgtttttttttttttttgcccgttttatttgagaaggaaaaagttgtttctgttattttacactgtgtttggcttttgttttcagaaacaagctgtcaagaaag

SEQ ID NO: 20030 - DNA, 904 bp, Glycine max
  Intron number 1 from transcript Glyma16g08040.1 (locus Gly ma16g08040) derived from phytozome v7.0 (chr-ID Gm16; pos 7276944 to 7277847 reverse strand)
aaggctatttcaagaacagcgactcccctttacctgtaagtaagacaatttcattgcttaccctctatttgtcttttgcttcatttacttgttagtttttttaacattaaaattggcatctcgatcgctatttctaatatgatccgttctccttaactggcagtattttattataagataatctaagtagtaggttttggtaaaagtatttttattttttatttttgtttttaaatgtttgtctcacttaaaaccttttatttataagataataataattttcgttgagaacttaactatagccacatctaattgaagtctttcccctcaattaccttattttaagggatttgattctaattctacatggaccatcgccttgttgatgttgaaagaaataggtttcgtgaaactaatattttttaaaaataactgtctcacttcaaatttgattatgagctagtaaagatagatttggagctcaaataactttgtagtcaaattgaagacatttcatcccaaaattgattttggagctaaaatctcatttgacacaattctcaaatgcacaaccatacaccttaaaaataggtaaactcacatttactcttcaaaaaatgggtttgaagacttacaaaattacaaccaaaaacataagcttgagttttaacattacgtgtttcttatgtaatttgttttgcttagttgtcacttctcatgcttgatcagattaagaacataaattttagtgggaagaaactagaaatttagataaaatctttcataaaaaaaagggatttttttatgggttattatgtcccaaattagttcttctattcacatttatttattatattatactataattttgtgtgtttggtgcatgtgaagactgctccgggtt

SEQ ID NO: 20031 - DNA, 787 bp, Glycine max
  Intron number 2 from transcript Glyma19g27660.2 (locus Gly ma19g27660) derived from phytozome v7.0 (chr-ID Gm19; pos 34965426 to 34966212 reverse strand)
ttgaggtaattagtcatatctaagtattttagttgccttgcacaacatagcttttttttaatgtataattaaaattaaaattcattgttaataaataatattgaatatataaattatattaaaattcatgtcttggatatgtaaattgtattttggatttataatgaactatttcttttaataattattaaaatttaatttaaagataggaatgaaggaggttagattaaaagacataaatgattaaaaagacaattatacttgtaaagataaggtggtttgagatgatcaatgttattaaataactgttatagcactgccgtaatgctataacgtggcgttttttgacctcactgccataggaaatttgtgaaaggaggtctgctatggcggtgccataagctgcaatggcatgcttatatgacggaattttggtcttccaccatattctgccatcatcaattgataacctgggagatgattgagagaaattgtttggttagttgccagcgtaatgtgtcaaatacaccatcaaaggaaagaagagagaaaatattaagaatgtctaattgagagagtgagtttcagagttgtgtattctaatttatgatacatgagtagatattgctaactttccatgcatgcatttttttttgtgtgtgtatgttttaatttcattaacttcttttaggggagggattttaaagggcaagaagtaagtgataatgggtttaattgagtgctgatttttctttttatttttttatgggtaggcatttttccagag

SEQ ID NO: 20032 - DNA, 529 bp, Glycine max
  Intron number 1 from transcript Glyma18g47120.1 (locus Gly ma18g47120) derived from phytozome v7.0 (chr-ID Gm18; pos 56758659 to 56759187)
tagccaaggaagcaagatccacctcgtaaaatttctttcacgtttttttattagatgagaaataaagattatacatatttcaattgtaatgttttttgacttctcataatgcaattagaattgtgggcacattagttgtatttgtttctatgtgattttcgtaatatcaaagattgcgacgaaaaagtgagataatgatttaaaaccttgatatgaaatgagattatttttgagttatgttatttgccttaatttaagtatgtttgtcgtaagagttattaatattttaccttttggcgacaagttgtccttggcataatttaagaattttttttatacatggcataatttaagaatgtttatgcttgtgctgtttttcttcatggctaaaatgggttgatgggtgttgaagatgtaaaactaatgttgagcgttcatatatttacaagagttggattctaggagttttggcaaatggggtatttattcttttttttttttttttcaggctttggaaaccgaggtagtt

SEQ ID NO: 20033 - DNA, 885 bp, Glycine max
  Intron number 2 from transcript Glyma19g03420.1 (locus Gly ma19g03420) derived from phytozome v7.0 (chr-ID Gm19; pos 3443759 to 3444643)
tgtctgaggagtaagatattaatgactcaggtattttcttgtatctgtcgtaaagtcctgtttaattttccttttcttcaaataaaaaactagttctatatgaagtaacgattaaggctggaaatatgttttctggtaattatgaactggttttcattattgagagctaggcacaattttatgaaatttagtaatgttaatggccaataacttatcctttttaacaggtgttttagttgattagaacctaccaactatgcttgcagaaaattaaaatgttttaaatatgataaagaattaggacacaagatcttcaattttaagcacctgttttttaacttgtatctgcaacacttgatctgactgattttatcaggttttgtcttgctattatgaaacaatgctcttaaaccgtaaattctagtgctgattaacacaaaattatgacatttttatttgagtatatgaagagagtgaaataaatgaatgtagatggtgttattctggtgtatgtgaaggatgggtgaaaagaggtaacaatgtggatttgtttttttttttttgggtttaccctttaatgtcaactatgcatagtattttagccacatgtgagcaacaataaacagtactgatgacataaaaccttttgttaattcaagtggagtggctgccaaactcctttccttctgtgtgctagtgagaaaatataattgaattatagggtttaggagggagaaaaaaaaaggagagaatggagacttttgaatagtattctcttgagtattgtaaagtgtaagtgtgtaacaatgcagcagacatatgcattacctacttttattatgaaattgtgacatttccttggacaggttggcattgaattctcca

SEQ ID NO: 20034 - DNA, 806 bp, Glycine max
  Intron number 1 from transcript Glyma14g13020.2 (locus Gly ma14g13020) derived from phytozome v7.0 (chr-ID Gm14; pos 12109151 to 12109956)
gaaggaatcagaccctacaccgttgacaaaattaggtagtgactcactcttcattcttcctataattcttttttttcttttccacttcttaattcttatttttgctttcttttgttcactgattttgtagtaataactaataattataaatattactattattactagagagtgcgcgctcgcctgtgatgcgttgcgttgcctcagattcaggcaactcatggtggtatgtggaaaagggtgtcatctttttagggtttccttgtgattcttgagactttaccttttttctgggtttctttctcatgaccctccttcttctttcttgtgtttagagatatggggcgtttttgtttttgaaatatgtttccttttaactggtggggtttagtgcaatctgtttttgttcagataaagtttgtattttttgtttttgttttaatgtttttcaggatgtttctccctcactagagttgacaaaggtagatgaagttgataatgctagagaagggtgtggtgtggcacttagcttagctatttatgattgcaatttttccaaaaatggaagtttggattcgttgatgttgaccggatctgagtaccccatttcactatcaccaccttttagctatagttcatgccttgcatcgcctgaatttgcttccccttttgtcttatagggttcattaggaatggaaaatgcctccctttcacattcttagatcctattcaatcaaaaaagcaggtgctaatttagttgaagtatgacaggttttgtgttggcagaggggtgggagggtaacttt

SEQ ID NO: 20035 - DNA, 924 bp, Glycine max
  Intron number 1 from transcript Glyma16g02750.1 (locus Gly ma16g02750) derived from phytozome v7.0 (chr-ID Gm16; pos 2344275 to 2345198)
ctgccacaaaggcgtaccttgatacccttcaactggtatatatattcacctttctctctttcattttatcaattcaagggtgatataaatttatgttgtatttgcttcacaatttttccttttttttcataaaaatgtgtaaaacagccccttaattatattggcattccacatcttttacttgtatgttgttctatagcttcttttttttcggtatatgataccgtgatagggcttctttttttaagggtcctggactatttgcttttattggtactgtttataaaaattatattattatcagaaaaaagtgagaagaaatgtaagtatttctcatttgatgtggccaaagatcatagatctcaaagaatgataaaggactttcatagacgtaactcattgaattcatagatttgaaaaagaaacaatgaaagtatgtaaatgatctttacacagagcatattagagctgacaatttttctaacaacctaataacagttgactaatatttctaacaaactcaattctaatcaaatggatgtatatcaatccataattagttgtaaaatttccataaagcatgaactgatcgattaataaacagaatatttgtcttctttttttaatcatatacaaaggaatttaatgtaaagaataatccttaattttgtggaatggattgaccttcattattctttggccttgcatatagtttgatctacgaaaccttaatttaaatttcaatctgcaaattcttgtaatcaagctactaagaacttttattgacaccttcacataagggccatgcgaaattttatacaatgtccataattccctaatttgtggcaggtattctaagcttttaacaagtattatgtttcatttatttcttcagtgtaacaatcacaaaagacaatacggcac

SEQ ID NO: 20036 - DNA, 785 bp, Glycine max
  Intron number 1 from transcript Glyma19g30350.1 (locus Gly ma19g30350) derived from phytozome v7.0 (chr-ID Gm19; pos 37959337 to 37960121 reverse strand)
tccttctctacaaagagcttggaaggaggctcaaggtatggtccctttcttttcttttgaatttgattcaacattcaaagggaaaattttaaaaataaataaataaattctatgcactgtccgaataaaattttttgcactgtgaactaatcataaatcaattttagaccatcaattaatcagaaattgtggctctcacgattttcataaacacgtttttttattggataacaatgtaaaaaaaattaaaagaggagtttaaattctattattggataacaatgtaaaaaaaattaaaagaggagtttaaattctatggaccgtcagaataaaaaaaattatattgtcaactaatcaaaaatcaattttagaccgttaattaatcagaaatcatcattgttatgattttctaaggtgattattgtaaaagttaacaaatttaatatatacgagggtttctgattggataacagtgtaaaaacaaaaaactctttacactgtcacattcagagaattgttttggaggggccattgaaaagtatagataatcattgagacaatttttgttctttctcaatacagttctaattctaagtactaggattctgttcctatgatgttgtggtcgtttgatgtaattctgctacatttcatttcttgtaatgagctgtcttggacaaggttgttctttatgcagttttggtcttttgttcttggcctgatttattgctttggatgttgatgttacagaaaaccaaccccgtggtggcagagattttctctct

SEQ ID NO: 20037 - DNA, 886 bp, Glycine max
  Intron number 1 from transcript Glyma15g22520.1 (locus Gly ma15g22520) derived from phytozome v7.0 (chr-ID Gm15; pos 21199776 to 21200661)
gtgaggatatttccatcacagctggcttgcctaaggtatgctaatttctctagtagataagttttcttcctttcatttgtattctatatatactctgttaacagcgatgacacattcacatgtagtcattgatgaatatgttatgtgttttttggtttgaatttaccaaaataaaggattggaaagaaaaaagtttagaacattttctgtctgtgcatttataagcaaaaagattaagaagaaataattttgattgttctggtagtggtgacaaaactattgtggatcttttataatgataagttatgagaaatttctctttcctcatgctatatggactttatacacacaactagtatttataatgagtaatagaagcaatgggtgttagttgagaggaacaaatcttgaccgttgggtcttgcaatggtgatctggagtagaaattaactaaagttaatctattcccattgcaatttatgaagtcacaaaacataatctaattctacctacctgtgtgatttagtggtcatgatttatggctctcactttcgcaataagcttctgttctcacttgatatgtcccttacatgcatgcacaaataaatacttctatgctacattggagctattgttttctacttggttgaggtaagttgttcatatgagacttaaagctgtgactactgtgtggtgtgtggagttgtaaattgtaattcaccatacttactgacagttcaatataattttggacttattttttgtcactgaataagttacatttcctatttcactttgattttaattttggactcttttttttttggtcttgacatagcatgtttatttaattctgcagcctgctgctcccaaactgggtacgctg

SEQ ID NO: 20038 - DNA, 347 bp, Glycine max
  Intron number 2 from transcript Glyma19g06370.1 (locus Gly ma19g06370) derived from phytozome v7.0 (chr-ID Gm19; pos 7282073 to 7282419)
gattccttgcttggaattcgagttggaggtcaatttcttgcaaacacttttggtttaatcatagattttcttattcttagtttgtttcaacttattttcaagaaataatcgcttctctagctagtgtgctaaaagtacttttggaaacaaaacaaaaaatggttgtgttccaaaatttaaatttatctaacagatttttctatctgagagttatcaatatgtatcaaatctgttcctatctctgaccaaattttattcttccaaaacaagcacttggttttgagttttgatggttgatctgcttgtttgcagcacggtttcgtgtaccgtgagcacaacaggtcacc

SEQ ID NO: 20039 - DNA, 642 bp, Glycine max
  Intron number 1 from transcript Glyma19g40080.3 (locus Gly ma19g40080) derived from phytozome v7.0 (chr-ID Gm19; pos 46545248 to 46545889)
ggaagccaagaggaaaggacgtcactctggatgtatttttattcccaaccccaattacctaatgttttggggattcagcccacgttaggccctatttggaagaggtgtaaagtctatttggatttatttatgatatataaccacttgtgttagtttttgaggtagtttatgaaatagcttgttacatgtctatattctgttttcagaattaagctctacattattgcttataaaagcagcttgcaattatatgaaaatagtttaattccactctggttttgattataaaaccaatttatatgtaggtgcttgcatattaagtacttgttcgataagattttaactaagctatttatgcaatcggtcccttagtttgtaatttaatcttatactttattatgttcctagtctcgtttgtcactttatgtattctgtattcattatgaaatttctatgatattgtaaagattttaccgagttgtttgccattttgataatagcattggccaatgtgattgttttgtgaaatatagtctgtatggaatatttaggggtgcaaaggcaggaattgcatgattacttatagtgcttgcctgaatgctactaggtaagcgtaagggtacaagggaggcaaggcttccc

SEQ ID NO: 20040 - DNA, 303 bp, Glycine max
  Intron number 1 from transcript Glyma16g02650.1 (locus Gly ma16g02650) derived from phytozome v7.0 (chr-ID Gm16; pos 2235405 to 2235707 reverse strand)
ggtttgttgtggttggaatttcatgttggattattattaccttgtttggtcactgagaacgttgaggcataaaagggaaatgcttgtgtttatttagcaattgctcatgtttttgttttttttaatgatgaaattttgaggggtgtgtgaatgacccttttcccttgtgaagattggggaaagtggggttgagtaaagttgttaactttctcagagaccatgcaggggcattgagcttgttttcttgtttgttctcttctcacttggttctgttttgtttttgttttgtggcaggtttgaagg

SEQ ID NO: 20041 - DNA, 886 bp, Glycine max
  Intron number 1 from transcript Glyma17g29620.1 (locus Gly ma17g29620) derived from phytozome v7.0 (chr-ID Gm17; pos 32308827 to 32309712 reverse strand)
ctcgccaactaattctattctctgttttatttgaggtaactacatcgattttatctttttttattttattttttattcttctattgaaagtgagttgttttgcttttcactcctcacttgccgctgcggatggatgtaaggttttaaattgcggtcgcagtcgcggagtctctgaaaatcttgacattgtgaaaaattgtgaatgcgatgtggttttggagaattaaaaaatcccgatgttgtggaaaattttggctgcaagtgtggtctcttaaaagactggtgaatttgagaaattgtggtttttaaagactggagaattttagaaccttagatatttgaaggaattaagcagaggcggacaattttatgtatttggttttttgaaagattattgtcttgggtttagtcccctgaggattttaagggttgttgccttgttggtgttttagatttgttttatattttggatcttgggaggactcggtttttgaaaggattggttttttggaggatttgggttaaaaaaagttatttgtgtttgggaatgaatggttggtttttctttctttgccattctaggaatgatgttttaaaagttagtttaggagaactgattttgtttggacgggaaagtataaccactttttgaatgtaaatgtagatgtggtttcaatttttcagtagggtctttgaaaaaaatgaaaataaatcttttgaggagtgtgcagtaatgtttcccttttattgagtgacaatggagggtttacttgaattttaaatttcttctctgacaaattaatatattcttattgattattgagggtgtttttataaatggattttgcttaaaatggtttcaactttcaggtcattgctgtaggtt

SEQ ID NO: 20042 - DNA, 693 bp, Glycine max
  Intron number 4 from transcript Glyma15g10500.1 (locus Gly ma15g10500) derived from phytozome v7.0 (chr-ID Gm15; pos 7624356 to 7625048 reverse strand)
aaacaaatttgcttcaggaagaaggttgtctgattttcttttttttacttggtgaatcggcctttttttaatacaatgtgtggatattccttacttactagatactccgtagtagtttatgattttcataatttatttagtttaatgtgtttttactcattttcaatttatagaagaatgaaggtgctgattgtcacatgctgaaaatgaataaggctctgtttggaaaaacttctcaataagcacttatagaagaagaaaataagaaggtaaagtgaagtaagcttctctcataagtcaaaattagcttatgcacaagttaaaataagcttttggagaagctaaatgaaagacctctgatcttctacaaattagcttatgtataagctaattttaacttgtggggacaacttatgttgttttaccttctctttttgtatcttataagtgcttattgagaagtatatccttaaggtgcctaaatgtaaatcttttctttttttttgggggggggggagtgcttagtcaatgtggtactctgtataatggttgaacgagcatgtttagttttcaggatttttgttttttgggtctacatttctattattacattatttgaatttcatgattataattcttatttgtgttccttttccagtttttttgtctggatacaatcttcattttcttttg

SEQ ID NO: 20043 - DNA, 965 bp, Glycine max
  Intron number 1 from transcript Glyma17g00730.1 (locus Gly ma17g00730) derived from phytozome v7.0 (chr-ID Gm17; pos 383265 to 384229 reverse strand)
gctcaactccttcccccaaggttcgtttctttgtctctcttactttcatcaattcaccaattttaactcttctatatatccttcccctacctatttccccctttttctttaccatacaagcctactcaataagaagctaggttccatctaagtgctgcaaatttgagattatttttaggttgtgtttatattttgtcgtctctgtcttcacttgagatacttccactgcagaaatgcatttttctttttctttttttaattttgcttaggaaattatgtagatttgcaattttgaaaagtttcaaacatcgtgttttggaatcacttagcaaggaagtttaatttcttatagcatcaaatattgagggtgtttcatcatagacatggtggtacctgctatcttagattgaaatacaacataaacctagcaacattgctttctgcatttactttttgctcatcaaccataaacttatattatgctccaagaaaatttattccacccataagattaatgttattttgcacatataataactcctgtatgtagcccaattactacattttctttctgtttggctcgcattatcttcaaacagagaacaccctactgaatttctgaatctttcaatatttgttagtaacagttatccttaattctgcacatgcatataattagaagacatgttcgacatcttctttggtatccttgtatttctttttgggttagtttattatgtcggctctattgtcatataatgggaatgttacttgcctgcaatgagagactatggaattcctggtgtcactctttttgataaattattatttgctgactgtttttgcagaatttaattatgtaatgtaaattcagatatgcactttgaatttttaatcatacagtctcagcttgatgcttatgttctgtttttgttctgctactattatagctttctggcatctca

SEQ ID NO: 20044 - DNA, 902 bp, Glycine max
  Intron number 2 from transcript Glyma17g17990.2 (locus Gly ma17g17990) derived from phytozome v7.0 (chr-ID Gm17; pos 15108495 to 15109396 reverse strand)
tggcaggcaccaggtaacgatgcttcattctgttgtgtttttttgttgtttttttgcgttatgtaataatgttacgtatttgaatgatgtgtgattaccttaactctgttacttaatttggattcctaaatgtggatatgatggtgacttgtgattattgcgaaaatgtgtgcctagggtgttataggatagtacattttggcttgtggtctaggcttttgttaaatattgacgccgtaccagccagcatgttcttagtaagagtaaaaatggaaaggtgtaaattgggggagtgaagattgataggatatttggatatgataaaataggttttgatcttccattttctatttttccgtttatagaaagcgcaccctcagagtagtagataggggtggggaataagccagcaacatatttggctttgagcttttcttgtctgccttggtatttttcttacctgagttattcagttggttaagattaggcctttgaagacctagttaggctaacatgatggcatctgtgtgtgtgtgttatttttttaatatgcttgttttgtttatgatggatatatttatcaattttataaacattacaatgattttgatttgatgcctatgcttatttgagaccttgaagttgtaggcctattaacctatttgaaggctgtcatttaatatcagccttcaaataggatttcagaataaaataggttgttatattttcataaaaagctaatccaggcctacaaattacaaagagatgtaaaaaataatgttgtttaaaacttcttgtatctacgtgtctgtaagtccatccactttatctcaagtagactggatttctgcaattttatgctaacaggatccaaagtttcagccggaatcttcaagcaccta

SEQ ID NO: 20045 - DNA, 554 bp, Glycine max
  Intron number 1 from transcript Glyma18g41410.1 (locus Gly ma18g41410) derived from phytozome v7.0 (chr-ID Gm18; pos 50296874 to 50297427)
acaaggtaactcagcttttcaaatatcttcttcttacttttcttgatttgtgctgatttgatttgtctccaaaacatcacctttcatgccatctagatgtgaaatctttgaataagtttagtgaaccctgaaaaaagttaaaaaaaaatttttcattaattgtatcaactttgtctaaaatcataccaatgattggtcaagttcattaaacaactacctccgattattatgatttgtgtaatccttatggactcggtattttgggggtgagttagaacttagaaggtattaggtgacatatttgtttatagcaaaaatgatggcaatacactgtttagtattgactgaaattaatttaaaattacaaattttgatagatcacactttttactttaaggtggctcgccagattttgtaatattagtatagcatgtgttaaaaagaatatgctagagagtgcgttggtaactcgattacgcttgtcctcataattttataaaaaaaaaaatcattaataaatagtatgatttatgaaatcagattgtgggtgctgc

SEQ ID NO: 20046 - DNA, 525 bp, Glycine max
  Intron number 3 from transcript Glyma19g31320.2 (locus Gly ma19g31320) derived from phytozome v7.0 (chr-ID Gm19; pos 39085550 to 39086074 reverse strand)
acttgcttaagaaaatcaaggtatgcttgctttgccttggtttctattcctgtctcatgtctcttttaaccattttattctccaccacttttcttctcagtttttgtggccaagattgttttcccttttcacaaagacccttggagaaactttccattctgaatgtgtgcattcatttcaaatttgatgttgttggttaaagttagttgtcaagttggactaatttcattactcaccaccactaaatatattatcaagtgtaatccttttgccattttcttttttagttttccacccaaaacaaatcaggttcaatatgtgatggaaagatttttctttcttttccaaaaggtcctactttagtagctggatttgatttgagtgaaaaaatcgtttgagaatcgatggaaattatgtgctcacttcacttattccatctggaaccaacaggctcaaaaacttaatagtattctctctgatgatatttcaggaatcttcatctttgagaaacataccggtggtgat

SEQ ID NO: 20047 - DNA, 619 bp, Glycine max
  Intron number 1 from transcript Glyma19g44930.1 (locus Gly ma19g44930) derived from phytozome v7.0 (chr-ID Gm19; pos 50228759 to 50229377)
tcaagaacaacaaacccaaatcaaccaccaatctggtacccctttttttttcttttcatatcaacgtttttccctttccacaagtaatttattgggaagaagatttgtttatttgttcagcacgacatgggtttctgagaattagatgaataaaaaaattgaactttccttttaattcaacctacccaattagtttatgagtaaatcgtatgtcggctcactctgtaaagtgtttttacactatcaactaattggaaattgctatgtaggataattttgttaacttttacaataatcaccttaaatgtcattcctagtatgtatgtttttttgattgattgacaatacatagattgttacactgacggtacataaaactcaaagtttagtttataagtaagcttcatgattcaatattttatttcaaatgtgtagatacttcacaatatgatggtatagattttgtattaacagttaggaaaaaagagatcttcttatgccatctgcccatttagcttcagatttgttgtcttttgtaaataataagtgtttgagactattgttttttgtttgtatctgtgtgtgcagcttattacgaaagaggaaggtttgcagctct

SEQ ID NO: 20048 - DNA, 641 bp, Glycine max
  Intron number 1 from transcript Glyma19g03220.1 (locus Gly ma19g03220) derived from phytozome v7.0 (chr-ID Gm19; pos 3280713 to 3281353 reverse strand)
tgggtttcttgggttactggtactttaattatctcctctcctcagaatttccataaaatctttgttttttaaagagtaaatactaaatagtcttctttgtactgataatataaaaagaattttacattttcgtttgattacaaatcgtcgtgttttaagagtaagagaatgtttgattttcagttgcaaagattacgtttgaggcaaaagtagttttgccaatggatcagaacccttacttctgcgtttattttacttttatttgttggatttgcattggaacggatgtcgcaacattttcaactgaaaaccaaatatgcactaagtagtctgtgcaccgataatgtaaagatagtataagaaattttacattatcatcttattacaaattgtcatgcttcaagagtaagtagtctatgtatcgaagatgtaaagggaatttaccatttgacacaaattattcaatcactgtttgttaatttttacactaacgatgatttgtaattagttgatagtgtgaaatttttatactaagagtggatagaaattaaactctcttttcttaatgtttatatggtgttgtactcaaaggcatcaagttgttgttacttggttgtgttgttttggttttggataagggg

SEQ ID NO: 20049 - DNA, 779 bp, Glycine max
  Intron number 3 from transcript Glyma14g04610.1 (locus Gly ma14g04610) derived from phytozome v7.0 (chr-ID Gm14; pos 3168575 to 3169353)
aggctgttgggtgagtgagtgtatgcctttcactctttttagttttataattttatttactggatcatattattcattcctaaggaaaaagaaatccactgtttattaataccctgtttgtattgtatctttctgtatcaacataaacttttgcgctttactttttaggtaggtagagtaaacttttgtgctttaatatatatatgtttggtcaaactttatgtggttcttactccctagtcattacagatgtcgtttctacagacatcagttgtattaagtttgtgctatatcttttatacatgtaatggctaggttttgaccagttgtgctcaaacctttgctcttttattaaataaattacttttgcctttcaaaagaaaaaaaaagtattgtgtgttacacctgctaaaattgtttagaggcatctttgtggtctaactatcaggagtagttaattttctaaattcaatcctagagaaaagattggataattatgaggcaaattttaatgtttcaattttgatcatggattaaataacaaagcaaagtgtgtctgcaaaccttcagatgatttaacaacagtaatctgaacattgatttaagaacaaattctatgactaattatatttatctttcctacctatgttttgtgttggttgcaaacgatttggcaccttgagcccctttatatcttctgcatgttatattatagaagctgatgatgatgttctagctaattttgatatgatccagggttgtggaaagcgtaggagagg

SEQ ID NO: 20050 - DNA, 721 bp, Glycine max
  Intron number 2 from transcript Glyma15g34440.1 (locus Gly ma15g34440) derived from phytozome v7.0 (chr-ID Gm15; pos 38895171 to 38895891 reverse strand)
cagtgaggcatgtatatataaatgttgattctttatagtgtgtatttgaaatttgattgatttgtttgcacatcctatgtataacactataaaatgggataaatacattggtcttcagatttcacctcaataaacaaagttgatgtttcacgtggttgcaacttttgaaccacctctgcagctacttcctgcaagaaacaacacagattaataaacattacaaaacaattgtatgacttatgtaaatgaatctatcgaaatcaaatatataaatagaaaattacattagatgatgttaattaattctccttcatcatgatcattatgattagcatgaacgtcgtcagcttcttcttctccgacaacgttaggagtgatttttgtggacaaaggactaacacaggtgtccatgtatgaatcatcatcttctacattaacaccaattgttttgccctgtagaaccacgcaccacctttgttcacaaccggcaagtgtaccgaatcgcacaagtagtataaaatggtaagaaccgagtatcgaactctcagggaacttgtgttatctggcaagttatttcgataaataggcgtctggtatgaaaatatgactgtggttatgaacaagtatttaaactatctaggcaaaaagaaagaaaatcacgcaagagaaatactgtgtaaaaacaagtagagaatgtattggccttccttataggttcctg

SEQ ID NO: 20051 - DNA, 991 bp, Glycine max
  Intron number 1 from transcript Glyma20g36690.1 (locus Gly ma20g36690) derived from phytozome v7.0 (chr-ID Gm20; pos 44740547 to 44741537)
ctcgcttctcgcaaccaccgactcactcaactcaggtgcattttctcttttcctttcatttctcctcctgattcaactcttctccatgctctttcttcactcatcttctttttttctcttacctgcttcggagttcagttttttctccgttttcgtcgcttgcactgctcacattcacttccatgctattctttccttctgcatttgacttcgctgtctttgattcgttgcttttaacgttttttcggctatttgtttgtgttactacttaattattgtattgcctcgtggtttcaagaaatgtaggtcagagagcaaatcgttaatcacgcgtagtgatctcagtaattgttgctaattcaagtagctaagtatgaattgtgcctcgtcgtggttgaacgaacaaaacattttcgacatacactattatctacaaacgaatggaaagacactaatgcttcacgtgaatcatttttgtggtggaatcaaactatttgtcaagtaattagcgtcctgattattcaactttagtgcataacttagtgtgatccgtggttacttctctttaaccgcgcgatctttatttttctgtattagcgagcattgctggacccggtttttgactactttattttcttttctttttttttgttttcttatgattatctattactatttgttggtttctttttgcagaataatcaccgttgtattatattgtattgtacttttcctattctttatgagaaaggagaaaggggaaaggttaacttgcaagcatatgcaaattcttgagtaacttcgctgctagtgtagtttcccttcttacttcttagtcgcttagtgcagtagaatagttgtcgctgttaatctcaaatatggtttaattatttacctcccctccattttttttgtcatctaatctgtttgtaaggatttaacgtgtttgacttggaatgtatccaggggcgggaattctcttactaaattg

SEQ ID NO: 20052 - DNA, 569 bp, Glycine max
  Intron number 1 from transcript Glyma20g18980.2 (locus Gly ma20g18980) derived from phytozome v7.0 (chr-ID Gm20; pos 26667624 to 26668192 reverse strand)
cgtctacccacgtcaacgaatcatcctccctctatgtttgtttcatttcctttctctgtttttttcaacttctcttcagtattatggcgttttcatcgtgttgtccttttcttccaatttctcttaacagcgtgtttaacctttgggaaaactacccttttgccaattttgcaagaataatatcctttcattgatcattagctcataatttcgttaaagttttggtcttgaacgtgtgtatgttcattcaataggttgtttcacttgtttggcatgtgagagaagtacccttttgacacttatatgagaatttgttgtcttgattgattgttagctcagaattttattgaagttttgatcttgtatatatttatgattttgattttatatgcctaattgggtgtttcggaaaaagtacacatgtggctcttttgttactcatagtttccttgactgattgttaggatttagctgtacatatttatcacaaaacaatgtgtatatggatgtgttcatgtgctgtcagttgattgtttgtatgttgaactttttgatcactaggcttcagc

SEQ ID NO: 20053 - DNA, 1043 bp, Glycine max
  Intron number 3 from transcript Glyma14g06620.2 (locus Gly ma14g06620) derived from phytozome v7.0 (chr-ID Gm14; pos 4858137 to 4859179)
tgagggaagttagcgaacagattgccaagtacaaggtcaagtaacatgttctgtttttcttatgtttaataatattctacattactgctatcagtgctatgtaattgtgaggttgctatgtgtgtaaaaggatgttggttgtagtagtttggtccttgttttttatgatatcattgcttaagtaatgccaaaattttactccacaactgatagttaagcttattaaaaaagaactaacacacacacacacacacacaaaaaaaaaggaacgtgtaactaaatatacatctcctgggagtttctttttagtctttaattgtactgcagtttcttgcaggacaatgatatatgtggaggaacccctatctttgtatgacacacttgcgattcttttttccattcacctaaaaaaaaatggcttttgacctaagttgattgtctgagtgagattattaatcgcaatttaggtgatatcattaggagtcacgtagcagagaagccatgttattacaactaagttttgtatgttgctaagttcacacacttaggtctgctagaaagagtccttcacttctcaatgtggcaatgcctcactaagggtgtctttgcaaaaccattctctgttcaacgtgaatatatcaatttttttttagtcacattcaatttctcggaatgtaggaaatggagggtacagctaaacaaacagactaaagcattaattttctgtcactgtttgttgattctacagtatattctacacgttaagatttagctacatcatttgctgaccacatttattatttgcaagttagaagagtttgcttcaagttgcagtatttatgaactttttactaatcttcactgcacaaaattttgatgtggatatgccatagtttgcattaggactaagcattatggtaaatattcttttattgagtacagtatggaagacttgcttccctatcaaggaagctattagaaaacttccttatcaaaagccttatgttttcactaactatctgcaggttgttcaacctattctc

SEQ ID NO: 20054 - DNA, 542 bp, Glycine max
  Intron number 1 from transcript Glyma20g16990.5 (locus Gly ma20g16990) derived from phytozome v7.0 (chr-ID Gm20; pos 23956422 to 23956963)
atatctccttaagccgcctcttattcgcaacagaggtcatttttccttgcgcttactctttctctttcttcgatattcatcaaatacgaagtttatacatagtaaaaaaaaaaaaaagaagaagaaaaataatgaagtatggcaaatgagacggttctggtgtgggtttctctcatttcattaaaaaataaataaataaatcaagtgtataagatgcaaaccatgttatttccatatgtgcatctatttgatggcaatttctgttgtcgctttaacaatttagattgagagttactactagttaaggattttataggttagatggtttaaattttacattgagcagtttggaacatgttattatggtaattgatttttgttttaaattgttgccatatgatatgttcatgtatcctttcaagtttgaataatcagaatgttaatgtgtttcctgtaagtctacaatttgttctctatttttaaattttcacagatcacctttgattgccccacagtgtggaactttattgcagattcagtgt

SEQ ID NO: 20055 - DNA, 811 bp, Glycine max
  Intron number 2 from transcript Glyma20g16990.5 (locus Gly ma20g16990) derived from phytozome v7.0 (chr-ID Gm20; pos 23956989 to 23957799)
ttttgaattgtttaaagcaggtagcgtcatgctctttcttcttgtatattttttagtatttccctttttcttcggatgattttttagttttattgatattttgacttaagatccctgttttttggaggggttgagtttctacattttcaataccacattgggtataacatatatggttaattaataacaagcttgaagatgagctcctaggggtattctattttagggttgaaacttgagtatattcttttgagttgttactggtttcaatcccaattgatgaagctgttgtaaaatttatatttttgccttgataccctactcagattagttttgtcttttatttgttaaaaatattagagtattcagtagtaaatagtattaacaatgttattgaacatcatttatactagtaatagaacactagtaattgacctagattattatcaaacaattagagctgtgaagcctgtgttttgtgcaacaatcctgaatgtttctatattgtttttgtgacagcttgtactagttatagaatgcttgtacttgacctagatcattagtgaagaattaggggtgtgatgaagcctgtgttttgtgcaacgatctggggaatgttactgtactgtttttgtgacagttttttgtgagtctttgttcttatacttggattagaatttagaactgggtatgttccggattctagaacaacaaagcttaggactctgaagcctgaactacattatgttgaacctaagctagtggagaatttgcaggtgcctactcgtgaagattcttaccaggttaagtt

SEQ ID NO: 20056 - DNA, 772 bp, Glycine max
  Intron number 2 from transcript Glyma19g13070.1 (locus Gly ma19g13070) derived from phytozome v7.0 (chr-ID Gm19; pos 16330414 to 16331185 reverse strand)
ctaagtgagtttacttttatgagaaagaagcaaatctctgctctaaaacaaaacatacaagtaaataccaacaaaagtcaaatacaagtttcctagattataggaatcaccaatcaccagcttctaaatccaagtggccttctttaaaattttcactattattacatctgtagatgtcatctttggaaattgaaatcccaaaaaatgtcccccaaaaaagccctaatttctttgttcattggtcttttttcgaatcaacacataatgccactgtggccactacattaaaccgctttgctatggcaacccctgtagtgggcagtcgcctctccgcactgacacaccactactgcagagcctatttaaaaccctaatataaacaagctacatacaaatttcaaaatagctgctaacgaactatagtgtttttgggtctggctgctatgccccagtgtcccactacttgggatttaaaaattaaaatatgctactaactcaacttacaaactctgaatactaaacactcatttcagtttttaagtttgtttcattatttatatccagaaaagaaatttgctttattgcagaagcttaaattgctaatgtaataaatttttgcccaccattaattctaccaattaagtcttctttttccctcgggaaaataatttgtctaataaatgataaagtttttatgatttacttactgcttcatacatgaataactttaccctcaattccaggttattgaagagcacttatcataagaaac

SEQ ID NO: 20057 - DNA, 531 bp, Glycine max
  Intron number 1 from transcript Glyma19g13070.1 (locus Gly ma19g13070) derived from phytozome v7.0 (chr-ID Gm19; pos 16331277 to 16331807 reverse strand)
gccataggagccgttttctccgacttcgtaacccttcttttccctttcaatttgattctcttcactttttatttcagtgccctctctcacacatttgaacagttttaggcgtttcttgttgtgaaggaaaaaaaataaattctgttaggtttgtccattaatctactagcgaacctttttgttcaaatatctatcttttcgatcacttctcgttctgaatgcagcgttactggcagagaagattttgtttaaacttattgatgttattctttttgagcaaattattgagattattaatcttttaattttagaaaagattatgttatttttcattattttaaagtgtaagcgattttgaaattggaatattgccaagtcaaatattgttgaggaacaatcacttcgtccctttaaatctgtttcttctaatttggttatgcctttgatcttgttcttggcattgaaatggtagcttcattgcaattgtgtcttttctgtagggtttaatgatctttgcattttcagggtggg

SEQ ID NO: 20058 - DNA, 841 bp, Glycine max
  Intron number 2 from transcript Glyma17g17520.1 (locus Gly ma17g17520) derived from phytozome v7.0 (chr-ID Gm17; pos 14393870 to 14394710 reverse strand)
tcattaagatcctgaaacccgtgaagaagaagaaggtgagagccatgtgtgagcgttgacgttttctttattcttttgtgaagttttggattttgttcttatgtcttggttgggtttactttttcgattcgagtttcgtaaatgaatgtgttgttatgcttgtgctgcaataatcatagacaagacaagtcatgttattatattgagggatgcttacaatttgtagagtggtatgcttatgttgattttgcagttgaaacgttttattgtgtgtgtggtggcttgggttattttattttctgggaaataaaattgaccaaaagtatcacaaacttgagagaaaaacttaacataataatcaaattcaaacacaaaagcatagcatcatagtcttttgacaattctgatgatgtgggtgaaggttctggcacagatgatgagctatccttgatcaccaaaaatgcataaaaaagatgtggaaaagaaatggcaaaggataacgacctttcaagaagaatttcaagggaaggataaagttaatttgtgtgtattataggctgtgaatgtgaatgtcatgcaagtggccttagtgctacagagtagttctagttgcttccatttggttactcagaataaagatgctctagtagcagagggctgtctagttgtttattttaaagtataaagtatatatatatatatatatatatatatatatatatatatatatatatatatatatatatatatatatatatatatatatataaatgtaactctgacaatgcttctgtttctgaatgcagatcaagagggaaatcaaaatattacagaatctttg

SEQ ID NO: 20059 - DNA, 921 bp, Glycine max
  Intron number 3 from transcript Glyma19g01460.1 (locus Gly ma19g01460) derived from phytozome v7.0 (chr-ID Gm19; pos 1075558 to 1076478)
cctgctttcaccttcgtgcttgcagtcatttgcaggttcccttccctatcttgaatcatataaatatttgacatttttttgttttttttttatgtttagttttcatttttccacttgacttgaagacaatatatgcatcatagatatttatttaaataagagttttctttttataatatcaatgatcaattagtcaaaattcataataaatataatttttaagataattattttaaaagtcaagattaaatgaaagggtaaactttcataaaacagatagatagactgtttacagtttaaatactgtatcaaacctacttcatatctttaaagaaaaggaaaaaaaaataaaactttcatattatatggaagaagtacaactcctggcggatctgtttcattattgagaatgtgaaccccacagctttcccacgttgactttacccttttggtcattcttgtgataatttcgaaaaaacaaaggccagtagtatactttttctatcatactacttcgttattgaataaagtggtttcattagagagtggagccagtgttttttttttttaagtgaaactaacactaaattcatccaataacagtgtactaaaaagggatttgatttcagtagaaagtgcgtaaaggaagaaagtaacatgcatttaatcaatttaaactagaatacttcatagatttaatttaactcacttaaatcaaggatggatgcacttttagtttccttgctttagagaatgcatggatgcacttttagttcaattagaaaagcactaacagtgtacaaattttaacttttgacattaaatcataggttgtcaattgtttattaatcagttttaattttactaacaggcacattcttgttttgttttttcttgtcctattaccaccacaaattaagg

SEQ ID NO: 20060 - DNA, 670 bp, Glycine max
  Intron number 2 from transcript Glyma18g51640.1 (locus Gly ma18g51640) derived from phytozome v7.0 (chr-ID Gm18; pos 60487820 to 60488489)
cagataatcgtgttaatatcagagtccagacaacaggtaagtaactatgcagcatcgtggtggatataatgtgattgtgactttgatttgcaaatttgtttccacaatctagtctcatgaatctatttttgtattaaaatcacaagagtagtgtatacttagctacgaaattcgtgttttgttagacaatctcgaatattttcttcacttactatttgttacttttggtcgatatgaagttgttaataggagccaaacttttgtaagccaactattctatcacagcattgtggtactaaaaacttttcttatcattgcatggcattctctgttgaactaagaagttttcttatcagagttcagatataaacacattataaggtttagagtttagacagtgcatctataaataattaagcagtcaaacacattatacaaaattatttttcttctataataaaaaaacatagtaggatgtactgatgtagatcatccacaaataagttttacatcatgtatagcatgactattaattaatgcccatatgggtatttgcattacgtttcttgtatttttatgctctaaatttgtctatttgcattagtattttgctgttgaatgtgcgatttctctgcatctgtaggcgatccatcacgcgaggtgttaaaag

SEQ ID NO: 20061 - DNA, 794 bp, Glycine max
  Intron number 1 from transcript Glyma14g05020.1 (locus Gly ma14g05020) derived from phytozome v7.0 (chr-ID Gm14; pos 3486367 to 3487160)
ctcaattttgataccttgtcacttgttttcaacaggtttgcttttccaaactcttcagtgtgtcaaaaatcaattctaactcacaaaatcatggtgataccatcaataatggaaggaactatttgttgctttaccttcaccatggaaaaaataataattaattatttttcgccatgaagctaatccaaacacactattaatcattcaggagtcattatcacattgattaaaatcatgtttggattctcgttatgttagataaaatcatgttgaggtaccagctaacttgattttttaaggtaaactgttcatgtttttggttgcgtgttgaagaattgattgattctggctccaaagtcaattttgagtgaagcgattttataatggattttactactaattttgttttaatataaaaacaatcaagcataaatcacttcattttaaaatcaatttttgaccgaaattaattttctttctttctaaattagcttcattcaaacacggactaagttaattttctgcagtttaggtattaacatttaatgtttttttttttataaaaaaaaatgttaggggagaattaaaggtgtggttttcctttaaaattttgatttgtttgttataattgtgaagagtgaaggaaatatggtttgtagaggactggaatttggatgttgtttatgggagattatttatttatttatttatttatatatgcgctttgttttgttgcttggtttaatggtgtttcttcaggtcgagtagatttgccaggctccaaggtattcagt

SEQ ID NO: 20062 - DNA, 955 bp, Glycine max
  Intron number 3 from transcript Glyma15g20000.1 (locus Gly ma15g20000) derived from phytozome v7.0 (chr-ID Gm15; pos 17586215 to 17587169 reverse strand)
gaacatttggtgtgttttgttttcgctttgaaagatatttagttcctctgtgtaattactttttcacaaaatggcatgtttgattaggttcccatcacttttgttattttagaatgatgttttttatatgccacttatatagtccatattgtagtgatgtactgatgttacattggatatagggaagattgatgagataatggaagttattaattattaataatttttttacatttacttcgttatatgtcaagttactttcgatttgatttgttttcgacgccgttgacttcatgttgctttcatagaggaaagggaatgtgaaagtttgagtttcaacgaattctcccaaaacgaaaaaaacttgtactgttgttaggtttgctacagccctttgaccttgtagcatacacaatgtacatacccacctgacctttgcttatgaacaacaacaaaagccttattcatctaggtgaggtcggctatatggattttatgatgtcatcttgcacagttaaaaaccaaattcttagtgatattattcaccattagattccttttaatgattttcaccaatgtccttcttggtctcagtgtaccccttttttttacctggataaaaaccttgatcccaacctttgctcaaattcaaccttttctttcataagaatgagaatgacaaggatttaactcttgattatatgtcaattaacaactatccctcaagcttaaactgtcaagtaaagacacgttaattattttctgatagtgtaaacaatgcatcgtccaaaagtttgttgaacttcattcatgaaagtattctttaacatgtcaatttcactgtttggggtcaaaacattattttctttcttgttatagcaagttcatctcttattaatcataatttaattgatttattggcaacagcgttggttcttgtaccgacgcgggagct

SEQ ID NO: 20063 - DNA, 880 bp, Glycine max
  Intron number 5 from transcript Glyma20g25650.1 (locus Gly ma20g25650) derived from phytozome v7.0 (chr-ID Gm20; pos 35298475 to 35299354)
agggcacaaaagtttccccagtggacatacctcttgtaagtactcttttacaatctcagggtctgtgacattcctttgggtggtcttgttgattccagatatctgtgtaagtgacaactgacaatcttacacttacagtatgtacaggatgaaattcttctagaatataattataatagaattacaagctcagaaattgtttttgatgactgatgttagtttcaaataaagcaaaaataaattatgaattttctaaggacatgtctattcttactactttcaaaaggttgaggtatttggtgtgttttgaaatgtttaggtggtgtttggtttcatttttgtagttgctttcagaaaatgactacaaaattactactttgttaaagaaaataaaccaagaattctactgttatagttcaattaaacatttttgttttcatttatattgcaaaaagtgctactttgttttcaaatagtttcttgtttccaagatgttggaaaggaaatggtgaaaaggttttgttgtttttcagtttttcaccatttcctttgcaatttcttgtaaacaggaaataaagtaaaaatgtgacgtttttataattattagtaaaatatatcaaatgaaactgaaaacaaaaaataaaccaattaccaccttagtttctcaaccttttgaatttgctttctttcattccaaaaatatgcttggggtagcatatgcattttttgagtcatcagtgtcttggttgaatgatctgtttcttgtctttttctcattttgtaatttaccacaagctaaattaccacaatataagctcagaaagattcaattattttgtatccagggtcctttgctggtcttgtttatcttgcttggtat

SEQ ID NO: 20064 - DNA, 996 bp, Glycine max
  Intron number 1 from transcript Glyma20g27390.2 (locus Gly ma20g27390) derived from phytozome v7.0 (chr-ID Gm20; pos 36565449 to 36566444)
gcaccacaccaggccgtcgcgttgtaaggttccaagtcagtgtctttcttctttatcaattttattacgacttgtttccaaataggcatcaactgagtgcaacctgcacttaactctacaatggctgggaaattgacatgtgtttttgaacttttgaagtattggaatttgaattaattagtgagttcggaagtattgtattttgtaagagtgagtgttcgacattgcattctgtgactttttattactgtttttgcttgaagtttctggtattgggaatgaaattgaaatgagaaggtgttcaacacttttgtaattagtgatgctgattgaggttcaatcctttaagcttttcttacttgttaccgattgtcactttttggacggaaggatggactgatacaatttcagattgatataggaatgggtaacagattgctggatctaaatacgagaaatgccatggcaagtgttgtaggataaaagatgtaatgggaattgttacatgggttgggggaagttactgttattattttaaagtctgtattttttagaaacaggcactggttgcttacttgatttttaattgctaaaacattgtatgtaagcaagtgaactgtcttttgtatcaaaatagggtaccacttttacctaatgctgtttttacttgaagtttctgtcattgtagattctaaatttgttctgctgaaactttttttttgtgcatattaatttgtgatatgtttgtctttttttggcctttttattaattcaaggtataaagttttcaatttttttaatatagaccaagtcatgtgggtcaataagtgacccactagtttgaccactgacccaatgccttgaccggttcgatcactttttggtttttaaaactatgcttcgtagttcctaggccaatgtttgcattcacttccttatatgctctttggaaccatcacaggctttttagacagctgacaagagacaacaagatat

SEQ ID NO: 20065 - DNA, 864 bp, Glycine max
  Intron number 1 from transcript Glyma15g12430.1 (locus Gly ma15g12430) derived from phytozome v7.0 (chr-ID Gm15; pos 9184645 to 9185508)
ctccttccttcccacgagcactcctcggtcaccaggttctctctatcccattcaattcattctaataatttttttgtaccactctgttagattatacaggcataagcactttttatattaatgcaatgttttttctatcaattgtagtggtcaagtcttgcgctttaaagactatgtttaggaattgaaatttatttagaggtgaaaatgaaggaggggagagtcataaaactttgattttaatttgataactttaaaataaaagaataaaatgataaattaatgtaaatttaattttgcagtcttttgtttaattttataaatattatatacggatatgttaacatacgttaacttatttttttatagatacaaatgaggattggatctagcgggaggggtagtccttcacaacttggggaacagagtttcgaattttagacaatgttgtaatttaagaaaatcaacgttatttgctaacttacatctttaggagtatattagcaagttatacattgattgaatttttgaaaatttggagttataatttgttaagcaaatctctattatgtaattctcttaatttaaaaatatttttctttgcctttccttcttttcttttttccctttaaacctcatttccaaatgtacccagaagagtctgtttcctaacttgtaggaaaaaaattgttgtttttcacctgtttactggatacaatgatgacgttttggcactcacttgaagtaaactcatgtggttttgacttttgagatagcttcttgttcagttgataaacttataaaatggtttttgatggatcctttgactcatagatgtacttgtgcattggtaggtttgttaaa

SEQ ID NO: 20066 - DNA, 715 bp, Glycine max
  Intron number 5 from transcript Glyma17g01960.2 (locus Gly ma17g01960) derived from phytozome v7.0 (chr-ID Gm17; pos 1209452 to 1210166)
ttggcccaggccttggcagagacccatttcttctagtatgctttctccttaatgtttcactgtgtaccatttttattacacacatggatatattttgcctatctttaccatatcgtgcttactcaggggttttgagttttatcttaaatccttaacttttctcaaatgcatttattctcttagttatatttcttctgaccatacaagatttgaccttagattggggcttggctattaaaatacagtttacaccattccctcatatgtgcaacgtgttaatgtgtatgctggtaaaccgcatccattttttttttcgttaagcatgtatctattccatttatgtaatgttaaattcaaccataaattattctataaaaaaaaaaacttatggtatagtgatgactagaagactgacaaaaaaactcattataaggaaactaactgttggagaagaacccaagattttttttcatacatatgaaagttcatttggcttaaaatgtgataaaacaattcttgaaacttaattctaatttgtactgtagtttttataataaagttcttccccttaacttgtgctgtatagacaattcatttttctcacttcagttctatgacattgttttatatgtttttatgactttctttctgccaatgtccaccatctttatctctaacatttgcaaaatattgtcaggactgtgtgagtgaaatc

SEQ ID NO: 20067 - DNA, 564 bp, Glycine max
  Intron number 1 from transcript Glyma17g08900.1 (locus Gly ma17g08900) derived from phytozome v7.0 (chr-ID Gm17; pos 6589777 to 6590340)
tagccagacccacaagggaaggtgagaactaatagtactattcttttctgtttgcaccttattctaaattaggatgcacttggacagaaaatttaatcatggataaaatactttttggtttcagtttagtcttctaagttaacttttttttttactttgatcacttgaagtctttattggatcaaattgattctttcatcagtttattaaactaatttgatagtatgtaacttaccacgaaagatgtcacatcagtgatcctttattatgtcaagtttaaaattaacactataagtaccaaatctagcgaaagcatcagactagtctaaaaaaatacaaagataaaagtagaactttttaaacttagaaaccaaattaattacaaataaaagtgtattttagtctttaattaaatacgtatgagacttttatgacatgagagcttattagtttgattataagctaacaagagagtgtacacccaaaataattatgtacaagggaaaaaagctaaattgtgtttttgattgctattcccaggaactgaatctggttcgaagttta

SEQ ID NO: 20068 - DNA, 353 bp, Glycine max
  Intron number 3 from transcript Glyma15g19180.1 (locus Gly ma15g19180) derived from phytozome v7.0 (chr-ID Gm15; pos 16305037 to 16305389)
aacataagaaggtacttgactcttgaacctccatttagtatttaacacaccgaaattatatttaaagttctttcatagttcatttttagcataatgattaaatcaaaattgatatctgacttaataatcgactaatgttttaacaattattgattacagtcagagttttataatctaactatatgctagaataacggaataagtttttttttgaaaaagcattctcttcccttgtttcctaggaaatgctagaatttgtgagcctctgcatcatgttaatatttttgttagtagttaaattaaagcttttgacatcaggttatcactggcatcgcacttcctgttggatccga

SEQ ID NO: 20069 - DNA, 617 bp, Glycine max
  Intron number 1 from transcript Glyma15g40190.1 (locus Gly ma15g40190) derived from phytozome v7.0 (chr-ID Gm15; pos 47177040 to 47177656)
aggctagattctgggctgactttgttgacaataaggtacccttctgttcttcaagctttttatgctttgattgttacttgtaattcctttaccattgattttgtattatgcttttagcgtttgatgatgtaatttggttgttttattcccatgttgctccctatttttaactcttacccttatttagatgtagtatggaatatgagagatgtttaatcaaaggaaaatggaccacatctggataaaaataccttctttagacactttttttttatagattctccacaacctatctaagtggttcaactactttttttgtttgaatgttttgttcttttgcttttttatttatttggtttttggtcaatattcctctgcctactttagcaacacgtagcaaaaagtatttgattatcttgttaagtgattgatcttatgtctaacaaaatgtatttgattgtctctttatcatcccttttggtatcactatggtagctaggcattagggtattggttattagtggcccttccattcttacattttttttatctaattgagtgttaattttcaatgtcaaatagatatttgatcttggaagaaagatttggacatcaaa

SEQ ID NO: 20070 - DNA, 824 bp, Glycine max
  Intron number 1 from transcript Glyma18g14750.1 (locus Gly ma18g14750) derived from phytozome v7.0 (chr-ID Gm18; pos 14647345 to 14648168 reverse strand)
acttgttagagttagacacggttctgacagtggggtcggtgtctctggctttctttcaacactttttttgcttcatgggacttttgatgaagactatgttttgtgttttttctcaattggctctcagaattttgttctttcactgtgtgtgattgacttcaaagtttgaatttttatgcttgcaatggaaatgggtcatgcaagttttattttttaaaaatattatgtaggggtggcttgtttttgtttttttccttgctttaaggtttgtgttgggttatttgttgcattctttttgtgggttggaattgttggtagaaagtgtttgcagggtctttaacttagttaggatggttggatcttggtatgtttgattgctcgtgtgctttcccattgatggtgtttgtcttaatgggggtgtttgggagttgaatttgatgcttttgtttgaatttgtaacttgcatttagtgtgtggagtttcatctatatgtggtaggttcgacttcagaagtgtgtcattgaaatagtgcagcttagtctttggatgagaccattagcacttggaagaattgtgattgtagtttgcagtctggtattggtaatgaaaattggtcgttaactgtgagtgattttctgatcgtgatgcatatcaaagatttcatcactaattttgtcaaaatcatggtcatgatgaaatcttttcatttttgcatagaatcttgtaagagattgatctgcataggcttaaattttggttatgcaattctaattctgtcttgtataattactatactctgcagtctaaacccttgaagaatttaa

SEQ ID NO: 20071 - DNA, 1000 bp, Glycine max
  Intron number 2 from transcript Glyma19g01060.1 (locus Gly ma19g01060) derived from phytozome v7.0 (chr-ID Gm19; pos 751337 to 752336 reverse strand)
aattatcacgttatccgtggtgcctctgatctcaagttggtatttttttgttttatttgcttagtttattttgatattttttttatctatgggaattgaagagagtgtcaaggagtttacaataactaatgcacatactcagccaactgagctatactccccttatagttattttttttatatatattgtcaatgtaaagaactataagctaattggaaatcatcaagatatggattttaaagtaattcttacaagaatttaatataacctacactgtaatcataaattgccgtgtttggtaagataaatgacttttataatagctattttaaatgtcatagctagagtgatttttaattagttgaaaatgaaaaacacattacagtgaatgaaaattatactctttttacaaaaaaaaaaaaaaaaactaacaattttgtcatatgtaacagtctgtaattgaataacagggcaaaaaaaactttacactgctagtgcattctaattattatttattttcgcatcttttgatccagtttctcaaacttgtacgtttttgctcgttgcttctagttagagaggtgcacatgtctgctgtttgacttttgagtcatatgatgctggcaaatgggagcttttaaattttgcagttgaatattttcatatcgtgtataatgtgagttatctataattaaatgggttatataatttaggttgcattaaaacaaaagggaggtgacagttatgtgtgttactttgcacatttgcacctcattaaatgtctctgagtgtgtttgcattgcaacttttgcatggtattgaaaagtgaattcattgagaagaaagttttttttttttttgaactgcaaagattgagaggaaagtgtgatggtagatagataaatacacttgttggcatggattgagtgaagtgattgctcctattcaaagtgatgctagttatgtgcagggtcactcttgctgaccagtcaacttacg

SEQ ID NO: 20072 - DNA, 677 bp, Glycine max
  Intron number 2 from transcript Glyma18g39820.1 (locus Gly ma18g39820) derived from phytozome v7.0 (chr-ID Gm18; pos 47963134 to 47963810)
gtaataggattaaggctgtgagtccttccaatacaggtcagtttttattatgtgcttgcatcttcattttcttctctgtgaatgcttgaatgagctaatttttcttctggggttggaaatgaacatggaataggcttaaagttgttagctttatggatagttgtgaagccatgttcatgtatctaagtctatagcacatgattgagatccttgcaagttaaggcttctatgttttttctgatatggtgatctgtgtcccatgaagatttgagatacccacccattggattgatagactttaggtttgagtcttcatgagaattgtagcttttctacccctttgaaattttcacttagggttggtttggaatgggagtaaaaatggggttggaaaatctttgaatggttttgcactactattccgtaacaaaactaatttatgagtttttcaccttttttaataccatcagaagtaatgttttctgctaggtaatttttctggagaaaaaaagtgttatctcagtatgagggaaattgctgttaagacaacagaaggataatttggggcttttgggattccatgtgaatttggtattataagtgatgagtctttgtgaacttgtttttctttgtattgatgtagggatcacttctagaagtgtcagcaggagtggcca

SEQ ID NO: 20073 - DNA, 316 bp, Glycine max
  Intron number 3 from transcript Glyma18g39820.1 (locus Gly ma18g39820) derived from phytozome v7.0 (chr-ID Gm18; pos 47964074 to 47964389)
ggctccagggtcacagagagtggttggttagtatcaattgaattcttctatggatgcttattgctttggctttaaattttaattcattgtatattaacaaaatcctaggtaactttaagcatttatggatactcttccactctgcctgtcttactttgttttggggattttcagtggaactgtatggacttgttgactatgaaaccgaagtttgatcaatgcccaaaaactgattgaataatagttgatgtttttcttttcttgttttgtttgactctcaggctgaaataaactatcttggccaactacagcatcc

SEQ ID NO: 20074 - DNA, 395 bp, Glycine max
  Intron number 1 from transcript Glyma15g37630.1 (locus Gly ma15g37630) derived from phytozome v7.0 (chr-ID Gm15; pos 43541957 to 43542351 reverse strand)
gggttcttcgtgttggcaaccgttcatttttccaggttatacttgttgtgctgctaaatacacttccccatttgttaaaaaaacaaaagaaagaagagcaattttattggactttgatttttatgcacggtcagtggattttttttatattactaaccaattagaaatcatcttagatactacatttaaagtagtctttgtaaaagtcaacaaacttgttgtacatatgtgattggatgacattgtaaaaatctttacaccctcaatagattctaattttaattcattgtattgaaccttgttgttgttgctgctgctcatatatgtggccttcagttgcaaactgggtctgatccagatgtgcttttcaacttttatgtaggagctggaaggat

SEQ ID NO: 20075 - DNA, 836 bp, Glycine max
  Intron number 1 from transcript Glyma20g34890.1 (locus Gly ma20g34890) derived from phytozome v7.0 (chr-ID Gm20; pos 43212278 to 43213113 reverse strand)
aggtcagataaagttttctttttcctttttatttacccatgtagcatcatcttaagattcttgaacttaacattccagccatgatgctgatagtgatgggttcttgatctggttagttatttcgaagaaataaaataattttttggcagaacacacaaaaataatatatatatttcctcaacaataattcatctttgcatgcacttaccatcccaaacatgctctatttttattgcaatagattctatgatattgaagcctggaaacagtgacataacgagaaaaactgaatttaattatttctatgatattggagtactttggaacaattaaaatattacatgaaatcattcaatgtgaacgataaaatcaagtccataagaaaaatttgctctcagactaggagcttaagcttttggtctagtgagaaagtacttaccttacaaccgagttctctggtctttgcactgttcaaaagaaaagtttaatgacttttcggaacagagttctggtgtttgaaatgttttaagtaatgcataagtggtaagtgcatttattggaaatgattggatttcatgctcacatatgtctgcaattagacttaaagggtgcaacaattgacccctaaatgaactttatcttcttttgtgccatatgttaagctttctatgcttctttcttaagctgtatcatgtggttttttgggtaagaaattagggccttatcccaatatttgattttattgatacttgggaagcctcttcattataaagatgaaactaaaggacctttccacaataggaagccagagcattgcttggaagacttgagtatca

SEQ ID NO: 20076 - DNA, 814 bp, Glycine max
  Intron number 3 from transcript Glyma18g45120.1 (locus Gly ma18g45120) derived from phytozome v7.0 (chr-ID Gm18; pos 54867560 to 54868373 reverse strand)
cccttggggctggtcgcatatttgctcaggggtaaactaaaactagcctctctttttcatctatttggccccctgtgtatgttactacctaggtattaaattggggtcgcagggccgtcaatttagtgatattgtaggaagatctggccgcattggttgtgaactgttctttgtgaacttggttactaccactagcagttaataggaattgtgatcatatactgcttgtcaattttgttttttaaattgattgatgtctggaaaactaaaatgaaatgtttgtttttagatttactggtttttcacgagagcttggtcttgtatgtttcttgaattatgttactggtgtttctagatacctatgattcctacgaagatgaacttatcttgtttcttgtgaacttttgtatttgttgtgttgtgcctgccatactttgtcatggattgaaccatacaatggcttgttccacgttgtttcttaaattatcgtaaatgtgatcaatagataaatgtgccccagatacttgtgtagttttgtttcaggatgcaacacaacaataaacatgtaaacactgttgttgttttgtctttttgaatgtcacttttcacaaggaatttgtattacatttgggatttataattgcatgtttaccatcttgaaatgtttagttatgttcttccccattagctatgctatatagtctatatttcttagttttaaaattattcatagcatgtgtgatgattgggatatcttggtttgtgattgttcattttagtgctaagcttgtcgaccttgctctagcctctggaa

SEQ ID NO: 20077 - DNA, 815 bp, Glycine max
  Intron number 1 from transcript Glyma17g31720.1 (locus Gly ma17g31720) derived from phytozome v7.0 (chr-ID Gm17; pos 34929101 to 34929915 reverse strand)
gtcagggacgagattggtggggcaaagtaagaacactgacatgttttattttctaattaatttattttgtggatgggttaaatatatttttaatatccataaatataaaaatattcatttttaattcctcaaaaaataatcatctctttttagctagtctctctcggttttcacaatgtgtcaagtatggtccttttctttaacaaaaaattatgtctttttagtttcttgtttacggaaataaggaccacaaatgatatatttttataaatgaagtagtaaaaactaaaaagggacaattattttaaggaactaaaagcaaatattatctaatttacaaagactaaaatatatttaactctttaataatttagttatttagctattattatatgatagtttgaacttattttggtttttcttaaacaaaaacttatttttaagtctcttatgtagctattgttgcaggcttaattgcagtcattatttatcagattaatcatctaacaatataacatttaaacttgcagccatatggaactggagcatgcagccacatgcctacggttagaacttagaaagtctcttctcattaggttttgagtggatcttatgatcttgtattcaagattatccaacatatacatcacttagagtatgattaaatttggttaaaacattttttccttaatttatttaatatgggttcaatttggtccctctatttttaaaaaattcaattaagtttttatttttaaaaaaaattaatttattttggtccctttactaattttgcaggctcttcttttccaaag

SEQ ID NO: 20078 - DNA, 819 bp, Glycine max
  Intron number 1 from transcript Glyma16g25870.1 (locus Gly ma16g25870) derived from phytozome v7.0 (chr-ID Gm16; pos 30021664 to 30022482 reverse strand)
gatagcttcctttgctgccatgtataagttcaattttcaccctgtttgccaataccaaccaatacatatgtttgtctaggaaggaaagaaataacgagaaatgctaacaacatttttaatatatttcttctaaaacattttctctattgtttgattgtttcaataaactttaagtaataaagaaaaaaaaaagtgttgtattagagaatatgttattaagacttctcaacattgctttagtaaaatatcaattagtgcacgtttggattttaggtgaatttttttaaagtaaaagtaattttattaaaggatcaaaactcttattttatttttatccattagatctacattagaatagatgcacaacctttcttataatttcattccaaacatgcacttaatccatttgtgaattttcacatatcattggttgcaaataacatatgaaaaaaatgtgattcgtatatcattgtagttaaaccttttttatttaaaaaagaaaaatactttgctgtcagatttaatttagatccttatacttttatatcgatgaattttatgatactaaattactaaccattttaagttcaaatttattgatatgaaatataaaaatacaaaataaggactaaaaatattttttttttaaattgtatgcatcttatatcatatcttaatttgttaatcgaggatccatatacaaatcattgacaagttgctaattaaccagtgatcagcttaaggaggaaatttttttattaattgaggaaattttctgttgcagttatttactgatactggatagcacaaactggagga

SEQ ID NO: 20079 - DNA, 408 bp, Glycine max
  Intron number 1 from transcript Glyma16g25460.2 (locus Gly ma16g25460) derived from phytozome v7.0 (chr-ID Gm16; pos 29423281 to 29423688 reverse strand)
aacaaaattaggttcaaaacgttgacattcttcgtgtatgtacctaataacgtgttggactcgatgaataataggtgtctgttttttcaattttgtctttgttcgagtagatcagtcctttacttatattttatgttgtttagacagttttgtgcataaaaattgttaggtgtgttactgtgttttggtttgattccaaatagggtgatgtgcatgtgattgagtacagtacaggtggaattattcgttcaacttatggaattgttgcaaagttctgattattttcttcttatgtttcaacttttacgattttgtgatgttgttgtggttgttaggtttgaagagcaaaactaatcttacttgatgttttgtgctgcaggttgggaattagtgcctttggtggtcacc

SEQ ID NO: 20080 - DNA, 1019 bp, Glycine max; identical to SEQ ID NO: 19411
  Intron number 3 from transcript Glyma16g34060.1 (locus Gly ma16g34060) derived from phytozome v7.0 (chr-ID Gm16; pos 36746640 to 36747658 reverse strand)

SEQ ID NO: 20081 - DNA, 816 bp, Glycine max
  Intron number 2 from transcript Glyma16g34450.1 (locus Gly ma16g34450) derived from phytozome v7.0 (chr-ID Gm16; pos 37104578 to 37105393)
agtatcctgtcaccactgagctccaggtctgtcacttctctcagtatatttgctgtctttattattatatgatcatgacatttaggtccttgaagttcagtctgtcaaaaaaggattttaaaaaatactagtagtctacaactgggatttaggctgcaacatcaaggttatttaggtctttatgaccacaattgtggctgcatcaactttatttatctgtaattttctgcaatatcaaggaccgggacaagactgtaaccgaaatttaaaaccttttgtaaaataaataaacaaataaatagaattgtttgaaatatgttttatgctttgaagttattaagtgtggaagggtttgattattcatctgtttaattatgtagaattttagtttgtgtatgccaaatatttctaatttcccccccttcctctgcccccctaaaattattattctcagctccagttgccttttgtataaaatggaatttttcaaagaaaggctaggggtattaagaaaaataaagtactgctgatttttctgacacttatgaaaatttagtatatcagatggtaacttcttagatcttatgtttttcgttgtcagatgaagattcattgtagattactttgttttaaataaaatcattgcataccaatgttctgtaactgaagttcactagtaaatttgaagatactgatattatatatggatccttatatgattattttcagatgaagtttgagactgaaagattgattagtttcattttgttaaattctgcagaaccggtgtgttaatatcatagcaaatctattcca

SEQ ID NO: 20082 - DNA, 1037 bp, Glycine max
  Intron number 1 from transcript Glyma17g33930.1 (locus Gly ma17g33930) derived from phytozome v7.0 (chr-ID Gm17; pos 37844183 to 37845219 reverse strand)
caaaaaggagcaaacttgtccgctattacaagcaggtggtacctaagtccctttactttaatatgcttttttacaattcaagccgggtcatgattcaagataacgaacctactgttcgtagttttgttcttactatttatgctgacgtgttccttccattatatgattatgtttaattatatcaattttaatcataagcaatgctgtggaattcctttattgaattactgtatacatacagacaggaagacaacatatgcaaagacatatggtaatccaactgaacatcacttcttttctttttcttcttaaaatatgacaatttttattcaaagttacggtgctagctgaagtcagtgattaccaaaattatttagataaaattggaactatgttaattcattttaagcaggatctttctaaatgttttatgttctctgtaaattggggaggggttttgttgcaaaatggtggtggggctggtggctttgatgcgatctgaggagggatggtttgagcaggaaatggaccatcttttctcatgaacagaatggaagaaaacctgtagagctttaaaggagaatatctgtatggaaatattatcgtccatgggttgccaatctaaactagaactgagagtatgccaattgttttgcaatgatgattcatcatgtcatttcattgtatgggttaaaataaattttgctctcaaagttagcaaaatttgcattaattgatctaggggtgctcttatgatttgtgtagatacagtttgtaaaaatcaacatagatttatattaaatttaattgcagtttggatattttgtttctacttaatactacacaggattctatcagttgacacagatgaactaagttaaaatcaaaatgaagtatcattatttcttcattttcctctatttaaattctacttacacagggttcttaaataaggaattattgttttccccatttccctttatttatttatttttgttacaggctgattgtgaactagttaagattgacatccattg

SEQ ID NO: 20083 - DNA, 337 bp, Glycine max
  Intron number 2 from transcript Glyma19g29940.1 (locus Gly ma19g29940) derived from phytozome v7.0 (chr-ID Gm19; pos 37651450 to 37651786)
ctctatctatgtattccttctttaatgtctcactttgttagaatttgaaaaatgctatattataggacgaaattaatttgaattcatgaaattttgagtaatacacatcaaatcggaatgagatttacattattttttgagttcctataaatgttagttaataataaagagtgtattgacaaaaaaagaagaaaggaaaaaaaaaaactgttttgttttgtgataatttatatgttgtatccaccttagctacttggtcgtattggcctaatgcataaaagccttttctctttcgctgcttaagatcaaatttcatttgtttacagcctcaacatca

SEQ ID NO: 20084 - DNA, 889 bp, Glycine max
  Intron number 3 from transcript Glyma16g03140.2 (locus Gly ma16g03140) derived from phytozome v7.0 (chr-ID Gm16; pos 2724684 to 2725572 reverse strand)
tctcaaatattgagctggtcttcaaggacaataaggttagccaattgccacattcattactgtctttgtaatgattgcaatttaggctgcatagcgaggtagtctattccccatcctttatgtgagtcccaccttaaattattaataaacagttaagtagaaaaagaaatttaacgtgatacttaatccatgaagctctttcacctaatgaactagtcttttgattgagttcgccttctgtgtttaagtcataacaattggtgctttgattaaaagttgggttacggaaagacctacctatggctggattaaggttgcaatatatcaaatactgataggtgagtaaagtcatcaaaggaaaaaaggactaccatcaaatcagtggtcacagtgtgctcttaaacgacatgataatgttatgagtctcacattacatagcataagaaacttaatgtgataattaagacatggggattatgggactctcccccatctaaggaactagtcttttgagaaacctacatacgtcataacaccatcccactaatttcagccagtgttgtgaacccaaactcaaattagaaagctcaatgaatgtgtcttcaaaagcctggtcttattttaatagaataatgttgcatcctttacaagtatctttctgttaatcctcctaatatttgatgaagtactaaattacaaagtaaaaatatttaatgaggactactaagaaaatcttttagaaggattagtaaggaagtgtttcaagaaggatatagagttattcattattgcaatttataaagcttgacattactgagaaatccataacgttttgattgggttatgattgacagttggaaggttcgtttttgaagaaaggtaaccccta

SEQ ID NO: 20085 - DNA, 347 bp, Glycine max
  Intron number 1 from transcript Glyma16g03140.2 (locus Gly ma16g03140) derived from phytozome v7.0 (chr-ID Gm16; pos 2725911 to 2726257 reverse strand)
tacccacctcatcatcatcaccaatactacccttggtatgtctctctgattattcaggttcaactcaaataatttgtacatattaattaatctaataagaaaatattatgtggaatattatttatttctccattttaatagctaatctttagttgtagctttcagttttttaagttttgtatgagataatactaatgtaatgaacttacacgactgaaatattaggatatttcaattatagcaatttttttttttggttgaggtaactaaatgattagtttcttttcaatatttgttcttcttgtgttgcagattgcaagtaaatttaaaacggccagcagaaacag

SEQ ID NO: 20086 - DNA, 784 bp, Glycine max
  Intron number 1 from transcript Glyma16g19180.1 (locus Gly ma16g19180) derived from phytozome v7.0 (chr-ID Gm16; pos 21047789 to 21048572)
aagaaggtattgaagacttgtgccggaaaaaacaggtgctatattctgcttacctatttgttctgttttgagtttcttcttataatgtcatttttcttaactgtttttctcttctgtttagtttcttggtaatatttggaagggatggaatgcagttgctaagttgtttgttcgtacacatttatagtttttgctaaaggattttcaatcctctaagtttaaactacaagtgataaaaagttaataaccctcataaaatatttgaggtctgttcaaatcaacccttagtgtcttttcttgaattatataaaatctaaagtgttatttttaatcaacggttccaacattgaactgtattgtatgatgtgttacttgcatattgcaaaataatatgtcccactacaacttgactttgttaccagactagaagattgttgataatttgatctacatgcccatatggttggaaaccaaaatgtccaaaaatggtagggagggatgttaaattttgttagtgctacaacaatgtttatctctgtcaatttccttttttccccccctaaaatttattattttttactctgatatttgcatggaattaaaataatataccaaagttctaaagtaacaatagtttagtgctgaatatatgataaccaaaaagaggaggaaagggaagataaaggttgatttttgtgacaagcaatggcatcagtgtatataatttttctagttgaatacttctgcaggatattgaggtgaacaatagaagagttaaagtgca

SEQ ID NO: 20087 - DNA, 319 bp, Glycine max
  Intron number 5 from transcript Glyma19g44420.2 (locus Gly ma19g44420) derived from phytozome v7.0 (chr-ID Gm19; pos 49862077 to 49862395)
tcgggcaaagatagatcctggatttacaactctgggtagccatcttgaagtttctttcatgttattttatatatttcattctaacaatcataaaataaatctattgtgtcagttgctcattttttttataaataaaatggtaatcttttacatgggttaatggcatggaaataaacataatttgatagttgagagtgagacatgtttctattgaaaagaatggcctacactgcagttttatctattttcctttatacatagatgccctcaaatctcattgccttctgtttgattcttttttctttttttaaaattcagt

SEQ ID NO: 20088 - DNA, 982 bp, Glycine max
  Intron number 1 from transcript Glyma17g29650.1 (locus Gly ma17g29650) derived from phytozome v7.0 (chr-ID Gm17; pos 32355049 to 32356030 reverse strand)
caagtacgaaggtcaatcagtggtataaactataaactatctctccctcacaattcgcacttcaattttccccaaacctaactccttcactttcaatacgaccatcaattaataataatagtaataattaccaaacagttttgctccgtcgaaaaaaaactgtcaaatggttagggtttacattcatttcttatattagagtatgtgacgacaaggttttgatcacatggaaagtagatgcctttaactctaatgtgtgtttatttatttaatttatttattgagtttaatttctattcactgtcattctagaaaattttgtagtcaactaatacgaagtaatgagaaatcttataatcactaagtctttagggagcgaggtaggggagaagttttttcatattagaaatcatgattcttgaaaatgtgtaaaataagtttggttagctttaatatgtttcttggaaattaaagattcttgtaaaatacgtaactaaaatcttctcaaagttggattcttgtccccctccttaggaatatttttgcaggaaagtgagttaaaattgattcttgggaatcatagtttccaaacaatttttttttcttaattgtatatcaaacatgagaatcatagtttctcaatctaagatttgtgggaaaataaaaattttccatctaccaaatgccccctaagtgtgtgtatcaactagcacatgttattcttccttaactagtagtcttgatttcaagtcccaaatatgtagttgcattacccaaaaaaaaaaaaaaaagaaatcatgtatttatgactaaagtagttgttgtaaaactcatcaaagttagtgtatgtaacaatttgtaactgaatgacaatggaaaaatgttttgtaatgtcagtgcatagaatatttactctaatatttattttaaagttgtgaactgtgtagagagcacttcctatacgtatattgtcagtggggaa

SEQ ID NO: 20089 - DNA, 1005 bp, Glycine max
  Intron number 3 from transcript Glyma17g00990.1 (locus Gly ma17g00990) derived from phytozome v7.0 (chr-ID Gm17; pos 555739 to 556743)
cttacaacatcttggacttacaggtatttcttttatatattgacctattttgaacacaaaataaataaataaatcaatatatgatggtcaattcatattaatatgatgaagtttttttgtctttgggaaaagaattatgcttatgttaaggatcattaacttaacatggcaagatttgtgcaaaaaatatgaatccagtgtgattaaattgtgaagggaaagccttaatatttttcagaaacttggcattgaatgcacttttctctccttttagaagagtacaaacatttgttcattttcacatttttttttgccctgcggttgagcattctccctggactgctggatgtcttttattttcttccttttcatactccttgactgcatgtcccttatcttcatgcaagaattttgtttcagatgcatttgatctcaaactcatttcaggaacatactttttcaatgtgtcccaatatatactaccgatgccttgtcataactgtagtcccatatgaatattttccattcattttgacttgtgaagggaagtcaactggggtgatgagatgataactcgtgttttgttatttcttttggaggctaacagtgtgggaaagcctccttattgtgaccactcttagcccccaccttaattgcggtctacttctagcctcttcttggtactttttcttcacttggtagctgggtaactgtggaagtcttttttaattatcggatagctacctttaatctgcatgaatctgtttttgcaatagttgtagaatagttttccatattgttatttgaattatttcatttttatatagcaacttatttttcaaatagaatctcatgacattgaagtaacacgtaaatggtagcctttaatgaatcttgtagaatatcctctatgattaaaattaagtgcctgcattattttactgctgaaagccattgatgtctacattgagggtaactattttaatctaatatatatgtaggatt

SEQ ID NO: 20090 - DNA, 512 bp, Glycine max
  Intron number 2 from transcript Glyma17g02590.3 (locus Gly ma17g02590) derived from phytozome v7.0 (chr-ID Gm17; pos 1683382 to 1683893)
cttcttcttcttccactcattctcccagtttcgaggtatccactgattctcctcttttggaggaacgccctatttgtttttcaaccttgtttaaacaaagtttggtacttttcgaattggaactctgggtaatcatcatctaacttctaagccctaaatttgattttttattcttttctttaatattcaatattttttaacctttgtaggaaagaacttggtcccctgttaataaattgagtaaatagtaagtacataaacaaactaggtaaaaaaaatgtatactgtcaacgaattagaaattgtcacggatggtaattttgttagcattggcattaattaccttaatactgtcatcctttgcataatttctaattggttaagatgtaaaacccatttgtactgtcactgcatggaaattaaactgtattaaattctggttatatggtgctgatgtattggtggttggatgtatagtacagaaattgtttgtttggaaaattgggttacag

SEQ ID NO: 20091 - DNA, 831 bp, Glycine max
  Intron number 2 from transcript Glyma19g36630.1 (locus Gly ma19g36630) derived from phytozome v7.0 (chr-ID Gm19; pos 43929472 to 43930302)
cgattcttgcggaggacaagcacaagcctatgtaagatacttccgttcactgtttacttctccgttgtgctgatactcaacgatgtcgttttgtatagttgagattaatttgtagaatttatgaaggtttgttgtttatcattggataatcgagttttatttcgcttcaagcactgcggttttaattcttttacactgcttttttactatcttcttcacttcttcgggaaatgtattgagtttcataaatctgcaagtttttatgtgcttttttggtcttcatgggtttatttttgggacaaaacttggattcagttatatagtttcttaggtgctttttggtacaattctccatttagaattggagtttcaacttggtaatacgcatgataaaggtttgctttaaagatttacgctcattactgaggtgaaactccaactctaattgaagaattgcaccaaaaagtacctatgtaattgtatctaagttttctccttatttttattttcacttaattacttttatgctctgcaccagtcctaatagctatatgttaactgttgaaggaattcttaggttctgggtatgtctttcactagatacctagtgtcagcatgtatatttttggatgcatgtaaagtaacgattcattgcaatagtaaaagggatattcagtctcctattttgataagattttagatctttcttatccgttctttaattacgggttatttttatggttacttgttaaataagatatatcttttgtgagttcatttgatgtgatcagcacaatcgtttcaggtatcaagaattggctgagaaatata

SEQ ID NO: 20092 - DNA, 805 bp, Glycine max
  Intron number 1 from transcript Glyma20g23080.2 (locus Gly ma20g23080) derived from phytozome v7.0 (chr-ID Gm20; pos 33012638 to 33013442)
ttccgccaaggtcttcttcgaggagcgtttcggtatcaaacccttccttcttctcttctctcactagatcgcgaccctgatttttcgtgtttttcaattctgcattgttctgttcgaattaggcattaattttccaggatcaaggtttttttttttttttttgcgtttgagcctcgatctgaaaagcttcgatggctcgatttgtgttttgagttggacatccaggtctggcttcaaatgtcattgtttggagtagatctgttaatgtgtataccgttttgtttgtagttttttatgcgttgattatgctgatgtggttttgaaaagaggttatgatggtttatgcatttgcctcaataaccgttctgaaaaatagattggataaatgaggtgagcatgggaggctctaggttttttttgccacaaattttaggttaaattcggcttttgatcatggttcattgagtaggcggcaattacagtcactcagaaatgtttgaatacgtgatagttttttacttcaaacttaaatgtaaggagtctgtttcatgtcttaaagtgaacatacttcttaaacacgccgatggtaatggcgaactttttataaattttaagcatttgcttttatctatttgatggtacattgtctataagattaataacttttttctttttaaaattttagtccttgcactttgatgggtagtcccttttcgtggttcatctgtatctttttttttaatcttaaatcagtattttccatttttctaactcgtgtgcatgtgctttgtgtgaatgcagacgg

SEQ ID NO: 20093 - DNA, 486 bp, Glycine max
  Intron number 1 from transcript Glyma17g03760.2 (locus Gly ma17g03760) derived from phytozome v7.0 (chr-ID Gm17; pos 2500536 to 2501021)
ctaggttcgttccctttttttcttatatgtaatcaactcttcaaattttctcatatcaatagtcaatattgtaggactgaacatcttgaacgtgaaattagcatttgcaagatcagatttctgattgtggtttcatattagggactcaacggtctgataagagatggccttacggatctaacaacaatccttaagataagctttcatgaccattttagaatctgtgtttgtaggattagttatttgcaattgtaccgatacaccaacaacatttattagaatagactttgatatcattttagaatttgatttgactctaataccggtaggaataagctaactcataagatgagagttgttccacttatatacactattttgactatatcacaggatctccaacattattggatgtataattttctgttcttatagcatggtattgttgcaggtttgggatatttccttcgtggggtttgtctcaga

SEQ ID NO: 20094 - DNA, 564 bp, Glycine max
  Intron number 3 from transcript Glyma17g36720.1 (locus Gly ma17g36720) derived from phytozome v7.0 (chr-ID Gm17; pos 40677853 to 40678416)
tcagaggtcatatttggataaacttctttgtaaatactcatagtagaataattgaattaagcttttcccataatttagttgagtgcacttcagctgttggagaagttagacgagagtactcatataaaagttaagtgcttaagttgattttggcttatgggagaaacttaagggtctgtttgggtaagcttctttagaaacacttctaagataaaaaaaaatgagattagcttctccataagtcaaaatgagctctccattagctaatttctagaagttctctctatatagtttctctaaaagatgagtgaacatctacaaattagataattcattttaccttcttatttctttctcctatatatgcttatgcaaaagtttatcgaaacatagatatagtcaagatacctgttttttgtggtggctaactattatattgagtttcttctgtcattggcataatgttggagtctttttttagttaaattttgtggaggtggctggtgaacaaaaacttactgcatgaatttaattctttgatttctcagattcgcctagtgtgca

SEQ ID NO: 20095 - DNA, 895 bp, Glycine max
  Intron number 1 from transcript Glyma17g15930.1 (locus Gly ma17g15930) derived from phytozome v7.0 (chr-ID Gm17; pos 12640747 to 12641641)
tcgctgtgcctccctccccaacaacactcaatacggttagtcatctcatctttctttacaattaatcgctcgttttttctccctttatcccttaattcgaacaaccatttcaattcttttttcttttatttaagaaaacaaaatcaccaatcttccattccatctgaaacgtcgccttcttacacatctcgcatgcactaattgaacgtggcatcgtttatatatttcattatggaagcctgcagaaaatgatttctcttagttggcacgtcttattgttaattatacctttatttccattactgtgaaagccccatcatttcaagtttcattcttgaaaataaaattcaaaggggatgctattggatggcaagaggaggattctagaattgtctaatatctctgttggttttctactttttaaggtttaaatgaatgctccgtgaacttggaatgaaaccatgtatggttatgtgcaactttttcgaacttgttggttctataagataaaaaggaaaaggacaatgaaaatgaaaatttgccagcgggatggaatggacctattgtgcacggcagagttttgggctatgtttagatttccgtttaaaatgcggtgcacgaatttcaagataaatttaatgattcacaaactcagttttgcaaaaggaagggtctggatgcttttgtatacctcattttgcctcaaaagtctatttgaaacgataaaacaaacatgcacttggacacattataattacttgggtttttttttatcagccaatgttagtttgttagttttgttagaatgttactggtgtaatttgaacaactggggctgactttaattcgccgatctttattttctgtgtattgggtgcagaggaatctgaaacag

SEQ ID NO: 20096 - DNA, 776 bp, Glycine max
  Intron number 3 from transcript Glyma20g02020.1 (locus Gly ma20g02020) derived from phytozome v7.0 (chr-ID Gm20; pos 1532318 to 1533093)
tactgttggggagactctgacaattgtggacacaggtctaaacatgttctttgatcccgcattcaaactcattcactttagttctatctgttttagtactaatatagtcttttgttctgcgatcatgtttgttgtcatgtaaatgagaaatgtatgtttaaagtttcaagtttcaagctgatgctaatgttggctggctgcagaggtgtatggtggcgaaaggaaatgaaagttattatggttgtagccttgtaagattggataaagctctaaaatgattgacttatacttttccatggttcttcttgaacttaaatgccagggtatcttatgaacaatttgagattgtatgcctctatgaggggaaattttgttaagtatatcacttgttcagattacttgtttttatgtatttatggcttctcatgtttgtgcatatatgtgagtgtgggatacgaaagagaaaacaatcattaagaaattatgacattattatagaaggagaggataatctgtgcgcttttttaactaattatgcttgtagtcgagttttacccaaatgaaactgaagaaaaaagatagcaaccttgtaatgtaggcttcccatacaatcattctttatttataaacatgttttttgactaccatgtcacaagagtgatttaaatttttgctatttgtgattatttttttcttgcaatgaaaattttgtctgggtaaacaaattgaaataatgagttgattcatgtagaggttggacgcattagcataggcat

SEQ ID NO: 20097 - DNA, 507 bp, Glycine max
  Intron number 1 from transcript Glyma17g12720.1 (locus Gly ma17g12720) derived from phytozome v7.0 (chr-ID Gm17; pos 9624303 to 9624809)
caacttctcaccaacggtacagaattgaaataacccttttataaacatccacaccaaaactaaattcaaaatcccatcccccaataaactaatcaaacatacagaatccaaaaccttaaagattcaagctatcaattctaaattaaatatagataaatagatataacactaacaaactcgatcagattttttttctcattcagatttttctaataaagtctagtatttatatatgatcaaactttattatcttcaaatcatcttcttctattctggcatctctttggtaaatttctcctctttttttccacctttaatcacgtacatatttgtctactttaattgatttatttgaatgctatttagatagtgatcagatattaatcattaagggtggaaataacatgcaaccatatgcatatttttttccccaataatattcttttgtgcacaccaagcaatttagttaactaactaggcacacaattatttttggttggaacagcc

SEQ ID NO: 20098 - DNA, 585 bp, Glycine max
  Intron number 2 from transcript Glyma14g06070.1 (locus Gly ma14g06070) derived from phytozome v7.0 (chr-ID Gm14; pos 4367897 to 4368481)
tgactattcactggtatcatatcaaagcaacctagcatttcggctttcacccttaaatatactttattaaatgtcattaattatttaaaaaaagacagttattcgtataacaaattcatatattatattttctataacattatttcttccttttatctttttcttatgtcaatcatcttattttatattctctctcttttcatctttctttgttgtatagcatttactacgaaatttctgtaccaatacaatttctcttttaaaagaaatcagcattagataacttctatacttttgatacattactttttttataaaaaaaaaaaaatttatttttgcatttttaacatgtgctcacggttgaaaaaaaagttctttttaattttttatgcacttgtgagaattaaatgtaacacaggccttaattaatcttgtctccaaacgataagttatagaaggcacgttatactcatatatatattgcatgctacatgcatatatatatggaacttttagaagaaggaaaaaatgtttgagtaacttagtttttgttgatccttgttaatttcttgtatgtgtttaggc

SEQ ID NO: 20099 - DNA, 1032 bp, Glycine max; identical to SEQ ID NO: 19366
  Intron number 1 from transcript Glyma19g39250.2 (locus Gly ma19g39250) derived from phytozome v7.0 (chr-ID Gm19; pos 46000020 to 46001051)

SEQ ID NO: 20100 - DNA, 696 bp, Glycine max
  Intron number 1 from transcript Glyma15g12060.1 (locus Gly ma15g12060) derived from phytozome v7.0 (chr-ID Gm15; pos 8948745 to 8949440 reverse strand)
ctggttagtattacatgctactaatattatggtccttatatataattgatttgttatagcattcaaacaaaaattacatacagtttcttatgtgtttttagcatcagaattggaattacattaaaaatcaattattaagataaaattcttctagtttttatttgagaacagtaccaaacatacttaagaacaacatctaagttttgtcctaccttattaacgtttagctcttgtttcttgtcttgctccaagctaaatgagcttaattttgattcaactcgatcatcaatttaatttggcacatttcaaaatggttggctagaaagaaaaaaaatgattcccattcctttggtttatttccttggatcaattcattaaattgattaatctattatattatctctacatctagatcgttcgagaggggaaagtgttattcatcatactcatgtgccccagtcaggatgcacgtacagtattttttttattttttattttctacgttcaaaatagcatacatatcaagttgccaattgatgagccgcatgcatataccaataagtatatggttatatactatacttatattgtagtaaaataatatattattgaaatggtcatctagttatggaacttggtttaataaattatatacccctctctatgcaggtctttgcaaatccaagtgggagaaaa

SEQ ID NO: 20101 - DNA, 670 bp, Glycine max
  Intron number 2 from transcript Glyma19g01300.1 (locus Gly ma19g01300) derived from phytozome v7.0 (chr-ID Gm19; pos 922318 to 922987)
cgccggagaagaagcaccgcctcagttccgaacaggttgaccagtagcttcaaatttgaatgaattgttctttgttgttgttgttgttttcagactcatcaccaatttgaatttaagaagttgttgttgtgaaatagcttgaaatttgaatgaattgctttgagtttgggttttaaacctaatacaatatgtggagagaaaaaaaaaaggtggttggctttaaagagaaattccattttgtagctatgaagagattttgatgttgaaacaaattcttactattggtagtaaatcaagacaactttccttgattttaatacttggtgttgttattaatttactgattaccatggggatggctagatgaaactgataagagagatattgtataatgcttttactttcttttgtttttgagattaatatatactgttgcatccaaagatgaagatatgagaaaagtgtgtgatatgtcatctaatattttcatgttgtggcactcttgtgttatatgaaactttggtttttaaccgtgcggatgacattgtgtaattcatgtaaccaacttcacctagtggcataaggttttgttgttgttgtcgtcgtcgtgacactcttgtgtggttgatggttaggtccatctgttggagaagagctttgaggaagagaa

SEQ ID NO: 20102 - DNA, 1015 bp, Glycine max
  Intron number 1 from transcript Glyma18g20460.1 (locus Gly ma18g20460) derived from phytozome v7.0 (chr-ID Gm18; pos 22156648 to 22157662)
gccttaccctacggtaaatatgtcattcaagcttcattttcatggtatctatatttggagtataatatgctagatttggctagaagtttgtaattttttttagagaaatactaattacagtttctttattattctttttctgtcactttttctatgatcgacagaaattaattgaaaatcatcaattttaatgaattttacttctaaattaagagataaagttattaaatgaaaagtaaaatttattaaaattgataatttctaataaattccatccaactatggagagaatgttagagtgttagaaaaatgttagagaatgttagagaaggtgtcattaaccttccacaattttacatcctattgtatataccaccttcagatcaaaactcttatgtttaaggttattcccacaatttaaaaaatctttaatactaataaattacatatttagtctaaaatacctctatttaatgtctatatgagagtagttgtgtaatataggccatgtaaaataggggtatatatggaataaaataattaatgatagtagttgtgtaatatagaccatgttaaatagtggtatatatggaagaaaataattaatgagacttggaattcgtaaaacatcattaattttgaaacaaagaaaaaagaagttaaaacattaagaattttggtcgggagggagtaatacctaacacctaacatggattgattttatcagaatgtgtcatcagtttaaaattttacaatgtctaataatattgttatgatttttaagataatttattgtaaaagagaaacaaacttatcatatatatgatttgtaagtggatgagtgtaaaattgttttatatcgtgggtggtatgtatggtctattttctcatggattacttgaaaatatttcttgacatcagttagtgaactgaagtcttagcctacattatcaaaagcttgttccttgttgatctttcaggaaggtgataagattgcactggctaaatcaactgg

SEQ ID NO: 20103 - DNA, 547 bp, Glycine max
  Intron number 5 from transcript Glyma17g03700.1 (locus Gly ma17g03700) derived from phytozome v7.0 (chr-ID Gm17; pos 2463107 to 2463653)
acaggcctggatctgttggatttgtttctaaatctgtatgtagttattcattttcctgtttatgtcatttgtcgttctcacctgatcttctcatatcaaggatagatctttttatctagtcctactatgaaagagtgaaagttacttagctattaatattttgctgagcactcgatctcattgatttcagaatggaaattatggctctagagtgatgtatcaatttaatacagaagtgcagttctgcttaatagtttacaatggcagtaaacttgcatgataggattttgtaacattactaattagtagccaccattccctcaccccacccacccctttttctgttgataaatagtggcactagctactacagctaagatgatgtggttacattttgcaagtgaataacttttatccaatgttggattaacaaacagtggtttatagtcacaagaaagatggaatttgagctttatttcttttgcatggtcttattatacacaaatgattttgagagaagaaaaaaaaaattgaactgcagggtggg

SEQ ID NO: 20104 - DNA, 1015 bp, Glycine max
  Intron number 1 from transcript Glyma18g04730.1 (locus Gly ma18g04730) derived from phytozome v7.0 (chr-ID Gm18; pos 3511779 to 3512793 reverse strand)
cccgctcttcctggttagcctcttccatttcctgattttggtgtctgttttttgtgattatctgataggttggtgatttagttcgttagagtttgatgttgttgttggtgtttagagagattctgcatactctgatttgtgttaatttgatgaattgttctttgtttggtttccacagcataggattttagatggacatttagttcgttagagtttgatattgttggtgattagaaggattctgcatttgttttaatttgatgaattgttctttgtttggtttccatagcatagataggattttagatggacattatcgatcttagttgatgactgtctggtttcttcctgttatgttcagatttctaattcgttgtagtagttatgagttttgattggtttatgttatttgcacattgtagtttgtggataatggtgatgctagtgaaattcaatcgagttatatttgattttagtacatcattaagttgcccagatgacatttatgtgctatgtagtagagtttaatttctatgcactgtttgtctaaattttatttgggtctgtcaatcgatctgaaatcatggtatgatgaatttgaaggtagttattgtaaaagtcaacaaacttatcgtacatgacaatatttgtgattggatgatagtgtaatctgttatgtttggtttgttgctaatttggcagtttttatgttaaatactttgcatagtttcattatttttgggtttctactctgtcttttccatttgaaatataatttgttattttttaaattctggagacattttgagattaaattacaatttgtcagttggttttgctgatggtatcttcgttttctataagatcttagttgtatactcatgcagtattcatatacacttatgcacacaaaaacagataagcatccttggattttgttctaatgaggtttttaaccagttattgctatgattcttgttaaagatgtaatctaatgagatgctcatctttaggg

SEQ ID NO: 20105 - DNA, 274 bp, Glycine max
  Intron number 1 from transcript Glyma20g12200.1 (locus Gly ma20g12200) derived from phytozome v7.0 (chr-ID Gm20; pos 17120807 to 17121080 reverse strand)
aaggcccgcgaagcttctagaaggaaccgaaagaggttgttttaatttcctttccctatcaaaataaaaacgaatttatatttttttattgacaaattaatttgatatttttgtttctgcgagaagagggttcggacctacgatctttttttcttccttcctttttcaatcaagcagccaactttatatttcccatatttattaattttatttaatttttctgattgatgtcatgtcaggaagccacaatcaagagcttgggtacagaataaac

SEQ ID NO: 20106 - DNA, 894 bp, Glycine max
  Intron number 1 from transcript Glyma14g37780.1 (locus Gly ma14g37780) derived from phytozome v7.0 (chr-ID Gm14; pos 47073656 to 47074549)
ttttgtttctgctcctggtcgcagaattcttgctggtttggttctcttattccaactttgttttgtggcatctatttggttttgaatgtgtttagcaaagcattgaattgttcttttgttattgttgctttgaaataaaacaaagaaatgtaaaaggtccactcaataggcatgtttaaagttgataatttgggctgaatgcttggaaaaataatttgcatggtagaaatatggattatatactgacttgtgttggtttgaaagtaagagactaaggtcaattgaatatatggttttgtgtttgatcttgtttccatgtgtatggaaaaatataattaggaggagtttccatcttaaacattggtagtttggtacccaatatagtagtttctcacgatgtgtatcatatggactatgactttaagagaagaataaccaaccttataaatgcagtgtagtgattctccgattaaagttgaacttagttttgttgacctcttacaagctgatgcataagtctgtgttcaactttgtgttttagatttttttattatgaaatttcaagtgtaccactctcaggttttggtatttcctgatggatcctgctgaaatgcacttttttaatagttactactaattgtctttgttgactttgtagtatgaataattatttttgttttatattttatagccttagattagggaacttcaatacaaactctcaaaattaaagagatgaagagcttctgtggacagcatagtgtcctgtgattaattcactgtcatgataatgttcttgctgatcattttctaaccttgttttgatttttagtgcatgttgtctgtcaattatgtcttattaaagctaattttcttgcatagttggagatctac

SEQ ID NO: 20107 - DNA, 781 bp, Glycine max
  Intron number 3 from transcript Glyma14g08690.1 (locus Gly ma14g08690) derived from phytozome v7.0 (chr-ID Gm14; pos 6712184 to 6712964)
aggtttgtttatgttgctaatagcttctaacttgcaacttttgatgatatactttatttatttttaacttttttgttgttacaaggatgtccattcaaaaagtaaagccgaaaaaagcctcctatttggttttgaaatgaaagcaaatgaagagttgcttttgcaaactcaatttgcaaaatgaagttcattcaaacttaagtttgtaaactttaatccaaacatgcatgtaattgctgatggagcttacttttgctgaattcagctgtactactactaggatattcaagatgatcttctttatacctttatttctttgaaaataaatgctaaggagtgccttaaggatgcttggttaaggaaaaacagtggaaggtttttattggaatgtatggcttttattgttactgatgcactcccaccatggtttccaataaaagctttctatttattgatttttttaagccgtgaacttaagaaacttgttagcagaatcttagtttctttctttttcttttatttgtttcaatgcgatatcttctctttgttcaagcgttatttatcttatacttggtttaattcaaatggttgttctgggattttgttgcttttccctttaactgaacatgttctcacttcagtttggatggtgtatgcttgtcttgttatttcttaactgaattgctttctctaatatgaaaatggtgaatcaaactgctaatgaattatcacactggcacttgtagaggtttatctacacaatcagaacaattcaaggatc

SEQ ID NO: 20108 - DNA, 559 bp, Glycine max
  Intron number 4 from transcript Glyma14g15070.1 (locus Gly ma14g15070) derived from phytozome v7.0 (chr-ID Gm14; pos 15777540 to 15778098)
atcgtattattgtttcagtgagtatatctatatctttatttaaattaattgaaaattgttgtgcaatgctttttagaaaagtgtttattaggatttacttcaatctgctggctattaattgccaagcttaaatttctaccttctagatctagaattggatttactttggacctcatcaaagtcaatttattttactcttgctagatgattgttttgatttctgtaccatgattttagtcctttttttctttgatctcttcatttttaacttatggccctatcaaaatgcttctaaagatgattcacagtttatctttatttgttttatcatccaaactcatgtcatagtagtgagaaagaatgttgagatataatgtttctcattgaagcaaaatttagtggttatactaatccatgtatacttatggaattattgcagatcatactatacactgaattatatgtaagttctgtaatcatttcttatatttcctttaataacacttgaattttgttagtctgcactataattataagaaatctttttatgagtgtagtc

SEQ ID NO: 20109 - DNA, 1037 bp, Glycine max
  Intron number 1 from transcript Glyma18g50080.1 (locus Gly ma18g50080) derived from phytozome v7.0 (chr-ID Gm18; pos 59308905 to 59309941 reverse strand)
aaggaattatagactctgaaactggtaagaacaaactaattaattactatattatattatgttagctaacctattatttggatattaattaaacttcaccaggaattggaatcaagcattaattcagttacaaatcatcataaaatatcaatggccaataaatttgtatatattcttctcccttcttgatatgcaattttttatgtacatggtttgatggcagttctcattttttcttcttctaaacatggtcaagttttactgctaattgaatcccactacaggtacaacccaatttgaacacgtaattgacgttggttttagggtaattaaataaagtacctacaatattataagaaaaaggcaatataaatttacgctaaagatatcatgcattggtgttattacatcatttttttatactaataaataaaaacaattattaaaaattaattttattgaaaacctaaaaaagacacacactattaattactacatcacactttaagtataaattcataatgtttatagtgatattttgttttttattaaatatattattagagtccaaagggttagcttattgtatgagactttaagtataaattcataatgtttatagtgatattttgttttttattaaatatattattagagtccaaagggttagcgtattgtatgagattctaatggattcaaatgaataaaaacaatttatttagcatataaattcatgttcgattttcatatgtaaaattcttttaaaccataaacaatcatataccacaaatataaatacttttttatccaatgaattgggagatatccatgatcactaaattagaaaaaacacattattatattgaaaagagaagacttaatgaatttttttataatgcatagtaaacttctttatattcttttttgtagactaaaatttcttttagtggtagtcaaacactgacataggcaatcattcttaattttcttcggactttgcaggacttcctaccagaaaacaggagattcagctttta

SEQ ID NO: 20110 - DNA, 385 bp, Glycine max
  Intron number 3 from transcript Glyma16g26630.1 (locus Gly ma16g26630) derived from phytozome v7.0 (chr-ID Gm16; pos 30701940 to 30702324 reverse strand)
taccagattgtgtaagtatatatttacttcttcactcaacaagtaacaatttcaccttccctttccaccaccatcttattccagttccaccaatctacagaaaccatattaaagaaaaattcaaaagtaatgacacaatctatatataatttttaatattcatcactattttttatttatttcagtagaagtaaagaaaaaacaactttcctcactgaatttatatgtactttttaaaaattcgtccgtaaattttttgtgctatcaatgaagaaattttcaccactaaatttgatcattaactattcttattatttttatagaaatttgtctacataacattattattactaaaagaaatccaaatgtggggtgtgcagtttct

SEQ ID NO: 20111 - DNA, 594 bp, Glycine max
  Intron number 1 from transcript Glyma19g28580.2 (locus Gly ma19g28580) derived from phytozome v7.0 (chr-ID Gm19; pos 36143628 to 36144221)
agaaagaaaagctgagttctctcttcacttttttggttggataaaaaatgaaagaagaaaggaaatataattatgctgaatgaactttttaaaaaataaaactaaagtaagcatattttggttattataacaaaataccttctctcccattttcttgtcaaaatggagagaaaccaaattagaggtctgccccatgcaagtttttttctctctccatctctacagttccaaacaagggacattttctaaggaagtgtgttttctgtctcacccagttctttcctttcaaaactattggtttcaaacaagtatatgggtgtgtttggtgggggtggtatatatatatatatatatatatataccccttatttgaaaaatcaaaatgagagattgtcacataaccttccattagttccatattcatttaatatatattcaatataaacattttataattttcacaattttgaaatgaaaaattccctacgttcctctccattcaaacattccctaatgcttgattctctacaaaattcatgatttctttctagttttctgttttttccccttctaattttgattttcttctgcagg

SEQ ID NO: 20112 - DNA, 623 bp, Glycine max
  Intron number 1 from transcript Glyma20g14250.1 (locus Gly ma20g14250) derived from phytozome v7.0 (chr-ID Gm20; pos 19536417 to 19537039 reverse strand)
ctttctgaaactcaatttatcaccaaaattctagggtagatttctctgcgctctctctctctctctcttgcttagatctagcggttttttcgcttttcttctgctccttgattgtttgggttttaataagtgattgggcacatgtgtgtgtttattgttctcgcggcctttaactttcagcaactttggatccctgtggctgttgtattcttgaattgtttcgtggggtattttttatttatttaatgttttattattattactatattggatggtttgatttttgtggttgccgttcatggttctatcattacggcttgtgggtggaatccattacttagtcttatgatccgcttctggctttttcataaaaattatctgtgtttatttctgttcacttgtggatctgatttgaaccctttgatgatgtatgcttcagggtttggttgtttcttttatatgttttttattatctttggcatgtgatgttgaattttgttttactctttttgtctagattttgtattgactgcaccggtgttggtgttggtgttgcgagttaggttattagaagattcacagagaatttctgcatctgcttttgttttattgcattaaaggaa

SEQ ID NO: 20113 - DNA, 419 bp, Glycine max
  Intron number 2 from transcript Glyma17g05940.2 (locus Gly ma17g05940) derived from phytozome v7.0 (chr-ID Gm17; pos 4188694 to 4189112)
ttgaagaatttttccagcagtgcgatcctggttagggtttattttgtttgcctttgccatctcctttaccttgttctctgtgtttccttgtgttgtagtctgtaactaatatttatcgccttctatgtctaggatattctactcctgaaaatttttggtttattttccttgcattgtgtaatagggtaattaacaattattttgtgcatgcgagttgaaacttaatttgattttttgtttatttcttttccatgcttgctatgctcaaattcttgttctatgtcgttaattgatgagagtagagcacgttaacaatgcaagtgaggtacactgataatatactgatgcttcatttgtttaactgttgtgtttattttgcaccagaaaaggataatctttgtctgtacggattccctaat

SEQ ID NO: 20114 - DNA, 547 bp, Glycine max
  Intron number 2 from transcript Glyma14g17270.1 (locus Gly ma14g17270) derived from phytozome v7.0 (chr-ID Gm14; pos 18985147 to 18985693 reverse strand)
cgaatttcgtgatcaacggtgtagatctgaacaatgtatgcctctcgccattattagtggattttttcaggattttaagttttggtcttttatcttattattaggaatttcaatgtcatgtttttttggttatgtatgcaaaaaagaaaaataaaattgaatagttctgtcatgctattttggtttgaaatttagaaaaacataccatgtcatggttttcattttttgacagtagagtaaatttctgttggatgcttgtacactgacgatgcatattatgaaaaatcatatttgggatgattttgaatttctaattggttgacacttggaagagattttttttttaatttgttggtggatgaaaattaaactcttattttatatgctttaacatttgtttttgaataaataatgtatacattgattgtgcaaatgttttttacacttctattcaattacaaactgtcacatattcaattacattgacaatggatgcttattaatctcttgctttatatgttttttggttcaggtaacactggttggg

SEQ ID NO: 20115 - DNA, 534 bp, Glycine max
  Intron number 2 from transcript Glyma20g21130.1 (locus Gly ma20g21130) derived from phytozome v7.0 (chr-ID Gm20; pos 30138192 to 30138725 reverse strand)
ttcatcatcagcttcatactcttcatcttcttcaggtaatacattactaataatgtctgataactaaccttcctaccaacacactgaaccaaacagatatgaatgcaacaaaaattgaggaaaaagagaagtatcaggttttaacatcatgctaaatcttgaagaatctgtcattgtcgttctctatttagaaaactctagtctattttatagtattatgttcatgttttcaaataagattgaaatagacgtgatttatttatttctaacttgcttttataataaaaaaacactcaaatataaatcaatttaccttgaaatcaattctaatcagaatcaattttgcaaaatcaatttctcttaaaattggttttacaaacactcacctaaacaaattaaattcattgttccaatgttcaaagaaaaagtgctagtatatgctaagtatgatcgtaatttaatctactattgtatatgttccctattggtgcaatgacagggcaaaatccagggaaaacagctgctataatatta

SEQ ID NO: 20116 - DNA, 909 bp, Glycine max
  Intron number 1 from transcript Glyma17g05500.2 (locus Gly ma17g05500) derived from phytozome v7.0 (chr-ID Gm17; pos 3839241 to 3840149 reverse strand)
atgtgagatttttatattatttcctccatacttttatttcgtttttatttatttatctatttgatttatttcaaaataacagcgaattgcatggacaataaaatcatgcattattttggccctcgtcagataaaaaactaactaatagattataaccaacttttatatagtatgaatgaattatgaagggtttggtaaaatggtagttaaatataaaattaaatgacagaaaataatatgtttgtctgccattttatataaattatatataaaatttgttaatttacattcccttatgtttagttagaatacatattttaacagatataactgaatattatattaaaataacgatgtattttgttaacatatttcaattgaaaaacaagtacctatatatgaataaatacttgttaattcccaaggtctaatttttaatatctaaatagatgaataactcttcctcttattatttgttaacatactcatttagttggaatacattaacatactaacttactaatattacaactgaatttatatttttttaatctattcaaattcacataaatttaattagaaatcgttccaaataactcatcataaggagtgattcgagtggtaaacaaccctacaagtttttttttttcttggtgtacaatgggaatcaaatctaggttttcatgtatctattttgacttcaccgataggccaaaactttagtgagttcctaatccttgagtttaatgattgaagatatgcattgtacatatataatattatataggagaacgttcaaaacctaagatcttgcaaaacaatgataataataataaatagaataaagtcaacatggttttgtttcgtctaatgttgcatgatttctacgcataggaggaagaatttgtt

SEQ ID NO: 20117 - DNA, 611 bp, Glycine max
  Intron number 1 from transcript Glyma16g04420.1 (locus Gly ma16g04420) derived from phytozome v7.0 (chr-ID Gm16; pos 3735225 to 3735835 reverse strand)
cctaggtacactgccttatatgatcattgctgtattatgtgttgtttacattaattatgtatcttcatggaattggcttgattctttaggtcttttgagtttggtgtatttttttcactcaatttttggccttgaataaaaaaaaaaaagaagcttaatttgattgattttcaacatgattgtcttacttgctcaattagatgtaatccttaaacttgatatattttccaaagtgcatctagggtccattatttagcactctgccaaattggaaaactagggatatcacttcaatttggatcaacatattactactctgatctatagttatatgtttaaatgtaattctagaatcttataatgtaactttctcatgttgtttctatcattgtttcccattaattggttgagttattgtggagtactctcggtggggtcttagaccaaattcatattgaatgaattttatcattttctaagcttataatttctcattactctaaaactagaacttgatttttgttttgacttatccattctaattatttttcctaataattgacatttatatctgcttaattgcagtgacacctctgttggcattgcacacg

SEQ ID NO: 20118 - DNA, 206 bp, Glycine max
  Intron number 1 from transcript Glyma14g40460.2 (locus Gly ma14g40460) derived from phytozome v7.0 (chr-ID Gm14; pos 49392305 to 49392510)
cgttattttggtatgttttggtttcgttactttgattttacatgttgatgtaatttgaatgtggttttagtgccattctttgttcgtgtgaattctacttgcttttctgaaatgaactgtcgaactattatttctttgccaatcttgtgggattcagtagtgaaagaataaactgtatcttttgtgcaggcagggtgcgggaggta

SEQ ID NO: 20119 - DNA, 807 bp, Glycine max
  Intron number 1 from transcript Glyma17g31070.1 (locus Gly ma17g31070) derived from phytozome v7.0 (chr-ID Gm17; pos 34206111 to 34206917 reverse strand)
ttcacaacaccactttaacactcaccattgatcaggtgccaccctttttggtttcatgttttgtaattttgcgttaattacttgtcaacatctatctacccttaattttctagttattctttattgtttcttttttacttgtttcaagctgtctcagtgtgtctagggagagaattatcttgcttatttttatgctagagtgtggtgtccctaagttatgttttcatttataggagttataaggtatctagcgtgtgattgaagggagaagggggagggagaagtcatgggttagaattcctcccactaacattctaacaaaactaacaactaaaaagttgttttttttatgagtgatcaggttgtgtttcttaaataagtgtgataaccttgccagtgtcaattaattcaactaatatctctgaattctgataatgatttgtggatgttctaaagtgaatattgcagttctattaacatttaagagactaagagacaagagattgatcagattaacttagattttgtgtttctctgaatctgaagatttgatctttaatcgtgccggatggcattatgtgattcatacatcgtattgtagaataaggcttttgttgttgtagtcaaaattgtttctctgaatgaatggttatcagttgatagtttgctatgtaagattccaggcataaaccagtgaaaagaacccttttgattatcttgatgtgtggttgaagtagaaatcctatcagaaactatagtatttctcattaaaataaaagtcttaccttttttcacttgagcagaacc

SEQ ID NO: 20120 - DNA, 847 bp, Glycine max
  Intron number 1 from transcript Glyma11g33540.1 (locus Gly ma11g33540) derived from phytozome v7.0 (chr-ID Gm11; pos 35351228 to 35352074 reverse strand)
gaattgtcaaaggttctttttgttaacttctttgtcttttgctttgaattggctttcttgttaaccatgatgcatgcatgttttataaatttataaatactgggtaagtggattttattttattttattttttaaaaagtggttaagtgaaagaaacttctgcttaatgaaattatcctcgtcaaatacaatttgtctaagttgatttagtttcttcatttgggtgaattagtggttgcatcttatttgctactttttctgtcacttttagtgtcgtgccattgtcatggtttaggggtatagggatgggcaagacaagttggtttcttttcctgatgcattgagcaggcccatagatagggtggttgagcactattattttctgttcttaagtttagttgtgatagaatgctgtttctactcttgctgaataactattaaagtcttttaagttattcttatgtagattgacatttttgttattagcatatttaatttgtttgatcaaataacagtatggtgataatagataattgggctgtaatttttgaacaagttaggagttggatttctcacaaaacaatcatgatttcataactcataaaactattattattacttgacaatcgtggaaagtagtatgactggctctagtgacagattgatattttatgatgttccttggctggcattttttaatcttccttttccatttgctactttctgttttcatttagaattagttgtgttgatcttactcaatgaaattagaaaatgttgcaagaacagttttgtcacaaatctgttgtcatcgtcaaaaacatgatgcatttggtgtaatacaggg

SEQ ID NO: 20121 - DNA, 681 bp, Glycine max
  Intron number 1 from transcript Glyma02g34770.1 (locus Gly ma02g34770) derived from phytozome v7.0 (chr-ID Gm02; pos 39280775 to 39281455 reverse strand)
aagtggttgattctctaagggacttgaaatacaaggtaatgctttgttcccatcagtttcatctgaattttggcagtattatttgtcttctcttctatataaatttaattcatatgaaatgatgattgtgttagccactaaactaatggtatgtggggactctaataaactaataaaaaataaattgaaatgcagctattaaaatgaagaaagaagtgtacaaagaatacttctatgtacgagataatcgttatgatctttagttagatagatgttctataaagctcaaagatagccttcaatttgtggatgacatctttcattcaaccagaattaccttatattacctctagctactgtaaacattagttctgcagctaatcctcttgcttgctgcctttggtccaccatacttcttgtaagtgctgaatgatatattatatgtatggcttaggaaaactggaaaacaaagttttgctaaggttggccagaatttcgctaatagatgaaaattatggcttgattagccatatggctcaaattgcacctttgctaacaccactaaaacacatgacaaattccatgctagttttttttcttattatttgaaaaaaaacaatacagtgccctattgtatgcccagcaggtagaggaagcaaagctgatcaatcagttggctga

SEQ ID NO: 20122 - DNA, 483 bp, Glycine max
  Intron number 2 from transcript Glyma02g05960.1 (locus Gly ma02g05960) derived from phytozome v7.0 (chr-ID Gm02; pos 4784832 to 4785314 reverse strand)
acttgtgccttcaagttgaccagaattcctctcaggtaaatatgccaatattatattcagcttaatttgagaaatggaacctctttgtataaatttctcctcacacactcgtaggagaagaaaataccaaggaaaaactaacttctgcaaattagcttatgtataagctcatttaagacactgggaaaaaattatttcatttatttcttcttttataagcgctttaaggagaagtttctcaaaatagggtcataattattatattttttttgtgaaattatttcccctaaacaatggttagtatgattgccaggttttagttttacatatctgacacttggttggatgctatgaggttgaaatcaaattatacgaaaagttgataataaactggcagtaatagggaccaggggctaatgatttttttttaatgttttgttgttgaggttattgtatcgttacttgtttaggaattttgttgaa

SEQ ID NO: 20123 - DNA, 253 bp, Glycine max
  Intron number 2 from transcript Glyma05g04160.1 (locus Gly ma05g04160) derived from phytozome v7.0 (chr-ID Gm05; pos 3276854 to 3277106)
actctcagacaagttcgaattcaggtaaccaagttatcgacctaaaaaatttgattatcgatattagttcatgaaagaagttttctttgcattacgtgcccccaagtctagaacacatggcaagaaacttatttgatgctgtcatcatgtatattttcttttgctgtttcactttttattctaggtttattcatgtgtcctaataactaacaaaatatttggtggattttcttgaaatgaacagggagtagac

SEQ ID NO: 20124 - DNA, 836 bp, Glycine max
  Intron number 1 from transcript Glyma02g40310.1 (locus Gly ma02g40310) derived from phytozome v7.0 (chr-ID Gm02; pos 45532695 to 45533530 reverse strand)
tgcactcacttctagggtttcctccgcgctatcaggtttctctttcgttttcggttatccatttctttaatttctttccttttggtttttgctggctgatgttttcgcccaatcggtttccattgaaatttgcgttcttcactcttccatttctaaaatcggtgtttttttttttttgcgtttctttctccttttcgagttatccgattgaatgggtgtttctggaatccgttcgtcgcaccgttacggcgtgttaggtgttgattatttagggtgaaacaatattttttttaaagatgcgtataacacataataggctaattcaaaggcactcttgtagttgcgtatagatctgtggttttcgtaacttctgtagttgatagttcctcctgctactcgttctggatttgataatgttgttgttttgaagtagcgtaagatttttgcacattcacaattgaggttctgcttttttgttgtgttaagtcaggttgtacaatttgtttcgttttagtattcaactgttcaattagcaaggttctcttgcgttttttctttttaacttatttttcctttttattttggattattgatactgatatatagcattttcgagtttgggacttttccctgatagaaactaatagtgctattcgtttccctataattgataattgatgctgttttttttttaaaattttttttggaaaaagtatgatttagtaatatgtttccttaatcttctacgtctttctcttttatccctacttttttttatatctttttctatttctccgatcatgtacgaactttatattacttgtgttgcagcaatc

SEQ ID NO: 20125 - DNA, 607 bp, Glycine max
  Intron number 2 from transcript Glyma03g40880.3 (locus Gly ma03g40880) derived from phytozome v7.0 (chr-ID Gm03; pos 46492175 to 46492781 reverse strand)
ttcctcaagtcaaacttggaactcaaggccttgtggtattatatgaactctatactctatcttgttctattcccgcttcagatattttctcttattccaattcatcatgatgagaaaaccgttttctttttcttttctttctctaataggtttcaaagttagggttggggtgtatgacccttagtggacgctataatgatccacttcctgaagaggaaggcatatctgttattaagcatgctttcagccaaggaatcactttttttgacacatctgatctctatgggctcgaccatgctaacgaatttttgctcggaaaagtaaccattcctttgcatcctccccttaaattttaatcaagaaattatactaaaaaagttataacaagagttttatattttcatccaatcagaaatcttcgtttgtattacttttaagataattatttgaaaagttaaaaaaaattagactattagtgtataactttttttctcacatgtaaatgtgtttgttttctaatggatctctggaattacataaggactgtgtttttatttgattctatggagcaggctttgaagcagttacctagagaaaagatccaggt

SEQ ID NO: 20126 - DNA, 447 bp, Glycine max
  Intron number 2 from transcript Glyma04g35110.1 (locus Gly ma04g35110) derived from phytozome v7.0 (chr-ID Gm04; pos 41453121 to 41453567 reverse strand)
cataactgtcaatttaggcctttgggatacagctggtatgaaacttgttatagtgtttttttttaaggttggtgttcagttatacacaaacattttaaaaaaaatacaaacaaattatagtgacaccccatgtggtttcttgagatagcacacaatactcctgcctttttagccgctatagtaatttctcttaattgtttgaaatacattacaccatgtatccccataagaagagttattgcaaagtgtaaatcttaaaaaggtagtgcaatttcaataaaccacaggacgtatcaatcaaatttgttcaaatgaatgatgatggggattgttttctggtttggctgatagaatgatatttgtcaaaagaaaaaggttgttatgttgtatttgtttccattatcttccttagggcaagaggattacaacaggctgaggcccttgagc

SEQ ID NO: 20127 - DNA, 713 bp, Glycine max
  Intron number 1 from transcript Glyma01g42200.1 (locus Gly ma01g42200) derived from phytozome v7.0 (chr-ID Gm01; pos 53503174 to 53503886 reverse strand)
aacactcccaggttctttaactatcctccctctcttcttgtcttaccgtgttttatgctactattttttcctctcgcctctctagtctcttccgtttctattacttggaacatatagcttctaaccctgtatattttggaccgatctataaatttcgcctctgattttatgcaaatctctcatattcttttgtttttgcatcgtcttatggacacgctatttgatttcctgccaattttatttactctttaatctattccccccgaatggtggtaaacccctagcctgttaatcttaaaacagttgctattgtttatgttggtttttgtcccagcgaaatcccttttttgcagacaagaacgtttcgtgtctctgaccactggctttgttcctccttgcattctatctggttgcaataattcagtttcaaaacgtgaatacttttcagagaataattacgtttttttttatccctaagtcacgccgacttttgaatttgatttgtccgctgacaatattttaaccattttttttacttttcttttcttattgcgtccagcttcctcctcttctgaaaagtctgtgttcccattagtgtattctttatactttgatgtttggaagagaaattgggagacaaggcaattttgctaactttgacctttttctatgaaacagggttgtcattgacaattccgttttctcctcagcta

SEQ ID NO: 20128 - DNA, 731 bp, Glycine max
  Intron number 1 from transcript Glyma04g41670.1 (locus Gly ma04g41670) derived from phytozome v7.0 (chr-ID Gm04; pos 47519664 to 47520394 reverse strand)
ttgcctttctaggcgtcttcttcctttttattcaggtatgcatgcattttctcattcattaaaacctttaaatgtgctgtttttgcttattcctttacgataaatgctaagaacgcattgcttctgaggtctcttcgtacgaaataatatctttaattaggagaggatagctccttagatagttagggattagtttctgactttctgcaggaaaatacacacgcaaaatgtttaataaacacctagtattcaacacagagagaaaaaataattattataagatttatgatgcgaccggaagagaaacgagagatgttcagggtgtttttaaaataaaaacgaattgggtatcattacttactacacactggttctagtaaaaaatataaatgtttttttggtacccagacaaaggtatgtttattcctttatttggttctcgagtttttttttttattgaaatcaaaatgtaccattcgttgtccttttaatgaacaaaatgtaacgagttctgttttgttatgtttcttgtttaaaacttatcaatagcaaatgtaaaatgaaagttgtatactatgttcgagagacatgaatgaagatagttgttgataagcaattgtttgtttcttttaattaatgtcataaacttggattatttatttattttgcaaatctaaattggatagaaaaaaattgggttgtgtggaccaaaatgcaggaagagaaaggat

SEQ ID NO: 20129 - DNA, 768 bp, Glycine max
  Intron number 1 from transcript Glyma03g36990.1 (locus Gly ma03g36990) derived from phytozome v7.0 (chr-ID Gm03; pos 43787903 to 43788670 reverse strand)
cttcatttttttgtttctatatccgtaattacagcgtaacaaaatcaatatttcatgtttgagaagttgaattttgctttgaaatgataatgatatatagttgcattacttgtcaaattctagcctctaggctgtcctttgctagcttaaaaattgaattatagtttggtagaaactagaaagaagatgcgtttagtgataacaaataacactaactgtaaagaagtgtggatttattaaacttttacttctgtttatggctatgaaactattcaagttaaaaggaaggcatcatgaaatgacagtaaattccctgattccaattctatgcatactcttactctatacgatggctagggagaataattattcataaacatctaacttctagacgaggggagagtagaaagaaaagtactagtatgatagtctttctttttttggattcgggatttggacctagaagtatctcatagttggaagtcatgactaattttccgagaaaatagagtaccactcaaagggtaactcttctatccacatgtgttttgttctatttgcatagttaagaattacgaccctgccatatgtttaaaagtctcaacttactagtcacttgtgcacatctgataggtaatatgatgtggtaggaaaaaaaaaataataggcgtcaatagaatgtttgatatatgtgagtgttcatatatcatcagtcggggcgctagcaatagcatgttcaattgttatttgcctaagttctgccagcta

SEQ ID NO: 20130 - DNA, 810 bp, Glycine max
  Intron number 2 from transcript Glyma02g08070.1 (locus Gly ma02g08070) derived from phytozome v7.0 (chr-ID Gm02; pos 6327545 to 6328354 reverse strand)
ccttcttgtttgaaacgactaaacctccagcacaagtaacaatttttttgggtcatgatgtttacatttattgttttttattattatgtgttatgggcatgataaattttagttatatattttttgttattaagtgatttatatatatgggtctagctagacctcatgaattaaatacaataggatatattgaatatataataaatcatgtgttaaaatttgtgattttagattatttaatatatgtgcaattttaattgtaacattacaagttacatttttttaaccaagaatgagaatttacctagcaaatgtgattgaaaaacaagtaagaatttacacttatatgtgtcctgttttaaatttctattagaagggcacaagtcaatattcctctttgctcctcatattgctttaatttcgaataaagggactgctatattaaatgagtttgttactgtattggacaaccatactgtctcttctccttgctctagtaactcactctgaatcttgtgttttatttagagtaattatagttagtgataaattatatgtagaaatgttgcaattgtcatggtaataatttctcattcatgcttagtatgaagtgtttgatttgcaagggttttttgtttgaaactctattgaactttgagcatccacacgattgtgttaaataaattttttggcaatgacttaagaaactttatcaaaaatgaatttcatttcctataagaattgacttaattaattgtttctttgttcttttgagtttagagaatcataggacagccacttcgtgtatac

SEQ ID NO: 20131 - DNA, 457 bp, Glycine max
  Intron number 1 from transcript Glyma01g10160.1 (locus Gly ma01g10160) derived from phytozome v7.0 (chr-ID Gm01; pos 13070014 to 13070470 reverse strand)
atcccgccgaacagaaaaagagaaggtgagagaattgttgctctaataaagtttcgttaaactgcctgtaattctcttcctctttcaatcccctttctcaacacaatcaaaatttcttctggtttcttcgaatccgagatccgcttccaatctcgttaatgggtccattttattttggaacattttaatgggttctttcgcattgcaaacaatttagtcctcaaaagggtgttgtttcagatcctaggtttttctacatttcttcacatcccaacaatttattaaccaggttagtgatatagactaagtaaaaggttgtacttttttttctttaatgggttatttgatttgtgtataattgtgtacaaattgagtttttttttttttttttgggggggggggggtgtttctgtctcggttccttatgctgttgttgtgaattaggtgaagcataaga

SEQ ID NO: 20132 - DNA, 674 bp, Glycine max
  Intron number 1 from transcript Glyma02g07000.1 (locus Gly ma02g07000) derived from phytozome v7.0 (chr-ID Gm02; pos 5616607 to 5617280 reverse strand)
acgttgaacaccgcccatcttacgtcttggaaaaggtctgcttcttaattacactcttgaggtttccttctcaaatttttgaccagttttcttacttatttcagccatttttttatcttgattttcttaaaattttaattgcgacctactttcagtgtgaagttttttatgccgccttcagcaaataaaaaaaatgaatacttaatatttgtactaaaataagtgttaaggagaaaaataaatatttagattttggagtaagcaaagaatttttttttacatagaataaaattaaaatttaatttactcattttaccatgaataaaaccaacaatttcataatttgcagagataaaaattaaaggaattttttttagaaaccaaaataaaaatcttattataaaaaaaatatgatgatactagttagatatatttgaattatatattaatatgcacgtcatcgattatactacttttttttatagataattaatatgaaaattctttagatttcaaatatctaattcttcactgatgtcaaccaaaaatatacactctgaaaacttgagaaacactttcacatcttatgcattgtccatataaagaaaaataccgaatgaaaaagttgcactcatctttagcattattataattctttcccttgcgacagtaca

SEQ ID NO: 20133 - DNA, 1019 bp, Glycine max
  Intron number 2 from transcript Glyma0041s00290.2 (locus G lyma0041s00290) derived from phytozome v7.0 (chr-ID scaffo ld_41; pos 87534 to 88552)
ctgtggtttttgtgaggatacttgttttcaggttgttcagtccttccaagatttgaatagttttatctgtgtgccttatgttatagtaataacacaatgtgctagagtcaattgttttcttatctgttaattttttaatctgaaaacttcagatgccaaccaactatcaagattttagatacctagttaagtagaagtgaagatgttattaaggtcgttctaatggatatttttagtctactctctgtagtctagattcacttgatgtctctacaagtacatgtaaggagcatatatttgatagcatttcacctgcattgttcactattaaaacctctctggccagttttaattaacatgtaaattgtgttgttcaatgttatcattttgtaaatgattttaccttatttcagaaacaaattctcatgaaaatcactcttttgagcatctaaacaaagaaactagctaggaaatagaacattcatctaaaaatcatacttgattgcatattatgctgtcagatggaacaaatacttgaaatctattttaattaaattttgtggtgtgatatcatataacatgacaaatgttcatctattcatctatcacctttactgatggttttgtgcctgcataagaaggcatttgcttaaaaatttatatgccaataacaagaattgagatttgtgctcagagatagaagcaagattgctgttgactacatataattgatataggtaacccactactcatgaagtaccaaaataaattaatgaagctaagtgtgagctggcattttgtcctttataaagtttatgtagtgcttttgttatgccttggtttttatgtgtttggtttcagctccatttttttattcaaatcaaaatcagttcatcatacagcatatcaaataaaaattatgcctaaaggaaatttgattgtctatcttgtggcattactaactgtaatgttgccattgtcaccttcagtattcgagtgttttccattgctgctgtcat

SEQ ID NO: 20134 - DNA, 498 bp, Glycine max
  Intron number 3 from transcript Glyma01g05490.3 (locus Gly ma01g05490) derived from phytozome v7.0 (chr-ID Gm01; pos 5315995 to 5316492 reverse strand)
ttgctgctccgtggcctgaaaagctgcgctaccaggtttatgccctacctttgatcattcttcttgtaatgttttgtgtgattgcccagtaagtttggatgtctttctgtttcatgtaccattgtttccaatcacttattgtcattgagcttttgcatcgtaactctggaaagatggtgtatgatggtatgtagaaaatgttgttcatagtataaactgtaccccaagcttgctgttgtctatgagggaaagaaagagcagaatgttgtatgaatgaagtttacagggctggtgcgtttgctcaattactgtgccatttttggagccaactttgtgttatagccgttacgggatattaatgtcgctgtggttttccatttattcatgaaacctaaccacatttaatttccttcaaaatgtcatgcaaacagaaagccatctaatgggaaaatgtaatggcataatatgcattctttaatttttattcaccacagggag

SEQ ID NO: 20135 - DNA, 873 bp, Glycine max
  Intron number 2 from transcript Glyma03g37950.1 (locus Gly ma03g37950) derived from phytozome v7.0 (chr-ID Gm03; pos 44417495 to 44418367 reverse strand)
aggtatgttctatttcctctatttcccgttaactttgttcagactcgtgttgtagttgaaattgtggattaatataagagtgtgcacatggtatactacatagcaatggaaatggtcattttatccctgtctctaccgtacgagaatggtgaatcctggaataaattaaactttgttttatcaccttcgtggttctaaatttcagctgcggccatcgcagctgctgcaatgcagatggcggcttgaaattattataagtttgcactgaatgtaaaagagaattttacaattattctaattattggtatatcttttatttataagatagcaaagattttcattcattttaagatatggtatctgcaccaactcatacggccatactcattcgaacattgacacttagaagttcaaaatagaagattgaaatctaaattttattttattttttacacaaaacaagtggaatagaatggtgttaaggttccatagcggctatgttgtggaatttgatgtgattgaaaatcacaatgcaattgggggcactaccgtaacaacaatatgatggccgcaattgccattgtggactgcaatttcaaaccatgatcaccttacttatcttcagtttgttacaattgtaatccattgcatgcactaagcataatagcaatttgaaatagaaaaacaaatgtcatttcatttcccttgtcagaagagatggttttatttatctttttacatttttatcatgcatctttttagcaaattgcgtgattttatacttgtttttattttctgtttttattatagctcttactcttctatctctgatttttgtaattttatatcagattcgccctgtattcgaagaac

SEQ ID NO: 20136 - DNA, 345 bp, Glycine max
  Intron number 2 from transcript Glyma01g04870.1 (locus Gly ma01g04870) derived from phytozome v7.0 (chr-ID Gm01; pos 4470268 to 4470612 reverse strand)
ctctgctgggtggggccactctggttttgtttcaggtttgcactcttctgtctctgtctccactgtttttgtgaagtatatgactgtgcatatttggaaattcgttgtaaaatttgcgaaagtagttttattaacagatcatgacccttactcttttgcgttcattttacttttatccgttagatttttctgttgcaagattgcgtttgagacaaaagtaattctagtatcaacatttcaattctaactacaaactaaagatgcactatatattgttgaggtttgttccaagttggaagttattaattttgtattttgattagttctttggttggttttcagata

SEQ ID NO: 20137 - DNA, 824 bp, Glycine max
  Intron number 1 from transcript Glyma01g00640.1 (locus Gly ma01g00640) derived from phytozome v7.0 (chr-ID Gm01; pos 379310 to 380133)
agagaagtgcataattgtgtctaacttaatataaaaatatataaatgagagaaatatatataaagtaagaaaataaaacataaaatgtttttaagatacgaatgatataagaattgagatttgataacgcgtactgtttcattttttttttcaaacaattgactggagtctatatttcatttcattataaaatatctaaataattaattgacatttttatttccttttattttgttcctatcgtctttcaattcattctgtttcattatctaccacaaatcaaaatatattataaaattttatacgaaaataagagaaataaacattaatatttgtattttattataaatggtaaagatttaaaagtacaaatcacattagttttttcaaaatcatataactttttaaaattagttttttttttaaatcctgacaacttgtgtagaatagaactatatagttcactttcttataaaataaactttcaccatatagatgtaagtatactacatatatcattataaaaaaaaagtatacgtcatatattcatataaaaataactttcattatatttttttgaaaagaataactttcattatataaatcttgtctacatatatacacaatcgttttatgttttgatgactgcaatatcaagtaggttaataaaaacctaatttatttatcattgagaaaataaaacgtaatttgaattaaaaagaaaatgacaagtttgtcttgaattttgtctaaaaaacagtaattttgatcatttttttgtggggagagataaatcagatattttattagcgataactgctgga

SEQ ID NO: 20138 - DNA, 810 bp, Glycine max
  Intron number 2 from transcript Glyma01g21510.1 (locus Gly ma01g21510) derived from phytozome v7.0 (chr-ID Gm01; pos 26675553 to 26676362 reverse strand)
gcatatctagggtaaagtacaactctgcctttaagtctttaacatatcacaaaaaggtctcaactttaacacaatatttgttttaaccatggtaaaagagtctcagactccttgctaggactttaatattcttacaagttataattttttgtgttcattatgagactaattctatatttaagaattagtcatacttaaaaaattttcgtcattcttcaaggatatattatttgaaaatgaaactcaaattctctcccacaaacttaataatatatgttgtatattttgattaaatatttcaaaaaagttaaatatccttttaatcaatttatcacctattttaatgtgtattaaattcatattttaattaaaattattacctattttaattgcattaattaacaattatttttttaattacaaaaaatatttatattgaacaaggtgtagaggatcagtaagcacatatcttttcttcatcctttcatctttaattgcattgagttcctgagtttttctcacagaagaacctgttagctctgttgccccgataattgggaagagcctgttatattccaagggacttacgcatcatgtggatatgtccttgagaacagtgtgatttcacacgtctcaggcttaatctattgagaccatacatgtttatgtagatgcggtttgcagatgatcagttcgtgattgataattgatcgcgattttgaacgtcaaggacaacaatatatgtagctgaaagttaacttactttgttttacttatctttgcagggtgccagggaccttgattttgttg

SEQ ID NO: 20139 - DNA, 908 bp, Glycine max
  Intron number 1 from transcript Glyma02g13180.5 (locus Gly ma02g13180) derived from phytozome v7.0 (chr-ID Gm02; pos 11405480 to 11406387)
cggtttcccagatctgctccttcctcaccccacaggtagcccttcctcttctcgcattagggttttccattttcattcatttttcatctcaatttttgatcctcattttgcatttcattttacgcgagatcctttttccggcctcgtcaatctcccttgttcagatccattttcaattttcattgtgttttttttggtgtgtggaatcgtaggtttttttgtgtaatcgttttattttgcgattgatttgattttgatcaattcatggcgttgcgctcattcttatactgtgaaatgtgaatgataatggaaaagattgtgttatacctatgttgtcatcgaaacaatagaaaatgaaggagattgagatgtctttgttagtcttatagaatgatgatcaaagaacatatgacttttttattccgttttgcaattatgtgcttgttgcttttgctgtgttgtgcattgtctccagaattgcggacaaatatcacccatgaattgggaagtcgtggtcttggaaagttttttaaaacctaaattttaatggaatacaatgatgtagatcaattagcccaagatgaagaaaactggtagtaaaatagagaagtggtatcagcaaagtctggcaatcagttttttgtttttgaatttcatcttgattcaatttatctgttgtttgttgatggctgggtgtgctagatgttagaatgcaaatgaaaatacatttgattaatgtttagtgcatactaggttgtgaatgttatctgaattaatatttgtaggttctcacattttattttgtccttcctttttttgtgagtgtcttttgttacttatgaatttatgtgaatcttgtttgtccatttgaaggctgatactagactgtaactttcagaagtcagttg

SEQ ID NO: 20140 - DNA, 866 bp, Glycine max
  Intron number 1 from transcript Glyma02g47380.3 (locus Gly ma02g47380) derived from phytozome v7.0 (chr-ID Gm02; pos 50978289 to 50979154 reverse strand)
tgtgaattctggcaaggtatcacccaaaccaattttttttttctcttgtggcttgtgatgtgggaatgtttttctggttgcatatgtgggagaattgggattttggtgcatgtactaggataagataaactcccaattttggtgatattctattaagtgtagctcactagctagtgtgtatctgcttctgtgaacaatagctatggttgcatgttggaatatcacctggtgctgtttggttgtgtgactaaatatatggcagaaataaatgttgctgattatgattttgttcttctaggggcatttggtttctgggcactgtccaagagttgaaagattttttctttttctttaaacagttgcggctcctgctgaagatcaagtaatagcaaaatggaaactatttttgttttaagcctctgtttgcttaacaagtattatcttttcacgatgaattttaataattttgaatgtgggtttatcaattttctttaacttgcatgtctactatcaatcagcatgctgcattttaagagcctttcattcattaatgaagctatgaactagtactattgtaactttctgtgagttgtgcttgatatcatatcgatcaatttgtacctctagaaggtttggatatcaatgtttctgagacaattatgggtatagttttcacttcacgggattttgtttcagaaataccttatttacccattcttttaattccattggagggtctcttattgtaaaggggaataaccactgttgctatcaacttttatttatcttgcctttgttttagcataaggaataaaatttgtaatccaatattcttttgtagggaactagggatctgaagataagat

SEQ ID NO: 20141 - DNA, 799 bp, Glycine max
  Intron number 1 from transcript Glyma03g38220.1 (locus Gly ma03g38220) derived from phytozome v7.0 (chr-ID Gm03; pos 44610008 to 44610806 reverse strand)
gtttccctcccaattctcgtccaactccatcccaggtcttttcattttctcattcctaatgtctagggtttttaattctttctatcgcgattgccaaatcaaaattcactcccttaacaaactcaatttcagtttttgagcctcacccattttttattattaccacttagctttatttcctcaattcctactgggttttctttaagttgattacttaacattaataatattaaaaaaaaaagtttttattctaaagtactgaacttagacgatgaactggtactttgtgttggaatacacactgttcctcactcaattgtaagagatgcaattcactctctcttagattcactcgtgtatctgttaggaagaagatgctctgccatgtaaacttgccataggggtagttgttattctagaagtagttgccgtaggggtagttgttattctagaggtagttattgtggtggttattgtagcgattatcgtagtgggagtgcggttattatagtgagattacggttattgtagaacattcaggcttaagttaccgctaacaatatcactcactgttttaagcacagaattgcacacctatagaatgaaaataattcactttattaagatgtatgtatgtccttttatacaagcaaaacaaagcaacaaccctttacacttaggctagacacttataaaacagaattaaactctcacactttgtcgttttctgcttgtgcctattctgatttttactttttgtttaggtaaaatcagcttacaaaaagaaggtgtgggaatc

SEQ ID NO: 20142 - DNA, 868 bp, Glycine max
  Intron number 3 from transcript Glyma04g34220.1 (locus Gly ma04g34220) derived from phytozome v7.0 (chr-ID Gm04; pos 40323289 to 40324156 reverse strand)
ccccgtaagaaagcaggtatccatatccattacagctatagtgtaccactcttcgggtttcaatttgacagagaagtagtccttggtctatggttccccacattatgtatttaaaaaattatatgacatgtatttaaatttttaaaaaataattaataacgcttaattacatatataggtaaaaattataaaaattatagaccaagtgataattcaaaatcacctaacaatttcaccaatttgacaaattgttgaatttcccatgggagtcaccatatttttagactctttcttttacagtcacacctcagctctatatttttacctttattttctttttttattgttacttctattttctactacatttatatttggttcttcttatttttcttttttcctttcaccttaatacattccaaattgaatatgtcttaagtttagtattttttttcttattatactaattaacccacacttatttttatgataaaaaaacctaatttcatttaaatttatctcaattttattttatcataaagagagatgtgagtagggttacgtaatgtaaaaacaacatatgcataaaagaaatgattttatgagtaattaattaataatacacataaacactattttgttttaaatatttcattaacatttataatttttttctcttcttgccacatcagataatatattttttttctattttatatcaaaatacaatttatttatatgggtgacaagattatttcccaaagaaatctcacacactatctagtttctcattctttaattgtaacatagaacaattaatactattaacttacactcttcctacacatgaaacatttgaggtgcaaag

SEQ ID NO: 20143 - DNA, 616 bp, Glycine max
  Intron number 1 from transcript Glyma02g11240.1 (locus Gly ma02g11240) derived from phytozome v7.0 (chr-ID Gm02; pos 9421222 to 9421837)
agcttctcaatctttgacgaagataaacaacagtacgaattttttttattttttctttctacgtttgatgattgaacgatcacgattagggtttttttctatcctatgcttcttaatttgcagattcaattctgtgttttctgttttgattaggttttagtgtttgtatttattcctgtcgtttcgaattgttggacgatgttattagcagtaaattcaaatcgtatgttgaaaatccttctttgttgtggtggaatttcgtaaaaggggaaaagaataggtatattcataatggtaagctatgtatgaagatttgatagaacatgtttgtgtctaatatgtgtattttgctatgtatatgtattgaattctgatagaactgttttccttgagaagaaactatgggattctgtttttgtaaggcaattggtttgtttggttggttctggcttaatgatttctgtattaaatctttcttttggcttaagagggattcttggtgcctgtgttgtatttgcttatttggtgtctacttgttaatttcctgatatactgagcttggtctgactgtatttttgcagtcttcacttgcggctgctagagcagacaactttta

SEQ ID NO: 20144 - DNA, 675 bp, Glycine max
  Intron number 3 from transcript Glyma02g11240.1 (locus Gly ma02g11240) derived from phytozome v7.0 (chr-ID Gm02; pos 9421999 to 9422673)
gcgagaaaattagatcagggtatcctgattataaggtaatcagcagtagctacagtaaccattaaatcatgttaactgtttacctttttctaataagggatcccaatgttatcatgttatgtgaaattctattgtctggaagatggaatgattaatgaatgtgaatgatgagcctgtttagtaattgatgtttattgtgtatcaagtacatgacaaactacagattatcaggtgtataaagatcaaaattgaaagtattttgatagatgttatgaattctgagtatattctaatgaccgcttatgattgaactgaatctatataaattttttcatgcttgaacctgttcttgcagatttattttttcatgtttataataagtgcttggtttcagaatagattatttatacaacaattaaggttgtaaaaattgagatccctcttagatcagaaaggggatggggaagacccatgtaatcataagtttgtatgacagctctaagatgcctaaactgatgtatatggaagctaggaaaaattttcttgactcttgagttgagatgtctcattcttccaactgaatttaaattggttttcctagaatgccatgctaaaattatttctcttttaaagtttaatttcatattacttaactaaactactttcaggtttgag

SEQ ID NO: 20145 - DNA, 611 bp, Glycine max
  Intron number 1 from transcript Glyma02g36660.1 (locus Gly ma02g36660) derived from phytozome v7.0 (chr-ID Gm02; pos 42107748 to 42108358)
tgttctgatcgttctctcgccctcgtcgcccaaaggttccaactttctcccaaattccaatacccttttgtttttccttcgctaatcgatggtggccccaattgggtctcaaaactttggtcctttaagtgtgtgtttgggttatcatttgcaaaactgattttgcaaatttaattttggttaaaattgattttgaagtaaagtgatatatgtttgaatatttttattctaaaagcatgttagtatcaaaaagttgtttcaactcaaaatcaattttggacgagaatcaattcttcaacttggaactaaatgttacctatacctaaaattacattagctgatattttcatgtaatattgaatcatttaaggtgaatccaaacatgccataattcgttctgattgcttttgagatttcaagagtatgctatgatttttcttttatattaggactttgattctgaaattccaatattttaatttgtctgttaaatgcggggtttgtgccttccattgtgaataaaacatagcattggagcatttagcttctttttgtaaacttgtctctgcatttcagttgcccaaaccttgaggtgttgtttatcagaagct

SEQ ID NO: 20146 - DNA, 653 bp, Glycine max
  Intron number 2 from transcript Glyma04g24950.1 (locus Gly ma04g24950) derived from phytozome v7.0 (chr-ID Gm04; pos 28635553 to 28636205)
tcattgattttattgccacactccctctacctcaggtgtgttgttctagtgtcaacattatttgatcttttacattgtatcaatttactgcaaacttctcttgctgttgattttgatttctgctataaaaatggagataaagttaattgagaaaaatatttagcagaaaattatctttagggaaaatgtataagtttctctattcattgtaaatttctaattttgtgcatggtgacattatccattatattacattgatgtaatagattaagctaaccatattggttataatcccttatccattctggaccaaaatccagaactaaagtcatgaatcaactaagcatgtttgcctctaaaaagcttctcatttgatcttccatcacttgaccacttttaggggccctgcaaaatgtaaaagcattattgccctacatctaagatttagattcttattttatcatttaaagtggtgcatacataaacacctctaaaacgtggtaaactaagataatatgtccaatttgaggcctgtatttctacatgctgtacttcacttatatagacagaacagtttagttggtttaaattttagaagtcgtttgcaggtttggcatatagatggtagctgattgaacttttttctctttcag

SEQ ID NO: 20147 - DNA, 780 bp, Glycine max
  Intron number 2 from transcript Glyma01g37860.1 (locus Gly ma01g37860) derived from phytozome v7.0 (chr-ID Gm01; pos 50142611 to 50143390)
ttgattcgggaggaggagaacctttcaatcctaaggtattgaattactaatattctgatttaataatattgtttacttggagtatccattgcttaatccttgcaatatgaaatgtttgtttaagaacgtggcattttataaactcagctgttgctgcagttttttggttggagtatataatatatttgtgaatgtgttttgcgttgctttgtttaatcttgaatttgttagacattgtcattggtttaggtcatgcacctttcttactctgcggtctcccctgcaccaaggagaattgtgttgctgtgtgtgtataaaataatgtgggggtcagcactcaccccctctttcaattacatgttagaatctcttattcaaggcttacatttcttaggttatgctgccttggagtgatagaatagtaagaggagtggattgaaatcaaatgatactaggatagtaacttttattactatttgaattgttaaaacaggatggaatgaaaatggaatatgatggaatgcattcattccattccattctatccaatacccctctttttcttcccctttaatttgagagatggaatcattctttttccccaatctgtcacaaatataatggtcattttgttttattccagttgactccattctatcctcttccactctatatatccaaactatcttgatttgttgttatcttcatggctgctaattccttggattatgaattatcaaattgttctctcactcatatttatacatttatattgtaggt

SEQ ID NO: 20148 - DNA, 452 bp, Glycine max
  Intron number 2 from transcript Glyma05g04880.1 (locus Gly ma05g04880) derived from phytozome v7.0 (chr-ID Gm05; pos 4050246 to 4050697 reverse strand)
aaggttggttctgattttttgattaaactattgtttttaatgactgggttttaggcttttaattcggggcttaattttaaatttaaacaatgaaccttctgcaatattcttctttagctttaaggaggggtttccttggataaactcacggtgtttatcctgtacctctctaagtacagtttttttactactatgagtctatctgttattataagtttgagttgaattttacctctcactccccctacaaaagataataataaataaaaagaaaatgcttaaaattaaaagagcatagactgttgacctgggtattaagtaagatgaagtttggctgcaattacaagtgccaactttgcaaaattagtatggtagttcatatggtaggcttttgatgaatagcatatttacattattttatagttgtctgtttggaatttcagaatatcttg

SEQ ID NO: 20149 - DNA, 816 bp, Glycine max
  Intron number 1 from transcript Glyma02g07920.1 (locus Gly ma02g07920) derived from phytozome v7.0 (chr-ID Gm02; pos 6246619 to 6247434 reverse strand)
aaacaagtacctcttgtttgtgtaactactggactttgttatgttgtgtatgtattttgatattataaaattgggtattatttgcaaattggtgttgagaaaaagctgtctaagttctattgagtgatgactgatttctgctagatgataacttcaaaatcaaatggtgtaggatggatgcttcctacttgctaaaatcacgcttgatttgtttctgggggttctaaattgttacaccaatgtaaaatttcgagtattacataagcatcctttctgttttaaattttaaattctaaagagcagtacattattttgagttttttttcctgttgacatccaatcctaaaattgctagtgcatataagtgtagtttgatcactttgatgagcctaaaatcatttgggaaaactatagtaaccttccttgaggttagcactttttacattgacactgtccttgtttaggaaattacacctacctcctttgctttgttatttttaaggtgttaaagcaagtgctgtgattggactttcccaaacaagaagggtgttggtgtaagtgtaataatccttatccttaagggaggtccgtataattagccctaatcatttccttcatttgccaattttcttagatgtgtagtttcatatcttcttcctcttattattgccaggatatgatttgcttcttatcatttttaaattataaaatatagatttactaaattgttaaacttaagacaatcttacaggttttttttgtgtaatgaattaaataacagggtgttttgggagatagctgctcttatttgtacca

SEQ ID NO: 20150 - DNA, 493 bp, Glycine max
  Intron number 3 from transcript Glyma04g35000.1 (locus Gly ma04g35000) derived from phytozome v7.0 (chr-ID Gm04; pos 41285566 to 41286058)
gacactggtgttgtggtaatttccttttcatagggttattgattgttaattaaattgtaacataagactgagtcgtagttgttatgttaatgttgaggctagttacaacagtttttattggagtatataatcaattagtttattaagaattagttacaaatggttaggttaacaaaataaataggagcattgtaattcatttttcttatcttttaatcaatatgacatctcttgagacttattctctctatttggcctacgcctatgatttgtatccctctcatcctcttattaccaatagttttcctcttcggtactgatggagggatttttgaaggggggtttattttaattattaaggattgaggaattgttttattgacaaaattttgatgatggaatttaacaatgtttagctgctatttgttcaaataatgcaatttttgttggattagtaggttcgtggcttttcggggcagcaacaacttgagag

SEQ ID NO: 20151 - DNA, 737 bp, Glycine max
  Intron number 1 from transcript Glyma03g25750.1 (locus Gly ma03g25750) derived from phytozome v7.0 (chr-ID Gm03; pos 32995336 to 32996072 reverse strand)
atagggacgccattcgagccattcgcttgaagaaggtacgtgcctcttccgtcagttgcaacggtgacgttttgctccgtttccttctaattgctgtgtttcatgtgtgtgtgtgtgtgtgtggtgagggatatgagttgaagctgaatttgaagttgagttttgaatttgaaaattctgcgttgtgtgttttttcgttgaacttcaatgtaggattgaaaattgattgccttgtagagttgtagttaattttgttatcaacttgtctctatattaatctattctctcgggttgtttacgttctggtaaagtatgagaatttgattttggggggaaaaaaaagaagagaatttcatgcattttgctttttacacttgtgtgtgtgtgtgtgtgtgtgcttttcagaaaaaaaaaaaaggaatagttttggactaactctatttagctacgtttttcttaagctaggggatatgatggaaaattgaatgcatggttgctatatgttatctggttatgttgttggagttgggtttaggtgcctttcttcaattatggatagtttggacaatttgatagattttggctgagacgttgagtgcttgtcagaagactaaaaagttaatggtcttcattttgagactgtcttcaattatggataaaggattattatttttgacatccctttttgctggttgtttgtaggttgaagaattgagaagcaaggggcttgatccgta

SEQ ID NO: 20152 - DNA, 672 bp, Glycine max
  Intron number 2 from transcript Glyma05g07750.2 (locus Gly ma05g07750) derived from phytozome v7.0 (chr-ID Gm05; pos 7740765 to 7741436)
tggcaagtcaaaggaagacgcttcgcttcctaaaggttttcccctccgcactcctctattcgcgaatttgattgaatagttagtgtgtagttattatattcatatcgagttctctggaattagtttgttatttgcacaggtgtattttgtttctccggagactgctaaaaatgataacataaattgtctgaaatatgtctaggtttttgtgacattgtagggctaatttctcgtgatgcattttttcttcttctttgaaaatgctgaatacgagttttcagcaagcttaagtgacctgataaaactgtttttaaactataaggtagtttcatgaaatttgtacgatttgctaattgattttggttttgctattataattaattaaataattaatatttcttgcatgtgcttattttgttatcaatttataaagctttaaagtgaattgtggtcatatcaaaacaatctcttcttaacattaatcatcagaagacgggttgatgttttttttaataggtttaattgatataatgctcctgattaattatgcattgcgatgtttggttactttaattcttattgtacttggtagtcaatctcaatgttctctctttcttggtaatgcatcactgttctattgcttacagaatctctgattttttggcagcaaca

SEQ ID NO: 20153 - DNA, 501 bp, Glycine max
  Intron number 1 from transcript Glyma04g34450.1 (locus Gly ma04g34450) derived from phytozome v7.0 (chr-ID Gm04; pos 40695848 to 40696348)
caggtgcctctctctcttcactccttcaacacttttaacaccttacaaatttctttaattgcttctcatgttccatttcccatgtctttgtcatttcgggattgcatcgcctgtttcatgttttgggtttttctaaatgacagatttttttttaacctttgaatatgcctcttgtgttgttcaaagttagtgtcattctgggtgaaatggaattgccgctacattttcttcttctgggaatctgtctgtttcaataagggtagctgattttgtattagcctttgtttatgattgtaattgtaattatagttataataatgtgcacgtgcttatagtgactgtatttgcattttgtagtggctggtatgttgcttgtttgcttccactgctgaaagttcacagaaagttggcttctttttgcttatgcttattgctttcgttttcgtgttaagagttttgtgatcggtgacatgttgagtttttactttttattcacagaat

SEQ ID NO: 20154 - DNA, 802 bp, Glycine max
  Intron number 1 from transcript Glyma02g46780.1 (locus Gly ma02g46780) derived from phytozome v7.0 (chr-ID Gm02; pos 50633624 to 50634425 reverse strand)
cagagacttcaatcactactctttggccttggaaggtatctatcttgttattttatccctcctttttctgaatgatactatttatgttatatgaaagtaggagctatgcctaggaaacaaaaacccttttttgtacccctgctatggcattattcagtatagacctattaaataattatttggcaagttgaccaaaggattgttgccaaacttgattggatggtaacattgttgacatttgacaatgaaatttgttttgctatccaatttcttaaagtttctcattttttaagaaatgaagtttggatcttgcattagatcatactgaccagaaattaatctgccatgtacctgagttcaacaccaggatttcttgtgttaaatattctatcttcttttctcaagttattgagaatataagtttttcaagatttgatataatagcacaatatcagacatatattgctttgtattcatgtatttgtgctaatgtctaaaatctaatataacatcataatttgattgaaatattggtttcactgcagaatttatgaatgactaaaagttagggatttcataactcatgtatatgttagtaaggaaattaaatgttgctgatagaatcaactactagtctactatatttccttttcctttaacatgcttgcatattttgcacatcagatttgttattcactatgattagtttagctgattaaagtttgaaccctgaattcttataaatatctgttatgacaatgtgtaaggttcgtgagttggctgaaaaggagtctgaaaacgg

SEQ ID NO: 20155 - DNA, 950 bp, Glycine max
  Intron number 1 from transcript Glyma02g09920.1 (locus Gly ma02g09920) derived from phytozome v7.0 (chr-ID Gm02; pos 7817496 to 7818445 reverse strand)
tcactggctttagcatacttgtatgttccctcctttcccttcttattttcacatacaacttacagaccattcaaatgcattttccttctcttttagcaaatcaacttttagccatttttttggtacaggatatcaacagatttactataactaatctctgtaaaaaaaatattttttttaattatgtttttttcatgattcaaataaatagactaagaaaagaaaataaattacattttttataggctaaaattaatttttatattatttaatgtttatagaaattttttcctttaacttttctaaaaactgaaggtataaaccgattttttttagttcatgaaagaatttttttttacaaatacttaataaaatatttacctaaaaatagtataagccaagctcacttatgaaacatcatctacgtagtcttaaattatcatctaagtagttgagaaaactcggtctcttaaataaatttatgtaatttgaaggattagtgtttgactatctgccgaataatattcttaaatcaaagtagacaagcagtcaaaactcactagtttccactaattcatgtgatggataaagattatttttttgctcggactctgtgatctatatatatgctgaaagaataaattaacatcagcctcgtgcgtaattttatatatttataattttttttgacgaaatactttcttttattaaaattataaatttattactttgaaatagttatatgtttttttactagctgtatagcttatatcttgatccgacatattttctagctgtcaatgcaatactgcaatcacacatattggaacttgagtgtgtttgtttgcttacgatttgtggtatttggtatgaactgggatgcttagacaagttagaccatctccaatactgccttggtattagttgattgaacatgaaatgtaatgcag

SEQ ID NO: 20156 - DNA, 715 bp, Glycine max
  Intron number 1 from transcript Glyma04g36210.2 (locus Gly ma04g36210) derived from phytozome v7.0 (chr-ID Gm04; pos 42763938 to 42764652)
attctgtctgcagatcaagggtaaggttctgtgcccacactgattataattataattaactaaataaaccaaaacccattaaacctttatcatcatccaccactttaaaaacaaacaaaaacaattcagtagcatttaattgctagcactttcattggaattagaatacaactagtagtagaattttcatagctatagagagagaggttattgggttttagtagttcttacttgagggcttggtgattggttcttttccatgttcccctttccggggattcttctcttttccatgaattttcaaaatatctttttgggctttgggctttgggctttgctttctcttgtggtctctctctctctctctgaagcatgtgggttttatgcttttccctctggaggaaatgtaaaacatcaccacactgctgagataaagcctgagcctgactttttgagatgtggtttctgagcctcagatcacactgcagagcatgtctagtttagttctctgtttcatgtcagaatatccattcttattattatttcttgtttcttccaatggttcctcccttcttctagggttctcttccacttgattcatttcactctctgccaaggtggaggcacttcactggctcatgtaggattttgacttgagacccatttttcttttcttttctcattacagtaaaaaaaaaaacaaaaaaaaaaagag

SEQ ID NO: 20157 - DNA, 254 bp, Glycine max
  Intron number 1 from transcript Glyma01g00520.1 (locus Gly ma01g00520) derived from phytozome v7.0 (chr-ID Gm01; pos 307814 to 308067 reverse strand)
aaccaagcactaccaaatttctcttcccttcccaggcactcttcctaaccaataatcatctatgtttttttcttcttcttttttaaaaaaacgttagaaatctgtctggatcctgtttttgcgttttggatcatagatttgatcatgctggattttatttcctcaccctttaacttaacgcatcttttcaatttgacttcttttttattttcttcgcagagcttcaacaacaacatcttcttacgtttctgagt

SEQ ID NO: 20158 - DNA, 756 bp, Glycine max
  Intron number 1 from transcript Glyma02g08220.1 (locus Gly ma02g08220) derived from phytozome v7.0 (chr-ID Gm02; pos 6438011 to 6438766 reverse strand)
ccattgactggaaggtagccctccaattttagtttaatgattctctgttctttgtggatttatgggttttcaatttaagctccatgtttttgttctttgtttgatgggctttgaattgtggatttctgggtttttaatttatggctgacaacatcattagctttatgcattgaatgtgagttataaggttgacttagtggttgaaaggttgagggtggtgacttcaaatcactgtcattctaaaaaaaaaaaaaaactaacaactaacattgactgatccaagaaaagcataatacattgaatcattagcagctatacatggaaaaggatcaatggaagagttttcctgcgtgtttttgttactcttcacgtcaaaattgatccacatctccagaagcatatatgtgtagcttctgcgtctttaaaatcaataccattcaaaatcaattgtttgatgtttttttggctcttaacacgaatccttagtgcagtaccaaacacacacttcatgtttgttcttggcagcaatatcttgagattatttggcaatctatacactgtactatttagtgtacaatgcatataagtgatataacatttggatagataatacactttctgaattctgactttcagtgttttctgttctcagattgttcaatctttatcatatttctttttttctgaactttcttaccattggcaccttttgattcactcatttttcttttcactttgtttcaggaaccttggcta

SEQ ID NO: 20159 - DNA, 422 bp, Glycine max
  Intron number 1 from transcript Glyma02g08340.1 (locus Gly ma02g08340) derived from phytozome v7.0 (chr-ID Gm02; pos 6560100 to 6560521)
tccatcttcaacaaaggttttaaggctgccaagtactgtttgtttgtttatttatttatttattttctgtataaaataatctggggtttaatttttcttcttgcaattgtatatttttttatgctttgaaatgaatttaatactgtgcatcaattggcctggttgaactatttgggatggtttatgctgaattttccctttactttatttgctaagtaactgggtatttttttttcttagtttaattgatcacatatgcatttcagtttgatttaaacgataatgtttattgcaatagctcatctggacaaaattgttctatttttatttttttatcgttatttatttggttgtaagtgatttttttaccaatgttcatactttcagtaaaacattgctgaagctgacaattccgcgtataa

SEQ ID NO: 20160 - DNA, 952 bp, Glycine max
  Intron number 3 from transcript Glyma02g08340.1 (locus Gly ma02g08340) derived from phytozome v7.0 (chr-ID Gm02; pos 6561011 to 6561962)
attgcagtccgccttccaattattgaatctcaaaggtaatgtagagatgaaacagaagtctggttgactggcttagattttgtctgaatttgtgtgatatgccaacgtgatttttgcattcaggctagtcatttgtaaatcttgtgttgattaatttgataaatgctcggggcataattttgtgatagcagtgtgactgcctttgactctgagatgaaaaatctactggaaactatgaaatgagtgatgctctttggtgtttgggctgtgaagtgccaacaaaagaaaattccagatagcatcataattgttgcttcactataataagtttttatgcatgtcgtcgtactgctctttaattcttttgatgttctgttattgtattgctatatttgaaaattagctcctttgattccatggcaagtatacccactttgaaataacaagggagtcaaacatggaaataaaatatccgtagctaagaaacatgcatatgctttgtcattgatggaatattcagtacttgcacattgttagagtacttggtcagattctacctcaaatatatattgaagtgacatctatattggtaaccattacgagctttttacaaagtaaaagaaactttcctttaactattttgtcaagatatttagtcaagcaagttatattgagctgaacatttacagatctaccccttaatagttgtcaattctattctaatcttcatataggttgtattatttgctattagtatcattgatcagactaagaattttgctcaccattatcttttttagagcatggcaaaaaaagtgtttaatggatttttaacattgtttaggtcatcctagtgttatgattaagaccatgatcatttttgtaaccaaagtataaaatctcaaccattattctctaattatgtatcaatcttctcaatattgttcaggga

SEQ ID NO: 20161 - DNA, 597 bp, Glycine max
  Intron number 4 from transcript Glyma04g37380.2 (locus Gly ma04g37380) derived from phytozome v7.0 (chr-ID Gm04; pos 43725321 to 43725917 reverse strand)
aagttgaagcagtgcccttgcgacggccgacaaaggtagtggattccctctgagagttcggactggtgcattctcagaaaatgaaatatgtaatataaactattaaggcgttttgaaaatgaatacctgtacaaacccaagctagagatggctcactgaagaaaggtgttaaagaatatagaataaatatcagtaaatattttgctgtctagcattgatcttccatattgtaaaaaattaactacacaatttgcaaaacagagaggagtcccgaagactaacattgtgactatttgatcctcttttagcctcactgttagcatattaggtagccaggtattttgggtttttcatatttgtaaatgagatgctatagtcatgcttgtctgaactctgaaccagaaaggcatgtaaggcactaaaaaagtgagtgtgtagcccaaccagcaagacacactgcacttgcctcacctcagctccttagttgcacccttttgcatcttttgactatgttgatacaatctatattgaatagttagattaaaacaaggctttgctttacgcttttccatatttttgacatcagacgcaagcaat

SEQ ID NO: 20162 - DNA, 1049 bp, Glycine max
  Intron number 1 from transcript Glyma01g04580.1 (locus Gly ma01g04580) derived from phytozome v7.0 (chr-ID Gm01; pos 4161529 to 4162577 reverse strand)
gaccagatcctattcacaacaggtttctctaccttctcttaacccaaataagttacacacaaattatgtatatatattttgtttctcatgcatgtgtgccttttaatttcaacttatgtcactgttcttaattagatgtgtattatgtttgttcaacgttttctgccaccaagacatgcattacttttgataacaagacatagtacgtatatatgtagtaattttactatatgatttgtattataatattgttgaaaattcaagtgtacaagagaaaagaatgcacaaactaagaaaggaacatataaatatatacaaaatatgtttgaggtgtttttggctcccctgttcctgtcatggatatgaggtcacccctgttactaggctaatatttatctttcctcccaactcaatctaaaatttccattggattattttcaaatatagtagtattatactactattaaggtgtttcgttccacgtcttagacgtgatgttttacttctcaacggatttccaaacgcgttacatgtctcttgcgaaaaaatattcatcaatttcaagtttagtggatcctgccaaagtgaagcttaacacaaaaggatgaaaagccaactatgggggttgattaccatgcttttaactgttacattgaattgttgatttaaattcttttaagatggatacttctttataatagattaatacatataaagccataaaaaaagataaagtatactccacctaacaactttattccacttcttaattaatcatgagcaaccaaagttatccatgtcattcggttctctcttcattaagaaacttttaaccttttcttagttgtctttctttatttctcttagcacaagacacaagcatgcatggagtgagacttgctatgaattatgaaactatgccataaatattggttgcttcaattgcttgtccatgcattttctaccataaattgtatcaatttgcataattttttttttgaaaattttgttcaggagagctggaaattctggccgaccacctggccaag

SEQ ID NO: 20163 - DNA, 711 bp, Glycine max
  Intron number 2 from transcript Glyma04g10540.1 (locus Gly ma04g10540) derived from phytozome v7.0 (chr-ID Gm04; pos 8740502 to 8741212 reverse strand)
tcgtcaaatcgaagtgctaccaccacgccctcgaggttcgattttcttctactatctatattattcttccaacttgtgcttcaaagctgatttacttagttttgattgaggccaattttgctcccacttttggtattcaattttcccgagaagtaattaatgcttgtaaggataatgtttgtctaaaattaagaaattgctcatgcaagacactgatgcatacatcggtgagttgcatcaagatgaggaggaggaggaagagttgcaagaaattcaaattagaaaaagattcgtgctatcatgttaatgttgtgggatcaaacaagttgatgattgaaagtttcactccttaaatctaaacagtcatagagaagagtagtcaaattttggatgttcaattaaggttatgccttaaagtttatgtatttttatagtttttagcattaatatgcatgtagtattgtggcatctatttttggcagtgaccgctctgcaatccaccgtaccattagtgtttttggggtcagccactcttccctactttcaaggattgactgcttaaggcattgcattacatacaattgctgataatgggttctttcaatctctgacatgcatgtcattgcgatgcaatttatagtttttatgagaagtttattaaaaatgttaagcaatttaatttgttaattattcttttacccaggtagttaa

SEQ ID NO: 20164 - DNA, 610 bp, Glycine max
  Intron number 1 from transcript Glyma02g12150.1 (locus Gly ma02g12150) derived from phytozome v7.0 (chr-ID Gm02; pos 10404546 to 10405155 reverse strand)
gtgccatcactgtcctgtctcgtgtgcggtacgaggttctgtttcccctgtttttcctttttcctctagtttctactatttttttttggttttaataaattaattaattaaactatggcttcttttttcgcatttactgtaaatttggtaaagtaacatttgatttctttttagatgtggtttctgtgcagttatgatagtcggtaccctgtgtgtgaatgtagggttttatcactttgtttggttttggattttgtaaccgtatttcaatttttttttaatattgtgtttctgtgatttagatgtcactttttgaatttattgcaatctgttaactaattaactaacttgatgtttattatcgccatgcttggttttggctttagtgaaatttttttagtataatgtttctttgatttagatatcaccttttgaatttattgcattttgttaactgattggtgtttatggcttaaggtgattgctgaaagtagctttacatgtttgctgtattttactttttttttttggtggttggaatagtagtgttcgctttatttcatttagatggtgaatggcattcctttcttcttctaattgtagggtttta

SEQ ID NO: 20165 - DNA, 619 bp, Glycine max
  Intron number 2 from transcript Glyma04g10190.1 (locus Gly ma04g10190) derived from phytozome v7.0 (chr-ID Gm04; pos 8418104 to 8418722 reverse strand)
aacctttggtctgtgtaacacttaccttatgaaatctctttgttatgctaattttttattaggtgaaacagtgccaagatggggatgcttttgatttatttcattaagctctctaagataattcatgaaaatagcttagagcttgtaagaaaacgatttaacagtctttcctctttgattatacaaacaaagggcttacacaataaatatttaggaaatggtcatggttttacatgtttgcgacacgtgtccaagcacatttagtcaatatttaaaaacataaaaattaaggttctggctgaaatttcaatgcataaatattagcgtttgttccctttaggatcaaaatttacacacgtttaatctgttactgataatgaataaacagtaaaatatttaacgattatagttgagtttgtcaatgacatgaagattcacttcttgcagaaaataaagaatttgtcaatattctatatatcattttagtcttaacaacctttactctacaaattgctatctcagattagttttgcacaatctactgtattgcattttttttcactggattcttggactaacattgtatatcttcatacttatttggagcctcatttccagg

SEQ ID NO: 20166 - DNA, 549 bp, Glycine max
  Intron number 2 from transcript Glyma02g46240.1 (locus Gly ma02g46240) derived from phytozome v7.0 (chr-ID Gm02; pos 50256444 to 50256992)
caaagtcattcacttgaggtatttgaattcttgattaattattatttaagaaaaataagttggatacagtcaaactctaaaagcacataagaaaactgtatttaaaagctatgtcttatagaccgttgtgttccttgagaaacatttgatttgcggaagacaggctttgtgttgtgacttgattgtgctagttgttttatagactgaagatacatattttgcaggaaagtaatctataagtttctaaaatcattggaaaattatgggttaatagtgtgaagcattggatcccagagaaagatctccaaaatgcgcgaggcagcatatatggacttgatggattagtatcaggtagggtgacctcctgtgaagctccatcaaggatgcctcggtcacgctctgttcaaaattgaggttggctgtttgttcatttgtgttttgttcttgtcagagcatcatgatacttttatgtgtgtgtgttttgggttttagtttctggctttaacagtattttgtggtggttccagaggccatttgtgtgtgctgtcg

SEQ ID NO: 20167 - DNA, 497 bp, Glycine max
  Intron number 1 from transcript Glyma04g35220.1 (locus Gly ma04g35220) derived from phytozome v7.0 (chr-ID Gm04; pos 41557498 to 41557994)
ctgcttcaggtttgtctagtttgaatttaaccaggtttgtttactttgctacttgacaaaaatttaatccgacaattttaatttgagaaaagtaatttatcagagaatttgaatttctgtaatctagaatttattgtttgaatattcttttgtgaagaatttaaatttatgaaaaatgtgaaatttcaatttctttttaaatggtgagaaattgaaaattttttcttacaaaaagatcttctaaaacgtttgcgtattttttttactaactttatcatcttttctatctgaaagttcccaaaatctttaaaatgttaaaaattcttgaatttaacttttgttatccaaacacaattttgaaaataaaagaatttctgttgaaatatttaaaattcttagaatttaaaatttctcaaaaattttaaattttttcatccaaacaaacgggatttcatttgccatatttcttatggtctcagggaaaacttttccaacat

SEQ ID NO: 20168 - DNA, 413 bp, Glycine max
  Intron number 2 from transcript Glyma04g35220.1 (locus Gly ma04g35220) derived from phytozome v7.0 (chr-ID Gm04; pos 41558111 to 41558523)
actgcttatgtaggcatttaaactttccagtcttttccctttgcttgaagaaaactgaattggtgcagagtaaataatctatgcattgacaagtaaaaggttattacactgtcctttaatcacaaattgtcgtggatgataaagtcatcaagagtaaataacctatgcactaacaatgtagaaggttattacactctcattcaatcacaaagtgtcacctttgataaggtgattgaattttgtcataactaccttaaaagtcaaacttaccatatttttaatcggttgacattttatgctacggtacataaatattaaattcatatgaaacataacaatgatttgttaacaacttcttcaggaaagatgccagataatactgcgctttgctgatttggtttagaaacacagtg

SEQ ID NO: 20169 - DNA, 932 bp, Glycine max
  Intron number 2 from transcript Glyma04g38670.1 (locus Gly ma04g38670) derived from phytozome v7.0 (chr-ID Gm04; pos 45038061 to 45038992 reverse strand)
aactctatagttgggggtatgcaattcttcatccttttcacttggttctctttaataatcactttttactcagaaagaaattcaccctctgttgcttctctgtcctgttttataatgggatcaagctagtttatggatccttatagtattagtttcagcttcaaatagtagtactactttttgtgatactcaggccttttatctttaatgattattaattaccataagaataagaatgtcagttgactcacttcattctttcaacatatatatatatatatacacactttatacacactgacattgtaaaatctgtcatctaatcacaaatcaccatttgaattattttaagataattattttaaaagtcaacaaacttaacatacataatgagttgtgattggatgactgtgtaaaactttttacactgtcagtgcataatcttttttctcttaaaatattacacctagttgtgagttgtagctgtctcccataaagttattcttttgaaagagatggattttattttaaaattatagtaaatgtccagtgtccttcttaattgtatctctgcacttgtgactagttttctctcagcacaaggggctgccaccttttttattttatgtttttggtaagcttattattagaagacaattttgtcaagtttaagcagtctctttttactcaatgattttccatatgagagaggagttcaactcaggtttgggtgacaagtgacaacgagagactggaccttgaatgatatttcatcttgttattttaatcacccttcaacttgtggaaaaaaaaatgttctcatacataatagtgtttcggtatatggttagtagtggttacctttggcattctttgattctcaagcgcatcacattctgatttttccaggggtgattttggaaggttgggtc

SEQ ID NO: 20170 - DNA, 642 bp, Glycine max
  Intron number 2 from transcript Glyma05g02120.1 (locus Gly ma05g02120) derived from phytozome v7.0 (chr-ID Gm05; pos 1544928 to 1545569)
tttcagaagtaggatttctttcccaactattttcttcaaatagtactcctataaaatgcttttaagaaatttttttgatgtttttttataagattattttttactttttagatacattaattatttttttcctatatatcttttcttaattattttctcttcaaacattaatgatgaattatttaatggatagagagataagaaaaacataattttagaaccatagtataaataattgccatatttaatgtgattaattacttttcttaagagatatgaaatagttgaaagtgttttacaattagaaatggagtacattgatttttttgtttaattttcatgtgctttaagtttgtaaaaatcaacatgagaccatcatgtgtatgtgtttacgtcttgatcagtttctatacaacatgtcatatgaagattaagtaagacatgattgtctcgaatcatctagtaatttctccaggtattatcaaattatagtgtataaaaggataaaattaaaatgagtcttatccttgattccttttttacaaatttcctacatgcttgttttgatgagctaaagtgggatttgtgcattgatgttaagaacgtatctgagtgtggggaattttcaaatgctccaggtgt

SEQ ID NO: 20171 - DNA, 772 bp, Glycine max
  Intron number 3 from transcript Glyma02g18380.2 (locus Gly ma02g18380) derived from phytozome v7.0 (chr-ID Gm02; pos 17171331 to 17172102 reverse strand)
actggttgggttagtaatttttttttatcgataaatattagtttttgttagaaagttaattggattaattgtttatctcacttcagttctgtttatgctagaacttaaaattcaatttcctttaaccatctatagcaatgttaatagaagattgagagtgatatagcaagttatttaccatttctcatttttttaagaacattgatcatttctcatagttgatagatagctggattgtttaatatattgttagtggtttgatttgtggtaatttgtataataaatactttgttgggagaagaaaaacacattttaatcataatctttatgtcttcaaagagattagtccgtgagtatcgcattggagatatccttaatgaaaaaaaaatcaacatttctctcatgaacttaataaaattgttataaaatatacataaataataggttaaattgtttttggatccttttatttttaagagattcaattaattttttttagatcgataagaatagaaaacatgtataaagggattacgacaaatcatatatattattcgatcaactaaactaattttttagtgttaaattagtttatttattttttaaaataaattcaatcactagtcttaaaaaaagagatagaaagagaagtatgtgataaaataaataatgagaaacaaagacagagaaaaaaatataaataatgtaactcaatcactaatcttattacacgcaattaataatgtttttttttttcttggttcgaatgtag

SEQ ID NO: 20172 - DNA, 798 bp, Glycine max
  Intron number 2 from transcript Glyma02g18380.2 (locus Gly ma02g18380) derived from phytozome v7.0 (chr-ID Gm02; pos 17172288 to 17173085 reverse strand)
ccacccccgttgactttaagtccaaagacccagaggtacactcatccattcattcatacttgggttttctggcccatctatcaacctcacaattcatttctatatgtaccccaaattaatttaaagagacaaacataaattgtcagagtggaaggaatctgaattgcttaaacatgagactctagattttaatatatttgaagatgaaaagacaaaaagtaagacaacttgttgagtcgtccttccagacacaaaatatatagttctgaaatgtacgtttttttaaatttgttctgaaccttgaccattagcgccacataagaatctctcaaaatataatataactaaggaatattaattaggcttaaatgaaaattttacctctaatttttatcattcaagtttttttttttttttttacaaattttattactcaagctttcaatttttgcattttcccaccaccattgaagaaaaaacaaacgacatcattttgttatcattttttgtgaaacaccatccttttattgctaacgtgatgctaaaatgtgaaaaaaattaaaaactttattgatgaaatttacagaaaaaattaagtgataaaattcatgaaataataaaatttgtaaaaaaaattaatagtaaaattcgaaaaacatgaaagttggtaaaacttaaaattaagcctattaattgtgaattaacatcttaaaatgtgaatgcaaaatttgattccaaattttaaggaaaggaatctaacgcgtggtttcaaatttggttgcaacttgcaagtgcaga

SEQ ID NO: 20173 - DNA, 659 bp, Glycine max
  Intron number 1 from transcript Glyma02g39210.2 (locus Gly ma02g39210) derived from phytozome v7.0 (chr-ID Gm02; pos 44479329 to 44479987)
tgacttccttgttttgtgtgtctgtgtctcccaaggtatgcttctttttcttttgttcttgctccttgttttctcttctttaagttaatgagtcatttaatttctgtttaaaaatgaaccctttatcacttcttgaaactctgtgttttttttttcttgttgccaagaaaattcataagatagatgatgtgttttggtccgtgagtgttgttgattgatgctgaaaattcatgtgttccatttttaaaaaatgtattttttttttctttcactaacaaagaaacataggacaggttgtacatgctattttgtttctgtttgcaacgatttctggcttttgttatttcctggattcatgctaattttttttaatcgctgttgggacctaactgtaaataaactgaaagaacgaccctttgtcaatttgatgtatgcttgttgcaaaataactttccaaatcgttttccttttgttttctcacaaaacaggggagaatctgccccttaatttgcatttatctgttttatttttgttatcttagattgatttttctgtgctttatatttgaaacttcttttctggtacaatagcttattaaacctgttctctgctgtgatttgtcagattctgctgaggccttaagggagtatattacatat

SEQ ID NO: 20174 - DNA, 879 bp, Glycine max
  Intron number 2 from transcript Glyma02g07880.1 (locus Gly ma02g07880) derived from phytozome v7.0 (chr-ID Gm02; pos 6229477 to 6230355 reverse strand)
aatatattcaggtctgttttctcatatgtaattcaggaggatcagggacagatccagaagtgtattaaaggagatcaaaattattttttacacaattatttaatatctaacttttaataaataataaatttaatataaatatttattattaattttatatataaaactagttatatgatctactattaggaagaaaattaagcatatatcaacttaaaaatctgttttcttatttatttttaattttaactttttttcttatttatacataaaggatggggaggggcaagccccccttggatccgtcactgaggtagggtctcacataaagaaacttaattcaaattatattttgtacgccatcaatgtaaagataaccaaaaataattatgtataattaaagaaatttattatacgtgaaaatctattattggatgacgatgtaaaaatacttttatactttcactaaatttttattaaattctttttttttttggctcttcattgtttgttccatctcatttgataagtaaggaaataaaatatatcaaattctttttggagaggaacttcctttagagtatatcaatgggagctgacctattaatattcagaaatgcctgaatgaacaaaacaggagtttgttaatgctagataatcaatctgccatacatgctaatagatacttcagttcatttgatcttataagttcagtgtttatcatccatcctcaaaaacatatacgttcctataggtaggtacttatttgttatgtgtattagtgacttgctgttcttgcaatttttttgtaatactaattatttacttagacatcttgaggatatttcgtgcaggtagaattaacaaatagaacatcag

SEQ ID NO: 20175 - DNA, 494 bp, Glycine max
  Intron number 2 from transcript Glyma04g41530.1 (locus Gly ma04g41530) derived from phytozome v7.0 (chr-ID Gm04; pos 47404792 to 47405285 reverse strand)
atagactcaaagaggtagctcatttattttttcggttcaaaacttggcttgtatttctcattttttttggaaagcgcgatgttttagttgttaatttgttagtgagatgcattcaaacccacgacttcactctccctcctctccccttcaaccacaaaaccaaccttataacacttatatttctcaatttttagaagaaatggagttttcttttttcttaaaataaaataaaaaaaaacttaaagtggtgaagcatcaaaattgttgtgtttaaatctgtatttgtgcaggtttatgattgtatttgtgtgtgcaaatggaaggaaaatttgggatttaatgtaattacgttttggaagaaaataaataacttgatatggtgaagctgggttctcgcagttatttgtttttttgttactggagtatgtttaacggattggttgttttgtggtataacagatacgagagtatcataggaagcacccagttgctcg

SEQ ID NO: 20176 - DNA, 318 bp, Glycine max
  Intron number 1 from transcript Glyma03g04760.1 (locus Gly ma03g04760) derived from phytozome v7.0 (chr-ID Gm03; pos 4973606 to 4973923 reverse strand)
tgctacgcacacacttccgtgattgttttgttaatgtaagactttatgtttttttactcaatatatgatagtttgatgttagtttgtttaattttgttaaaaatatcaaaatgagatattcaaacggataatttttctatcttccttttctctttactcttaaagtttcattttcaaattaccagaccaatcttatatttctgttaacttaaaactctctatactagtgttatttatacatgtatagtaggttcttgatgtaatttttgtctgatgaatcacttggttttgtaatcatggtgactgatcagggttgtg

SEQ ID NO: 20177 - DNA, 715 bp, Glycine max
  Intron number 1 from transcript Glyma03g41120.1 (locus Gly ma03g41120) derived from phytozome v7.0 (chr-ID Gm03; pos 46645895 to 46646609)
ttttgggttacttgcaatcttgttggagtatctaggtaattaattcccttgactctgttcctttctctgccactgattctgtatgatggaaaaagaaagcattattaactccatgtttcgtaactaggattcactagctgaaaaccacagtagtatttgccacttgccttgcttgtctcatgttctttgcagctatatatcagtgctcatatattttcttgtgatttttactgttgttaattaaattgagagtaattagctaatctatcaccctgtggctttagtaaataggaaactgggcaataattctgaaaaaaaagtaatttgattttatggaattctggctcaacttgaattcagcgaggagtttgagcatgtaaatgctctattttcccccattttatttcttgcaaattcatggaagctattttcagatcatttgtagtgtaccatggggaacttgttcatggagactattttatgatcatttgtagtgtaatcatagggaacttgggtttttccttttcccccaaaaatgtctattaattatggaatttgaatccaacaatggttgccaaaaaaaaaaaatgtcactgtaagcattaatttgtataaaattgtttatgtgatttggtgtttctagtcttgcaccaaatgcaaataatgagaatggcacataacatttacttttgggcttgttttggtgccagagaaa

SEQ ID NO: 20178 - DNA, 282 bp, Glycine max
  Intron number 3 from transcript Glyma02g07800.1 (locus Gly ma02g07800) derived from phytozome v7.0 (chr-ID Gm02; pos 6173168 to 6173449 reverse strand)
tccaaggtatccatccttattgtcaaatctccaaataaaaatatcaaacctttgtaagaaaggactttttcgttcaagaaaatgttttctgttttacttttattattcaaattatttacagaaatgccatgttactttcactttgaacttatgtataagttccctatacaagtctatgaaaataagaaacagttcttgtattgattaacctcccaaattgtacttatttgttgtcttcttgttttggttaggttgaaaatcaagagggtgttgccaattttg

SEQ ID NO: 20179 - DNA, 971 bp, Glycine max
  Intron number 1 from transcript Glyma04g26720.1 (locus Gly ma04g26720) derived from phytozome v7.0 (chr-ID Gm04; pos 30652261 to 30653231)
tggagaattttccatttaaagttgagactatcaaagtgagtttctttgttacttactccctttccattaataattaatgcttaattaaacttttttatgcaagatttagtaattagtttgattttgtgcttgatacaatcaagggtaactaagaaaatgtgtggggcctttaatcatattttatgtcaatttcaataaatcacatttaaaaagtgatcggatcttcatccaagggttgcttaattagttgtgtcaatgtgtgatttttagtaaatcgtcctttatttgtattttatattaatatatcaataaatcacatttaaaatgtgaacgatcttcatccaagggttgcttaataagttgtgtcaatgtgtgatcttttagtaaatgggcctttgcttaaatcttaattacttattttaggtttttagcacacaatatatgattttaaaaatttcttgttttaaaaaatgattttaaaagtttagtgtttagaaaaaatgatttttaaaatttatgctatactgtgtgttcaagaatgtcttgtgtggttgactggttagggtttgttctaacaagaaatcaggaattgaagattcaacaagttgatggatataatatgtttgaattagtttttgaatgaggaaaatgttgtgaattgaaggggtataaaaatgttttttcatgttccagagtgaatctaaatattgagttcctttaacaattgcatatttcatgccaatttcttagtcctatgaagattttatattttcaatgcaattttgttgaacgcaatgatcaaattcatttgataatcatgcccttttcatttgtttgactttgctagcagtgttttagtatttaaaaaagtattacttttgtgtacgatatatttgggcacttttaattttgttgttatgtgaaagggggttttaggtctgtaacatcataatattcttgtttctagattg

SEQ ID NO: 20180 - DNA, 614 bp, Glycine max
  Intron number 1 from transcript Glyma04g03590.1 (locus Gly ma04g03590) derived from phytozome v7.0 (chr-ID Gm04; pos 2622312 to 2622925 reverse strand)
tttattggatccccgaatcgaactctgcctctcaggtctcacttaaattgctttgtctttttcactttctcactttcctgttattcactttgttttgggattcaatgtgcatccataaactgaagttttgcttaccattatatctatatgtgtcaactaaaaaaagtaaaagtgaaggtgttatttctactttgattgtttccggagagatattgcctgatattttcttcctttttgtttttcgaactaaaagttactgcatgtcgttcagtttaggatagcagctgttgtaactagaatttactcatgaattgtatttcaaatttcagttaaaagttatcttaattctgtcccattggaactgaaaaaatgacttttttttcttccttcattcctgttttttaatgctttttgtacatggttagctagtatatttatcatttagtgtggagcagtgcctctcttttccttttcatttttgaaagtaccgttgagatgtattttgcaataaaaatgttatgtattggcatttgattttagttctttctctttttattttgtctacctcaattcgtgaaggaagacaagagtcggcagcccgaagagttgaggag

SEQ ID NO: 20181 - DNA, 577 bp, Glycine max
  Intron number 1 from transcript Glyma03g19010.1 (locus Gly ma03g19010) derived from phytozome v7.0 (chr-ID Gm03; pos 24296952 to 24297528)
gaacctcgactcacctctcacttattcctccccaggtgagtgtgcgtgtttattatggttaaatttataaatgaatcgcctcagcacggtctaatttatatttttcttttagaagaagaaaacttacttgatttcaaaagcttactagtaggtttgttgtttttagcatgtttatttgaattcatctaagttcaacagaattacaatatggttttgtattatggcagtttatgtgtaataatgtaaagtagtaatcttacttaagtttcttaaaatttcttatctagatggctcgtgttattcaatgatgaattattaagtttcaacattatttaggttagttttgtcatgaagcaactattccgaaggctcaagctaaatgaagacgtgtgaattattttgtattatatttctaatatgccccctcatgtaagatccctttgagcctgaagttaattaattcatttggacaatgtgcatacccacttcccttgtgctgaaattaattcattttgttagaaaaatagggtggtagggatcaaactctagatcacttggtcatgtaggctctgatatc

SEQ ID NO: 20182 - DNA, 170 bp, Glycine max
  Intron number 3 from transcript Glyma01g40420.1 (locus Gly ma01g40420) derived from phytozome v7.0 (chr-ID Gm01; pos 52179716 to 52179885 reverse strand)
aggccttccgccactctgtcttctgatccctacaggtccttccttccttcttatttcttttctttttattttatttagtttcttgtttttttatgcctccgttgtttgattgtaataatgacttggaaactggactggaacagtgagacgattgaattagctgatataga

SEQ ID NO: 20183 - DNA, 577 bp, Glycine max
  Intron number 2 from transcript Glyma01g02080.1 (locus Gly ma01g02080) derived from phytozome v7.0 (chr-ID Gm01; pos 1602933 to 1603509 reverse strand)
gggtgaggattgttctgagaatgctggttttgatagtgtgatgggtaacaaagatgtgaggcagattatgagcaatacttgttgtggtgatggtgatgagggtggtctccaggtttctcctctcagtgtggaagagaaagatagttctgttcaagtgtgaaaattgtgttgaataatgtgtgtctcgttctgatacattgtcattatttggtgtttttttgggtaaccagagtttgctaaatggacccatgagccaattggtgggtacagggtaggcatgagttgcacattctatttaggctgcagtcgattagaaggttgttttgtgactagtttaacctcttaacatgtatattccttagaccattgcttttgtggttttgccttttaactcaatgatgccttaattcttcattttgttattctattcttgttttttttttttaattttctttcattgattgtttatgattttcttattaagcgatataactgtacctgattgatggttttgtatatcctgatctgaggtttcttatatattttgaattgctattgaattttttttctaggctga

SEQ ID NO: 20184 - DNA, 618 bp, Glycine max
  Intron number 3 from transcript Glyma03g39530.1 (locus Gly ma03g39530) derived from phytozome v7.0 (chr-ID Gm03; pos 45575546 to 45576163 reverse strand)
ctaaacaagtaactcttatctctatctatctatctctctctttgcgggatcagccaactaccaactcaattacttaaacactgtttcagaagctagttcttggttttgaatatgcatgccaactcgatttttcaattactgtttcagaagctagcttttgattttgaatatacatgcttctgcttaacttttcctttttttttttatggaatgggataagcaaactagatgtttattatagtcacctattttaatttcttcaattcatttagttgcaatgaaagttataatgattgtaatctggatcttcatgcattgatctcaactttagtatcgatgtggactgtggagcattataaggttcaactccgcttattaaacttgcctgctgtagcatgggttttcagtgaagacatcaaaatcacaagaaaaattaattggaaattagggaattaagcaaatcatgaaaaaattgcttttgtaaccagttatgacttttgtgatgaataggtttaagtgcaatagtgcagtagttccaagatgtatcgcttattgtcttatgatagtgtgctcaatgtctcaggtttgtacagaggtgagacctgccacagacgaaga

SEQ ID NO: 20185 - DNA, 665 bp, Glycine max
  Intron number 1 from transcript Glyma02g03420.1 (locus Gly ma02g03420) derived from phytozome v7.0 (chr-ID Gm02; pos 2711037 to 2711701)
tcttcgtcaacacctttcaagcattggaaagcgaggtacatatttcccttacttcatgttcttttcgtttcaaatgtttcatctcttgaaatgtctatgattgactaaagtttgtctttctgtcggtttaccatctaatttgatcatattccatgacacatgataaattgtgagagatgtcacgctagataaacttttgacacgtgttcccacctttagtgtggtaaattcaccgaatgattaatttggtccaagagaaacaaggataagaggaggaaactgaaattaaaaaataatatgaacgacaaaaatataaaaaagtggaacagacctaaactaaagcagagcaggacctaaaaaataagatgagctcccaaaaaaactatgagaaatgagaatttaccaaataaataaaataaggtgcttaatattaagagcatttttatgtatcttattgtctgacactgcatagagttgtattaaatgtctttttatctgtttgtgatatgacttagtgatttatcagaatttattggttaactattgtgacttttgttgttctagtatattttgctttctctgattcaatatgagtttatgacattgttggtgatggtttccctttgaaaggtggtgaaaggcttaacggagctctttccggcgaa

SEQ ID NO: 20186 - DNA, 585 bp, Glycine max
  Intron number 1 from transcript Glyma03g28050.1 (locus Gly ma03g28050) derived from phytozome v7.0 (chr-ID Gm03; pos 35892395 to 35892979)
actacttcagggtcaactgatcaggaggaaaaaaggtatcattccctttatacgtttgtgtttgtttgatccgtataagaatagaaggtagatattaagaaaagtttataacaacgcaccttacttaaccatctgagttagatctttaatcttatacattaatagtgtcatattcctacatgttgcttttcaaacaatgctgctatctctgcacagaataatctttttttccacaagaaagcagaagtttatgcaatagttaaaattaagcaaatgctaaccaaccagtttccttggagtaatagttaaggaagtagaattaaagagcaagtttttattttttattattaaaatatgtaaaaatacgttctcttatgatttcaaaatatactctcacattatttttaataaaacatttctgcttttaactctttccataccgggcgctcctaactgattagtaagacccttaaaattatgcctaacaactatgcacccgacaaatttatttgatcttcaagactctaatatttgattttctttctttcaggctgaggaatttgaatttgaacctccagtgacccc

SEQ ID NO: 20187 - DNA, 617 bp, Glycine max
  Intron number 1 from transcript Glyma02g03980.1 (locus Gly ma02g03980) derived from phytozome v7.0 (chr-ID Gm02; pos 3187270 to 3187886)
ttcggatctctctcttctttcacaccaatttccaggtagcattccaatcttcaatctatttgtttcctttcctcactcatatctggattttcatgtgcaaaaaagaaatcactttttacttttgggtttgtcgaaaattttatacttttttccccctttttgaattttgtttggaatttcttaagtgtctttgatggaattggaaaattggtatgagtttggatctcatggtttatccttgctactaacctgatattattatcaatatttgaccctgagatattgaaaagttcaaaactttcttacccctttaagctggggttgggttagtctgtttacaggctccactatgttaattgagtttccttgcttttgcttgtattttagttcacatggactaaactaggtttttcccttagccgaaaattttggatgaaaaagttgaataagggagcatttcatattcaaagcctctattatgtacaaggaaaaggttcattaaacctttgattttgagctatgtattaaggtcttccaagataggcagtgtgcactgctgcagttttttgtgctgtcttagtggatgatgttcttgtggtttttgtagcatttgaaac

SEQ ID NO: 20188 - DNA, 806 bp, Glycine max
  Intron number 1 from transcript Glyma01g14800.1 (locus Gly ma01g14800) derived from phytozome v7.0 (chr-ID Gm01; pos 18360136 to 18360941)
aggacaaggtacgtgattctttgaaagtttatctgtcttgctttaatagtatatcgctattgtgattgtcataaattgcatttgaagttttgaatttgaaggtcatattttttaatcatgagttataagatatcctatttaaatgataaaaattgctttgaatgtgagttctacataatgaagcataaatcattcaaaaagtgaaaaatatcaatattaaacacaataatacatgcattgtactattgtaagtcactagccagggaagaaaatgaaacaccaatatccgaattgacataaccaagatttaaatcacagtaatagtcaaattgctttaaaatttgaaaatataaataaatgttttttaagagaagactaaattagaaatgtttaggatcctctcttgctaaaaaaaattctttctcaatataaaaaataaggtttatgatttcaggatagagttgggtattcaaaggtatggtaacaactaacaaggtgggttggttgcatacatatgagcttcggatgagtttagaaagagtagaagcaacttttgcattcaggttgtgccaaatctcagctgggtttgatgcaacctgcctgcattctttccaaaatctctgctggaatgaaataatatttgtggatattatgaggttgattcttgcaaactcatgatccagagagatacaatcatattgatttgtgatatgcttgtatgtttcagttacccttgtttgtcttgctatattttgggttattgtaacattctattcttatctaggttgagttgcgtggaagtcctg

SEQ ID NO: 20189 - DNA, 406 bp, Glycine max
  Intron number 1 from transcript Glyma02g42790.1 (locus Gly ma02g42790) derived from phytozome v7.0 (chr-ID Gm02; pos 47769229 to 47769634)
aagaatagacttcttgagaaatgtcattcctctatacttcttagatattactaaattcaaaataaaaatatgttactattatggtaaattgctttctattttctatcgaaatattaattgattttgtcaataattactctctatcaaagaatttaactaattatttttaatgaatttttttatattcaattatgttttttcatcaataatgcttggatatattcaaaaaccttatatccttagttaataagattgaattcagtattacaatttggaccaacgattgatgaaatagtatcaatttcattcttttcttaagattatccataaagttgagaattattaaagacatggatatttcacatattcagtaaagcatacaaaaatattgatatcagatatatat

SEQ ID NO: 20190 - DNA, 627 bp, Glycine max
  Intron number 1 from transcript Glyma02g15440.1 (locus Gly ma02g15440) derived from phytozome v7.0 (chr-ID Gm02; pos 13941539 to 13942165)
actctgtatattcgccgtttcctatttcctaactcgtaagttttccttttcttctctttttgatttctcagtatctactttagtttaatattagtgaattagtgtatgaatctcgtgtttccactctcaattttggtttaatttttggaattggtagctccagctttaccaattttgcttggttagtctttgttaatgctgcttcagctcattggtaatggttacgttatgactgtggattgtggaattttattgatgaactgaactcactatgattgtttgtatgtttgtttgctagccaaagtggtctagttcaattggttaaacaatgtgtgtgagttgttgtaaacccctggcacttgagttcaattcctatgaataaaaaaaatgtttgtttgctagtgtgtaagtggtttactctatctagtttggctgtttatggctttgttttggttatgagttatgacttcaattgaagagttcatgtgatcttttcctttttaataggaaagaagggacaaaaatggagaatatattatgattgccattcaattgacttgctttttttgtctttgtacttatgtttgttctgtttggtgatgttgtgtcgtagatactagtaaatca

SEQ ID NO: 20191 - DNA, 683 bp, Glycine max
  Intron number 2 from transcript Glyma03g38970.1 (locus Gly ma03g38970) derived from phytozome v7.0 (chr-ID Gm03; pos 45210833 to 45211515)
tcaagaactttctccttcacaccttgcaactccaggtaatatatcatagcatgtttggtttgcatcccaaatgtggcttttcatgtttactaagaagctagtagttatagctttcacatatctttgatttgatttttttacttttcaacgaatttgcagacacacaagggtcttgtttattattttgggatgatgcatttcatgaagataaagttgcttgttcttgttattggtcatggatttatatcacaaattatcttggctcaatttaattaaacaaataaaccactaatttcatcccccaagtattagcccatagcctaagtaatctcccaagtattgaatattcatcggtttagtccctaagttgatatattttagtaaagtttaagaaccaatttaaaggattttttaatattttgggaacagcttaacataatatcttatactcgaaggattacttatatagttcttttactttagggactacttcggagagagaataatacttcaaggataaactgatgatttattcttaattaaactgtaaataaatgtgatactgttacttatttgtcattatgtcatgcttactttctctttattgctgtttaatatcttgcatccttcaccctgttcaattgcaagagttgggagaaaacagtggactgctatagcccagg

SEQ ID NO: 20192 - DNA, 535 bp, Glycine max
  Intron number 1 from transcript Glyma04g37910.1 (locus Gly ma04g37910) derived from phytozome v7.0 (chr-ID Gm04; pos 44367480 to 44368014 reverse strand)
gagcctttgttgaaagccgagatccctcttccaaggtacccaatagagctaaagttgtcatgtttttttttctgttacaactaaattaactgtcatggctttatgccctttttctctttctaaaagtagcattttggtgtcaacggtactctttgcttagatcaaacatagtctccgacagatactttgtgaatcatattggtatacctttgtttgtttttaccatgttatcagtatttgtaaatgattaatttttgttggataacctacaactcgagactttgtttaaaagatttgagttgaattagaatgctggtatatggataaaactaatatgaccatgatatttcttctcttgggataagcacagtggaatacccaaaagcaaaaaatgtctttttttttttaaaaaatctgaactgttgtgattatttaaaatgaaaaattgatgatgcccaattggtttgtttcactacaacaccaattagtttgaaattttaatttgatttagccttggtgggtgagcaggaagaaa

SEQ ID NO: 20193 - DNA, 368 bp, Glycine max
  Intron number 2 from transcript Glyma02g48070.1 (locus Gly ma02g48070) derived from phytozome v7.0 (chr-ID Gm02; pos 51471877 to 51472244)
gtacggcggatcagtttgacacactaagagtccaggttcaacaggcaagttttttaactcagctgattgattttggttcttgtctgttgtgttgcattggctcgctctttagcttctgatataacatccatttctagcttttgatatctcaaaaaacttatctaatatgcagcgctagtatatataccatttatgttggactcactattttatgaattttcttttactactctcattaatcgcctcattgacatgatgacattgacctaacgacccttataagtattttgtttatttctgttttttattatgcagtaacagaaactttgtatcttgcaggcagtaccaattctagtgggctgtccagc

SEQ ID NO: 20194 - DNA, 760 bp, Glycine max
  Intron number 4 from transcript Glyma01g44770.3 (locus Gly ma01g44770) derived from phytozome v7.0 (chr-ID Gm01; pos 55310028 to 55310787)
gtagtatattacagaaggagttagcgaatatgtatattttctcctctcagttgctcacacttgttaaacagttttggtttgcacaataagttccaagcactattctctggtagtcttgagtaggctctaaaacaaatgctctgtcataagcatagtaagtcaacttagctttggttcaatgtgctgtgtacaataggtggttggggaattaaaactacaaaagtttttgagtgacaagatcaatgtgaagtcacttattctgtctgaatagaagtagaaagtagcttattaaataaagggatactggcaacctgtttcacataagatcaaataaaatgtaggatgcatttgataggaatgataatgaagagttactattgcttagtagaggagtatttagggtaatttgaaaatggggtgattgttatttagagttgagatctgttttggcaaatttgtcacagtaagcagttgaagttttatgcctctcactaagtggttattttgcttcaaaatatgattatcatctctgcagttggaattatctttttccccttgaaattatgtatttgtccagtccagattgctttgtcactgactacattcctaatctgggaagaaaagttggggtgacaagggagaaaaaagaacttcatctcctgtggactctcctatctatacttattttcattcagttgagtttatttattttacatattttaattgttgttaaatgacagaacggtgacaaaataccaga

SEQ ID NO: 20195 - DNA, 710 bp, Glycine max
  Intron number 1 from transcript Glyma04g05680.1 (locus Gly ma04g05680) derived from phytozome v7.0 (chr-ID Gm04; pos 4333187 to 4333896)
ctactcatacggtgctccggtaggcgctgacggaggtactccatacttttacaaaaccccaattaatttcctcctctttttttaattcgttattccccacacaaatacgtagaacaacaaaacccaaaccaattttacatgttcttaaccactggatttaatttcagtttgcgtttcggtaaatttcaacatttacgcttattttgcagcactaaaaccctaaatgagttatattatatagaagactagtaccatagtaacattctgtttcttaaatttttttaaggttaaactattcacttggtccctatagttgtctccattttatgttttagtttcagtacaaaaaaagtgcaagttttagtctctaaatctacataaaagtttaagttttgatccttattcagagcatgagagaagactttggtggtataaaaccgctacaaaacctttttggcggtgataatacaccacaaaaaactgtttatggactaaaacttaatagttttctgcacagggctaaaaacataaaacgagaactactatactgatcaagcaaatagtttaacctatttttaaaagtgattgtcatgtgatccatgtagccgaccttacctagtgggataaggctttgttgttgttgttgtgttctgactgttgatttggttctatcagctagcattgcaaggagcagctttgctggttatatc

SEQ ID NO: 20196 - DNA, 212 bp, Glycine max
  Intron number 1 from transcript Glyma04g37440.1 (locus Gly ma04g37440) derived from phytozome v7.0 (chr-ID Gm04; pos 43824384 to 43824595)
tggaccttgatcatccagcttcattctattgctgggtatgcattcttcgtcaaccttttctacgcccatgatttacgttattattatatttcttttggttttggtttgattcctgtatgtatccgtatatatatcttaaactactactgataacttctatgtttatcttcttttcaggccggttgtgacgttattgtaccctttgtaagtac

SEQ ID NO: 20197 - DNA, 1032 bp, Glycine max
  Intron number 2 from transcript Glyma04g40060.1 (locus Gly ma04g40060) derived from phytozome v7.0 (chr-ID Gm04; pos 46189574 to 46190605 reverse strand)
gagtcactcagggcaattctttcagatcctgtcacgtaagtcttaactcgttttatagcctgaggattcacaaacaaacaaacaaataaataaataaagttgtagtggataatgggttctttcttttatgttgtgattgttgagattaggtggtgttatgcaagataagagtagctttcctgatttgctattcatttttgttgcatatgttcttcaaccaacccttggcgtttagttaaatcgaattggccctgaaatggcatgcaaagttcatgtttagaacttaaaagcagtgtgcgcttgtattcccattttaaccagcttgttcctacaaaccatacatatattactttccttgtaaacaccccccctttttctttcctttagaagaagctcttgtctagcagtttggtgttgttgtctttcacaaaacctatgtaatgagaaaaaagaagcagctgtagttcaggtcatttacaaatcatgtaaagttcatgttttgaacataaaaagcattgtgcattcacatccccatcttacccagcctgttccgagaaaccatacataccactttccttgtaggcatctccccccaccctttttctttccattagaataagctcatctctacctgtttggtgtttttgtgagacagaaaatttgtgtagtagggaaaaaccgaagaagaagcttcaattctgggcattttctaaacaatatactcattatactgggtacttctcgggattatctattagcatcagttgatcccttgtgtaaaaatctttgtccaacttgttgaaaataggtcctagtgttgtgtatttttcccttttaattaagatttaacaaatggtgtttttacaggtgttccttttgtgcaagcatataataacataagttttttttttgctcagcataataacataagtttgacctgctgatatcttgttggcatcttgcttattcattcttattactaacttcttatatttgattgatgccatactctgaaaataaaggggtgctctt

SEQ ID NO: 20198 - DNA, 737 bp, Glycine max
  Intron number 1 from transcript Glyma03g37190.1 (locus Gly ma03g37190) derived from phytozome v7.0 (chr-ID Gm03; pos 43888931 to 43889667 reverse strand)
aggtacaaattataaaccctgcatcttcctttgatggttatccgttcggaatctctgtgcttattatcgtttttttttcttttttctttatcaacatatcatggaatgttttcttcattatcttcgacttgacattattctttattaagtagggtttgtaatcgatcgaattgtttgtttctcttgtttgttgtgttgagttgagttgttactgacttgtgatcccgaagaatgatgagttcttcttactgtttagctacatcgagaacttcttttattttgacaaatgtgatagtaaatccgaaatatttggggggaattttcaaactctagtgccaattgaaacacaccctctaaagatgattaagataggtgcagaaggcagattttgttgccaaaaatttatttggagatttaggtatccgatgtttgattattagggttcgttttctcttggtttaatatgactaatttgcatcttgactaacacttttctttcatttcatttcttattcttcttcacgtatccttctattttgttctcattgaaagatgggttgtgatttgtgattgttcaatattttgaaatgtcagtgataagaattttcagcagtttggctgctttccggtttaatattccttgacttataatgcatttctgaaccctctctaattgtttcacattatttctgtgcaatgcagtcgtcatcccgaggttaagtgggctcagaggcttg

SEQ ID NO: 20199 - DNA, 843 bp, Glycine max
  Intron number 2 from transcript Glyma04g36300.1 (locus Gly ma04g36300) derived from phytozome v7.0 (chr-ID Gm04; pos 42859955 to 42860797 reverse strand)
tggccggaatctatactctacgctttttggagcaggtatttatattaattaatatttacacctaattgatgttatttgatttctacatgccatgtgcttaatatctataagcttaaatctcactcttctacaagttatgtatgcttaaacttggtagttatgtagaccttacctatagttttaatcgtgattgtgaatatatgaagtgttagaaccgtcatatgtatatatatcaaaattatatatttatatatacatattgttctatttttgtgtttcatatgccatgctgacattttggactcattttcctgttatgtttttacatgtctattttgctttcccttctttttctacatttcgttgtatacattctttagctatctttcctgcagagcaaaaaatagtgtgactaattatgtaaagaacagcacaaagaaattttgtttctccattcagtcaacttactctttagtggcctctatatggagttaattttttacttaacccctttccattctcaggctacatgcattttcttgataaatgattgttatcaactctctctctgcccccataatgtatctatattatgttgatttttttcttttcaaaaacttgttgatctttgtccttcttacccaatccaaattcataattccattttcaaatgaaattatataattacttcatttttatcacaaatagaaacttttttcgtatttctgattaaattcaatttttctttttcaatttatattcaagctttgctaattttgtaaattggaatttggaaataaatttttaggttgatcaacttgttggaaagaatcatattttcaa

SEQ ID NO: 20200 - DNA, 1002 bp, Glycine max
  Intron number 1 from transcript Glyma02g05670.1 (locus Gly ma02g05670) derived from phytozome v7.0 (chr-ID Gm02; pos 4546499 to 4547500 reverse strand)
ttttctcccctttcctttttttacacctttcactggtatcccacctatcaacttctctgagattcaatttctgtatatacaatagttctatattgtgtctgattagtttaattcctctgtagtataatactatttaatgcttgttgtttcttttttgaatgattcttacaaagttctagcttgtgcccaattgcgtcgatatattgtcattttctcttcttagttcttagttcttacagtgcctcacgtctttgctgctcctttttataattatctttattgttatgatgaactcggggttgtggaggttttcaattgcgcttgtgttcgctgaaattgcgaaaaaaagtgaagtcaaatgcagccccaattgtggttggccgcaattttaaatctcaggttgcaacttaataacagtatatgactctaggaagatctggcctatggtagtaattggtgaaaaaaaatcttatcttttagtgatttgatactaggtatgcagttaccttgctagtgatgaagttgcattgtagataatgagacaattcaagaaaagttttctagtcatgacaattgttggagatcccacgtcaactaccaaaacagtggatataataggggggacaaccctcaccttacaagccggttttgtgaggttaagttagtcgtaacctacactctaagaacaattaacatggatctacatatccacgagtaaagaagaaaattggttatgtatggaatcggaaggtttagagaccaaattttggaatctaagaattaatgggttaattatatgatgatatcaattggtttgtatttgtaatgcatgataattgtcctacttgtctttttatatctgatgctagagtcttgggccgttgttggttttcttttcttctatttttctttcttcttttgactgtgaaacatcaagttgtaatctcaatttctcacaaagtgtaaataggtaggtcatattgccagaggattttggctata

SEQ ID NO: 20201 - DNA, 1046 bp, Glycine max
  Intron number 3 from transcript Glyma02g40720.1 (locus Gly ma02g40720) derived from phytozome v7.0 (chr-ID Gm02; pos 45950399 to 45951444 reverse strand)
tcccgaaaggcgaagagctatctgggcaatatgtgagtgatcatgctcatttgtttagggtttctttctatctttactattttctttttattgttttatattcatttcgattagcattagctggattgcaaaagcaatctactgtaaacttttgcagtgtagtgggaatcacaacaagcaaatactttaagaagacttttcataaattgtttttgaattgagagttattgtaacaacagaattgttttagaatgcactaagattatggccactcaattagggttcaaattccatatctaattgtagtatctaactcagaagttagaagcataagaagcaaagtttcagtctccaaaaagcatattgactaattatatatttgcataaaatcttatttgaactttcagggtagtttatgttgaaaataagaactagtgtctagtggaccagttttgctatagggaccttcaggcttgaaactattgattttcaattaacatttaatctgattttatacgcacaaaggtttgaatgagtcctccaaaattgagaaatctgtgtctttgttccttctagacatcaaaggaacttgtggcaatgtccattccctaatgaaacttaatcattgcatgaaaatgtatctgaccaaatatgttaatgagaacttaatcctcttatatgcacaatataaactgacaaacctcagaacagcaatcaatgttgaagctttcacctccagataataaaattgcaaaaacacagtggtcttactctgatctctgatcgaatgtgtaaacagttagacatttccagctgtcaaaatctttgttgttcattttgataaccaaagttggacagataagggtaagctgtggtaatgcttatggattcatagtgaagaaaatctggttatgttttatcttgtattacatatcttttgtcagatgactgtgcaagagtgctatatgaagtaagaccaatttatctgatcaattctcaattgccttatagcgctccctgttattcagtgtggtgtaggagaacgg

SEQ ID NO: 20202 - DNA, 447 bp, Glycine max
  Intron number 1 from transcript Glyma04g16840.1 (locus Gly ma04g16840) derived from phytozome v7.0 (chr-ID Gm04; pos 17999759 to 18000205 reverse strand)
gtaagcttccttcttcatttttcctgtgaaaaattgtctgaggttcaatttttaatgggtaaaattaaaaaccaaacccttgcaccattttttttttctttttcttttttgtgttcggtgggtttggttctcgaaggggcatggtgaataccttatacccaattgtttctatgactttagtgttgtgctgtgtatttatttatttatatagttgctagctagactgtgtaatgcaactaatttgtttaccagatcttctagtatcaaactagatacgtttttatggctgaactgcaattccatgtaatttgtttttttttttatatggttgggtttttatttccccctctgttgtttgtcatttgtttgatttcatttggttgtgtgttttctggtttgttgttgttctcaggaggtattcaaaagggccataatacagcctgggcc

SEQ ID NO: 20203 - DNA, 564 bp, Glycine max
  Intron number 2 from transcript Glyma02g26820.2 (locus Gly ma02g26820) derived from phytozome v7.0 (chr-ID Gm02; pos 27907659 to 27908222 reverse strand)
ccacatactatacgtggtacagcactaggttcattgtgagtaacttcataacttgctaggaactgtttcttgcaccttcatcccaagcatacttgtctgaagttcattttctctttgtatttacagtgctttggtggcaagagcattgattgagaacaccaatttgataaagtggtctctttttttcaaagctttctgtggtctttttgctctgatttgtgggaatggttatatagttggcatcaatcaaatctatgacattagcattgacaagtatgaagaagacatatggacaactttcttattacttgttgtcttccacttgttcttttcctttttgtgtcctccccgttgcacgtttctttcaaagttacaatattttgctcttgaacatgtttaactgcacaatgatttcattttaagattcttttgctctagttcttaaattattctcgtcgtagttaaatgtctatctcaataaacccagatagtagtgttaatctatgttggttttatatttttttttcagggtaaacaaaccttatttacctatagctgctggag

SEQ ID NO: 20204 - DNA, 945 bp, Glycine max
  Intron number 1 from transcript Glyma01g38260.1 (locus Gly ma01g38260) derived from phytozome v7.0 (chr-ID Gm01; pos 50395338 to 50396282 reverse strand)
caagtgatccctcattgatcttccctttcctcaaagtaagttaagttgcctttcgtcttctcctttttccatgcatactttttttctgtctttaattccgtacttctggtagtcactgtttttttccttaagaatcttgtttacagatactattttataggcttagcgtagaagttccgttaataattacaatgattttttattgcacgggaagaatttatttacttttttttcgcatccagttattttctttcaggtaatcatacaaacagtaaggtaaacaattgttgaagtgtttttctgtgaattgtaataacaagagtattgttaatatttttttaatagttatgtgttttttttaaaaaaacatcaaaatgtcttaatgccttctttaaaaaattaatcataattttttaagcttgaagaattgatttctacttttacctccagtatacatttttcttcgcaaatacacattatcttgtagaagaatgaagtgtttaaagagtatatgttttgacttttcattaagcagtttctttacatgctcctactatagctgaacggtcctgtgttttttatggctagacgctaaagtgcatgtaattgtaatgtaactgtatttcatcaagattgcacatgattttgtgcatgtaatgtaattgtaacccataaaattcataggggtgcatgaagacatggagtaatacattatactaattcccaaaattacaaacgttaatcaattataactttaacaacaatcaatcgattcagttcattgttatgaactatgcctcttttaatcttttagtcaattttgttataattggctcatattggtccagctatagttaatcttcagttagagcatgtgttagttgcattcaggatcagttttaacttttaagcaagatacgttaattgtggtaggtgctcgctaga

SEQ ID NO: 20205 - DNA, 636 bp, Glycine max
  Intron number 1 from transcript Glyma03g22350.1 (locus Gly ma03g22350) derived from phytozome v7.0 (chr-ID Gm03; pos 28659322 to 28659957)
gcaaaagatttgctcaaagaaagaaatagaaaaaggttattacaccaacaaacctctattgttcaaaaggatcaaatatgactactagaaggaaatgatgattgcacatttcgtggaaaatggaaatcatattccatttaatgatgagctaaatgagatccccagaagtcggtggatggaagagcaaaaatttctactcaactcaaaagcttgcaatgctcttttgtgctctattagaagaagaattcacgaaagtccacaacattagaagcgcaaagtagatgtaggacacccttgccataacatatgaagggtcatcgcaagtgaagaggaacaagataagtctcttcatgcgtaagtatgaactatttactatggaagaaggcgaagacatacaatgtatgtttggtcgcttccaaatcatactaaacaaactaaggtctctgcatagaactttttataactatgatcatattgacaaaattttaagaagtttgtctaaaaaatagagaccacgagtaacaacattgagagacctaaaggtcttgacaccatgtcccttgaagagctcattgtaactctaaaggttcatgaacaagagcttaaacaacaacacaaaggactcaataaagggaa

SEQ ID NO: 20206 - DNA, 1008 bp, Glycine max
  Intron number 2 from transcript Glyma04g08680.1 (locus Gly ma04g08680) derived from phytozome v7.0 (chr-ID Gm04; pos 6811915 to 6812922)
ggaggtgggaggggatcgtgtgtggtggtccgcaggtgagttcgcgtgggccttcttcgtctccagattattattattcctcttttcgccctcggttttcaactcggtgattgattccgtgttgatcggggaccggttcttggatgctcttgagcgtgttttgatttgttttttttgatattaaggtcactgtactgtttatggtgtgtccacttcagcttttgctttgcgttttccttttcttttttttttctctcctgcgtttcgctttattgctgccatttcacgcttttttttcccttccattttttctctctctcgttttcgttgcttgttaaatcgagctgcgttaattttcgtttatcacttgataagaggtgaatttgtgtaggtcggtgaaccctagaatttaggcttcgcggattgttgtgcttcgttgtctggtttcagctccttgcatgcgtttatgatgtgcgttttttctatcttcacgttaattagtatactgagatagtattttagctgcaaggttagtagtttcgtttttgattttgaaaagccctagcgagatgcttggtcttgttacctgtattgatgttataattgtacgcgtgggatggctttttttgtattgttgcgtttcaaatgttcaattgttgacttcgagcatctttgtggttggttttattgatagaaaactagggtttaggaactttcgtattgttggaggttgttattttatgtgattgatcactgtgtatgcagttcttgttcctctatattactttatcttggacttttcccttgatttcctttttatttgttgttgatttgcataaaccctaattttataggaagcttgattaagatatgtttcaagttttaatttgagtttaatttgtgttgataggaaacactatttaatcttgtgcttcttgctggttgcttgtactgtgaggatgtgcatgcatagctgtggagaatcatttgcaaggtggttttaatact

SEQ ID NO: 20207 - DNA, 336 bp, Glycine max
  Intron number 1 from transcript Glyma04g38510.1 (locus Gly ma04g38510) derived from phytozome v7.0 (chr-ID Gm04; pos 44912615 to 44912950)
gtgtctctcccaccgccatacgtgaaatcgtattcctttctctgcttgcttaattacacctagggaagttgtaatttctgaaattcggaagcgaattcgcttagattgtttttaatttcgagtttctgaagaaattgccattttttttcatttatctattttccttttcttttgttagttctctgtagtttctagtatttggaaaccttgaagaggcttgagccagaggaggcttttttttataaaaaaaaaattatttaatggtttggcggtttggattggttttgagtgaatttcatttgatgctgcagttactcagggagataacgcacgaga

SEQ ID NO: 20208 - DNA, 1033 bp, Glycine max
  Intron number 2 from transcript Glyma03g33970.1 (locus Gly ma03g33970) derived from phytozome v7.0 (chr-ID Gm03; pos 41462944 to 41463976)
agtataagcccttactgcacgtgcataataaggaggttcaatttttgtttatatatcagctccttcattgttgggcttgtttaaatgccaataataagggtctatttggataaacgtcttcagaagcacttataggagaagaaaatgagatggaaaaacgaaaaaaaaaaaaaaaccttctccataagctaaaaaataagcttttggagaagcttacatgatcgagcttctataattagcttatgcataagctaattttagcttgtgaagaagattttattttatttttttgcttatttttccttcttattttattttcctataggtgtttatggagaaatttatccaaacaggccctaagagtctttattatcaagcacgactgctttcatttgcttcatgtatccttacatgatacatatctgatattgatactcttgatacttcaccatatgtgtttgtgaaatatcccgttctttaaaaaaagttatgaaatcctaatatagctacatctgagacgtagaagtgtgtatgtgtataagatagaaaatatagaaggcatagtcccttgatgaaccaaaaatagaaaaagttctctttatggatgatctcaagaaaggaatgttaatgatagtatgatactatttctagttgtagacaataagaagtgatttgttatgacaatggtttttaatttttattttgtttttagtaatatacaaaaggtatgttcttaatttggatttgcagaattgcaattatgtgtttattatgctttatgaattttatacatattgcatatcttactcatattgtgtcctatatatttttagaataaacatattcccatacccataacagatacatattatatttgtcacagaaattgtatctatgcatgatagagtctttatattttttcttagagcggcttttagttttgtcagatgtagtggtcccattttttgtgtatgttatcaattgattcacctttcctttgtttttattaaagacaacactaaatacaaggcag

SEQ ID NO: 20209 - DNA, 635 bp, Glycine max
  Intron number 2 from transcript Glyma01g20710.1 (locus Gly ma01g20710) derived from phytozome v7.0 (chr-ID Gm01; pos 25242782 to 25243416)
ggactgttactgttgcttccattttataccagatagtaaagatcctctcccgactctttttcttatgattgacaagtattacttatatatcaaattttaacttcttggtgttccaatcatgtattttgtattcttaccattcgagaaaagtagaatgttatctgcagtgatatggatattattattagggtaatggagctagaggatcaagggaaccctttccctaaccctaattttattgaaaattgtatcggaatattttgttttttattggttagttattatgattatttttattagtttttattagtgagagaaatttaaatttagtatctcttttttacttctacaatactcaactaccaactcaatcggttagttttgttagtttttgtcactagagcagataattagatatgagcatccatgctgcttagtctaaagataaaataaaaaatatgaaagtcttatttatgaatgattattttttttataaaataaatcagagtagattctttgatttttttttgtcaaacatgtcatgtcatataaattgtcttccccacttgaatgaatgtttacaaaagtaacttttttccctattttgtcactttttttttgtaactaatcagggg

SEQ ID NO: 20210 - DNA, 315 bp, Glycine max
  Intron number 2 from transcript Glyma0169s00200.1 (locus G lyma0169s00200) derived from phytozome v7.0 (chr-ID scaffo ld_169; pos 6341 to 6655)
tcatcaaggaaatccttggctccggtacattcttctcttccatcaaaatccctttttttcattttttaattttttaatctgtaaaattaaatgcctcatgctaattaattaggtttaggtatcaatgacaatttattattttgcttttaattaggtttaggttgagatttgcttgccccatttgattattttattcattaatgcaaaaattggtgaaacgtgttcgttttatttagttgttgcgtatttgcatatatatcaggttgaggaacggacaatatttttgtttttgatttgcagttggagtagaagcag

SEQ ID NO: 20211 - DNA, 715 bp, Glycine max
  Intron number 1 from transcript Glyma04g18930.1 (locus Gly ma04g18930) derived from phytozome v7.0 (chr-ID Gm04; pos 20673124 to 20673838 reverse strand)
attgctaggggggtgacaactcggatggaaatgttagggtgcgacgaagacggcgcacaaatcattgatagatcattttatgtcttgtatttgacaacatttttgtatttgttacattattttggttataacttttattgaaattatttgttacattattttattttttgtgcactctatatgacacacattccagaattgataaaattaataaataataatatgatgatcaaattatcttaaaaagaaatataaaaaatttaacgtaaaaaagtatacaatagaaataaaataaaaaaggtgtattattctaacttgtaagtaatttaagataatagtaatttaaaataaaaaaaattacatatgtttcattgcaactttgaaagaattataataattattatgtatttgtgaatgctaaaattttatattgtcaactagtaaatttaagaattgataaaattttacattgtgaccctactccctaggcctttctgttttaagccccactattttccaaacatgtgtttttaatttttgaggtggtcaatttctcaagcatttataatctattttgaagaatgtttttaagtttattttaattttaaaatatcaaataagtaaacaaataaacaagatagaataagaaaaaagtaatattctgtataaaagttacaaagttgtctaaaagaagttcacaacacaccctgaaatt

SEQ ID NO: 20212 - DNA, 918 bp, Glycine max
  Intron number 1 from transcript Glyma02g44300.1 (locus Gly ma02g44300) derived from phytozome v7.0 (chr-ID Gm02; pos 48894916 to 48895833 reverse strand)
gattggatttgtaagatttctcctctctccattttttaaatgttttgttttctttaggctattagtgaatgggtggaatggttaataatggagtggggtgacaagaatttaacctattattttatgcgcacatgaacataaatcaacatacaacactcaaattttcgaatttcaataccctccattgaaagagatttttctttatttaacccttatcagtccaacctatttcataccattctttttcaaaaaaaaataaaattgcccaatcattttctgattacttgatttgaatttttttttaattcttaatctcaattctccctagtgtgtgcacagaaaaatatatatataaagagggtaaatgatttaattgtttaaaaaattagacttgaatatttactcttaatcttttttctaaaatgaaaaattcgctaattcaactttctgagtagtatgcctacatttttccaacgcatattaccaataaaatgcacattttatgagaattttttcagttgttaaattataagaaaacatttttctccgtttttttaaggctactatgcaattccctactgatggcatgatcaataatttatgacttggcatgatttcattgtttagactcaaattgatatgccaaatgtaattatcttgattaaaaacttgaatatgtatagactaaaaacatttaatttttttgtttaaaaaaccatttgatttaacaattcaagacatatatgttttcagtttcctcatcacattttttaagtcaataacaaatcacaatccacaaataaattacaatagccaagttttatgtatgtctgcactcaaattactatagattaatttacattttctcttttgactgactatgatttatgatgttgttatgcttgcaagactttggat

SEQ ID NO: 20213 - DNA, 529 bp, Glycine max
  Intron number 2 from transcript Glyma02g02700.1 (locus Gly ma02g02700) derived from phytozome v7.0 (chr-ID Gm02; pos 2064058 to 2064586)
agctagtaagattcgcgtggtttctttcataatgataatatatatacttttatttttaattagttttagaatttaattttcatacacccatattttatactgcacatggagtagatttttatattatcaaataattataaattatattaacgattgagggtataagaattgatctggtgttgtttagtttaataaataatcttaatttaagttttgatatgcattgaaaatttgactgatcaagaaaattgtcttcatcaaaagatacttatatatgtaatttataccaaaatattatacattttcttacatatattactctaaaattaattattaaaaattttaatattttacaatatataaaaatttatgattggaaaatattataatatataataaaaattacatattctaattaaaatcttagctatatgccccattttgtttaacagaaaaatttactttaatttgatacaaatgtacatataaatggaaacaggaggtggcccaggctttccaggtgcaagca

SEQ ID NO: 20214 - DNA, 853 bp, Glycine max
  Intron number 6 from transcript Glyma02g17000.1 (locus Gly ma02g17000) derived from phytozome v7.0 (chr-ID Gm02; pos 15341150 to 15342002 reverse strand)
caaataagctctcacttcgaattttagcacacacggtattgttactaggcataaatactacatttatttagcttcgtgtgctttaggctattgtttgatatctattggtttatgtatttttgttgcagaaggatttaaatttcatgatttcatgatataattgcagtctctacaggctatatagaattgattgtaacatgaaggggcagttttatattctgtgtgatagattgctcaactgaatatgaaccactctatgtattggcagtgcctttacagcagtgcatgtgaaattttatttgagatcgtgtttcattgatatatttggaaatagaagttaaaatgtacaataaatttggagaacatgggtagattttcatatcctaaggaggaatgttgattttattcctagattctctttgagctacaatgctaagtctatgtttgcttaagtgcaaaatcaagatcatttgagagaataactttggtaatcaaatatagaattactacttgtaatgaacagattttctgcactatctttttggctgaggggtacattgaaggtctaatccattatttgcctttgtaatatctggaatagataacccagagttggtacgaataatcttgctggagaatcacactgcttcttcgtaccccctacctcaccccaagctaccaaaataaattaaaaaataaaatgtccaagccaaaacatatgaattggattggacttaaatcctttttcatttcagtgcagaagttattttcctattgtgctaacttctgatggttcaaaaatattaatccatagaggttctaacatttggttttcattttatgtcgcagtctg

SEQ ID NO: 20215 - DNA, 634 bp, Glycine max
  Intron number 1 from transcript Glyma02g06940.1 (locus Gly ma02g06940) derived from phytozome v7.0 (chr-ID Gm02; pos 5560832 to 5561465)
ccttgattacaatcaagaagcccagagatttggaggtaaattttgcagtcacatcgtatgtttccaccggaatgctactagattcttttagtgaacttgttcggaatctcacgttgagtagaataaattacttcacgtggtattaagtcttgagactctcttatctaaaggactagtcttttgggttgacctctcttcacgtgcttaagtcctaacaataagaagacagaatgaaataagcttatctagttaagctaaaatcagcttatgcataagttaaagtcggatttttggagaagttaaatgattttaacttctccaaaaaaactggttttaacttgtgtacaagataattttagcttataattataggcgaagcttatttcttcttttttgctttttgctattagtgcttacagagaaacttatgtagacaagacctaattatgtgagtaacagagttactaagacccatttaagggctgatgtcttcccacagatgttgttccatacacatgtacttgagaatcaaacccttggctacatgtttaagagacatggttatttgcgaactaatattggttggattggtattagtttgctaacaattgttttgaccggctttttgtaggtt

SEQ ID NO: 20216 - DNA, 723 bp, Glycine max
  Intron number 1 from transcript Glyma03g41340.1 (locus Gly ma03g41340) derived from phytozome v7.0 (chr-ID Gm03; pos 46850243 to 46850965)
gcctcaacattcccgatcttatcagttaagcatcatcattttcttttcattcgttgctccacattaatcattatgttaactttgctttagtttaggttaaactttacagtattaaaataatagaatatatgtatttttaatataactaatagaataataataaaataattactacctacgagaaagatgggtgtcatgaaagatgtttgatgttatttttgggggaaaaatatttggtcgtaacattatttatatgctaatcaataatttttaattttaaggttttatttttattcataatcttttgggcctgatcaaagcaaaggttttacctaacttatgtttgggcaggcctgcttccatcggccacatccaaagctacgcatccattttcgcctttgcatgtcatgtgctaattattagctggtgtgttaaagtttagtttcgtttagagaaataaaatcgtagtttttagatcttactaaagcttagttgacaaaaaaaaaaaatcttactaaagcttttgaaaagaatagtccgtttccctaaaagtaattaagtgttactaaacacaaacatgcacttgtgtgtggtaattgatttaacgtaagtagagtgtacgtagatatatagttgtaaatgtgtatatctgattagtcatcaattaacctgctttgttgattatcaggtgaacgaataggtggcgagtccgtgttgccttat

SEQ ID NO: 20217 - DNA, 436 bp, Glycine max
  Intron number 3 from transcript Glyma04g37730.1 (locus Gly ma04g37730) derived from phytozome v7.0 (chr-ID Gm04; pos 44154587 to 44155022)
ccttctaggttcccttctctttcttctccatcaattgcatttgtacagtttttcataattgtcattgagcatgaaatgtaataggctgataccaaggagatgtttggttttgagaaaaatggttttttggttatatttctccttttcataaataattacaaaaatgtcacgttgatatcacttttgtttactatgttcaaaattttgaataggaagcagccaaatcaatttgtcattatttgttaaaatgagaagtaaaactagaaacatgctttctcaaattaaccggacttgaagtttttttggaaggggagtggtaaacggggtatgttggaggagtttcctttttttatgaatttagtatgctttctgaagtggttgttaaggatgatttaatttttgttcagcccgggagaatctattgaggacacgaaga

SEQ ID NO: 20218 - DNA, 867 bp, Glycine max
  Intron number 4 from transcript Glyma03g28810.1 (locus Gly ma03g28810) derived from phytozome v7.0 (chr-ID Gm03; pos 36737998 to 36738864)
atatcaaggagcctttcagtgaggtaacagataattcaattgatgttgtttgaagatgattataaatttagttcatgtttgtaacttctttttgtttttatttgggtggggggggatctattaaatatcagaagtttgctgcctttgttgtgccatattattgtgggtgtggaaaataaaatactcactgaacatgaattgcaaacattttaaaagctatcttttaaagaaatgaggcaatctcaacttgcttgcgcacacattttttgtagacattcaaaagcagacatgcatgggtattcatactcataaagaattctgtgtgtattttacaaagaaccttttatgtaatgtttatgatttatttttagctaattaagatgcattatttacaattttatacttcattggcagaatcttttaagttttaatgatgcctattgaacagaaataaggcagaagatgacttggtataattatatgattcagaaactaacaacttgttagaataaaatttattaagcagtatctacattttactaatatacaaagtatataaacataaacctaatccactttgcatgcactttcatatcggtggtatttggttgtttaaagatatgttgttgatgaacttgtgatgtggctgtttcagacttacaatctccaaggttgtttttttataattaaataaagaacgaaaagcatctattcggataaaagctattgttgtagatccagatttttaccatgtctagcctttttgtttatggtgttgattgttgttctttgttccaaatttttttgtcctttttgaaacctagtatatttattgacatgtttaactcttttttatcataggtttca

SEQ ID NO: 20219 - DNA, 753 bp, Glycine max
  Intron number 1 from transcript Glyma01g01970.1 (locus Gly ma01g01970) derived from phytozome v7.0 (chr-ID Gm01; pos 1533196 to 1533948)
ctaggtgcacttcattcaatttacttcctttgttgtgattttcattcaaaattgaaactttgcggtcatttcacaattggcatgaatatgatgataccctattagttattagggtgaagttcatctaagggtcattttaatattatttgatttaagtctccttaatcttaagtttacttccttctgttgcacttttttagcattgcaattactgagattcatgagctactctgaattattgttcatggctaattgatttaatcgttcaatattgattatttgttttttgtttttgtatgttctcatttggggtttctcgggtttgaactaatatgtagtcttaaattgcattcgggttaggatttatatcagcgagggcttttttttttttaaattggcaaatgtcagtttattagttttgttagaaatgtcagtgtgagattcgagcccacaatctcttctttccttctcccttcacccttaagccccccttcccaaccatcaagctaaactaatatctcctcagcgagggctttctcgcctggtttcttgtgttgattcactatgtcttgcttttgaaaaggaaaaaaagggtaagaaaaaaactttggtttactcagagtgcatcatctttatatgtagctttggatttataattataatgaattctgttgtctgttcttgctgaacttacacatgaagcattcattttgatattctgctatctattttgcagttttaaaatcagatctc

SEQ ID NO: 20220 - DNA, 709 bp, Glycine max
  Intron number 1 from transcript Glyma03g01270.1 (locus Gly ma03g01270) derived from phytozome v7.0 (chr-ID Gm03; pos 1021339 to 1022047)
ctgaggtacctaccttctgtctctctctctaaattattctattgttatgtaaaataaagggtaataaaaatatttttttatcagcaaatgttaattgttaattgttagaatattagttttgttagccaaggggatcgaactcgtgatcttaccctcctttccttctctcttaaccatccaacccactttaatatctccaaaagataaaattatttgtatgttgatccatgtagcagacctcacctagtgggataaggctttgttgtagttgttacttgtttgtgtgttcattatatgctcattaattatactgtattcttttgtggtattctttcttgttggtttcattgaattagcatttgaaattggtgataagcctaatttgaatttcaatggtgattgttctaagaaaagaaattatgagatgttttgggcgaggttttaaaagactgtatgcaattgcgatttaggctgcaatgtcaaggtttttggtgtgtttgtgactgcaattgtagccgcattggtcacaatttcctgcaatatcaaggaatgtgataaaaatgtgaccgcaactgcaatttaaaaccttgccgagtaacatgttttgattgtgagatgttactatgtcttagaatttagataaagaatctgtgtttgtggctgaaatgttgagtcaggatatgagattgtcaggtgtttgctctgagag

SEQ ID NO: 20221 - DNA, 463 bp, Glycine max
  Intron number 1 from transcript Glyma03g24110.2 (locus Gly ma03g24110) derived from phytozome v7.0 (chr-ID Gm03; pos 30777354 to 30777816)
ttacttgtgaagtgggatttagagcttaatctgaagttgggttttgcttcccttgtccaaattccatggctttaatcttctttacttgttttcccttactcgatttcacatgggtattttttttacgatggctactgacgattcaattttttttctgattcatgagtcctctttcccgcaccgttaagatttgattaaatgttttcgttttagtacaccaactgttcgatgaaatgttgcaccgaattcaacttaaattgtatctctacttcaactatagcatgcgtgtcactgcttcttttaacttttctgtgattctttagaaaattgaataaatacgcagaaaccgcaactttattaactggttatgtagtattgtatgttgtagatcaaaattgagttcaagcttcccctatttctctgtgcagcatttcaaccccgttctggagctgatagtgaagtt

SEQ ID NO: 20222 - DNA, 756 bp, Glycine max
  Intron number 2 from transcript Glyma02g10920.2 (locus Gly ma02g10920) derived from phytozome v7.0 (chr-ID Gm02; pos 9053496 to 9054251)
tcttcaaactcacgtatttagaggtgacttttacatgtgtttgcaacagtgaaaagaaaatgagtttgagggaaaagttttgaatttaaattgaaaagaaaacgaaaatttttaacttgttttttttcctcaattatcttccttatgcaaatatactgatgtggaaaccggagatataaggttgattgggtgattaagataaaagggaaggaggaaaagattgtgagttccatccctcccgacaaaaaactaacaattaacatttgctgataaaaaaaattgatgtggaaaccagaggggttggcattagcagaaggggctaatcccaataacctggcgaacctagattcgaattttttccaggacaagtgttcatatttagtgaccgatagtacctcgaacaaaggattgcctccaaagtaggattcctctggggaaccaaaaataatactgatatggttcttaggcttgtttttataaataattataaaattagcatattacttttacttttttttttgcaaattagtgaaaactacattttattttttgtattttctagtataaaactttgaaaagaagaaaaataaaactgaaaacaatgtaatatttttgtaattatttatgaaagtgggaggtggaaatagaaactgttttctcaagttgagcaaaatcttggtttgttttaagttttgttgctttccactttcctttgatgggtgaagtgttgaatttagggaaacagttggatctgga

SEQ ID NO: 20223 - DNA, 680 bp, Glycine max
  Intron number 3 from transcript Glyma04g22160.1 (locus Gly ma04g22160) derived from phytozome v7.0 (chr-ID Gm04; pos 25384652 to 25385331)
ataaaattggttctccagatccctttttttcaaaggtttgctcttgacatctgtgtacacttctgagaatttatttataaatggcttgtatagtgtatagattactacatgtttctatatctagtttagataaatgtttgcaaatatgtaaatttaagtacatatagttctcttctcttccctataaattgtaagataactttgccccttctgtgattctgtgaatctcaaattttagaagaagcagtctatagataaaaatgaaaaaaagggctcctaaattctattcaatgctgaaactctgtactttgctttataagcaaataaatgtggttaaactattttgtcattttaaaaaatggtccacaactacaattttgactacaatttcaaggattttgtgatctttgcatctacaattatagccatattagctgcatagatatatttatccatactttcttacaatatcaagaatacaaagctataattgtgaccacaatgattatacataagtcataaaagagaatctaatttgatgctggaaaaatgattatgtggttaatttcgaatttatgtattgtaactgagtgagtaatatggtgctggaaatgactgagtgattaatttcaatatgttttttctataacaaaaactttattctctctggcagctgctca

SEQ ID NO: 20224 - DNA, 563 bp, Glycine max
  Intron number 1 from transcript Glyma04g32270.1 (locus Gly ma04g32270) derived from phytozome v7.0 (chr-ID Gm04; pos 36740739 to 36741301)
ttactctctcaatcttcattttttaattgcactctgtatgctcttaatttctttcttgccctctttgttaccttttactgatgaaaacatgaaatgaatctgaaccctctttctgcgttcttgtgttttaaattttcattttcagcaggaagaaagcatgtcactttgttttatcatatcttattttgtttaaaacaaaatgaaaaaaaagagaaaaagaaaagatgttctttggggtgtatgcctgaaactgagtgggagaattatgtatagttaattatggattcagcaaaaatgacagaaaatttctcttttggtataatgttttgtgattctgtttatctaaaccatttgtgatttgggtattcaaatttcatttcttggttggattggtgaatttaggacctaggttttgtctgcaattgcatcacgacttcaatgtcaaggatggggatgaaatttaaaaccttgtttaggacactatttggagttctaaaactttgtttggctgttttgggctgatctcttgttttggctgactattcttgcaggctttttgaaag

SEQ ID NO: 20225 - DNA, 917 bp, Glycine max
  Intron number 1 from transcript Glyma04g16260.2 (locus Gly ma04g16260) derived from phytozome v7.0 (chr-ID Gm04; pos 17343412 to 17344328)
cacgacaccccaagttctggtaccctttattcttcggccatgtttggcttaaaaaagttattaatgtacctgttttttatgatttcgctaataactataggtaagttagagtcaagagtaattcatcaaagtggaattgaagttacaccctcaatttatttcttaaaattttaaaaatatttaaggtcctaaaattattaaagaacaatcgttttactcataaaattgtatgaacaaagactaaaatgactgatatttaccaacaagtctctcatccagttgggttcaagtcttgtgaatgggaaaaatgttgttaggaggggagatctcactaaaggtgggcaaccagattcttcggcggagattagtcataaacaaaattggtggatactccgcatcaatgtcatggtgacaaaatgaaatgactgatatttcataattttaaggactgaaatcacatttttgtaattttagaagctaatttgaatgcacgctcttaatttcaatgtcacgttagtcatattttattttctaatttaaacattataattaaaataaaaaagatatagtaatcataccagaaaaaatatagagtagatattatatgcacaacagttaaaagtgtttttatattatcattcaatcacaaactatcatatatgataaattttcttaattttataataattatatcttaaaaatcatatcaacaatgtttcctggttagttgataagctaaatttttcttatactgacaatgcatagaaattaaactcaaaaaagtatttcttcaactaaaggaaccgtagaatccactacattttgtttttctgtagaaacgtgagtatattgaacatgtgttttgttctgattaccgacaataataatgaaactcttttgttggtggtgagtaggtg

SEQ ID NO: 20226 - DNA, 464 bp, Glycine max
  Intron number 5 from transcript Glyma02g17430.1 (locus Gly ma02g17430) derived from phytozome v7.0 (chr-ID Gm02; pos 15712453 to 15712916)
tgacaaagtccaggaagaaacaaagagccgtactggtaagccttgtttttttttttttacaactaactgttattcatattgataaaagagcatttttctaactctgttgcggccacatcatcaagacatgtgatttttcttcactctgaaatattaatccatttcggtatcattgtgttttgttgtggcctttttttgtgtttttgaatgatttttaaaacctttttatgttgaagatgcatatggttttatgcttgaacctaacagtttcagagtcagacttatctcttactcttatataaatcagcaatggaagtttcatcactgtgaacaagttatttttgtgcatatagcatgagctgttatgtgtattcttattcagttaccaaaaaactagaaagttctttgattaatgtgaccttttttcagatcgcaaaccccctggtgtgggacgtggaagggga

SEQ ID NO: 20227 - DNA, 418 bp, Glycine max
  Intron number 1 from transcript Glyma02g43030.1 (locus Gly ma02g43030) derived from phytozome v7.0 (chr-ID Gm02; pos 47921875 to 47922292 reverse strand)
ttacaggtacttttctcttactctttctatttgccttattttgatgataaataataaaaaaaaaaccttttgtggttagttagttatttgatcaatttcaaaatcaaagaagttaggaggtgggagattgaggtaactctttcagatagtatttgttaatgggcctgtttgaataaacttattcagaagaatttttagaaaaataaaataagattttttttaaatgaactacttcataagctaaaactagcttatgcataaattaaaaataatctttcagaaaaattatgagagaatttcttcaaattttcttatgcataggcttttaagtagtgattcttttagtggattgagggctccaaatggttgtttcttatgcaatgattcattcaggaacttccagttcaccagagagcag

SEQ ID NO: 20228 - DNA, 621 bp, Glycine max
  Intron number 2 from transcript Glyma04g27580.1 (locus Gly ma04g27580) derived from phytozome v7.0 (chr-ID Gm04; pos 31496048 to 31496668)
ctttgcctcccctgagtacaattactctgtcgcaagtatgctggctcaactatctgtttcttagtttcttttaatttgttgatattgttggcaataattagtcacataattaaaatagtgtatataactggagaaaaatatccttatactatgacttaactgttggagttggagtttatcttaatggttgtggttgattttattgtgtcacatgttacgaagaggccgttatgaaatcacctgttcagtcaagtaaactttacacttgaaatattctgtctttagatgggtgtgtgttgaagattaaataatatgtataataagtaggagactactcatctataaactggtttttgagtgtaggttaggttgaaacctaatagagaatccatttttccatggatttgcaacctatgctattgttgaataatacggtatgcttacaaaaagataatgaaatgatttaatcaatgttaattaatggatctaatgattggttattatgagcctttattttgagaaaagttgtgtccttaaatatatgatggtagtaccttattattcaatgatcgaaaaccaaactaatatccatactttcatttattgaaggtccattaaaga

SEQ ID NO: 20229 - DNA, 658 bp, Glycine max
  Intron number 2 from transcript Glyma05g01430.1 (locus Gly ma05g01430) derived from phytozome v7.0 (chr-ID Gm05; pos 928044 to 928701)
gctgtttttcatcacttctggtaaggaaattaacatgatgcatgcccatgtctttctttctatgcacataattattttcatttctgactcatgtttttattgtccaattttcattttggcatcctatatattaatttctaccttccagcaatatataaccttgcaaagcctagattaaatgtaagtaacttccaataagtattatcaacaaagattgatccagttgataagaaatgaacttatattacaaaagaatatgaattcgatttgtattgtcaatgtgaggacctagtgagcctatggacttgactcacctaaacttttaaccagcaaaaaaaacttataataaatattcaaattgataaaaatgctcaattattcattaattcacttatgtagtatcatgataaaacaaaatgtagcaaatcatatccaaattattgacaggtcagttaattaagctatattgggtggttatgttataggaaataaaatgaattaaagactatgattgagcattgcaccaaaaattcaaatcccttattgctcaaattactttcttactaacttggtagagatcatgcatatagatatatatcacaagcttggattgtatttgacagggtattttgaccataaccctaacagcaggtataca

SEQ ID NO: 20230 - DNA, 643 bp, Glycine max
  Intron number 2 from transcript Glyma04g01620.1 (locus Gly ma04g01620) derived from phytozome v7.0 (chr-ID Gm04; pos 1081323 to 1081965)
caagaataagaagaataacagctctaagtattctggtaactttctcttcttcaattttcctcttttttttgttgttttatagagtaagtaagctttacagtttttttttcctttctttctgaaaatatatattaaaatggagttccttccgaccgcagcatgttttttattttaacttgtttttgttttcaaggacatgtcttattttttttttacgtttttgcttccctcacatacggagtgtgtgtctgtggtgggatacttgttaattgttattgtatttaattttttatttatttatttatctatgtgtttgaactatgatttgggacctattctattccatcggatgcattatcggttccctgattttcaaaattactcttttgcccgtgtgtcatgtgctgctgttcccgtttcttcggtgtatttttatttttgtttgccctgaatatgctaatttcttatttgcttgcgtccactgttctattggatatctgcatgttatactttttgatttgcatgatatattatttgaaaatcctttgtttcactcatgaagttaaagattgaatttcatgtacatgtaatggtatcctctaatgggatctttttgcagggccaggatcttggtttactccgc

SEQ ID NO: 20231 - DNA, 517 bp, Glycine max; identical to SEQ ID NO: 16712
  Intron number 1 from transcript Glyma01g33480.1 (locus Gly ma01g33480) derived from phytozome v7.0 (chr-ID Gm01; pos 45641847 to 45642363 reverse strand)

SEQ ID NO: 20232 - DNA, 939 bp, Glycine max
  Intron number 1 from transcript Glyma02g40530.4 (locus Gly ma02g40530) derived from phytozome v7.0 (chr-ID Gm02; pos 45800002 to 45800940 reverse strand)
ctctttcacacccttcactttactctctctctctggtattctcctttttcctctgatctatgtactttcttttgtttgagctctgtaaatgaaggatctgaatagttgatatgtgttgttttgagtaatcatgaataaagtctaagtgtccacgtctcacctgtctaaatttaattaataagggataccttgaaatgaaaatgaaggttctttcatggatttagttttagttaacgttgtgttattgatgctgatgtgtgtagggtcgtgttgtggttaactgtgttgattgatttggtttctgggggaccagtttggtttttggttttggtaagcttttatatatatatatacatccaatccatgatgagcctttggtgatctaaagaagcaaatctgaatagagaggagagagcagaggtgagagtgtgattcagttttcactgttcatttttttggattcgatctgtagattctgcttttgtttcattgctttttttataaaaaaaaataattattttgacatactttcagcttcggatacttgtgacttgaaaggtgattggatgctcttctctggcatgtctcagttttcatgtttgagattctttttgttcttctttgaattagtgaagttgagtaaatcaaatggtttctatgatttgatccaattgtttttttaattggacaagagaatgatttggttctccttttgaactttgaagatgcagtcctgaatctaattgaagcaattgattctgtctgtgactccaaaactaattctaaagtacctttcagtatgcatgtacttagatcctgtccaattctttgcagagtgcttgctcatcacttttttcccataaatctttgcattcatagacttgagactaattaaattgcaaattctgatatgtgctatctggttattagacagctaaa

SEQ ID NO: 20233 - DNA, 827 bp, Glycine max
  Intron number 4 from transcript Glyma03g27170.1 (locus Gly ma03g27170) derived from phytozome v7.0 (chr-ID Gm03; pos 34700122 to 34700948)
cggctcatactatattggaaacaggtgctttcattgctgcccatccgaacctttgaccattaaaaaaaatactaatgaaaaaaaagcaagaaaatgtatttagatgtttacccatgttggttattttttttttcaagtgctggggcataattcttgcttagttattgcttatggcttctgtatttgtgggggcattctatggttagtaatgtttgggtataacccgtaaatcctactactatattttcttcagtgcaatgggaatacatgtgaaataaatcttttcccccttgttatatgtttttcatattatagtggatctaatgagaagtttcgggtctgggttatcaacaattttgttatttgatgtgagaaacgatgcgatgcaatcatgtctcactggtgcttttgaccgtttctcttttcttgttcataaatcttttcaagatgtttaaattgcccgtcatactatttatttgttctacctgattgtggcaggcaatttctttatgtgattgcaaaccctgctacactgaaatgaatgtaattttacctaaatgtggccttatctagaactaaatctgaattgttgaaataggaactttctgatgatttttataatttatttttaatcctggaacaaagaatatgtacattgttattattattattatttttattgggacagtcctctgtttgaatatagctatgctatgagttcttattgaaaaactaatttctgataacaattagttgatatctcctttttactgaccatgtaattatgtacagatcaaacacagcttgactttgaggcaaagagacta

SEQ ID NO: 20234 - DNA, 867 bp, Glycine max
  Intron number 1 from transcript Glyma02g16750.1 (locus Gly ma02g16750) derived from phytozome v7.0 (chr-ID Gm02; pos 15114973 to 15115839)
ccaaatcaagttggcccgaacgttatttgtatgaatacataacattggtttttattacaaacaaatagtccatttttagcaacatattttttttaaaaaaaaataatttttacaaaatattatcttaaaaatgtggttaaaaaataattatttcatcaaaataaactaatccaaatgcgggcataattaaaaatatagtcaacctagagttgtatataagttgacttataaaaaaagaactttattttaatattatgatgtattgtgcctatcaaaatatgagactaatttaaagatatcttaaaacaaaatattggtgcaaatttaaatatatttttctctttattgtaaagtaagagaatatttaaccctattatgtgagacaagatgagtggaaaagctgctctaaccactaaacgctagctacctcttagcagaaaacaccacacacacatgtatagacaaattcaaaacgaacaaaaattagggaataatcagaaagaccttatcatacaaatattctttatgcaatttgccgctccttgccctataacccactaaagatagaacctaccgtgcccactggtttcagaaacaagatgactttgaagagcttcgttgagcatttcagtggaccattaacatttttctatatggcataaagtttatataaatattggcagaatatttgacgacaacaagttgacaatcaataattaaattcatgaacagagctgcagagagtgacagttttgacctcttcgcactttgtctacgctataaatactccacgcacacccctctgtttctcaatttactacttcacttctagtgtgagctagctagcttaattcgacaagcccttcc

SEQ ID NO: 20235 - DNA, 480 bp, Glycine max
  Intron number 2 from transcript Glyma02g13770.1 (locus Gly ma02g13770) derived from phytozome v7.0 (chr-ID Gm02; pos 12089793 to 12090272)
ctatcctaggaaacaagtaaatattcaacaccactatagtacttttttttgtgtttcgatgttaattatattcttaactagaggcctgctcttatagccggagaactttattgcaatttccattaatttatatcggttagttatgcttgtagtcgccactaattccataattaaatttctcttcaataactatttttttatgcattatatatatgtggaggaattttgtaataatctaatagaatagatgagcaaatgaatcatattaatttgattaattattctgaagcaagattttaaatatcggttgcagtcgtattgtgattttattacatttgatgatatctcagataaatacaacaatgtgattgcagataattaaaaaatattaatgttgcagtccaaatcaaattggttgattattttttaaaaccttgttctgaagcttatgtactttagttttttttctcctttgagtag

SEQ ID NO: 20236 - DNA, 847 bp, Glycine max
  Intron number 1 from transcript Glyma05g00330.1 (locus Gly ma05g00330) derived from phytozome v7.0 (chr-ID Gm05; pos 130742 to 131588)
ctctcttcgtaaatcgtgtgtcttccaccaatcaggtacgcacgtgggtgttctcatcaactccttcctcgtagtaattgtcggatactctagtttttcagttatgcttttgtttagcactagcaatagcagcttgcttgctacctgatctgtcaatactgcgtcgtttaggtccaaggatgtacgctattttgttgttccagccttttcccacttttttaaattctcagtttcgcatggttctgatgtagactttgattttgtttagggtttttactaggactttataattctcatgatttgtggggttttccacttctaaattgtgtataattgctttgctgatccaatgttccatgtttctggattaggatcatgattttactgttctctagtggcttgattagggtgttatattacgtaagcacttatatactgttataaatttacactaaagtcctcacacttgatacttagtaaatgtgaagtttcatctctgcaccctacatttgtgttttccactctatttgtaggttctgatctgactcttcgcaattgctttcacactaaattatgatttcaacacaccgagtgtctttttggattggtttattttgagatttttttgcagctttttaagagagttttttttacactatttttttaaaaggattttgtttggtcctttttttatgacatatatgttatgcaaattctttggttaatttgagatgggagtggggcatagcagggcaagctgaaatatttctcatgctttccacaaacaagatttatccgtcgttaatgattttttcagctttacattaatgtaaatttaaaattgcag

SEQ ID NO: 20237 - DNA, 604 bp, Glycine max
  Intron number 1 from transcript Glyma04g17730.1 (locus Gly ma04g17730) derived from phytozome v7.0 (chr-ID Gm04; pos 19264567 to 19265170 reverse strand)
tcctaagagcttagctactagctcttttcatcaaggtgctttcactttctctttttttttctcactttctttcactcatcaaagaaattaagtaaattaaatgttcatttttcccaaattaaatgacatcatgtgatttatataagtatagtccaatccatgtaatcgacttcagttatcagaataagtctttttttttttattattgttgttcatttttctcctatagggatatattatttgatgtcacattagtcctttatttatagggaacattaacatgtatgctacaatttttgtgcttttaaagcaaattggatgtcacatattgaaaaaaaaaatgatagaaaaaattgatgcttaagatgaatttaagggttcatgagaatacatttcatgtcacttattggaacaattagatatacttgaagagaagaaatcaggccccacattaacttttatgctataatttttgtgtttttaattgtatgacacttattggaaaaatttgatagaataaattgatgattaagatgaatttgagggttcatgagatttatatatacttgaaatgatcagaaatgtggcaccatatgaattgcag

SEQ ID NO: 20238 - DNA, 845 bp, Glycine max
  Intron number 1 from transcript Glyma01g22830.1 (locus Gly ma01g22830) derived from phytozome v7.0 (chr-ID Gm01; pos 28986928 to 28987772 reverse strand)
caccttcgcccttcccggcggccacctcgaattcggtcaatccctttctctcttctattttattttatatttaaaagaagaaatgtcgtctgacatttcattttggacacttttttttttgttagtagtattagttttttgtgaatgaaagggaaaaaaaaccccaaaacactgcacatgagactcatcaaataataaaaatgagtcattgtaaactactataataggagttcctatatcatttttatttatttttaggttgtgtttagacttacaactttatgcaaattatgtaaatattttattattaattcgatcttagttagtgttgcatagtttttaaagtagaaacttattttataaatttaatttcatgtattatgtttagaacaaagatttatatatcgttaattaattaaaaataaaaatattaataatatattttttaacatgttcttttatatgtattctctgaaatataatctttatcattaattaaaatttaatggaaaataatttttttaaaagaatgttactcatgtttttaataaattttaactaataattaaaaaaaatgtgttagatgagaatgttgttgctaataatttttaattaaaaattactctaagcaaatcttttaaagtaattattataaataaataaaaaactaccatctataataacttataattaaaatccttttatcaaactaattgagttaggcagacggtttgtatgaggtcttatatcaaacttattgagtaaaaccagtagattttaactaaattctattttatctaactaatttgggggcatgttaacttttcaggggagagttttgaaga

SEQ ID NO: 20239 - DNA, 765 bp, Glycine max
  Intron number 1 from transcript Glyma02g45950.1 (locus Gly ma02g45950) derived from phytozome v7.0 (chr-ID Gm02; pos 50051586 to 50052350 reverse strand)
caatttccaaggcccactcctcttaccctcaacaggtgctcaaccaacctctctttcattcctcatattcatacataaatataatacttttgtgctatttattccctacgtgatcaatcttacagtacctgatttctttcgtatttgattgtattaaggtgttcagttgtgagggttctttttttttttttaatatagggttgtattttcaaaattattctctgtttcatgttatcgagtttaattatttatatggtgaataaaaaaaattatattattaatcaatcagaaattatcgctgataagactattaagacagtgactttggtagcatgtctccggggttcaagatataaccctgtaaggtttctttggtgatgaaattctaacttgatccaataattttctgtcactcttgtattgggtttatagttcatgaactgggttctagtcgtaaatcttcaaaagacattttttatttgtgatagttggtgatttgttatagtatctatgcacagacaatgattattgtttatctcattatctgcttattttgcaacttgaacagtttgtttcgcttactaggaattatttgccaattctaggacaaatattctgtgaactgaacagtcaaccgtgcttgttttattaagcaatcatatcggcctctttatgcatgttcgtttatggtgactattcaacttaagtttctttgatgccaaatgtttgttccaggtacacatttctttggcaggagacaagcac

SEQ ID NO: 20240 - DNA, 465 bp, Glycine max
  Intron number 1 from transcript Glyma01g31910.1 (locus Gly ma01g31910) derived from phytozome v7.0 (chr-ID Gm01; pos 43154661 to 43155125)
tattggaataattttgacaagttcgaagaatacaggtacaagctgaaacttttattgttttcaattcggttgtaaatgtgatgtggttttgtgaggaatctggctgaagattaatgggttttagtcaaaatttgattttgcttaagaatttaattgcaatataccaacacagacttatattagaaaaattgttaaacattatgagattgtgcggttctgatcaatcttcttgtaacacatgcgattatgcatcacaaacagagattacatggtcttaaatcatacaaaaattatattatcatataattgaaaattattgatttttttttcataattacgattaaagcaatacttgtaatttctaattagctgattatgtaaaaatttgtacttattgtgatcaaactcttcatttgatgaagtaatgtggttgaagttgaatttgaatttttggattatagatac

SEQ ID NO: 20241 - DNA, 907 bp, Glycine max
  Intron number 2 from transcript Glyma01g31910.1 (locus Gly ma01g31910) derived from phytozome v7.0 (chr-ID Gm01; pos 43155223 to 43156129)
aaactgaagggttgattgattttgttggggatcaggtttggcattctttcttctcccatcacaactagttcgttggtgctctatttctatactcaactttggttctctgaataatgagagcttcgggggaatcaaattcagtgctgaaattgagttgaactgaacattttttacaagactgatgatttaaaagaaaaataattaatgagctggttgtaatattgcattagtttttttgtccctattggctgtgtggtagactgaagtttaacctaactagtggtgagttacactagcaagtaatgtttaaaaagctggattgaaaactagacacttctatttggtgttatccttcggaaggaataaaattctaaactatttcttctagtaatctatgatgactaaagtgttattctaataaggatgtgataaagataaaaataagggtataatgtgttttagatgttttaaattttagttaaaatttctcttaattcttttattgtaaaataataatttagggtgacatacaaaattaattatttataaaaaaaaagatcaaaattaaagagatctaactcaactgattgagtagtgtgtgtgacttgttataaattttataatactaaagtttgatttctccctttgaataaaaaaaaaattaaaaagtctcagatcaattttgacaaaaaaaaaaagtgaagggcctaaaatatattttataaaaaaaatattaaaaagtttatgtaaaaaatagtattactcaaacaggattaaggccatatcactggcttctatatgttatcttttgatagattatgaaatgttaacaaattttagctaaggttgattggcaaattgtttggtttcaggttgtggcatatctcttgatatcatcaacgtcttc

SEQ ID NO: 20242 - DNA, 371 bp, Glycine max
  Intron number 1 from transcript Glyma02g02300.2 (locus Gly ma02g02300) derived from phytozome v7.0 (chr-ID Gm02; pos 1669155 to 1669525)
tcgtcttgaaccaaactggacccaaagccttctagggaaagagactcaaatgaatactaaaatcaggtcaatcccacaattttacactctaatttaattcaaaaactttgtttcaattcactttcttttcgtttcatactcgggaaagcacattaatttggtagagtggaagtgaatagaatggaagagaatttaaaaaaaaaaagcttaataaaagtgtgggattcacgtatattttttaaattttctctttctttctcttatttcttcgcaactaaactcacctggtttcgtttcgcattctttcttatgcaccttctgcacaatcccttacaggtattttggtggtgttctttcttggggggtgagta

SEQ ID NO: 20243 - DNA, 1005 bp, Glycine max
  Intron number 1 from transcript Glyma03g03850.1 (locus Gly ma03g03850) derived from phytozome v7.0 (chr-ID Gm03; pos 3721134 to 3722138 reverse strand)
caccaaagttggcactggcaactatttcacagcaggtgggttggtacagtgtgacattttttatttacttattataattaagacagaatcacctaattgtgactgttttttcagacttattggaagtctcaaactctccatcaatatatatatatatatatataatgcatcttgatctagacagagatgacaaaataaatgctggtcataacgtttacttaataaaataagtcagttggatagtataatttaacaagtcaagaagtggataagttaagttgacatgtgagattatttaattgatgattatagttgttattatcacagcttatcttgatcggatgaagctaattattttgattataataattatggtgacaaaaattatgataattacgatgatggtgataatgattagttaataataattttaaaaaataaaaacatgataattgagattttattaaatatggtaatatttttaaagatttaatttttattttgtgatattttttagatttgatgattacatgaatttttaagtattgacctaatgattgatattaatttttatcactttcacaagtaggcaagtattttcactagagtgagactatatatatgaagataattcattttttaaattttaataattgaattatttattcatcagaagtattatatcatatattattctattgtagaattaattagttccattttccccttaattatatagaattgctgttttagagtaccatcgtagtaatttttatattgtgcttgagttttcatcatataattattaatttatatgtggaattataggtgcacctcttggatatgtttaagttaagtttcttgacatagatatagccatattagtcgacaggaaattttctaaaacgtgaaagaatttgaattattaaaataatcgtatatgacaatttttaaattattaccaatgcaggtgaggaagggggaatcagaactactcttgagtct

SEQ ID NO: 20244 - DNA, 271 bp, Glycine max
  Intron number 1 from transcript Glyma03g34830.1 (locus Gly ma03g34830) derived from phytozome v7.0 (chr-ID Gm03; pos 42132046 to 42132316)
agatctttgacagtcgtggcaatccaaccgtcgaggttcgtttcttccacttcctctcccatttccatacttctgcactttatttttcactttccacatcacttttctgttattattactcggtatttttatttactcttttttttatagcttttattccacacagattttattttcatgtctgaatttgaatctgatgaggtagagtgtttgtttacaattagaaacttatctgatgtgatggatgattgctataataggtggatttgac

SEQ ID NO: 20245 - DNA, 532 bp, Glycine max
  Intron number 2 from transcript Glyma04g08800.2 (locus Gly ma04g08800) derived from phytozome v7.0 (chr-ID Gm04; pos 6919536 to 6920067)
gatacctctgagattgtcgccatcaaggttagtcttcttttatttctgggttctcgcccctttaccgtgccactcaaatttcgtttgtgttgaatattaggacctgcttaggttgaaattttgtttttacaaattactgtaaaagtatttttatttttttaattgtatcttatacagatccttggaaacaagaaatgccaaaataatgtgaatggaaatgtaaaataggttcttaatttacataattttagtctcagttttatttttcatgtgcgcttcctcagcatgcggatgctggatatgtgcggttgattacatggagttagggataagtgttggaaacttggaataagcatagtccgtagtgcataaaaatgaataaaagcttgtgtcaagttttaatagagaactttgcttgttagatgtcatattcaattattcaagaaatataccaatggtctaattgtgagttatgttgctgtgttctaatgttgtaggaaagcaagaagaccaaacatccacagctattgta

SEQ ID NO: 20246 - DNA, 781 bp, Glycine max
  Intron number 2 from transcript Glyma03g38860.2 (locus Gly ma03g38860) derived from phytozome v7.0 (chr-ID Gm03; pos 45144168 to 45144948 reverse strand)
acactgaatcttcaaattccaatagaattatttgggtgagttgcccctgtactcgatctatagcgtcactgtttgtgctcatagctttgtgtattcattcttaagtgctggtcatttatgtaattaattcgtacctgtcaattaatttcccactgaacctggatatgttatgttattctagctgaattatcttgcaaaaaagaaataaaaaaccaagaaggagaataacattatcatccaacatggtagatagcacaatccaagactgtcagtcacattccttgtgaatttctgaacacaccaataaaagtctgcaggaactgcagaggaacaacctaacactgctccaataacttaaaataagcattgctcactgtgaaatggattgagtctttgtgactactatagtaattactctattaaaatctgctcattaaatactgtgaagatcatattgttaacgttttgtttgtgattaaatcagttgactttggacttctatttttagtacttttacacattaattcaaaggctgaacaaaaaaggatggcaatgaaagcttgagcatctaaatagtaaatatcatgttatagtcataagaagtctcggaatgaatagtgagaaaataaccagttgactgggatttttcgttggttaggctcagatatatctttattaagttgaatatatttttttattcctccatccctgcaagccctggctgtttctgatttttgtttattcagctgcattttggggttaacagtggtgcaacaaggtt

SEQ ID NO: 20247 - DNA, 670 bp, Glycine max
  Intron number 1 from transcript Glyma03g38860.2 (locus Gly ma03g38860) derived from phytozome v7.0 (chr-ID Gm03; pos 45145214 to 45145883 reverse strand)
tctcgtctctaattattgtaagaccttctctctctctctctcaatcaaagttccgttgcgttttctccttcaatttttctaatttatggctctttgatcatttgggtgcgtgatcatcatctttttctcaattttattttgatggggtcttgggtttacggttctactacaattcagcaatgaacaaagtgctttgcttcctccgtaactgttatctatctgaaaagttaaaaactctggtctcatatgcgattattcttctttgcatcacacttgaaactgatttttgtgttgttggtggttactcatatcttagattagtgaattatgagattatgtaaagacccgtttcttctgattctggtttcccttttttgccgttttttggttttttgttgaaatggttgcacttttttctttcactgcctcgtgcttcgaaaaattccgaagtgaacttcttttctggtactttatgcaattcatcaatgataatattaatatctgaactctatgttgaatcaaagtttgcttgatgtgtttctaaataatttctttggatatgatccaccatgtaggaaaatatttcaatttttctgtcccataatatgctcaaaagttcttatctattgatgcaggtatttggaaaatagttttgagttgaggatctaat

SEQ ID NO: 20248 - DNA, 600 bp, Glycine max
  Intron number 4 from transcript Glyma03g28000.1 (locus Gly ma03g28000) derived from phytozome v7.0 (chr-ID Gm03; pos 35808080 to 35808679 reverse strand)
aaggacattcgtcaacttgccaggactctcatcaagtacgaattagtttttcgttgatgtgtgttttttctatgtaccatttggttaattggtttgttttatagaaggtaggtgggcctgtttatctttggctacatggatcaaagaaatggcatctaattggttgttttttattccaattagtggtttggtattctcattgtgtgtgagagagagagagaatgaaggtcaatattattcatttttgttgtgatgacccatttgtggtttattgttgtagtatggctgaagatcaatcatcttcaactaattaaccgatgtctcagttgcattagcaggcttatgagttgttagatgtagtttgtcttaatttgtttcttagttcatcttacttgtgattcttttttagcttcaataaaggtctttagatagatgaatagccaattaaggttccacgcatatcatacttatgcaagcacatttcatctacttaagttagctattattcttttttggtgtatggcttaattttgttcacttgtgttctgaacaacttgcattctaaacttttcctcctgactttgcagtggctggaaagaa

SEQ ID NO: 20249 - DNA, 515 bp, Glycine max
  Intron number 1 from transcript Glyma03g28000.1 (locus Gly ma03g28000) derived from phytozome v7.0 (chr-ID Gm03; pos 35809694 to 35810208 reverse strand)
acattacgtacccacacacactactactgcaataggtagaaataaacaaagaaacatccagattttttttttcaccgtttcttttgattatttcccgggtgtccaatttttctttttattattgttttttttacaacaaccggagagaaagttctttcttttcttttcttttcccctgaggttttggtctgtaacgccagaatctgaaacagcaacaacccaacaacacaaaaacacgacgacgttgtttcttgtcatttattaacatacgcgttttttgtgtgtgtgttggtttatggtttctgttgttgttgttgttgttgttcgaatccacttccgttttgcggcacattaatccaatccaattttgccaaaacggggacacccggcgtgaaaaatcatagtaaattcaaaaactttaatgattgatcgtcgaaaatcttgttacccttttgaccgtctcatcattgctttgttcaggggatcgagaaaaacaaacagcatcatcccagtga

SEQ ID NO: 20250 - DNA, 544 bp, Glycine max
  Intron number 1 from transcript Glyma05g00400.1 (locus Gly ma05g00400) derived from phytozome v7.0 (chr-ID Gm05; pos 177678 to 178221)
tttaggaaaagacactgtctcgcgagtgaacacaggtaatctcaattattcaatcttcttctttttcttcttcagttttcaccatgtttctcttcgtttttgtttaatctcactttttttccctttcatttccttttgattcgatttatctgtttactttttttcgtgtagatcaaatatattgctaggtatggtattatacgcgtttttcttttccgttttcaaccggcgaacttgttttcttcggtgatcgtgaaatctgtcttgaaatcagagagtttgagatttgaacttgttttgatattagttttgttggctgctgagtgaacttgaatattttctctctggataagcgaagtttgttacgttgctgtctttagggttcttgtttagaaccaaaacaaagaaatggtttaacatttcatataggtttatggttaggattgggttttctgatacttgaggtgttaatagtttttaaatgtgtgttttaagctatatggtgtacagagtcattgacatatgtttccttcaggttacagca

SEQ ID NO: 20251 - DNA, 168 bp, Glycine max
  Intron number 2 from transcript Glyma05g00400.1 (locus Gly ma05g00400) derived from phytozome v7.0 (chr-ID Gm05; pos 178329 to 178496)
gtcatctgctccaagcacaaagctgtttatcggaggtgctttcgaacttcattttgagttggatgctttttatgtttttttcttctttgcatagttgataataatgatctgtgtacatatttgtatgtaacaggtgtttcatattctactgacgagcaaagtttgagg

SEQ ID NO: 20252 - DNA, 971 bp, Glycine max
  Intron number 1 from transcript Glyma02g37820.1 (locus Gly ma02g37820) derived from phytozome v7.0 (chr-ID Gm02; pos 43133933 to 43134903)
gagactttactttctgaggttttaacccctttaaggtataatactgattgattaatatcgtttctctgttcatttttttttctcacttttttccctcaactagcggtttgtggattctctgaatgattgaatctttgtaaaaaattcgtacttttgtcgtttcggcttctgggttttatgtttttcaccttgttttatcttattttggagtaaagacatgttttttgtgtgtttattgaaacgtttaaatgttaaatgaataaatgtgtaatctttttttttttttttggggggggggggggggggggggggggggggtgagtaattgaaaatttttcctgataaaaatgggttcggtgaccttgatggtgcccgcgttggaaatttgtctgtgttgcctattttaaggttttgctattttttgttcttgctttttactgtttttctgttttgaatctggcattgttttaattatgtgtcaaagatgggtttattcctcttgattctgcttgctgagaaaatgggtgtcttccctcaatgtacttaggattactgtttatcttttggttttgttttttggtgtatatacaaatgtattgtggctattgccctttcttataactagtagcaaattttaggacacatgcttgctaataatttgtattgcccttttttatgactagtaaatcgttgttttttgaggtcgaaaacacgtgaataacgcagctgcaaaattcaactcttccagcttttagtgcttgaaattcaagtagtagcacctaacattttctgaatttgattgcttcatcaactcgtttttcgtgtgcttttctataagcttgtttttgatgagtttcttctttaaaacgttggatttcctaattttctgttgtcaacattatttttcaaatggtgtgctaactgagttctttataggctttccctaacttgaggctgtgctcatttgctga

SEQ ID NO: 20253 - DNA, 834 bp, Glycine max
  Intron number 2 from transcript Glyma02g37820.1 (locus Gly ma02g37820) derived from phytozome v7.0 (chr-ID Gm02; pos 43135368 to 43136201)
gggtgttgggaactttccagacagttattcaggtgagttttttttttttttttattaacacatgttgtagtttacatttgcgctgttttaaacttgattttctctttatgttttgcataatggatagttagctatttagcatttgaaaaatgcatggattcgggtttgaacaataaacattagttgaattgttgaaaatgtaaaagctattcaaaatgttggtttggttgtctttaattgttgttgggtttgagcatgtgatactgatttctgtcaaaacacagtttaggcattggttccaccagctgctgaagtccaacatgaatgcattagttaaaaaaagagattagctagatataattttttgcttagacctaaccagactgaagtatgccattttgcatttagtgttatatctaatttatttttctgagaggaagttgcttcattttgttataaaagaagataaagataaacagagaattcaacaatcttgctgcatttttatttaagcaccataagaggcaaacatgatttgggggcgattcattaattattttttgctttagaataagatttaccattttgttggctggaaacaacaaacctattagcaataattaagagtgtacttggatttatatctagtatgataccttgtgatgtgacctgtgaggttaatgttaatttggactttgtgcatatatttgtggctggttatgacatttattcagatttgctttttcttatggtggggctagagttgtaacatttatgtcttttctgcccttgtctgcagagagcaaaaaatttgtggaagactggctctcttct

SEQ ID NO: 20254 - DNA, 935 bp, Glycine max
  Intron number 1 from transcript Glyma03g04400.1 (locus Gly ma03g04400) derived from phytozome v7.0 (chr-ID Gm03; pos 4519468 to 4520402 reverse strand)
tgcgtcagagttctggggtccgcagttttccagaggtaaatttagcaattgaaaattttccccttttttagaattactttttcttgttttgtgagaatgttttggtgaaaaattgtcaaggttttaaattgcggtcagggttttgatgcattcctagataatgataacgtgggaaattgtagacaaatgcacggatgaggccacaattgcagtcacagacacttcaaaaaccttagcattgcagcaaaaattgcggtcatggactgtattttaaaaccttgaaatttctttcccgaatgtaatttaacatgtttttttgtttatttatgcttaattgtttgtgctagtataggggacatatctatgggatgtttgatgaatttgacagtggttttgagttgctttttatgattgtggagaagagatggtcctggtgtaatgaaattgaggtgtggaatggctgctagcaatgaatctgtgaaaaccctcaaagtgattttgttgaggatggttttatttgtcatgtgtaatatgggatttgtaagggagggggagggttaagaaatggtgcttgagcatttgtcaattatgtaggcatgtaacttaaactaaaataattaaaggaggacctatcttatgatagatagcttgtaccagccttagcatggacgctgatattagcaatggcagagactggttcctttagaagatttttttgtttagcagaaatttccaaatcatatattcatatgtactactgacatttatcctttatggtatctgtcgtttttataaattgctttcataatactcaggttgacttcctgatattttgcatgcattaagtttgagacaaacaaaatattaaaatttgagattacactgtactaaagaaatgctttctcaaatttatgattattctgctgtggctgcag

SEQ ID NO: 20255 - DNA, 668 bp, Glycine max
  Intron number 1 from transcript Glyma01g43380.1 (locus Gly ma01g43380) derived from phytozome v7.0 (chr-ID Gm01; pos 54415913 to 54416580 reverse strand)
aagtctctcgtcgccggtggagttgccggtggagtgtgagttcatttcactctgcattatttcttttcttttggtgcttgtcgcgcgcaactttgctttattatactgttgttgctttactcgctcgcgttcttctttattttgttttcttttcattcttcttgcgattcttgcccttcgttttcctctgtttttctcttgagatcgatgttttcattatattgcatgctcgaggtcatgatatatatatatttctttgacgtttattgaattactgaattagtagatccataggaataggatgatagtcaaatctagtgggttaaagtctgtttgtgaccatgttaatctttttttttttttttttggtgtgctaaacatgtttgttaattaaaattattactataattattggtatttgactatttgtcattaactttacaaaacaagctacatagctatagctttttcttggcatcaatgacgcagattttaccttagaaaatgttttataaacatttaaaatgagacgataaaaaattgtttcttttaatttttgatgaattttttactattgatcttgcactatgatatagtcaagcattatatctccaacttctattatatttataggtcacgaactgcggtagctcctctggagagattga

SEQ ID NO: 20256 - DNA, 442 bp, Glycine max
  Intron number 1 from transcript Glyma04g24440.1 (locus Gly ma04g24440) derived from phytozome v7.0 (chr-ID Gm04; pos 28134560 to 28135001)
gcaaaccctcagcctcgcctctgcctcagcctcaggttttgtatttcgtagccttcctttcaatcgctcgctagatcgcgtttttaggcactctttgagtgagccctttctttttttttttttgggcaaatggtagttttgttaacagagaggatgacccgggacctttcccgtctttctttctcccttgaccatccaacccaccttatatctcaattgcttgagtgacctaacttttcaaaacatttatttatttatgttcttttctcgcattcattaacatgtcatctgcatcattgcctagctcttacttttcggaatcatggaagaagcgctttgtttgttcacgagagatgttgaaattttgtggcttgtttgttttttttaacttgttattcttctccttcctgtgcttgcgtgcgtgcttgccatcattttagca

SEQ ID NO: 20257 - DNA, 977 bp, Glycine max
  Intron number 1 from transcript Glyma04g08440.1 (locus Gly ma04g08440) derived from phytozome v7.0 (chr-ID Gm04; pos 6614482 to 6615458)
ctactccttctcttgtggttagagacacagtaagaactctaactctcactcatcttttcgcctttgaattatggttatgaaaaaaaagaaaacaagaaagaaaaatctgtgctttttttttttttttcttttcttctttccaatagttcatgtccctccttatttggaatttctgatttaatatggaaaaggttcgtttgcaacaagacgcccacttttttttaatcgtgttgtgttgttgtgacttttgtcatgtttcgaaatatacaccgtttgctttgcaaattaaaccaacgatggggattttaccttttttcttctcatgcaaaaattcataaactttcgtgaaatatactgttacaggttcgtacataaaattttgcatcactcaccactatctcactatctgaaaaacgaaattgcaaggcttcttgtgttctttctgaaaactaaatggaatcagtccaagtaagattcatgtaaatatccacaaattgggcttttctagtctaacacacaaacttcatacaaattacaaaaccctcgtttcattcttgcatcgatcggcttcaagttccaatagattgtttaaaaatgattcagaagctttttaattttaatttactttattaaaaaaaaattcttttgaggaacacgagtcttaaaatttgatcttgaactttcttggatttttaattaagcatgcgcaacataggtgtgtgtgtgtgtgtgagatcagtgatattttcattatttggaacccaaaacttctctttctcttgtttcaatttttttgagtgttatcccaaaaaaatcaggaggtaaaagtcctcgtgcatcaactcccaccttttaattattttaatctttggagtactgaagttgttttgtttttacattttagtaattaatattgttggtgttaaatatttttttggtggtttggtttggttaaggtacacgtcttaccacgagag

SEQ ID NO: 20258 - DNA, 698 bp, Glycine max
  Intron number 1 from transcript Glyma03g01410.1 (locus Gly ma03g01410) derived from phytozome v7.0 (chr-ID Gm03; pos 1144870 to 1145567 reverse strand)
aagcaccgttgtccgtcgccgttcagaaattagaggtcccacttcacattctctcactctcactttttctattttctttcttttttcctcctccgattcgtttgtagttacgatacttgcaatattgtaactactcactttaattttcgttttttcgcgcattttttataatatttttctgagtttttgcttaactggtctgcagaaacatggaggcaatctaaataaagctcttgaagaattttatgaaaaggattcgctccagtatggcaatgtgcttcttaattttatttttctttcatacctttgaaattgaaatctttataaatgataattattgttattttttttactaaacatgttttaagaagccgagtttaattaatttctttgatttattttatgtactaatagtttgtatgattcttgtttcgactagaaacccaagtcaaaatgagcaacatcgtagccaaaagggcttaacagtggcggaatttttggaagcatatcccaaagtataatactcatagcatgattctctcactctcacactttttctattttctttcttttttcctcctccgattcgtttgtacttacgatacttgcaatattgtaactactcactttaattttcgttttttcgtgcattttttttaatatttttctgagtttttgcttaactggtctgcagaaac

SEQ ID NO: 20259 - DNA, 685 bp, Glycine max
  Intron number 2 from transcript Glyma03g16360.1 (locus Gly ma03g16360) derived from phytozome v7.0 (chr-ID Gm03; pos 20753276 to 20753960 reverse strand)
atattagaggtgattgatttattaaagtttgattaccattggtataggatttctagaaattaatattagataaaatttctcaagaagtatttatagaaaaagaaaataagtaggttaaatgaaataaacttctcccatgagttaaaattaagttatgtaaaagtaaatattttttttttgaaaaaaactaaatgctagaacttctataaaatgactaatgcatatactaattttaatgtaaaggagaagcttaatttattttatcttcttattttcttctcctattagtgcttattaattgtcaacttttccaaataaaccaaaagaaaaaagaaaagagctagcaacacactctcaaatacattcatttggacacacttgttgattaaaaatttattaaacaatacaaaatttggtgagtctcacttcttataaatgattttctatcatgatttatagtttcttataaatttcaacaaataatagagagtgtgtctaaaagagtttattagagagtgtgttgtcaacatttttcttagaaaataattacttttgttattagttactctttcttttgacaaattgttattagttacttatgatttatcttttttaataattaattgtgtttccttataattaacttgtagggtttggttgaggagacaaagttggactcatttaa

SEQ ID NO: 20260 - DNA, 636 bp, Glycine max
  Intron number 2 from transcript Glyma02g29250.1 (locus Gly ma02g29250) derived from phytozome v7.0 (chr-ID Gm02; pos 30742101 to 30742736 reverse strand)
cgttctcttcacggtaagtaagatctctttgtctgcttctgcatgtaatgcttgcttgcatgctccatactggagcgaaactgttggtcagttgattaattttttttattttgtattttatattggggtaataatctaatacaatgtatgcaaaagttaggaattgttaggtaacttaagctgaggctgtattatgtgtgcataactatctgtgtgtttgagctctggaactgatatctacaagatattgttccagaagctgtgtacaaattcacaaaataaggaaacacaagacactgcaggaaatttgagcatctctcttccttacaccccaaagtcaaccttactttttcatttactggccatctcaaagtttaccattatatctatgtagagttaatcaatttttttccgcacctggggattttatttggtgtctccaagaatttgtctatctagatatttcattgtatacaattcagtaggattaatatttccattcttctttatagtaactacctttctagtgccatatatatacacatctactaacatgtgtattatgaacttctgctcctaattgttgtttatgcatcataattcacaatagttaaacactatgcaggttcacatctg

SEQ ID NO: 20261 - DNA, 842 bp, Glycine max
  Intron number 1 from transcript Glyma03g24990.1 (locus Gly ma03g24990) derived from phytozome v7.0 (chr-ID Gm03; pos 31920611 to 31921452 reverse strand)
actcttcttccgttctttttcttcagcaactcaaggtgaaaaaagagagatcgttgttgcagttttctgaatttctgtttttgattgtgaaatttggtgaaatagttagcaggtttagtagtagaattaaggattgacaaatttgttaggcgtcgtagtagttggattgcgcttttattcttgaatttgcagttcgattacgctttttaattgatggaatcagtagtagtagtagtagtaatagttcaacctcactcttcttttgttatttttcttcagcagcttataaggtgagtgagatcattgttagaattttctagagtcctgctttaatcgtgtctgattgattgctggttgcttcggtgttggaattttctagaatcctatttttaattgtggaaattggtgaaagaattactgggcttagtggcaaggttttaaattgcggttgcgtaccatttgttgaaactttgcttagtagtatagtaccatttgttgaaactttgcttagtagtatagattttattttttttagcctgcgtattaaggataggacattggtgaaggggttttgtggtttaagactatgtttggatatcccaattccaataatgtaaactgatgttcatacattccaaaacatggaatggagaaccaaaagattttgtcattcgtgttgaatgtaggtttagttaatttaattcaactgataaccaaacacactctaaatgttttgttggtagtctaggattgtgcttttattcttaaattgaagttaaaagaggtttggttttgtgtgttgattaaccagcaacgcaactttctggtaacaattggggagg

SEQ ID NO: 20262 - DNA, 868 bp, Glycine max
  Intron number 1 from transcript Glyma03g24050.1 (locus Gly ma03g24050) derived from phytozome v7.0 (chr-ID Gm03; pos 30731516 to 30732383)
gctccttcacccttgcctctgtatgtcacgcactctctctttcacctcatttttttttaatattattattgttaaatttgaaattttggcttctactacattcttttatgtcttttttcttacatacaaaaataaaaaagcaatttttggtcaaaattgttgttgagccctttacaaaatgattgttttaatgctcgtttagatttctcacgttccctgatagtagaaaattggcaaattgcagacacaaatgcggcaattacagtcgcattgggatcaccgaagtcccataaacgttatcggttctgccaaaatcacagttttgatgacaccttgttcactaatatttttttttaaaaaaacttgctgaggacaaaagttattgtttttttaaaaaataaacagagtaaaaccttgctttcccttaagtaaggtctcagatccagccttgaatgcaaagaacggaaggagagactccactaaatctggttagttaggatattagccattaggaaaagctggtggtggatactctgtgccaatgtcatgataacccaaaaaaaaaaaaaaccaattaaataaatagccaatttaatccccgaaaagttatatcttgctgtcattttagtctttaaaagtaagaaaaactcaaataagtttgtgaaatattttggggtttcattttaagtccttaaaattagtcctttttcttgttatggtccctaatccgggacttaagtgataataataataatgtgaaactaatcaagaatatgtagtattgaaaatacatactacattttaattttaatcatatacaaatgtagctagtaactgttgagtaattgtttgcagccattgaaaggat

SEQ ID NO: 20263 - DNA, 458 bp, Glycine max
  Intron number 3 from transcript Glyma01g18780.1 (locus Gly ma01g18780) derived from phytozome v7.0 (chr-ID Gm01; pos 23304241 to 23304698 reverse strand)
cacttgggttgttagtggttcaccacaaacaaagagtaagcttatatttatattttttcttcatcttgtatgctgtaaaattgaacttagtttgtgctatttgatttggtatgtgttatgccaaatcttgacatctatagagagagcattctcaatgtctttgagcattatgcaagtgtgtgatcattcttgctcagccaatcttcaggcactgcaggctttaattcccttatgggcatggacatctttgtttaatgttttatcacattgatatattcagacttttgttttaattttggagcaatccatggaattattttccaccatttcaagtgtctgacttgagtctaagttccatttgatttttagctgatctcatgctagattggcattttactttaacaatttttttctgttttccagagttgcaggatattctccccaacatcatccaccaa

SEQ ID NO: 20264 - DNA, 459 bp, Glycine max
  Intron number 2 from transcript Glyma05g01300.3 (locus Gly ma05g01300) derived from phytozome v7.0 (chr-ID Gm05; pos 836410 to 836868)
aaacaggcattcaggtgcatccctgtaatgaattatttgtcctgttaacttaatattttattttgaaatatgttccttttgtggcactcacaaaaaactgcttcttagtgagaattcagcttgatattatcaaggttgtattcttttattacttcctcacccttcaaacttcaaacgatgagatatgaattgcctgaggcattatcttactagacaccacttaccacgcctgttgtttgaataggaggttcatgtttgaagcttcaacctgtgtgtgtgacacagggttcatcattttgtgaaaacaaaaaagaaattaaatttcaatttgaagactttagatgagttggtacttggttggaattcaacatttagtttgagacagagatcttgactaaattttttcttgtgtttgacttatcagccttttataaaaagcttgtccagctgtcccaaaca

SEQ ID NO: 20265 - DNA, 709 bp, Glycine max
  Intron number 1 from transcript Glyma02g44560.1 (locus Gly ma02g44560) derived from phytozome v7.0 (chr-ID Gm02; pos 49106287 to 49106995)
ttaacttcagtttctcgcaaccaccccctcgtgaggtaataattagtaatttgccacttttcaatatttttatccaatggttagattttctttcaaatccaaaaaagaaggaaagttgattacatatttttatttcttactgttgaatttaggttggttgtgatttttctgatagaaaatgcatagtttaaaaatagttcagccttatttatagtttaaaaaccaaacacgtattgcaagtgccaagctaatatgagagaggttggcttgtttgtttgaagtctagacgtctatactacaacttaagtaaaatctattagaagaaaatatagttcagttctgttactttctgacaatcatggtaataggatctgtgctacataattataaacaattaagttgtttttttaaataaccatattggattacaaaagaaattgcaggtaaattatttttgtcttcttttctcttctgtgagctctagctttctatgcccccaccttttggtattgcagtttcatcactagcttgcagaaattaatcttgtgttgaagttttaattgtcagttgtttgggaattatggctgagactgagattgcctttcggtgggacagatcactgaaattcaaaattatctagaaagataacatgcttaaatgtaatcacttggcaggtgcttctggagttggctcataaccgcaacaagat

SEQ ID NO: 20266 - DNA, 661 bp, Glycine max
  Intron number 4 from transcript Glyma03g24580.1 (locus Gly ma03g24580) derived from phytozome v7.0 (chr-ID Gm03; pos 31460452 to 31461112 reverse strand)
gataccttgttgagattaaaagtgaagagagcaacatagcatctaacttagccaacttgctatattgatcctcaaactattatgttggatcgagtggcctcagaataattaagaagggggggggttgaattaattattcctaaacctttactaattaaaaaattactcttctaatgcttttactaaattgttaagagaatgaggagtagaagagaaacttaacagaaagtaaaagcggaaattaaatgcttagcgaaaattaaaagagtagggaagaaggaaacaaacacacaagagtttttatactggttcggcaacaacccgtgcctacatccagtccccaagcaacctgcggtccttgaaatttctttcaaccttgtaaaaatccttttacaagcaaagatccacaagggatgtacccttccttgttctctttgaacctagtggatgtaccctccactagaactgatccacaagagatgtaccctctcttgttctcagtcaaacccaagtagatgtaccctctacttataccacaatggatgtaccctccaatgtgttaagacaaagatctcaggctgttaaacctttgatactttgtgaatggggatacaaaagaattctcaggcggttagtcctttgaacacttttgtataaggga

SEQ ID NO: 20267 - DNA, 623 bp, Glycine max
  Intron number 1 from transcript Glyma02g11020.1 (locus Gly ma02g11020) derived from phytozome v7.0 (chr-ID Gm02; pos 9169912 to 9170534 reverse strand)
taaccaaaagcagcatcaagattcatcacagccaagtaagttcttttcagatcactttgctagatctcacacacacaaaaccaacttttcaatgacttagctaatgcacaaaaatcaaaatttagtctaagaaacacaaacacttttcttctttaccgtgtcatcgtgtgagacacgtttccctctgacactctcgaaatttgttcaatacttctttatcaggtgcttaatttaaaaattatttttattaacttaaatacttatgttttgtcatctttacacaacttatacattagaaaaaattataaaagattggtttaaaaagatgattataccatcaatttaaatattttgttatatgttatccatatttaattccattatagtttctatgcttgtgtatatatgatgtcccggtatcctagattttagacattaatcatgccaaaatatctgtctatgttgtgtctggtgtctggtgtcttgcatccgtgtttcagagtccctgcttcataactcctagtaccctctttgagtagcattttctatcatttcttattcatgatgaatttgttcatatctatctagccaaagttcaagagctctttgtctacgaaatcaac

SEQ ID NO: 20268 - DNA, 776 bp, Glycine max
  Intron number 2 from transcript Glyma01g08060.1 (locus Gly ma01g08060) derived from phytozome v7.0 (chr-ID Gm01; pos 9054615 to 9055390 reverse strand)
ggcattgaacaaaggttttgtcagcagtgcagcaggtaattttggtttctttgaatgatatcttacttttcaattttcatacaatcaggtggtcaactcataacatttatgtgagctccttatatttgtttagttggtgaggtacaccaatcctgttggttagaaacaaataaaatttgagcaaattatttgctatagaaaaatgaactaaaaatatcacggtttgtttggtttaaagaactatctttttcatatctggtgttatttctttttgctgttaattacaaaagtgttactttgtcttcactttgtttcttcttttcaaatattgtgcatgaaatgaaatattgttattgaagacataaacaaggtgaagagcaagaaacaaaatgaaaacaagcaaggtaattttttttataattattagtgaaaaagaaaataaaaacagaaccttttcccaaatcaaagactcgcagtgcttctcttatttttactttcatatggttcttctagtgggtcctattaatacaataatttaagagttttctttgcctacaacaaatgtatttcaaatggacgtgacaaatgacaatacattattgatcaaattccaatcaatcaatttatataagcacagattgactgttgtatttcaggtgacctatcttcttgattttgattttaatgtttgcaaagtgaacctgattattacttatgtattgaattacaccatttgttttgttattaaattaggttccatttgcttgtcgagttcg

SEQ ID NO: 20269 - DNA, 821 bp, Glycine max
  Intron number 1 from transcript Glyma01g08060.1 (locus Gly ma01g08060) derived from phytozome v7.0 (chr-ID Gm01; pos 9056049 to 9056869 reverse strand)
ccaaaaccactcacaaggtgccactaatctgtcaggttatttcaagataccatttttctggtgtttggttcccgagaaactgtttacaatatagaatcatggaacagtagaaggccaccaaatcatttcaatttttttcttcaatctgtgtcagcacccttgttttgcattcttcttctggcggtttgtctcctttttcttcttcttcttcagaaaaatgagtcctttcagcttcctttttcatggtctttattctgcttcagcacagtttgagctaccaacattttaactttgtccattggggatttgaatgttgtgagagttggaacatggaagatatctaatcattcaatctgggtttgatttgatttgttttgtttaccctttaaattttttgtctctggttgcttggattacctctgtcaatgtccctgtcaaaaaaaagttgagatttttggatgctatttttggctggtagcaggtcggaggttatgaattttctgtccatgaaacaaagtgggatctgattttctttttctttttctttttccttcttttggtgaaaattttgatttcacaagtttgtgggaatttgttatattttcacatgcttgtcatgcatgtttgttttattttgtttccctagtgttcattagtacatgtactttatttatctacagctataattatgtcttgtgaagtatgtatattatgtatatgtctgaatttggtaaaacttttgattttgtctagggagtaatgtgtttttcttttggattgtgataggtttcttcattatttcacatcatctgtgacttcaa

SEQ ID NO: 20270 - DNA, 402 bp, Glycine max
  Intron number 1 from transcript Glyma01g32680.1 (locus Gly ma01g32680) derived from phytozome v7.0 (chr-ID Gm01; pos 44208359 to 44208760)
ggtgagcacaatatatgaaaaagatttggtttttaatgttttttgaaggtgggggtggcagtgcatgattgattttggatgaaggggattgttagctgttagaagaaaattttggttttttactttttttccttttactttggagttgttgtttatgttggaaggaagattcaggggaggtgggtttattttttgttttaagagtttttttttctttctaattcttggtaggtattgaaatgagggacttggttatagtttaagggtgcagcatgagttacagagaaagaaacaaagggaaaggagaagagaaggaatatgagaacagtactactagaggattggattcaaaatcagtgagtcacaacaatggttcaatagaagaggagctgctaacaattg

SEQ ID NO: 20271 - DNA, 832 bp, Glycine max
  Intron number 5 from transcript Glyma04g08510.1 (locus Gly ma04g08510) derived from phytozome v7.0 (chr-ID Gm04; pos 6668518 to 6669349)
ggacctcatagtctggcgttttccatatttccgttgtatgtgacaccctggctccttttttttcttttcttaatgttaatattcttgctctgaacttgtggtgtatctagctagcctttggctattattaccagttaccactgatgacactgactgctactagttttgtgatgttcttgatgaaatatcaaaatgtttgggttatttatttaatgtcaaattgacaatgaatatattttcctcttttaactatatgtaagttttaaccctccatttagtgatattaatatcgaagagtgggttatggtgtatttgcatgtacttataatgttacttgcacaacattcacatcttgtagtttctgcttgcattattgaatgaattttgaaatttgaactattttctagagaaggggttagaaattaacccagtataacacaaaataatgataaataactcatacctcacggatcccacatggattattgcaaatttgtcattgtaaaaatggttgactagttggtggttgtagtgacacccactaattgcatgatttttttatttttaagttctgttggtcaagtgtgaccagtaatttctttggctaattattatgcttaactatctatgctgttggttttataataccttatttactaccatgatatgattatcctcttgtgttgaattgtttgtattgttctgttacttttagctgtttgcacttgatctagttgacattaacttgcttgtatcatgcagaatgatatacttttgcttacaattttcttacacagcattggagattgagtttacaaagtcacaggtcgtt

SEQ ID NO: 20272 - DNA, 149 bp, Glycine max
  Intron number 1 from transcript Glyma04g03720.1 (locus Gly ma04g03720) derived from phytozome v7.0 (chr-ID Gm04; pos 2728122 to 2728270)
gcggcggagaagttacgttccacggccctggccaggtccttcttcctcttgtcattttttcttccttttatcgtatgatattattatccttcttgttttttactttggagtttggattaatgtattttgattttgcactgcagctaatt

SEQ ID NO: 20273 - DNA, 502 bp, Glycine max
  Intron number 2 from transcript Glyma04g03720.1 (locus Gly ma04g03720) derived from phytozome v7.0 (chr-ID Gm04; pos 2728381 to 2728882)
ttctcgggtagaaggtttaactggtgtttgggttggtaagtctcaattatcttatctttgttgccatctacatcaacaatttgtaaatttggtgtcagatatttagcttgattcatatgtttattgaatagtttggattaccgtgtgtctttggtatcggtcaatctctacccaacaacacatagtcaagttttatgaactctttatcataaattgaaaaatgtggttacatattacgtggtaattgaccggttcttcagactatacaatattttttcctagaggtgagtatgagactatcaccaaaccacaactttttaagtttgcactatcagtagccagacaatgagattgctgaacttattcaagttgtgtttttgagtttgtcatgatttgagaaatgttgaaacaaatccaacttcattcattttttttttcttattcttcattgttatttattattccaggaaaccagaaactggcagctttaggtatacgagtg

SEQ ID NO: 20274 - DNA, 1004 bp, Glycine max
  Intron number 2 from transcript Glyma01g17850.1 (locus Gly ma01g17850) derived from phytozome v7.0 (chr-ID Gm01; pos 22135095 to 22136098 reverse strand)
cgccggagtatttggaggagctctctgagcttcaagtgttgtgttctcttccctttgactcgttttcattcaaaatcagtatttttttttttcttttgtattagttggttaatgcagcatttagcccccagtatttgaatattattaatagtgttaactttaacctggcataaggatcatcttgaatcaatttaaaaatataaaggactaaataaactttttaaaagataaaggaccaaactgaaccacaaaaatgagatggaccaaaatgatcatttagcctataaaaatctagagcatgttttagacgttgattaacttagcatgatgggtttggagaaacaactttattcagtaaggtcttgattggataaatttctctgtgaatacttgcagaagaagaaattaaaaagcaaaatgtatcaaacttctgcaagtaaaatcaacttatacaccttagcttttggagaagttagatgagagggtttctctaaagttaaagttataagagaagtttaattcattttacttttttattttctttttcattaagtacttatagagaaatttattcaaatatggcctaagtatttgtttgagtgtgtagagcttattcgagtgcagtctaaaaaatgataaatcatatttggataaacatttcaacaagtgtaaagaatggaattttgatatgttaaaagttaatttgtttgaaactaattaagagctgattttgctaaggcttgttttcataagtttcagcatctagctatggaattaagaccaaacagcttatgtgggtttcaatagctgtttcagttagttttgtacaaatgagctgaaaataagtccatccaaatggcgcctaagtgagaagtttgattggctgtgactcagcagtatatagcatagcattctctttgctgcttttttgtgtaatacctgcaaagttttgtattaaggaattaaaagcaagggtaattttgatcgttgatgtacataccagg

SEQ ID NO: 20275 - DNA, 745 bp, Glycine max
  Intron number 2 from transcript Glyma03g40440.4 (locus Gly ma03g40440) derived from phytozome v7.0 (chr-ID Gm03; pos 46198018 to 46198762)
acataaaggtgaactcattattttatttcttccactgaaacagacaagtttctggcttgcttctagtagttgcatctttatccatacaaattttttctttgacatcgtgtttccaaatatgttaactagttgaacctgattgggttgtttttgataaacacatgcatttcttacatagatgaaaatattatttaaattatacagtgaattcccaatttggtccttgaaaaaaaattaacttaattttctcctcaaaacattagtggcatcaaattgtgctccaatgagaatatttggctgttgactgacatcaattgggtcctagtaaaaagtatttgcccgaattagatgttaaaacctgttgtttgaggatcaaatggatgtgataaccttttgaggatcaaattggtgttccaaagatccaaatggaggtttaccctaaattttaatattattttctctttttacattgacttatacccatttggtggtttgcatatttcagccttttctttttaatatttacccaatattttactttcttatcaatcaaagctgcatgaatagttcatacttagcattttgattttcatggtgttatgtcatcgattttattttcatcaatatttcttatgttgcttgatttcaattttgatagttttcttagttgcacagtctagaatcgtttgtaagttggctcttttctgcagcattgtgcaggcataaattgtctggctctacttac

SEQ ID NO: 20276 - DNA, 558 bp, Glycine max
  Intron number 2 from transcript Glyma01g27490.1 (locus Gly ma01g27490) derived from phytozome v7.0 (chr-ID Gm01; pos 36796002 to 36796559)
tcatagtaagttcatttgaagaggaatctttcttgtttgttgaagtctatgttatgataaatgaatttaatctacacccttcagtgtcagtttatattttaatgtctatgaggttcctagtcaacaaggatcaatattttgattggacaataaagcctattgtttattgttaatcttgtctgtctttacttaatatattaatctctttcaagcataatccaaaaaagttgcagtttattattattattattattattattattattattattattataagttgtcaagccaatcatacttctttttgagctagagaacaatctggcccgtttcattctattttcagaactaacaaggatttaatctaaagatatagtttcatccataatcttcattttatgttttcattatttattgcatttgaaatatttaagaatttcaatttatgttatagttgtactgtgtttcagaacattattttgaggggaaaaaatatatataaaaactaatatgagggtatgcccttttaacggtgcttgtttgtttactttgcaggga

SEQ ID NO: 20277 - DNA, 287 bp, Glycine max
  Intron number 2 from transcript Glyma01g31350.1 (locus Gly ma01g31350) derived from phytozome v7.0 (chr-ID Gm01; pos 42227239 to 42227525)
agtatcagaaagggtactttgttatggaattaataaatggaaaaattttattagaaatcatgttgagaaattattagtgacattttttcatataaatttttcatttttgattcattaaccaatttttctttcttaattacatactcattcttttctacctacatatatgtatggtatgcgtcaatattaagttaggctatgtttttttagctttgtgaaatgtggctccttctttgttaataaggttcaatgccacagcattgcttgaaaggctaaggaacaagagg

SEQ ID NO: 20278 - DNA, 694 bp, Glycine max
  Intron number 3 from transcript Glyma01g31350.1 (locus Gly ma01g31350) derived from phytozome v7.0 (chr-ID Gm01; pos 42227639 to 42228332)
gttcactcaacattttcaaggccgaagtaagtctatgggagtagaaattaaggataaataaccttactcctacctacttctcgcatggtcctacatttcaaaactattactactgacttttttttttttttcaaaagttctgttttttattaaacacatttaattaacttgagcacaaatttgaaaggaattatgtatgaaaaaaacagttaatggatttaaagtaattattaagcatttcagtatatattaattgcttaataattttgataattaattaatcaaaattaggtgagattaatgtgaaggtgtatacatggataattgacgtaacaatgatttgaatagaaatgttttatttgactttatattctataaatatcatagaaacaaaatgatgtatacataaatttctctttcaagatataatgttgatggatgattaagaaaaaagaaaataaaaaaaaaatcataaatttgattcgttcttattagacaataaccttgacatgtgcaagtatctctttacgagattaacccaatgaggttagcttaatggtaagagggtttaagtagtatgcacacaagtcttacgttcgatcttcagtattgtcgtcactttataccctccccaaaaaagagacttaattagttgtttaactaacacgtttattaattttaatgaaggaaaaca

SEQ ID NO: 20279 - DNA, 770 bp, Glycine max
  Intron number 2 from transcript Glyma02g16150.1 (locus Gly ma02g16150) derived from phytozome v7.0 (chr-ID Gm02; pos 14567880 to 14568649)
gacctatttctcgctcttcccgtgctggaatccaggtaaagtcttttactttgtcttttttccgttctcaaacgttgccgccaccgtatttgtttcttctctgtttacttttgcgtcaaagaacacatggtggtggcgatagatagcaaatccctagattcaaccacacccaatttaactattacagtagtagtctttccttggattggcgtacgaagaattttgtaatgcaaaattaaaaaaaataaaatgaaactgttgcttcttgtcagactgttaattttgttgtagttgctaggtacttgtccttttgtaaatggctttataattttcaattgtttcaggacatagccgtctgtacaatttcttttctttttattattactatttttgagtaaatagtctatccatagatattttacaggagatcttaatagtcattgaatcacattttcaaattaatatctgttgtttttttatgacaaatgttagtttgttagaatgttatttttgttagtagaggggatctaatccactaaaataaaacaaattggcatatatgataaatttggtgacttttataaatagctttatttttatttttttttataataccaactatttttttttattaacaaacatttaaggtaatgcaagaggaaatacaataccaagttaccaactaatattgtatagaggacaagtttaatttttttgatttgatttgaaaaacagtttcctgtgggacgtatccataggcagctgaaaca

SEQ ID NO: 20280 - DNA, 920 bp, Glycine max
  Intron number 1 from transcript Glyma04g03940.1 (locus Gly ma04g03940) derived from phytozome v7.0 (chr-ID Gm04; pos 2885700 to 2886619 reverse strand)
agcgcggcaagaacgccaagcttatcgccgctctggtacgcgcttctattcactcacttcacatttcgcacctactatttcttttcctagaaccgcattgcaatgtgcttaaccttcgacactcgaactccaattagtcgtgccgttttttctgagtctcgttctccttcttttgcatttccttcatcctatataagccttcttaaacgatctaggagctgcagtttgctgatgagcacttactgtttctcttcacggtctttctttcccgaataagtgatggcatataacagcttcaacatgctcttattttcttatcactatttcagtgagttcgttgcttccaccatccattaaaaaaaaaatagtagtaacaaaatgttcgtctttattttttcattaccttgtgcttccaatgtttacctttgtccctgaatgtctatctgaaacggtgataaattcatattatatgtttctattctaactccattatataaagttccatcaggattgctgcattttgttctcattaaatcgttgcataatccaaattgatgttacacatactgtatttattttctttatttttctatcttctagcattgggaacttcacattgaaattgaactaatttcccccctataaacacaaaggacgaggtttatattccgcagtcaggattagtttgttttatgtttaaaacatcttataatcaaaattttaatgtgaaagcttcaaaaaagtttactaaaaaataattagaaccaaacatgctcttagattatcagctacgtttggcacccagtccgtgtaaaaaaaataatgaaaaggatcctcaaggtttgtagttgacatcaggtttgactaatcatatacactgaagctatttaggtaattccaatgttgagtgcaggctaaac

SEQ ID NO: 20281 - DNA, 842 bp, Glycine max
  Intron number 1 from transcript Glyma04g04040.1 (locus Gly ma04g04040) derived from phytozome v7.0 (chr-ID Gm04; pos 2964784 to 2965625)
gggtttctacctattctgtttttggggtatgttagtgttatgtttctttctcacaccatcacatcctcttttttttttttttttttttaatttggatttaatggattctaaatttgtaactcaccagtggattttaatgtgattgtgatgcatcagaagtcaatgatcgtgtgatgtgttatttacgtatgatactgacatggcattatgatggggaaaagtgaacaagctatgtcagtgagtacaatgcgttcagcttgttgactagctacttcttgttgagttacttagaatttaaagccaattatatcttcttgattttgcttatatttgatgtttggatccatatctcattatgtggtttttcacatttaatgagaaactagtagttataacttccacatctccaacatgatttcttacttctcagcaggtttctaaacacgctcttagaccgtcaaaactcgacagagttttagcaatttgcatatgatgtttctatcaacaaggaaccatactactgactttatagttcattgacaaggctttttttttctcagaaatgattttcccaagagccccccccccccccaagaatgattttcttgcgaattgaaatgattgttcactggctacttcttgataactagcttttgtttgtgtatatgtgaaaggaactcaactgtattttctttctaattcacttgttattagttgaatgacaataatatgttagcagtttatgcaatgaatgcttatgttataacaaaaataaactattttgtatttttttttccttgttgcattggcattctctgatgtagaagttttacagctattcg

SEQ ID NO: 20282 - DNA, 442 bp, Glycine max
  Intron number 2 from transcript Glyma02g00710.1 (locus Gly ma02g00710) derived from phytozome v7.0 (chr-ID Gm02; pos 504545 to 504986 reverse strand)
tataatgtgagttcaataattaactgctgccaactacctacctttcaaattttgaaatgatggttgaaattttacaaggaaattttctgatttgctgtgtatatagaggatggggaaatatctaaggaatgaatgataagcattgatcttttcaaatttcagccacaggtagaaagaaaatgataaattttccttttgaattaattggtgaagcattttgttaatatgaactatgaaaacacacattataaatgaaaacatacttggcactattcaattcatgcaagagacaagagagttacttcttttgggtgaatatcctgcattgttgaatttgaaagctaagacaatttactctggccaaaagaaaaagaagaagaaaaataacaataagttttttctgttcattgagatataatgtggttttttgttggtctaggaa

SEQ ID NO: 20283 - DNA, 767 bp, Glycine max
  Intron number 1 from transcript Glyma02g38260.4 (locus Gly ma02g38260) derived from phytozome v7.0 (chr-ID Gm02; pos 43619041 to 43619807)
ttcttcttcacccttctgatctgctaattctcaaggtaaaacattgtcatcttcagcttctaatgtttgctttcacgttttttttttcttgttacctgtttgtttgaccaaggattgggaaagcctaaaatctttttttatgttggttgttttttttttttgctttaatggctccaactttggtatgcagaatctttccctcaaatggggttgcaaaaaactgatcaaactttcagtcaatgttttcccttttcaaaattcctttagttttaggccattaaaacaagtatcaagcttactctctatgtgagtgtgttatacataaatatatacatacatgtatgtttgtatttcaacatttttaagtgtctttgttgaagtggtgatttagtgaagagttgggcttataagttcttcatgtcatgccctctctttttttctctagtttgatcaacacttgtccaatggtttgttctctttctgttatttttggaaactttgttctatgactatctccactacaaagtaattaatctaatgcattttatggacatatattcatgatgattgttacaatggttttaatatagtaattcatcaaattgcttctaatttcatgcatcttaggcacaaagagagagagagagagagaaactgaggtgaatttgttaaggttgtttattaatgaaattgtgaccaattgtgtttcagtattggttgtttttgtttctagtatgtcagtttgaactttgaaggttccgtgacag

SEQ ID NO: 20284 - DNA, 460 bp, Glycine max
  Intron number 3 from transcript Glyma01g41490.1 (locus Gly ma01g41490) derived from phytozome v7.0 (chr-ID Gm01; pos 52979242 to 52979701 reverse strand)
gctgtccttagagagaaaacgcccccacttcacgggtaagaaattctgattgcgctcatctctcaagatacgacaacccgttggttccgatcgtgtgcagcgaaaagatccccgaaccttatgaacaccaatgctcttactctcaagaaataaattattttataagagaagaaatagaaaattttgggagaaagggatgggaatgtaactctgtcggatattcttttatctttcataagcatttatgctgcaacaacagaataatatgaccgttgaaaaatatgactgttagatcaaaacaaccttaacaaattgttgactcattaaaacaaaatcttaagaaaatctaaaataaatattttattttataaaatgaaattaatatatatttataaattttaaattaaaaacacaaatatttaccaacatcaactacgttacagatattattatagaattg

SEQ ID NO: 20285 - DNA, 631 bp, Glycine max
  Intron number 3 from transcript Glyma03g01750.1 (locus Gly ma03g01750) derived from phytozome v7.0 (chr-ID Gm03; pos 1510265 to 1510895 reverse strand)
attgtcttggcgaggcaacgtgagttgaattcttctttaacttccacattttttttgcttgctttttcagtgaaatttcattggagatgggattgaattctagagaggagtgtctaggacaaaacttagatcaagttttgtcctaaacttagatgttaatgtgataaattaacagaaggaccaacttagtttaacataaacattttttttaaggaatcaaagtgaattttcttaacagcacaactaaaatcaaaaaataagatgaggaatcaaaagtgtattttacccttctttctaacattaaataacctttatcatgtgtagaattttaagaaaacattcacatgacatcatttgttagaagaactagagggtaaagatataaaaaacttaatcttagttgtatctaataaagtatagtctaaattccacatttctatatgtagcaaattttcttcccagttaatggctgtgactggtggtcctctatgattattttttttcaatttaatgtttcattttgcatttttcaaccttgtaagccatttgcacttttggcatactaatatgcattaatttctacatgcattctgcagcattcatttagatccagtgtttgaagccggtagca

SEQ ID NO: 20286 - DNA, 916 bp, Glycine max
  Intron number 3 from transcript Glyma01g03930.1 (locus Gly ma01g03930) derived from phytozome v7.0 (chr-ID Gm01; pos 3401435 to 3402350)
agcagattgaggctggagcattgaaggctgttgcggtattcttcttctgcttcttcgccttcttcttgttatttatgtgtttctgctttttcatatttatatgtttttttaatatttactctgcttatatggctatttattgcgattatatctggttactgtgatgaacagttgttataatacttaaacgtttttctgtttatgttgatgttgatttctccttggagtcttgtcttattagagaaactttgtagttgaacagctgcgtggagtgtaatatcaagctgtattccaaattttggtgtctttgtgtatattttctttatctgtaagtttaatgttcaccaggagtgtatttggaatgttttaaatggggttttgatttgatttgtaaaccaaatcttgggtttggaatgtttaaagaaaaggaaatgatttaatttttatggaaaatgctcttctgaagacaagttttctccaatttgagtgcaagtaatggtgtgtccatccttgaattatagtaggttaaggtctcattgcatttttaactgaataaaaggtagattctcatacactcactcagtttagagacaatttcactttagaggggtcttattcaatttttctaaatcccatggatttcattgcatttgttttaggagttgtctcaaatttggaatgtttcagtcaaaattgatttgatttttaaatttaattattatattgattgactgttcaataatgtcgtgtgatctattttgctggcctcatgtagtgggataatgttattattgttgttgttaatatgcattgctcattattgtgataaacattacttttgtgttaatatatgtgatggatgattaagattgtatttacaggaaaagcaaccctttgagcgcattgaagttacacg

SEQ ID NO: 20287 - DNA, 762 bp, Glycine max
  Intron number 1 from transcript Glyma05g06050.1 (locus Gly ma05g06050) derived from phytozome v7.0 (chr-ID Gm05; pos 5591343 to 5592104)
tgctgtctcttttttgtgtgatttggatctacaaggttgaagaggagaacaaatgaattttttagcaaatttttctttctgggtcatttctcaagtgatattttcatgctgatgttgctttctttttttgaattttcctacatatagaatttatttggttgtgttactgttattatcattgctaaagtagttggatttagtttgcaacctttcagcttgatttgttcacatttgcactgaaaagtttcaatttttatgagctttgattttggtggatgtaattttagatcttcagccgatccagcttaacagttgagattgggggagtgatgtgacatgcaatacaattatacaaatgagattgtttgaaagtgggtattagattctatgaagatcagacaatagtgacaccaaaaactctgtttttaaagttagtctttttcttcgtgtaaaatcattatcaatcacatgttagtgttagatccgcttgcatgtgtgctagaagaaaataaaacaaagttcggatgaaactatagttgaaagagagttaagctcgtttattataaggtcttcttctgctagaaattgtgcccccaaactaccttatagattctaaatcagttctagtaccttttttgttaacatataaattctttgtgcttagataattattagatctattttgatggtttgcttggttttgaggctcattaatttcagtgtacactgctataggtttgagagggtactggcatccaaaaa

SEQ ID NO: 20288 - DNA, 743 bp, Glycine max
  Intron number 1 from transcript Glyma04g33110.1 (locus Gly ma04g33110) derived from phytozome v7.0 (chr-ID Gm04; pos 38594053 to 38594795 reverse strand)
ttcttatcagggtatgtatgtacggatttttatttttctttgacttaggttatttttgtttgtgcgtaataatctttacttgctgtctgtggttattatgttatgtcgtctttcaaactgtgaaggaaaaaaagagttttttgtttttttgggggcattatcttgtgaaaaatgatttaattatttaatttgaatttgttgctaaaaagggtactgtagattcggattctgtttgtgagttggcaacactgtgaaaggaaggatgatttagtcatacttgaattttattaaaccaagtttgactatcgtcgttccttttgaaactcagtttgtgttctttgtgctaatgttgactgttgagtttcaatgattggttgatgaaaataaggacaagaggaatgtttggttgcgaataagataatatgggtttgtttaagaccttgcagggtagttgcttgttgcaacttttacatgtataagcattatagattctagattcttgattcttctattgtggtttagtttgaggttcattttttttcccctttaaaaatccttcaagtggtgatttcgtcgaatgctttatgataaccaactgtgtgatgatgcagtttggtttgtttggtttaaaggctatgcaattaatttatgacatgcttcctgaaattttgtatatgtataaacctcttgattttctctgcttcacagttacctcggtaaagtcggcaagacaggtaattgat

SEQ ID NO: 20289 - DNA, 678 bp, Glycine max
  Intron number 3 from transcript Glyma04g04920.2 (locus Gly ma04g04920) derived from phytozome v7.0 (chr-ID Gm04; pos 3667400 to 3668077)
cactgatattgaacttaggtagacaagagaagagacatcaaggaatgtggttttatattgaaatgaatttgcattcgtgtacggtgtaacaagctagtcttaattgattacactcaggataactaaatcacactactgaacttggctttctataaatttactgttaacatcttgttcaccagttttgttttaagtgtttttttttttttatttgtcttttaacatttctttcttcttctcttactgcatgaacgtttgctacacagtgctggctgaagatcaaagtaagtatatggagtttgtacctcttacttttgagttttgattttgtttgattatgtgataaggtaactcaatggttttcattgttaagtacaaattatatggttacagcttgatctgaactgataatatttcatcaaaatggtttgttgttgtacccgataaatggaaatgttagtgtttggcatttgattttgtctattttggcaagctatagtaaaaaaaaaagagtttttatctttactgtattttattggatgctgagtagtttgaggatcattcaaaaaatcctattaatgatagtgtagctggtatgaatctcatctcatattattgctaatcgaggtattcactgttctagctctagttcattgttgttacctctgttgtgctgta

SEQ ID NO: 20290 - DNA, 721 bp, Glycine max
  Intron number 1 from transcript Glyma03g30030.1 (locus Gly ma03g30030) derived from phytozome v7.0 (chr-ID Gm03; pos 38025338 to 38026058)
gtggattcaagaaatccaagcaaggtttgatttttagcattctcgctcttctgggtttccactatttcaatacgctttggtttctgcttcaaaagttgctttctttttccatcttgttttgtgtttgtgaatgtaaatcgaagtcattcttcatttattaaattgttattagtaatttcactaaaaaaaaattttactcaacactgttatggtatggtgctcatcgaggagggaattttctctctcacgcttatgaacataggtacttctgtcgttgagttgtttcagtagtttgggaagtagaccaccaaaacactgattaccccgtctttcaaactttattatgttagataatgaactcaaaacgtattaaatttctaaatttttcactcaaaagtaatttaactcaacaatgttatggtatgaggagaaattgctctctcacgtttatgaacatggctgctactgtcgttgagttgtttcagattggtcagttttttttttcagtagttggggcagtggaaaaccaaatcactgtgattaccccgttttccaaactttattatgttagataatgaacccaaaacgtatgaaaatttctgaaaaaatttcactcaaaaatagttgttttgaagttgttaacagctttggaataaaatgtactagattaataagcaagaaaatgttaactgagaataagtaataatgttttgcaacagaa

SEQ ID NO: 20291 - DNA, 242 bp, Glycine max
  Intron number 1 from transcript Glyma04g36350.1 (locus Gly ma04g36350) derived from phytozome v7.0 (chr-ID Gm04; pos 42898693 to 42898934)
ccgcccacaatctacagctgctaaaatattactttgtggatgatgcaatgatataaaaaacaaaaatattgaacatgttgaaaaccataagtaatacactcagatcaaacagggaagagaaaaaaaataattttcacaggtatctttctcttattatttccactagctcaaatttgattggtgtgttttatgtaaagggaggaatagacttagtaatcaagattgagagcactccattttat

SEQ ID NO: 20292 - DNA, 1022 bp, Glycine max
  Intron number 3 from transcript Glyma01g44190.1 (locus Gly ma01g44190) derived from phytozome v7.0 (chr-ID Gm01; pos 54931701 to 54932722)
atttgattcagggggcacttgtaagtattatttactgcttgcttctagttttcatctaacaggaatttgttttcactttgcagtgagttaatcgtctcactttctagattcttagtgttccattcaacccattgggacatagaagtgtgcaagagtggcgcattcatttttaaattcttgtttagttgttctttgctgacaatgcaagaagatcttccctcattggcctttatgtcacccataccatgttgctttaggctaaacaaaactttgtgcttttagttgatttatggcagaatgttagatatagattatctaagtttccacataatgcaatatttttttttacaatggaacatattgttgaagaaactaaaaatgtatcttctcaaaacaaaccaaagtcatgtattcactgtactggaacttgaaagaagatggttcactttttcttggatttctcctcatttagaaatataaccaccaaactattgactaaaatagtttaatcttattaaatactgatgacaacaacaacaaaaacagctaatactaagcttttttccaccaggcggggttggcttaaggggtgtttggaagagttcacagggagcttgtatggaattgagcttatgaaaatagcttatgacttccacaagctctttaaaataagctcattttaactcattccaatcagtttcattgttaatcagaataagctcgttaataaatgcttaattaagttgtttacccaacactctcttaatgatattaattactgatatggaacaaaaacttgttgaccatacaaacccattaataatttaccaacatgttcaaaatgcttcttaataaaatagatttgaaacaggatgagaatattaagataaaagcttgtaaaatggcattggatggttgcaaacctctcatattttcataagaagttgattaatctcatttttatgatttctgtataatgctcaaaagactaatgcacagaaataatttcctatacaggtaag

SEQ ID NO: 20293 - DNA, 771 bp, Glycine max
  Intron number 1 from transcript Glyma04g07520.1 (locus Gly ma04g07520) derived from phytozome v7.0 (chr-ID Gm04; pos 5858290 to 5859060 reverse strand)
cacgcttttggtaagtacaattttacaatctcatgcttcgcgcacttcattccatgcaacgtgcacactaatactatatgttaacaaacacttcttttgctagaaattgatgaagccatcgcttaaatatattcgagctagttttggaagagaaatttgaattttaaactaaagtatatgttattaagtgcctagctaaaagaattcatgaaaggaaattaaacaaatatagactcgtcatgttgtccttaattctataaactgtacatgattaaattaaactaatctaactataccacatggtatacaataaactttcttgtgaaaactaaggtttagaggtcgttttccggtaaaatcaagtagttagcaaaagttttgaaaacttcaactctagaagtaataaacttatcgttagaatattgcataagctaataaagacaaactctcaaataaattaaatttagcctggcagagaatatacagaacctgtgtctagcaacattactatttttgttgctattctcctaacaaaattagtatcaatttaaactatcaagatgaaaataccatttagaaagaaaaattgtggatttgaattataataacatactatttctggtctttttataagaattgaaacaaagtcattaaaagaatcgagataatattttattaagttgtgtcctatttaaattccatgtaatgcatggcacaaacaattatataatattagtgtacgaactaattaattaattgtgcagtgatttg

SEQ ID NO: 20294 - DNA, 808 bp, Glycine max
  Intron number 3 from transcript Glyma03g25680.1 (locus Gly ma03g25680) derived from phytozome v7.0 (chr-ID Gm03; pos 32914652 to 32915459 reverse strand)
ggaatttcctggggtggttcctcgaactttcctcggtaagtttttttgtattttgtagccatttttctcctcagaatatgtatttttatttaggcttaaatatggttttcatatttttaatatctctttttcagtttaccttgatccgttgggtaatcacgtgacaaattaacacagtagcacatcatcggtgaactgataatgtgataagttaacagagtgtcacatcatcacttaacggacttaaactaacggtaattaccaagagtaaaagtttgaaaatgttaggtggtaaaataaataaataaaaaatttaggtagtaaactaaaaaaaaagtatattatatgaaaaacatatttaagccttttatttattcatgaattttttggttggtttatgttttcatatttagcactagtcacacctttgtgatttattatagaaaataataatttactttgtgaagaattaagcaaataaggattacagactcgtttatacagttgcattgcttgtgtgcctgatgtgaagaatccatttgataatctttgagattgtgatttgtgactagcatgtgttatgacggttattcaagtttgtttagtttttagtgctggaaatttaaccgtgatgatgttcagttggattgttaagattgcttttttgcaatggccatgcctcctcagtataagctggtgtgtgctagtgtagtacttctctttttgttaattgttatatgttatctaattgtgttattgttattttgttttaggtgctttgcttgtgtccataattgcatcaccgttt

SEQ ID NO: 20295 - DNA, 1042 bp, Glycine max
  Intron number 3 from transcript Glyma03g30180.1 (locus Gly ma03g30180) derived from phytozome v7.0 (chr-ID Gm03; pos 38131897 to 38132938)
tggcctaaacataactgatctcgttgcattatctggtaatcattattatattgcttcccccgtctactttcttgtgtgcacacacaaacttcatacaacatatgtagtggaataaaaaataatataaaagaatttttaacaattcatgtcctgaaatcaattgaattagatattcttaatacatttgtaacgtacataaatagattaattctcactacttgtttaataagaacttatcaaacaaattaaaaatgtcactttaatcatatttctactgttaacatccattttatatcttaaaacgatttttcaactgtagacattgtagtgtaagtttagtgctagttcttttcaaacgtcacctaaatacaccttattaaataaaggaaaaggctaactatttttgttttttttttttttttaccaatgctaactgttgttgttaggaaattaattaatgaatcaaaagcgattttatttttattttttatttttgaaaggaagcgatttttttttattaaaagtataacagtgtattatttgaactttaaaaaatttacttattgatttcttaacaagtaccctaatgatattattaacaagactcttaaataaatattaatatgattttatatatttgtaaagtttaatgtttatatactattagggtaaattcttttacatgatcaattaataaaaaataattatttatataatttttaaagtaattattttaaatttttataaatttattatacatgatcagtaagtaaaaataaaataaatttataggaaaaaaattttgtgtgattaaataataatataaaattattttatacttcattacataattttttcgtatttatagtgttttctttcttccaaaaacttttttcttatattttcttagctgaatggctgacaatttacctatagaaaaatggttgatttaattacataattactatgatgcttattaagtagtggttttgttttgagtggaaaaggtgcacatagttttggtcgtgcgcagtgtagattt

SEQ ID NO: 20296 - DNA, 817 bp, Glycine max
  Intron number 2 from transcript Glyma02g05680.1 (locus Gly ma02g05680) derived from phytozome v7.0 (chr-ID Gm02; pos 4549685 to 4550501)
tgggacccgtatgtgtcactacttattctttcctcactcgtataaaacttacgcattagtgtttttatttatttattaattataattcggtttaattattaattttggtaaatggccactttttggattgtaagactgttacaatttagttttgaaagaacacaattacaactcagcgtcaaattggtcctaaactttacagcttagtgacaaaatggtccgcaaaaacttaacggcaacataattgttgcactttacacagtgagggactacattaaatcaaaattttcgttctttcggggctaaattgtcacggcattaaaagtgataatttacccttataaatttggtccatatgcacttcactgttttgaccctgtactgaaaatttataagtttttagttcctggatacgtaaatttaatgcattttggtctctgctattgacactgttgctaatgtgttaagaccaaacaaaattttttgggtggtgtagaactgtctgaagtttcttccacgatagaaaatttctggaggttttacactactagaaaaaatttagtagtggtgtttcagcgactgaagtttaaggagttagaagataactgacaacaggaatcaaaattccaaataccttaaattagctcgtctaaggactaaaacttacaatttttaaatatagggtcaaaatagtaaagtgcagattagtatagagaccaaatgagtaattaaagcttataattctaatatatctcttaatgagaacaatgcatgttaatgttacagttcttgagattactttcacaagaattggacg

SEQ ID NO: 20297 - DNA, 492 bp, Glycine max
  Intron number 1 from transcript Glyma03g03230.1 (locus Gly ma03g03230) derived from phytozome v7.0 (chr-ID Gm03; pos 3014130 to 3014621 reverse strand)
gtaaccgtaagcgccctctgctatcttttcttctcaaaatttgtgatccattgtttcgattttttgcatcatcttcatgtaaatttcataggaattataccctgtttttcttgctaatagatatggtacacctttttttttttaattagtttgttcaatttgaataataaaattttcaagtgggttggttctatactagtaactttttgagcttagattcttatttcaaaccttacattcatgagctgactgggttaatgatattatagtagtgttatgtttattttatttttgataggcaaatgttagtttattagaatgttagattttgttggtagatggatcgaaccggcgacatttttcctcttcccttcttccttaaccacccaatcaacctcatatctccttgttatgtttgttgtatgactgacctgatttcaattttttattgcagaagattggttgagtagtagtgaactgaagaaaaattgg

SEQ ID NO: 20298 - DNA, 832 bp, Glycine max
  Intron number 1 from transcript Glyma03g38760.1 (locus Gly ma03g38760) derived from phytozome v7.0 (chr-ID Gm03; pos 45063977 to 45064808 reverse strand)
cagtaccggaatctccctcaatcacgtcccggccggtcggtaacctccctatttcaacttcatatctcactttctgcgattcctacatgcacgattttggttttcgattgttgatatcttcgatctaataaaaacactgcgcgtgaactctttaactgtataactagtctgttggattgaagttaacttgtgattatcaaatctcaacagttggaaattatttcaactctgagtagtttggagtttctttctccttactttgagtggatgtgaggggacttgtgtacgtggctatttgcctatcatgaaaaattatttatgattttgacgagctgttagttttctctcctgaaccctgtcgatgtgtcgtggttgcggttttgtagcatttattgagattgctagaaattgcagaaaaatgtggctgatgcgaccataattgcactttgagatcccgccaaaaccttgatgtagcatttgatatttccagaaattgctgataaatatgggtatgtggccattagtgcggtcatagacaccgccaaaaccttgatcttgccgttttgttgcattttttgatgttgtaagaaattgtagataaatgcggctgatgaagctataattttagtcacagacacagtcaaaaccttgttcacagaccaattttagaaaccttggtcaggagtttttttttttttttttttttatcaaatctactgtgatttttttggctttgtaggtgccgtgaagcttgaagcttctctctttgaaactgacgttttgatatttggtaataggtgtgaaagacgcaagagacgagaagattcttgtt

SEQ ID NO: 20299 - DNA, 1005 bp, Glycine max
  Intron number 1 from transcript Glyma02g41510.1 (locus Gly ma02g41510) derived from phytozome v7.0 (chr-ID Gm02; pos 46614549 to 46615553)
cgtgacgtttacatacccaaggattattactctgggtgagtcactcactcatctcaattaagagtttttttagaacaactagggtttattacaaattaagagttgtttagagaaaggttgtgctttttttttcaaactgaagggaggttgttgagtagttgattgtttcagggtgtcgaagcgctgctgggtgcagatgttagccttgattttgatttaggtcatgtttggataaacttctcaacaatcactttaacgagaagaaaataagaagatgaaatgaaataagcttatgtgtaagttaaaatcagcttttggagaagctaaacaagagagctaacttatgaagaagtttatttcatttttttttctttttatttttttctcttataagtgcttatgagaagtttaaccaaatagacctaagtgtttttttttcttaaattttggattgttgaattgatcttggactggtttgtcagggggtatgtttgtttgaaattgttcaagttaaaacaagaccaagccccaagtttgaagaggagatctactcactcttttaacaaattggtcctcaagtttgttagttcatacttcaaaccaagagaaattatataattaaacaacacaatgaatgcaagattggttggttggttcttgtcccaattgaaggcttcgtgaggaggtttttttagtttgtggttgtgagagctttgtgctcaagtgcttcttgtaagtacaacgagagagtgttgaagaatttttgaagtctcttccatttactattgagtgcaagtaaaggaaaggcccggtcacaactaagctttggatttttagaggatttagtaaattcagccaccactgctgtgtgcatgtttcaagtgtgtaaagaaagcatattctacaatctgtctctgccaatgtttttctagtagtgttggaatgaagcttcacttttttcctcatacagagaacctcgaggctttgcctttgtgcagtttgtgg

SEQ ID NO: 20300 - DNA, 799 bp, Glycine max
  Intron number 1 from transcript Glyma02g14350.1 (locus Gly ma02g14350) derived from phytozome v7.0 (chr-ID Gm02; pos 12917022 to 12917820 reverse strand)
aagaggggattgaagatttccaaaggaaaaagcaggtactagattcttctgtcttctactttaccctcatagttgcttgtgagtttagtttcattttattaaaagtgaggctcttgaacctttttgtcttccaccctgcagcacaactgtgtggattataaatttaatttgatttatattttttaacaacttattatatctgtaaactctattgggggatggatagaaccccatggcttgaagagtatcagtaatttttaaaagaaaattgttgttttcttggaaggtggagggagactatacaatgattctttatttccttttatggaatggtagtcagtttatggaagattccagcttttttgttcagatccttactatgtcttgtttgaaaaggatgtagtgctattattaaactctttgttcataaatccagtagttaacattatctcccggattccaagttaaatttataactggagttgaaaattcttaataatttgataaaatgacagtgtggtaagaaaccagaatgtccaaaatagtgtctataatattttttttttgccacaatattccctgcattttaagtcctcttgtctatgctaatatgattatgattttccgttttttttatgtttaaataaatatctatttgaaattaaagtaatatatcactagttatttatattaagaaaacaataaagcaataatcatttagctttgttggggttcataacctagccagtggaatcctgctgcaggatattgaggtgaatagtagaagagttaaagtgca

SEQ ID NO: 20301 - DNA, 950 bp, Glycine max
  Intron number 1 from transcript Glyma03g14200.1 (locus Gly ma03g14200) derived from phytozome v7.0 (chr-ID Gm03; pos 18136793 to 18137742)
agaattgctctcttcgttgagccttctccttttgcgtgagttggtttcttaatctgtgattctaaaatgtgcactgtttgtggcttccaattctcattgaatgtataatgttttagagtattgaaaccccttttgcctatttagtggtttttaatattctttttattttttcattgttgaaacatgggagctgggttgggacagcattgaattttagtttctgcaggagttgacttgttcttgttattctgattcagtgttgactctggtttttgatgaattgactgttgaggttttatagatcatttgaatttggttttcatgtctcttttaatgaaaaaaaaaataagaaagctttttgttttataattgaattaatctagctttgtcatcaactgtttcggaataaaatttctattagcttaataataattctgtagtcttaccatcagaaacgtgcatctcagctattttctgctgtttttcaccgaatcaggcttgtgaataaaaaacgttgtctagtagacactgtgagagagaaagagatagaagatagagagtagaagcgggttaatgtgactagtgatatgatgtaataaaaagagagatgaagaaaagtgaagggtgtgaatgaggtgtttacattatgcaggtgtccaaaaatcacaactctgttgatttggatgtaatattgaatggcaattacagcttatgaatgtgtgagtgaccaaacattaattttaggaaaagttgatgggaaattaaccttataatccctatgagattattgcattacacttggtactattgatgtgtgatccttaataagatttgtggtatggtgtctgctatgaaagaaaaaatctgttcttcaattcaaacagaatgttcattccacctttatctattttgcagatacgtctcaggatacaaaaatcgttttcagaact

SEQ ID NO: 20302 - DNA, 691 bp, Glycine max
  Intron number 4 from transcript Glyma03g30960.1 (locus Gly ma03g30960) derived from phytozome v7.0 (chr-ID Gm03; pos 38809506 to 38810196 reverse strand)
ctggctctgtgacctatcctggtacttattcactttttttcttctttctagttgataaacattaaggtcctgtttgcttggtaagcacctatgagagaagaatataagaaggtaaaatgaactgagtttcttccataagttaaatcaacttatgcacttcagcttttaaagaagttagaggagagagcttctataagttgattttagcctatgggagaactggagaagttcaatttctttttccttcttatttctttttcttctcttataaatgcttatgaagtagtttatttaaacagagttcaatatgaagattaaatactcagattggtcctctaaagatacatgattgatgagttttaaagatagtccttcaaagttttgttcttttgtagtgtgaaataagcatcaatttgggaccaaattgttgttcaaagacaatttgagttgctaaattggtattcatttaaaattgggggatcagattgatgtctgaaatctttgtttgatcaacttgatgtgccatgtatttttgaaggaccaatttgagtatatactcttaatttgaatgaattttctttatgttatttcctactttttttatatgttttgttctataataatgccactgttatactttacccgcttttgtctaggtcctatcaaattgtttgtgttaataaaggcccct

SEQ ID NO: 20303 - DNA, 613 bp, Glycine max
  Intron number 4 from transcript Glyma03g28750.1 (locus Gly ma03g28750) derived from phytozome v7.0 (chr-ID Gm03; pos 36694502 to 36695114 reverse strand)
accccaggtaatacgaaattttaggtaaaatatattacttcgtctgatatgtggcaggtttcaaattttgtaggctttattatttaatatagtccatgtaatttgttttctttcaaaggacaagttttggtggggctgttaaagaaaccaaatcaaacccaactaaactggttaaactgaattaaactgtgattcagttaagtttctttactgtacaatactgataacaatggataacaatgtgtttaagtacttcagaattacttggaaatttattgacttgaatttgagattgaattgagcatcattctgtttcctccctccatgtatattccttcccttgttctactttgcttttccctccctctacctttatatctcaacatcaatataatcacatacaggattttatttacattacagttacaaatatattactcctggtgatagtttcctgtaaatgtaacttaaatttatcttctaaaattaaatgtttatttttttttattttttgaggcaattgtttactatttttaaccttatgtaacttttgatattgattttttgttttctccatgtttaacaccattcttttgtgtgtaaggtcacaatc

SEQ ID NO: 20304 - DNA, 515 bp, Glycine max
  Intron number 1 from transcript Glyma03g03390.1 (locus Gly ma03g03390) derived from phytozome v7.0 (chr-ID Gm03; pos 3137683 to 3138197)
agggggcaccacaaccttccgttcagccactgttggtaagctaataaacttttctgactaactcatcttctttaatatccatctcttaggacagtttgggtggataagcttatcgagaaacacttttatgagaaaaaaaagtagttcttcttaaattcaaattaatttgtaaaaattcttttatcttttaaagaagagcaccagaccaatttggatataagattaaaagttctttttgagtgtttcctctactgaaaaaaaattccatatataaataagctctcaaacacacttttggtttgtatccaaacaacaggaaaatttctacaaattaacacttatgtataaattagagttaagttataaaaaaattcattttattcttttttactctctcaaaagtgcttctggataaccttacttaaatagaccattgatgatggaaaatgaaataataaattatccaaggatcaagcatttgatagaatatatgatttttgcagctgttgttggag

SEQ ID NO: 20305 - DNA, 933 bp, Glycine max
  Intron number 1 from transcript Glyma02g44470.2 (locus Gly ma02g44470) derived from phytozome v7.0 (chr-ID Gm02; pos 49040841 to 49041773)
tctctctccttttccctcaagctcagaatctcccggtactaagctctgagttcttgcttttaacttttaattttttcttttccttttgtaacttcactgcgatgaatcctgaacctttctagttctgctttcatgcaattttttttttattttttttgcggttgattgtgtatgtatgatttcgagcttaatttggcccttggagtaaatgggtattgattaattgaaaccccatttgaaaaacaaattttgctttattgacaatttctttgctttcgtcttagttttcagttggggtatagtcatgtcctctctttactgttactgtctccgtggcgatgattcatgataagtgctcttggcatcatgcatgaattttgttaatcccttattcatctttgataaaaaaaaatttaatccttttgggagaaaaaagttgatttcatttttcaattcgtctattatgatgaatctgcagagaatccccccctccccacctgatttgaactgttctttgctgtgctgatgactaattaatgttggttaaaattgatcgaaaatcaccagattatgaatgaaactcattaaatagaaggtgaaaccaacatcattttgtgaggcacagatataactctgtagcaacagctccaaatttaagtaataggatggtttaatgtgctatacatagccatcagtcacttttggtggtttaaatttaattgagataacttgtttctgcgtgttactaagtagttggtggtttaggatatacgtattaatactagcatagccaattgtcatattgaattttcatgtcattttgattaattaactgttttttatttctaaatatgtgtgtgtatttgacaaagaacgaaagttgaattttggtgcatattttacaaattaagaatcttgttaaaaagaagaagg

SEQ ID NO: 20306 - DNA, 539 bp, Glycine max
  Intron number 1 from transcript Glyma02g43320.2 (locus Gly ma02g43320) derived from phytozome v7.0 (chr-ID Gm02; pos 48102514 to 48103052 reverse strand)
caggaatttcaaagagggtgagctatatacatcgttttgccttatatatgtattttgatcatgaatattttaaagtaacgaaatattattatacttcagttatatcttttttctctctcatctcatcctcaaacacttttatcgttttcttttccttccatcccctttatcatatatataattgtgtaggagtttattagtagagagtcataagttttctccctatataaaggcatgaatcatgatacataagtttttagaaatttaaatttaaaggatgtttacataaacacgaggggtttcttaatcaatcctattcgttcgatcataaagagcttcatcccttgcaggcattttgtatcctttttccaatttattatgatataaccttttcatacttaaattttgatgttcactttatctttttcctatcgctatttttctttctgatctcatcatcgaatgcgtttaccattttctttgttttgtaaatggttcgtgtgttgattaagagctaggtgaggttgtcaaagagacta

SEQ ID NO: 20307 - DNA, 507 bp, Glycine max
  Intron number 1 from transcript Glyma01g06530.1 (locus Gly ma01g06530) derived from phytozome v7.0 (chr-ID Gm01; pos 6775368 to 6775874)
actagtgagttaattatatcatgcattcattttggtttttttggttatttgtgattttaatgattttttctttgatgattggttatttggtcgtctttgaataagtccaatgggttattcatgtagattttttttatgaatgagcaattttatttgaaactagataccttcacgaaaggtagtacaagctttatctgcctttaaggcattagaaatgaaaaaaggccccacatcaaaatcacaagtagaacactgaagctccaaaccatgtttggccaacacatcagtaacttgatttccctcatgcaagatatgaatccatttaactgtgattcatgcaactgattgcacttagtgggataaggctttgtcattgttgttgttgttgtcattgaagatgtttcttattgtatttagcttgatggatttcatgaagttgacatttctacctttggtaaacatgttgaacacttgcatatattaagcaggaaaataccaagaagaagc

SEQ ID NO: 20308 - DNA, 914 bp, Glycine max; identical to SEQ ID NO: 16855
  Intron number 1 from transcript Glyma02g13180.3 (locus Gly ma02g13180) derived from phytozome v7.0 (chr-ID Gm02; pos 11405480 to 11406393)

SEQ ID NO: 20309 - DNA, 873 bp, Glycine max
  Intron number 2 from transcript Glyma01g32450.1 (locus Gly ma01g32450) derived from phytozome v7.0 (chr-ID Gm01; pos 44039306 to 44040178 reverse strand)
atcaccgaattgttcacatctggcaccctacgagagtaatataatcaaccattttcctgtcactattttcataccttcgaacccttcaacttaatgagcaattcctacatgaatacagtgcttaatcaaatcttgaagttaatactaaaataacatgaatatagactttattttaagagagcataagttatgcacagttttacatactatcatccaaatacaaagcatcccatataagaaagaacgttatgacaacagagtaattcctgattagttgacggtataaaagtctctacaccaacatgcataattaaactcttattttaaagaaaaaaaaattatatctagttttttaagaattttgttttattgttttctaatcagaattacaatttcattgagatgaaataacactaattttgattagaaaacaccgctaaaacatttaagaaaccgtatctaaattttgttcttattttaattctagttcttgggatccaaattccttgcattcaatttttcacacattctataattcagaattgtcttgatcaagatcaaacggttcatattttatctcaataaatcaaagttagaatacacatttaaaatctgagtcggccgatcttcatccaactgttacaaatactgtgactgtgcaaatttgactgcactgaatccaattccttcatatacatcttaagttttcaattggctatgtttataaatgtgttgtattcatgtaaaaattactcttaatatacaatttttctttcctcacgttggttttttatttggtgataacaatgcatacatgaatactatgtatgtgatgtaggtatagaaagaagtaccagcgagtagatatcagag

SEQ ID NO: 20310 - DNA, 509 bp, Glycine max
  Intron number 1 from transcript Glyma02g02300.1 (locus Gly ma02g02300) derived from phytozome v7.0 (chr-ID Gm02; pos 1669155 to 1669663)
tcgtcttgaaccaaactggacccaaagccttctagggaaagagactcaaatgaatactaaaatcaggtcaatcccacaattttacactctaatttaattcaaaaactttgtttcaattcactttcttttcgtttcatactcgggaaagcacattaatttggtagagtggaagtgaatagaatggaagagaatttaaaaaaaaaaagcttaataaaagtgtgggattcacgtatattttttaaattttctctttctttctcttatttcttcgcaactaaactcacctggtttcgtttcgcattctttcttatgcaccttctgcacaatcccttacaggtattttggtggtgttctttcttggggggtgagtagaattatgcaaatatatgctactgcttgaaatgaagttagctactaattgttacagcacaatatttcttattcaattgttctgaattttactatgtgtgccaattctacttctttacataggattaaaagaatccaac

SEQ ID NO: 20311 - DNA, 967 bp, Glycine max
  Intron number 1 from transcript Glyma05g00240.1 (locus Gly ma05g00240) derived from phytozome v7.0 (chr-ID Gm05; pos 49111 to 50077)
gtcaaagagcccctctcttggaggctgagggtgctgtaagtcctcttctcttcttgctccatattcattgcttctgcttcaccattttggccacactcaaacaatttttgtcttttgtcaattaattctgtgctgaatcgtaaaaaacacgcttttttccactgcctctgctataataataataataatatcctattgcactgtttgaaacttttttttttttatatgcttctctgcgtgtatttcagtttctgttctgctctgttctgtaaagtgtaagctatgctcagttgaaaacgtagttggacttggagtctttattatttttgacatgtttcgtttttttccttttctttttgagggctgaatgagattaaaattggtttaattatttggtctctgtaaccgcataatctttaccttttatctctatacctggaaattagtagtttttagtccctacacatacattttaactaattcaatttcctatacctacactttttagttcccactggctactgttacattttagttcatttttgtccccacaatttttggacgatagggactaaattggattaaaaaagggtatgtttaggaactaaaatgagtcagctttttaaaaatgtatgttcagagattaaaaatgtaaaaagattgggctaatattgggactaaatgaataattaaatcattaaagtttataagagaggtcataatttttattaacggtttcagactgtttggaactcattcatggtttattggttaaggctcctacctagtgacagttgctctgtgaaagtgaaactattaattaatttcccagttcttggtatggttatgcatttagtgcaataaaatgaaaaactgcgaaaggggtgtggacatacttttgcaactgcatttgtcgttgtggtactccattaatttttctagtgtatatagggaagaggaaagaggg

SEQ ID NO: 20312 - DNA, 916 bp, Glycine max
  Intron number 1 from transcript Glyma03g32620.1 (locus Gly ma03g32620) derived from phytozome v7.0 (chr-ID Gm03; pos 40343098 to 40344013 reverse strand)
tcctcctcctcctcctcgcacaattccaacagcaggtcccgcgatttgtctctttcttttttcttttctcttttcggaacgagaattgattttaataatctcttgccttttctcaatcttgcattcaatttctcgtttcgcgagacagacttgaattttggattgtttcttgtatgatttcggggcaattttcaattttgcctaattcggtttttgtttccttgttctgtagcggtttatgtgtttgggttgcttttttgattaggatagtggaataataataatgatgttgttgtcgtttgaaggagctgaaattgagcttgatgcatgtgtttactattcccgagggtcgatttttccgggatgcatggattttaggttggatcctgttttgttgtgaaagtgatttttggtgtcgattaacatcaattcgcggttgctggattgaaaattgacaatagttttgtcaagaggtctgtttgaggcgtgtgaagttagctaggtgctgagatgtgatcatggtattagaagattataatacatgtatgttgccaagtcaatatgggggaatgttgatcatggatacttggcagtgtggtacttgctggaaaatttgtgcatgatttggatgcatggtcggtcatggagcatgggagtttgttgtcaaaattttgtagtttctgactttgaataccatacatcttaacactatgtttgagcttgacattgtgattagtcatgctactataataagctaagaatccataggtttgtcaaatcatcttacaaattttcactgaggcagaaatacactctttcccttttgaagttgaatttgaagttgcatgtttttttcttcttctttcctgtacaatatttctcttatttgatgtgttgaatttggccagtggtagca

SEQ ID NO: 20313 - DNA, 531 bp, Glycine max
  Intron number 1 from transcript Glyma01g35950.1 (locus Gly ma01g35950) derived from phytozome v7.0 (chr-ID Gm01; pos 48392416 to 48392946)
caaaaatcccatatagtctcattgctgtttcaaaggttagattttccttctctctttttttttggttttcatttttttgttttgtttgagttggtgaatatgtggatagtgaaactgaggtacttggaaatgcacaagcttctgacttttgcccatcttgtacttgctagtttaatgttgaagcatttcggtttctggggttgtctgtctttgcccttcattgttttctgtatgtttctgaaaattttcaggaatatccattttttaatgcatttttgttgctttaatgatttggtctgttggtgtctgttaatagtttagagtggttttacgctgcaattcataggctccatacttgattgtgttgctagactgtggaaggttcttcacttatcagttgtaacttgtctcacattaacatttcttatctgattttatttctgaataaatagagctcaatagtgtatctgtgtatgtggtgtaattgttacttatgtttcagtttttatcatgcagtggagattggaggag

SEQ ID NO: 20314 - DNA, 489 bp, Glycine max
  Intron number 2 from transcript Glyma01g35950.1 (locus Gly ma01g35950) derived from phytozome v7.0 (chr-ID Gm01; pos 48393146 to 48393634)
gctccaattttgcgccactgtgagtattatcgtttcttttggatatagataggagcttgttcaaacaagtatttacaatctattgtttaataacccctggtttggtagataagagcatcttatggtttgggaggctcatgttagcagatattaagttctgaattgcaagaggaaggcagaatttcttaattacagaagcaaattttacttatgaacccgtgcattatttttactctatttccttttttatctctgcaaaagtcgatctcacactgcatttgaaactttatcttttgtacctctaagaaagtcattatcatgttttgctatatgcagttgaacttggttctgttctcaattggcaatacatattatgctttcccttgaattgagtggctagttaatggcaaagaatgaattttctgttcatccatatgcaattcttcaatttgtaactttgaatgttgcagtacaccaacaactctatca

SEQ ID NO: 20315 - DNA, 979 bp, Glycine max
  Intron number 3 from transcript Glyma01g37290.3 (locus Gly ma01g37290) derived from phytozome v7.0 (chr-ID Gm01; pos 49642431 to 49643409 reverse strand)
tttagtgaggaagccttcgtcgtcctcagtttcaggtgatgatctcttatggctcaatcattctgttattcctggtatttgcaatagaattcaacagagggcttattggactccaaagcatctttttttatgtatctagcggtgcccctttcggtggaatttgtttttcctaaaatgactgtggtaggctgaacaatatttctgaaactttgatttttatccgtgccaaatggtttcgccatattgtgtgatccatataatcgaccctatgacagctataatagaatgcagtgttgctgtgcattgcatttcctaacagcagccagctcaactctatcatgaattgggattattccatttgtgccccacatctcttcctcacataaagcttccacatgcgtgtttggtttggtcgtttgttgtgggttcttttatgggcatgctattctcgacccataggcctatcatattagcaaggatacttttatggttcttactgtatatgccaagtctacatctgtaaatgttttgagagtttgaggaatgtttctattttctgttaaactttttaccccacattcccctatcttatagctctcaaacaagatgtgagagcataaatatgtcatgcactcatgctatatcgaattattaaagattgttgaattggtatgtcctccgcccattaatgtaagggaagacgtctatattgttcaatttgttgctagatgattttgtttagttttcagaaacacattgatgtgcacatgtttcctgtatgattttttttgtttttttattacatttaagtccttatagaaccctttttctgatatatcatgttagttgggatcattctattgtatgctagcagctgcatttaatactagtagttttatttgggggcaattacttagttgctctctttttcacgattgaatcagctacagtcaatccgaaggttatactggagctcttc

SEQ ID NO: 20316 - DNA, 687 bp, Glycine max
  Intron number 1 from transcript Glyma04g42760.1 (locus Gly ma04g42760) derived from phytozome v7.0 (chr-ID Gm04; pos 48433035 to 48433721)
tatatccacttgggtatgttatcttatgttatgatatgttatgtattctctgacttgttcaacaatcttcttctgaaagtcatacaaactctctttttattgttctccaaaactttaaagatttttatttttttctgggcatggatttttttccggaaagttttgaacttgcggttctgttatgatttgaactgtgctaattgtttgtaaagttttctttgtatccctacattaaataaaaataaataaagggtgtatttttttttttttttctgatttggttctgtatccccttttccccttttagacctttgaatactcctctcaaacattttcctctgactagttcttctaatttcgtaggaagtttcagaatcatcctcgtttatatcgaactaatttgattttcattcaatgatcctaccaatgaatttctgaatatattttttagagaaagaagaatcaaacaaaaaagtagtctgactttgccagaccccacctccaccagcatttgtgagcacttttgtcgaccacccccccccccccccatgatcatccttgctcatagtggctttctaacaagaaaaaggtaatagtaacatgatggtttgttttgtaaaagttaatgaatgaattcatccttcatgtgcaggtattacacggtgagcctcgccattggcaatcccc

SEQ ID NO: 20317 - DNA, 669 bp, Glycine max
  Intron number 1 from transcript Glyma04g34660.2 (locus Gly ma04g34660) derived from phytozome v7.0 (chr-ID Gm04; pos 40865072 to 40865740)
tcctctcctccaccaccactgccaacctatccaatgtaatcacatcattccattttagtcaaaatcatttttgtttgttaaaattagtgctcagcttattatttttatattattattaactattgtgctcgggcttttgattcgttcattgtatacgtcaattacagtccaatactttctcttttttggttattagagtccaattcgtctattaaagtccaatactttgagtgttttttcgcaattcccgaatgtttggaatttcgttaattatacctaacttatgtcgtcatcccatcaaacagtcacaattccaacttatatcaactgtttgagtctgtggtgttcagcaattgtaaactgtagtgtagggtttttactttgaatatgtttggtattttggtgaatttgattcgttttaatttgttcccgtttgctttaagggaaagaaatctaagagagattaaaattttttgaaatttgaatcaaagacgaagttggaaggaaaggaaagtttggatttttagtttttgaaagttaatttatcctttttttattgtttgtttgtcttctctttgaccaagtaaaagaaaattgtattattattcgtgtttctttttttttttcgtttctatttttgttttttagtgagtgtgaagctgagtgctg

SEQ ID NO: 20318 - DNA, 725 bp, Glycine max
  Intron number 2 from transcript Glyma04g07570.1 (locus Gly ma04g07570) derived from phytozome v7.0 (chr-ID Gm04; pos 5923579 to 5924303)
caaggtactgagttgctattttgttaattggttttgcttaaattcaaatgttttgccgtttgctgttttgtttttgtctttgcataatgctgaaagggatgaaagctatagtgccaaatgaactataaagcttaatgtttgtttgattctccttactattgtggaagatgggtttgtttgagagcacaggatttgtttagaatttgaacattttagtctgcaagttttagcttttagctcataagggttttgatttggacattatttccttctctcattgttctgtatgatcaaatatgtacgtttgttacaaagtgtttttgatggaatactttaaccatttaatcagcatttcttgtgctgatcacatttcatatgaatatggtcttcttggtgctgatttgcatttcatcatggtttttgtgcatttgtaaatttagaagttgcattttcttttaggggttgtatggagagagtattattgaaaacatgtgatgtgatattaattaatattacaccctaaagaatttacaagacttgggaaccttaaggaaagagctaaggttgtttcttgatttttgctgtttgagagattcagttttgaaaatttagcgttcaatcatcaattcctatgacttaatttggaaataacttatgaagttgctaagcttgcctgtacttgtttaacagattgaagctacttgtggaatacttcaaaattgctg

SEQ ID NO: 20319 - DNA, 917 bp, Glycine max
  Intron number 1 from transcript Glyma03g37820.1 (locus Gly ma03g37820) derived from phytozome v7.0 (chr-ID Gm03; pos 44308417 to 44309333 reverse strand)
tgttgcgaagaagagatcctcagcctcaacctctggtgaatcctctaatttcgctatatgatagaagtattatatcttcgattcttgttgtagtggcagattttcaatcaatttcttaatttcctcactcgctgtttggattgttcgttccgtttatttctttgatttacaatatatatgttttgtgaaaactgatgatgataaattggcaaccatattagaattttaggttcttttcatgtgatgcaaataaatcaaatagagtgaggcaggcagaagtcataaaataaaactaggatataacttgcttttaaggatgcatagctataacttccatttcattacttagtttgtatgattcaatactgctttcagtttgtgtgatttatcccagctaaaggatatataattttctttccacccagcttgctcttgattaatggcctaatcttacgtgaattcctttgatgaatcaaagacaattaggcaaagcatttttgttataattagcaaaagcaagacataggtcctagtttctccaatttgatttggatcttgaagcgaaatctaaatgttattttcactgagcaattttacttttatatgattcacttcttcaccccaaccccctaatgcctcattattggggtgatcaatggggaatgataaacttcttccttttatgatttcagaggaaaactgccaaacaataattcaagtatctttccttttccccgtctgtcctgaccttccctttactcaccaatcaccatgtgtatgtacacttgccctcagcctgcctgatcgttaggaaagtttgaactgcatctgcattctagttttatatttgaactatttaaaatgtcagggttttgtaatttgtagaaattgacaagcttttaaagacagtgaagcaa

SEQ ID NO: 20320 - DNA, 356 bp, Glycine max
  Intron number 3 from transcript Glyma03g04500.1 (locus Gly ma03g04500) derived from phytozome v7.0 (chr-ID Gm03; pos 4666743 to 4667098 reverse strand)
cagagtacaatcctaaggcaagtatcatttgcttgtagtgattttcgctcaaatatgctatctgcacatgtttacatgtttctttttttgcttttgcatctgaattacaataaagattaactggtggttgtgcagttgcctatcctgctttctggattgttttctgttcctttctggaccagagaagtgtggttaatccaagactattttatatttatatcccacgtgatatcttctgcttgctattcagaatcattaattagcaaatgtattatacacgccagttctaattggttggtggtatactgtactgatgtttgtgatgtgtttgtttgcagcgttttgctgctgtgatt

SEQ ID NO: 20321 - DNA, 809 bp, Glycine max
  Intron number 2 from transcript Glyma03g04500.1 (locus Gly ma03g04500) derived from phytozome v7.0 (chr-ID Gm03; pos 4667135 to 4667943 reverse strand)
cagaagcatccttctgggatcgtgcctacccttcagtgagtatctgatttttgatgaacaaattacactttctcttttgattggcttcaatttcaattgcaagcttcagatggttgaatcttaagttgtggggttaccctttttgataatttgttagtgataagtatccaactaagtcaaccgttatgcttgtagagcctatccacagatcacactattgcaagttctcaattgtgtaggaattttgctcccttaagttttgtgacttttgtctatttggcactttaacagacttgttgagtgctatttttgaatatttatgaatactttacatttcttttatttttttatgtacactttcaattatcaatcatgactgtgcattacaaatttggaagattttagattgcatccactattttagcgttagtgatcccactgcgtcctgctatgccactttaggaatttcctaattgggttttaacttttaagaggtggctgtttatgttgtgatctactctctaccatttgttgtatttgattgataacatttgcttttatttatatttgaatgtataataattttgcttctattcacattggaatgctaaggattttgcttcaattttctctggattatttaacaattttttttttgtttacaatttactctggattatggaaataagttgcttctattttcattagcatacatgataattttttctctatttatgcggagtaatctaataatcaagctgtttgtaccgtcagaaatattgtgtccacagtcaatttggactgtaagt

SEQ ID NO: 20322 - DNA, 1038 bp, Glycine max
  Intron number 2 from transcript Glyma03g35740.1 (locus Gly ma03g35740) derived from phytozome v7.0 (chr-ID Gm03; pos 42848729 to 42849766)
gaggtattctaatctaattccaatactcatacacggcctttatactttgaggacgattttctctattggaatggacaaattgcatactattaaggttaggtgagaattatgtccatctctctttatcatcgttaaataggtgggctcctatcaacctttgttaatctttatggaaagagggggatggaccctctcgttcacatatttatatgaaaatgtcaatgtgaaaattgtgtctgtctgtctgtctcttcgtagatgatgaatgggtcctgcaatataatgtctgtaaagagagagatagacacaaatgtgaggattcattcccacaaattttacatgaccttatcaggtgaaaatatcaaccgagaggattcattttcattgaagttaatttatgctttggatagagattttctgtttttgtgttgttaagtgttgaaatccatccctctagcatgaaatgccctgtcgtgttagcagtattttttgacagctctgttgctttcactatattttggacaaattaggaacttatttcaatgaaaactctgtgtaggtgtcagctgcaaaggatatgcatgcagtgcataattgcacatggtccctttttgctgctcttactagtaattaatgatattattaatacatctactagtactttgatggttgctaaatagaagacatacaccgaaaaagataataagtatagcatgccaaggttctattcacatttgagtggccaaactacatgccaaaattaatttacacatttttctgttactttggatggaagttcagacgtttagttttgttctttattttggcatggtttgaaatgtaccctgacgaaaatgcaaaacaccctgttaactgtcatgcacttacctatttcaacatacaattgcatttcgtttttcattcagcctttataattttaaattcttgagaataatacttgatgtgcgtgtctcctaacagtcacatcttggttttcttgcagattgaaactagatcccgagcacagacccctgcttc

SEQ ID NO: 20323 - DNA, 1010 bp, Glycine max
  Intron number 4 from transcript Glyma04g14970.1 (locus Gly ma04g14970) derived from phytozome v7.0 (chr-ID Gm04; pos 15351707 to 15352716)
ttcttgcaatatcaggtacacttttcacaaaaatgtatctctagatatatattaattttggacagacacacttcctttgtaaccttctatctcaaggattgcaattgcacataagtttttattcgttgacaaaagggcaagaggtcatatggtatcttcctccagggatttcttgtaaactggtcatattgagtgcacttcacttatttgaatttccaaaattgggatcttcaaacaaatttagataatgatcataatttagtgtttgtttgtaaactggtcatattgagtgcatttatttgaatttcaaaaattgggatcttcggacaaatttagataatgatcataatttagtgttcgtttttgaagtcgagttggttagtctaggagcattttttgcaatgtaagtttgtagcttttagtatattccatgtagttatcttatttaattgtcttcaatagaataacgttttgctcttacataaagatctgatgtttctgttagttgttgaattaatctaatcacaaagatgaattagttactataccattatatcttgaattctttgattaagtagatcaaacaaaactttaagtgggtgtagatttattcagatttcaaacttgccttaaaaaactcatgcatgttgtaactataacttctgtgagatagctcttttatcattttctatagaaaaaaaaatgataattaggcaagtaactgtataatcatccaactagctaagacattactgacataatatgaaatttttttataggttcctgattcgattatataagtaagcttgtttagataatacattctaccttgtttagataggagtttttcttatcagcttttgaattgtattaatttatttccttttaacataggatcaaagacgtgcagtgtattccttttgcattagttaatagatatgctgcttaattactgacttcatttcaactgatcaggtgttgctattctaatcttccagcttacactgtac

SEQ ID NO: 20324 - DNA, 917 bp, Glycine max
  Intron number 4 from transcript Glyma04g34980.1 (locus Gly ma04g34980) derived from phytozome v7.0 (chr-ID Gm04; pos 41276240 to 41277156)
agaaggcagtccagcaatcatcatcgaaatctcaggtaccctttgaaatcataacattatatttggtgtagtctttttaaaggtgttgcatataatattttaaatcaaacaccaatatataagattttaaatcaaacaccagtatatacatactagttcctacgtacgtacctggagttgctataatcaaaaagcttaaacaacaacgtgaattacaagtagtatatgataacctgaaaaaataaaccatagtccaagtgaacatcatgaataatctatgaaaaaatattttgataatgttccaacttgtattgttgttcatattgatagtaaaattatataagtttcttaccgtaaagagagagagagagagagatagagaattttgagcccaaactgatgcggcacaactcagttatcacatttataagcagcaacctctaggtttcgaaaaccataatacttcactagtttataagcagcaacctctaggtttcaaaaaccataatacttcactagtttttaagtgaaacagagaattatatgggcttaagaaagcaccaagataatggtttgacagacttaaaaccattcttttgcatcttggcttctttgcaagcaaatgtgatccatctctcgttatcttcaaagatgattctcatatcatttatgtttttgtgtatgttgatgacatcataataattgctagttctgcaaccttagtccaacagtttacaaccaagtttcattttgatttctcttaaacaacttgggaagctagattacttattgggtattgaagtcaattctatggttgatggttttattcttgtaactaaaagcaaatacattagagaccttttatagaaaactaaaatggctgaggctcaacctatatcttctcccttggtttttag

SEQ ID NO: 20325 - DNA, 750 bp, Glycine max
  Intron number 2 from transcript Glyma05g03060.1 (locus Gly ma05g03060) derived from phytozome v7.0 (chr-ID Gm05; pos 2333099 to 2333848)
tccctcaggtagggttactattgttactcactttttcatcatacctgtcattgttggtcgcataagtttttaagtgttttattttttcaaaaagaaaattatctgcctacaagagaaagtattttctgaatttgatttttttataacacttctattatcaatctttgttttttttttattgtttttttatctggatttcttgaaccaaataaaaccatgcgatgactgatttgatgaaattagagttaaagataaaattgatgagaaaacaatcctttcttctggaaagggataatttaatatataagaaagtccaatagtactatttttattgtttttatttatgttcgattatatggttacttgtttccttatttttaattaatttatacatatatttattatgaagtagaaatggatgaaataggaaactccataactgatttattaaaaatcaagaaaacttattatatttcttaatttctacaaaataacattaaaagatagataaaaaggaaaggagatacgtagtaatatatatgatctagaaagtacgatgtattctacaattactctcataatagattaagcagtgtggattaaccttaaacatcaatagtttttgatatgacggaagtatgatacatagattcctatactcttatgaaacaaattttgtatgtttgtttaacaaatatgtttgctggttgtgcagttactcggctattgcctggatagcttcatttcaca

SEQ ID NO: 20326 - DNA, 255 bp, Glycine max
  Intron number 1 from transcript Glyma01g41970.1 (locus Gly ma01g41970) derived from phytozome v7.0 (chr-ID Gm01; pos 53350048 to 53350302 reverse strand)
taagattcgtgtcgtccccaatttccccaaatccggttcctttttctccctttcccttttaatcttctgttttctttaatgttttgtttttagactaagaaaccaacccgcgaggctttgaattcatgttttgtttgacttccgtttccaatttccagaaagtcttcttcggaggtttctttttctttttttttcattttcactttagcttggtagctaatgttttttattttattttttgcaacggcaggtctt

SEQ ID NO: 20327 - DNA, 685 bp, Glycine max
  Intron number 1 from transcript Glyma02g16010.2 (locus Gly ma02g16010) derived from phytozome v7.0 (chr-ID Gm02; pos 14442019 to 14442703)
atctcctccgaaaccaccggaggtgtcggcggaacgtgagtttccgatttcttctgttttttcaatttcgcttctattgaactagggtttgtcactgtggaggccagtgaaacagtgtttcgtgtttccgaagactagttcgtagggttcgggctaaccaagctttttcaacaagctaaactgctagatataagatatgtaatttgctttttaatgcaacgtaataaaaataagcacttataagagaataaaaataagaaaaggaaaatgaattaagcttctttcaaattagcttatgcagtaagctaatttgtagaagctctatcatttagcttctctagaagctgattatggataagctgattcgaactaattggagaagtttaattcatttttcttattttcttatcctatgagtgtttattgagaaatttatccaaacagggcattagtgtatttcttctagcataagaatgagtgagccttgaattcaaccgatagtggtttttatctgaataaatgtttacaacttagcttttccggttgttaatatttttcctgtattagtgccttctcactgtgttcattgatcctgctgttcagtttttgttcctttctaaacgcattcaaatgtttttctttatcttgtcattttgtcttttccttgcagctgtgtaatacgagg

SEQ ID NO: 20328 - DNA, 405 bp, Glycine max
  Intron number 3 from transcript Glyma02g43880.1 (locus Gly ma02g43880) derived from phytozome v7.0 (chr-ID Gm02; pos 48573459 to 48573863)
gtatattaattgagattgaaactgacacaacccaggtaattaattagttaatttcgactgtttaatgcccaaggcatgtaaatgtaggggggggacatttgcagattcaaatttcagaatctcttaattcatccatttcttctcttacatgcttatagaggatatatagtgtttgatgaacacccgaaatattcatgtacacacctagagaggaaaataattaataaaagacagaagtgatatatttatagagataaaaaaaaaagggggggtgtgagagtgtatggtgctcctcttgacttaccataagtatttgttatataaaccgaattcataattagcaagttattgaaacatatttaaacatggatgactcaccgtgaagccgaattacatggcagggag

SEQ ID NO: 20329 - DNA, 861 bp, Glycine max
  Intron number 2 from transcript Glyma04g06920.1 (locus Gly ma04g06920) derived from phytozome v7.0 (chr-ID Gm04; pos 5352962 to 5353822 reverse strand)
gtcgagtgaagatccccagtaagttcttagttttacttcaatttctttttattaattcaaatcccgataatagtttaatgtgtagttcgttcaattttagatgaataaaaactattgaacttcgatctgtaaatgaagcgtgtgcttgttgtgatgtctaaggctaatacacgataggacaatgtaggttgtgccgggtcatcaaaattaatttttggatagtagttgtgacttgttcttatgaatttaccagaattgtgtgtgctaatcgaaatttatctggtttgaaatctttttctggttatattttttcttctgtcatctccaacattttttttccttgcacagcatgatcttttcttttctttttcttttaaaaaaatcttgtaaagacaaacacacctcattttacttgacaacaaatcttgtcatttttaggatgtgaaatttaatgcggcaagagcttaaaaatttcatctgaattaataatgtggatgggttaaaaagcttgttggttgctttcatcagttgctttgatggactatattcaaacagttttaataggaagatagaattctgaacctgttactgtctgtggtcattgaaaaggtatgtctcatggtgtttagtgaagtcaaatttagcaaggttttaggaaagtcaatggtttggttacctgaaggttgaaatggcaaaatttaattgtttattatccttgatgcatactgtttggtgcatatctgttctctgactgcacacgggttcgctatagcagcatagcctataaatttgattgtataatggtattggtaaatccttttggcaggtgtgggaacaaaagattatattcttcctggaaaa

SEQ ID NO: 20330 - DNA, 935 bp, Glycine max
  Intron number 1 from transcript Glyma05g01930.1 (locus Gly ma05g01930) derived from phytozome v7.0 (chr-ID Gm05; pos 1397047 to 1397981)
tgacattggtaacaactatctccttgtcatttatttactttgaatttaatacaaggatgatagagtagtagaaatttagaatcattagacaataacagtgaataagtgaagggaactaacatatatttgttactgtacatactcactatatggatgagattaaagtatattatatacagaaatatatttatccgctctatgacttcattaagaaccaacaaattgggatttaatatttaaaaatgatttattgctatttgaagctattgtatgaaactagttgtagcatggttctaaactgcggttgccattgcggatgttgcggcatgaaactattatatgtttgcactgaatatgaaaaagaattttactattattctaattattggtatatgttgtattaatgagatggtacaacttttcattcattttaagatttggtatcccgacatcccgtacgaccacacccatttgaccattgacacttagaagttagaataaaagattgaattatgcgtttttgtctttttagacaataaaagtggaatagaacggttctaaggttccgttgcagctccattgtggctatgctgtggcatttcatgtgattgaaattcaaactgcaattactggctattgtggtcacggacagctctgcaatagcaatattgcggttgtggactccaatctaaaaccatgagttgtagtatcgtaatagtgaggttatgaagaataagctgtgtcaagccttctcgttatatgcctttgcttgtgtgtactcataatggatgatagatttagttggggattttttttttttgagggggggttacagaatcactaattctcatcctccaaagtattactaaggaggctttttgctatacttcttaatatgaattcaaattaatgcatttgattttacacttgtagcc

SEQ ID NO: 20331 - DNA, 964 bp, Glycine max
  Intron number 1 from transcript Glyma02g08010.1 (locus Gly ma02g08010) derived from phytozome v7.0 (chr-ID Gm02; pos 6287033 to 6287996)
ctcgtgaactcaaagccggacttcaccccctaaaggttcctctctctctctctcacttccatttttatttcttcaccactcaatcgctcaaactctaccaacaattattagtattgttcttgtttttagaataaaatttagatacggttttggtgcttttctccgattagaacgatagtttcaccttgataatctatagtgagatatgtaaacttttattacgcggattactgaggtgaaacttcaatttgattagagaatggaatcaaaagtatacgagaactgcatctaagtattgtctattattatgtgtttgttccttaaattagggtaattttgactttgatcctggtctatggttgtgtatttgggacgaaatggtttgcaatgagaagtttggtgattcatatctaggctttttatttttttaatttgtttttcttattttggttttttattggagaatggcaatttaagggcgtaagtgaagtttgcaccaacgcatagacatgcagaggtccgatgtaatggctaaattggaagtttcggattgtgggtatttatattatttgctgaggaagatgataaagaaattaaaattttggattggttttttgttaaggttttatgtaagggtagcctgctttgatgtatcactatgattctgggatctttcaatttgacgtaaggagtggttttaattctggaagagttgattgaatgttgtgttggctgcttctgctttgaagtagttatatgagagatggttatgcacttgattagattgagcatcttgatcatttgagatgcttgttgattatgtgtggtagctatgtttgtttcactctatcttttatcctgcttagaggctgttggtgcaatttaacattttggtggatttattttgtgttgctggtgatttctattagcagcacaagtttgtcttctggtacactcgtcgaac

SEQ ID NO: 20332 - DNA, 880 bp, Glycine max
  Intron number 1 from transcript Glyma03g32440.1 (locus Gly ma03g32440) derived from phytozome v7.0 (chr-ID Gm03; pos 40183523 to 40184402)
ttcttcaaactctccccaaaacctcagatttccacgtaagctctctgttagcttcttctatttccttgtttcctttgtcaccttttatttggatttacttgttgttgcttgatactcgtaaattcgttcggcggtttcaaaatttgtaacttctttgagttctgtgtttctattagaggccaatttataaagtatatgtatgtgaaaattgtggattttgagtgtactcattgactcatttgtgccctcaatttttcacgcttcaaaatttcaggcatcatattctttaacccaaattatgaattttacattttgcatcacgctagttgaggtccctgaattcagaatatagtgagatgagtcctaacacaaaggaagtaaaatactacttgtgcaagttttggtttcagtttggtctgttaaatttaaaaagttttatcttggttccgtaaaatatcttgtcagaccaaaatggtccttttgtctattttttgcactaacaatgttaattttaattgacatggcaaatacccatctgaaatgacatccccctagtttgccatgtatatgtcatcaagttgaccaaattagtgagttaaattgatggaagaaccacttagcttatctactaatttaagaaaccaaagtgaaaatttttaaacttataaaactacacggaaacgagatttagatgagggacagagttatattttagccaaagtaatactcttttttttccagctgattttctttttttgtaagtgaaaaacatgaactacttgttattgttacattgttcaaatcaagatcatagtatgaagtgtaatatgccaatatggtgcttgattgtgaataccattttttaagctcttgcagttcc

SEQ ID NO: 20333 - DNA, 936 bp, Glycine max
  Intron number 1 from transcript Glyma03g26740.1 (locus Gly ma03g26740) derived from phytozome v7.0 (chr-ID Gm03; pos 34223606 to 34224541)
agttggaccacctcccccaccttctggcggattacgtatgtctctctctctctcccccctctccttctcctcttataattcaattcattctgaagaaattaagattttttgtttctgatttaattagaatgctctggaaatataattgtcttgtaatcagaaattgtcatctggataggaagtttgttgacttttataataattacgttttaacttacctaagacgatttctgattagttgagagtctaacaataaaaatctttacagaacttagaaacaattgtttatttaaaactgaactttttcaaatttgtatttaattttgatttgattattcatgtaaaatgaatagtttagattaactcctttttgcctcttatctcttacttgatgcacaccatctatgtgtgtgcaatgatcatcataacttgtcaagtggaaatcattgataagccatggatgttgcattgaatgatgaaccttgaaggatgaaaaatggaaattggggcagagaagttgaagtagatttggggttggttttagtaagtttcattaaagtaaacagggttagaagcaaagacaggaaatcaaacaaaaatcagaaatggggttctgtgacatagtagtgtattgtaccacagcacagcaaagttttgaacagaaaataggtcatgcatgttgcattaaatgatgacagaagaaaaatagaaatggggtagaaaagtttgagctagaattcagtttgattttggtagtagatttcatttatgatatagggttagaggcaaagacaatgaaaacaaaagaagaaaagaaagaattattgaaatggggttgttattagggacatgattagagaatggagtttgaagatattataattataaccatggtgggtgtgttatggaatatggcagctggaacattgaactcag

SEQ ID NO: 20334 - DNA, 667 bp, Glycine max
  Intron number 2 from transcript Glyma02g16440.1 (locus Gly ma02g16440) derived from phytozome v7.0 (chr-ID Gm02; pos 14852135 to 14852801 reverse strand)
tccatatacctgtctctactcctggaaaatttgaggtaattatatatacataagtgctagttatgcttttagtttttaaatttttatccgttaagatttttttctgaacaaaagtttgactttgacttcagtctacaattttttaaaaatttgatttttaatttatgaagagaagtttgaatccttttattttcatttgtttaacagatttttttagatgaaaatcgaatttaaaaaaaaaagtttaagactgcttaaacttttgttcaagaacgaacaatcttaataggaaaaaattaaaaaaactagaccaatcaatttttttttactaagaaatgaatttaaaaaatctttaaaaactaaagacttagttaatcttgtacacacatacatgtacatcaactttacaatttacaaacttaattcagtacatttatgaatatacatgtatgtatatgtgtgtgtgtgtatatatatatataaactttacaatttacaaacttaattcagattgactaaatcaatactcacgattgagttcacacatgttaactaattaaacaaagtagaagatagtatatagttgaatattatatttaaatttatactgatggaagaaaattgtggtgtaggaatttttcgggcctggaggacgagacccagaatc

SEQ ID NO: 20335 - DNA, 929 bp, Glycine max
  Intron number 1 from transcript Glyma02g39800.1 (locus Gly ma02g39800) derived from phytozome v7.0 (chr-ID Gm02; pos 44999421 to 45000349 reverse strand)
attacctgcttgataggcttcaaatccttattaaggtatgccaaagttattcattaaaactacattatgcattattttaagttaataacaacaagaaaatcatgagagaagacatatagataaaaaatgtataatttatttaagaaatttctatgcttgttctttcttttagataaacaatcatgagaggtgtaattatctgttttagtaatattgggatatattaaagtgtttacaaattttttaaagtacttaactggaatctctataatatactaaagttctttataaaaactaaatcttatgaattatcttttcttataattatagaagaaacactaaaaacaaaatatttttgacagtgtaataacttaatagaataaattatatttgctgaaattcttaacttccaagtcgattttcctactaattttattgaattcaaatcacatatcacttttatttgtatattttcttttgttgtcttttctatttcaaaataataccttaaccagaaacttaactattaattaagagcgggaatattgttatttttaagaggtagaaatttcttaatgatatatagaataaggatggaaaaagatcattcacaaaaaaaaaagggatgggataaagataaaggaaagtaatttcaatctaatttttttcagcaagaaacttgtaattttacagaggccacatcaaattccatttttttgttaattcattgtcttgttatccattttctttttgtagtatgcatctgcatatcgacaactaatatttatgcttgtttggtagatactataaattaaaaaatactttttaaaaagtattcttaagaaattaccaaaaaataattatttcataaaaaatccaaaccttcttatagttaatcatctttttgtgcgtaatattgtaggacctat

SEQ ID NO: 20336 - DNA, 580 bp, Glycine max
  Intron number 2 from transcript Glyma01g04530.1 (locus Gly ma01g04530) derived from phytozome v7.0 (chr-ID Gm01; pos 4109445 to 4110024)
ggagatctagcctcttcgacatcaccaccgatacggtacttccaatttctttttcttctcctgccactaaaaaagagtattaaaaaaaaaactaaaactaatgacgaaataattttaaaaaaataaagttattaaattttttgtggctctaaaatgaacaacattttttttgccattagattttatttactaatttattttaagttaaattagttagttgagttttgaattattaggaatttgtaaaaaggtttctaaaataataataataataataataataattattattattattgaattcttgaatatgtaactatttttaaatcgagtctctataatttttaaattgttataatttttaaaatcttcataaattaatttcagaaacatacttttttaatttataattttaaaaaaataatttagagatgtatttaagtttttttttccatataatttagaaattagctgagtaatttaacatttattttatagtgcaaataataatattaatatgattttagatttttggtaatggatctaattttaattgattttcattttggaatttcaggtg

SEQ ID NO: 20337 - DNA, 467 bp, Glycine max
  Intron number 2 from transcript Glyma01g40660.1 (locus Gly ma01g40660) derived from phytozome v7.0 (chr-ID Gm01; pos 52348362 to 52348828 reverse strand)
ccgggaggctctttcacagtggattagctcataaagtatgctcttacgttcttcactacaattaggcttttcttttttagcaatggtgttttctctaggataaagacttaacagttacataatattgagaaagttctcagtcttgcatgtgagtgaaccaacataattgcttctctggagtctgcatttgattatgattgtgtccatgttagtgttttgggaatggatgaatctcgtgaaagatgttcttctcaactgcctaccctgaaattggtttatgaactgcatcataggaacaaaaatattagtttgttggtaattggagtcaggacatccaggctagtttatgatgtgattggtttggatttaaagggtatggtgattaacatgatggttaacatgtgacattgttataacaaaggattgatgaagactattctttggttttatctgctgaaatttagggt

SEQ ID NO: 20338 - DNA, 718 bp, Glycine max
  Intron number 2 from transcript Glyma02g14210.1 (locus Gly ma02g14210) derived from phytozome v7.0 (chr-ID Gm02; pos 12746336 to 12747053)
ccgtgagtacttttatcatttgaaagaaactaagttttttttctttgtcttaattattttataatgtagaaacatctcttcatttcaagcatgataaatcatattatgaacttcatttgggcagattgagtgttattattctagccatggaactttttttatttataaatattatataataatgttgtttttgttatagttactgtaacttgataatatcattatcagtttgaatgaatacatacaaagttaaacctagtcttaggatatcttcataatctttaaattttggttgatatatgaacggctgttttatttgcttttcttgtattcacttattgtcttaaaattgctgatacaaccatcattagaagttagagtattccctataggaaatttccaaaatgatattgtttgcatagatgtgttttaattgtcatgtggaatagaaatcatccagtcacttatagttgttatcatctgatgctgaggttatgtgcatgtgaagggttcacctcctgattgaaatatttgtttgacatttctagctataaccacatacacacacttattcataagataataatcatttgctctttggcaaaaaaatggtttatttttttgcaactctagttttggagttctgaatacactaactcatacctttttcttttatttatcctgatctcttggcattcttcatctctgcagtccaaac

SEQ ID NO: 20339 - DNA, 855 bp, Glycine max
  Intron number 1 from transcript Glyma03g22840.1 (locus Gly ma03g22840) derived from phytozome v7.0 (chr-ID Gm03; pos 29470887 to 29471741 reverse strand)
tattatcagtacccgccatctactctgttttataggtcagtcacttaattgccatcatcctaatctctatttccataaaataaaccaacccaaattgtgtagaaaaaatgacacgactgatcagtgactcacacatatgcaattcattatgtagatgcagatgtagattcgaaaattgattattttatattttttctattaactggttattttatattttatatattccgaatgtacgtacgtacctctttaattacattgacataaccaacgtttcttatattatagatgaaaaagataatgtaaagtggctagcattcatattagttggttcacatttgaacttaaaaaaaatttgttcctttcaaatagtcattaaaaaaattaatcagtttaacaaattaagttttgttttattttatcacgatctcgtctcagatagggttttaactcttaattaagaaggcagggataaattaatcttctcaactaaaaacaaatacgtatatttggtgtactcaatagatatggtacacaactctgtgctcatcagttcttgctatacgtacgcttgaatggtacacatgagaacttgcatggtttttcataattaggcttaggtagatggtacacaattctattggtttaattatttgaatgaaagcaaagaaaatagggagagaaaacatgaataaacatagattgtcttttgtatgaaaaatatgttgtattttgtgcttcaataaagatttagtactattgtgtccttttttcacacatattcagtggataaataaatctttaatttcgccaatttcagaaatcttagaaaactgaaatacttagacaactttc

SEQ ID NO: 20340 - DNA, 1017 bp, Glycine max
  Intron number 1 from transcript Glyma01g04650.1 (locus Gly ma01g04650) derived from phytozome v7.0 (chr-ID Gm01; pos 4287112 to 4288128 reverse strand)
aacgagaaggtcactctctctttaccttaacattaatttcatgtttttaatgagttccattgcaatattggataaatgggtctatttgttgatgactgatcatgtgttgaatgaaagaaaaattctatggaatccttagaaaatttaagggttttggtttatggagaaaatctctcctcttctttctcgtgtggcatgtctaaactcattcaactatttgctcgctgtatcaaaacccttagatttttggaaaataatccatggacacttaacactagatgtcacccagagagagaaagagagagaagtataggtatgatagcctatataatatgataacaagagtgatagagaaataataattattgatggagtatatgatatatataagtgtctatatatatcatcactgttgggtaccattgcaactctcaaaatgatatcttggtgagtgtaggacagacatgatacccacgagtccctgatgtgaatgtgagaagtgtgactatgtatatgaaaaattaaaaagctgagtttttagttgtttgaaaagtgttgtgcttaaaaatactgttagatgttagaaacaatccgagaggcaatctatttttttttctttaatcgagaaaaccatttgttgcaacttgcaagatctagctagtttagactcctgcagtttacaaatttgtgatgtaaaagtgttagacattcatcctattccttgtaacagggaaatgcaggctggttaagtaatcccaaactttttagaattaaacaagtttcttatgctttgaaaatgtaatgataattgtaatttttattccatgtcgttcttatgcaatgcatgccaagttccaaaatgattctttgtaaatgaagtcagggaattatggaaaaataaaattgtactgtttttttctccatttgattgaagaaatcttgcttccttcctatttcatcaatttctgtacaccgtttacaggagataagacacttgtgtgcttatcttgttgatct

SEQ ID NO: 20341 - DNA, 534 bp, Glycine max
  Intron number 1 from transcript Glyma02g07850.1 (locus Gly ma02g07850) derived from phytozome v7.0 (chr-ID Gm02; pos 6205087 to 6205620 reverse strand)
accttttctctcatcagaacacggttagtgtgtttgggcctcttcattctacctttctatacttttctgcttttggcacttatttgatacaattttcttgccttcctacttgtttccaagttatacaacttggttttccttgaaaacccctcctccccttttggttttttaaattttaagtgatgaagtgattcttttatgtatgtaaacatatgaacaaaatttagatacagtttctttcttaagtgttgtttgcatcattctttatttttgtgtaacaaaggtttgcttttaaaaagattaagtggattttactaaaaggaaactccaattctgattgaaaaactgcacaaataacactttaagaagctgtttttaagtttttgtccttaataaactttgcaaactactttataaagtttcagtatttattggtgtgtgtatatataagtgttttatatgctgccttgtgtggattgttccaactaaatttggtaccaaaaaatgtcagcaggaagtggattttggcctgga

SEQ ID NO: 20342 - DNA, 852 bp, Glycine max
  Intron number 1 from transcript Glyma01g04300.2 (locus Gly ma01g04300) derived from phytozome v7.0 (chr-ID Gm01; pos 3803758 to 3804609 reverse strand)
gcgctcaagtgcgtttcgattctcctcttgccgtgttgctttctgtatttttttttttatagtttgcggtgttgaagaaggaaagattgtagtggagtctctgctgccatatattggattgagttttttcaatattgagattaccgtgtttgaaaaatgttatatataattatataacatataagttatatgtttcttttcacccctcaaaattatatatgctataatctattgtattcaagggattgtggtgtagatgataggagaaattagtcttcttaactttcatgttgtggctgggcgttgacagaagtagtcagtgcttgatattgtttacttatacttaattgtaagtgttaaatgatatctgcttggtggtaattctattgtatgtggaagaaggtgcaccaaaggtcgttttatttgatctgatgaaaggaaagagaaagggctcttaagcatcatagactagaactttggaaaaaaaattcaattttacattcatttgatttgattttatcctgggcacctgtttgttttttcattttttttcatacttgcaaattgttcatctatataaagcccaaataaccctccaaaaataatgtaggaatgaagcctctgaatcactgatcatgccatcatgcatctgatacaaagcacataacagcttacagtaaaacttaatgtattaaaggtgttttacttgaatgatttagtactctttcaggtgcaccgggttactctaattgactgttcttgctgttttgttttcatctgaagttctgaacaggattgattaatttattaattagctaaatcaatttgatttcagatatcatccggacaaga

SEQ ID NO: 20343 - DNA, 577 bp, Glycine max
  Intron number 1 from transcript Glyma04g42250.1 (locus Gly ma04g42250) derived from phytozome v7.0 (chr-ID Gm04; pos 48019957 to 48020533)
attctgattctgatttgtcacacacacacacgcaggtaacgtttcttcaacctctctatacgtaatctatgactgggttttttctctttgtcaacacttcactatgtgtgtggggttttaggttcattcgatctctgcaacataaatccttaatctatttctttcgatttctcttctcctgcctcatgtttccaacttagttctttgatttggcgtgattatgatttgcttttttcctccttatgcacgattcagtgttttacttccccatagggtttatttgacatttctggatttcgatcagctagtcaattgagcctctcttctgtcaattattcagttttgatgctcattatgttgcattctttctttctgagtctgtttttgtttttattaaccacctattgaattgacggaatgaacgtggattttttgaatcctagattactgatcggataagtgctgttgatatttggtacgatgcactctacaattttgacaggtattttattgatgttgttacattgtatttgggtttgcagaaaggttgaaagtagagggacttgattcagtggag

SEQ ID NO: 20344 - DNA, 347 bp, Glycine max
  Intron number 1 from transcript Glyma03g29860.1 (locus Gly ma03g29860) derived from phytozome v7.0 (chr-ID Gm03; pos 37879194 to 37879540)
tcgacggctacttgtccgctctctcgccgcttcaggtgaattcttcgttttccttcaatcctagctttttcggtgacgcaattcgatgtgttattctgcggtgcgctattaggcattgaggtgttgttctggagtctggaccaatgcattgcttaattcctgtaatcttggattaatttcttgtggttattttgactatcgaacacttggatttggttttatttatttattattagctggtgatcggtgctttttcattcgttatgattctatttctgtttcctattctgttgttgattctgatgttaaatgttttgcagctcgtacgcagcaacagtcggcggttt

SEQ ID NO: 20345 - DNA, 420 bp, Glycine max
  Intron number 3 from transcript Glyma02g02590.1 (locus Gly ma02g02590) derived from phytozome v7.0 (chr-ID Gm02; pos 1921046 to 1921465 reverse strand)
gagacttagtggtatgtgccataaaagttgaaaactatgattgtgcatttaattgatctaaatttggttaggagagacaaggattttttttgtttgttaagggtttggattttaaagttccactgtcagacgaagtattctttattcattaaatttgggaccaagcaatatagttctctgcttcttcccttttgattgcctagatttctccattatttccacaaatgcatgcaagcagcttgctatgttcttttatttataatatacaattataggtatttttaactcagaaaatctatggaaattgtgatacacaataaggaaaataaaagataaattgtattaatggtagctgggattttcccctgtggtgggtagggtgctatgttactgaatcttatgttattggtattattgaga

SEQ ID NO: 20346 - DNA, 1061 bp, Glycine max
  Intron number 2 from transcript Glyma03g32970.1 (locus Gly ma03g32970) derived from phytozome v7.0 (chr-ID Gm03; pos 40675484 to 40676544 reverse strand)
ctcatcaaacttactcacgctctgtatctctgcctgtaagttatctgatttatattacttggctgttagtaaagtttgaaggtatagtttgtaagcaatgtatgcttttgctcaatgagaaaatactgaaattttagaaaggattgttggactcgtgtttctttattcctgtgtcttatgtcaacaattttcagtagaaaatgtttgcataaatgcataacgtaaaaatacaaacaaatcaatgccctgtagggagtacagaaaggtttgttggtatattgtaagcatttatgcaaatattttctatttatgtaaagggcaatttggttcttgaggctcccacctatgtatcacatatgcagtaacacagacttatcctggtaagtgaagagccaatttttaaggattgaatgtgacctaggtcacaagcaaagcagcaaccttactggtgatgggttgcactcaagtgtttctagttgtgtatcacatggaaaattatattttaagcatttaaccaatggttacaaatacacttacccccccccccccccccccccccttttctcattttttgttgtattggaacaatggaaattttggaaccagaggcatcggtttttcggttgcaactgaaaagattaatgtattcaatgctgttaattactttgttttgagagtatcatgatttaagttatatttcggattctgtctttatgtttttggttaggtttttgagtttctattgacaatgggataagtaaatcttgtaaaggttagtatgttacaactttgtctctgtaacatttccctttctatttggctcctcctgctagaagtgaggtttgaagggattagaaaattttcaccttactatatatgcattcaagacaggtgatgcttgatagaatcgtattctgtgaagtatagtttttggctcataaatatggactaatatctatcttattcttaacacgtgcctattcttcattaatggcttccatttatttctgtatttttataccacaggctcctctgaagcttatacctgccataaaaggtag

SEQ ID NO: 20347 - DNA, 835 bp, Glycine max
  Intron number 1 from transcript Glyma02g41320.1 (locus Gly ma02g41320) derived from phytozome v7.0 (chr-ID Gm02; pos 46477324 to 46478158)
tcagaggtaatccaaattctgggtcttcatgaaatccaaattttatgcatgttataagatgagcaactgttttctgttctgttagaatccttgcaaacgttttggaatctgtttgttgcaattaagggaggatgctgtttatgttttcaatttgagttgtgtgcttgtgaggttttaggtgtctttggaaaatcaacttcattaagtgcttatttagtaagcctggctcttgtaagctatgaagtgccaatttttgtaatgcattttatcataggtcttattaagataggagtttaatagacatccacggttagtataaaatgttttttcactattaaccaataagaaatcatccttgtatgacttttatagtaagacaaatgataatcagtgccttaagcgtattgggtaaaaaactaaaaggagaaagatttttattggtatgcgtaaaattgcactgtccatgactttttttatgctctcctataatctccacaataaatactttctctctttagttccttaaccaatgccctaaggatactagttagcaagacccttatagtaattataaaaatcaacaaacttgttaattagtttgtgattagaccatagtataataaaacttaaaaatgttattcttaaaataagcttaaattttgttataggagttataaactatttccataagtacaaataagctttgtaaaagctctttataatgcctccttaatttaaagattgtattgcttcttctggagatgccaagtaatgatatgaatatattttcacttctcaacttttctttgctatacaggaaaggcttttcctggtg

SEQ ID NO: 20348 - DNA, 959 bp, Glycine max
  Intron number 1 from transcript Glyma03g09870.2 (locus Gly ma03g09870) derived from phytozome v7.0 (chr-ID Gm03; pos 11887131 to 11888089 reverse strand)
aattctctgaatagtcaagtggctccattaacaaagtgaacgaagttccactttttttttcttgtactttttgctttatgattcttctattcctaaccagaatcattttaagttgaaaagtttctgaaatctcagttacacagtgtacaatcactagcatcagccaaaaagcctagtgtgctgttatctttctcctgtttggatatttgcttttgcatttgcatttggggctgcaaactttggcttattctttagatttttttgagtttgtttgtttgcttggttgcatctgaaagatataaccagaaacttttaagtataggggagatttttgttgatgggtgcttgttggagcagtaggattaagtctgttagtccttccaatacaggtaaggaacttcttgatttgcatgttacatcattttgtttactcctaatatctgaatgagttaatttacttgacaagatttactttttggagttagagtgaatattggggttggttatcacacaacttaaatttgttaactttatgaagatttgtgctgcctagacacgtatgctagtctatgacatctttgagatccatgcaatttaaggatgctatgtattatcttatggtgtgatctgtgtttcttcatagttgagtttcgtcttggatgttcattgaatgcctaaattctagatttgggccttagtgtaaagttttaattttttttaaacccctttgagaagacccttcagtaattcctggtggaaaaaaaatgtaatttgaatttgagagaaaatatacttagcacagtagggataatttgtggctttagtgaattccttgtaaatttggaagttagtgatgatgaacttgtttattttgtttgttttaaggcactatggtgattgatttttgtgaaattcttttggtatttttgaagggttcacttctagaagcgtcagcagag

SEQ ID NO: 20349 - DNA, 1030 bp, Glycine max; identical to SEQ ID NO: 16759
  Intron number 3 from transcript Glyma02g23860.1 (locus Gly ma02g23860) derived from phytozome v7.0 (chr-ID Gm02; pos 24261315 to 24262344 reverse strand)

SEQ ID NO: 20350 - DNA, 944 bp, Glycine max
  Intron number 1 from transcript Glyma01g05160.1 (locus Gly ma01g05160) derived from phytozome v7.0 (chr-ID Gm01; pos 4825555 to 4826498 reverse strand)
cagctcagagctccaaatccacttctggttggtcttaattagatcattaccctctttcttcttcttcttcttcttttttcaaggcttgtgattgttatggccttatgggaactgggtttcagagttatgggttgatgatgacataatgttgtaaaaatgtaaatttttttatctcttggtcacagggttggatataatttgacagttttctcaaagtagtataatatatgtatttttttttttttggggggggggggggagggggtgttgtgttttttttttttttgttgctgttaatttttagtgtttgtacatttcagcttgaaatattactacaagggtttagatgcttcaaaatatcatctagtaattttatgatcatgggtttttttattttagtctatttgtcctccttcaatttttagaatatggattgttttgagaattgaagtttgattgctttttataagtaagttgtcttggaatcgtatgaaataaggagctcagttcgttcccatctttatatctgaagttttataattttgtgtttatttttttatgttaaaaataagcgttacatcaaaatggtgaggcaaacttttaattgagttataaacaatttaaattttaagtgggagagtttggagttcataaaataattaaagtggaagatttggctttgtttttctgtgattatgtggattgggggttgaaatcatgaaattgagttataactaaagaaaattgctgttgtgttgtgatgcacaaagtatgaatttcttgttcagaaatgggtcctagtattgttgatggttaaatttgaaagcttttttgttttgtttttttggctcttgcttttgtctctgtaggcactatggattaaccttgtttgtctcccttgtctttcagcatcaggaatctcaaaaactactccttccagttta

SEQ ID NO: 20351 - DNA, 414 bp, Glycine max
  Intron number 1 from transcript Glyma01g42260.2 (locus Gly ma01g42260) derived from phytozome v7.0 (chr-ID Gm01; pos 53565255 to 53565668 reverse strand)
ccccgacccaggtattttttgttccccttaagtctagacttttacttaatcagatttttttagcaattgagtgaaattcgtgtgcaagtgcagcctactaaatcatttaggttccacttcctattttatgatactcacataaaattttcccaacaataaaattttttgttgacatttctatatgtttgcacatgatggaaaatctgcttaaatattagtatcagcagtagattttgcagttttttcttttcaccttttccatcaagattcagagcatgtaggtttctttcatgtaatcaagtttgactgctgaaatgcctgccatgcacaaaaatgacaaaatcaaaacagaataacgtagggcattttcgttcttggttattttgtttctttcctcagacggagcaaaattcc

SEQ ID NO: 20352 - DNA, 748 bp, Glycine max
  Intron number 1 from transcript Glyma04g01090.1 (locus Gly ma04g01090) derived from phytozome v7.0 (chr-ID Gm04; pos 649572 to 650319 reverse strand)
gctccaaatgtaaagttgaggccacgaatctaagcgcctcatactattaaaagtcaataaccatcggaacgttcacgcgcaacgtgtcttcacttcgccaatcacaaaggaagaataaattatccaaaaatcaaccacgtcagaggcgagatcaacgcggagaagcaattatttccctcttacaaaccaaattttaaattttgcaaaaaccaaacgtattctattatgggcggtttcctgtgttaaatacttcgtttggctgttgactctgttttttgaaaactgctagcgccaaacttcgctgtagtaacacacactcataatctcaacctataacggaaaacccaaccacggtggttgtggcctgcgattgtaacagtcaaaaccggcgtgtgattttaacgtttttgtttttatatgcttgcattggaccaggccagttttgttttttttaaattctaggttcggtcaaaaataagaatcatcgacggaagaacttttgaatttacggagccatcaacgaacgatcaattcaattaattttttttaaaaaaaaaaaaaaagaagagagagactactactaataatagtcaagccccaccacgtgaccaaatatcacacgctctcaattctaatttctaatagtatttatatttaaattgaaaaaggatacaggaacagagagaacggaaatacgagagataaagttaaagaaattaaatagcaccaatttcgcccacgaaaccct

SEQ ID NO: 20353 - DNA, 878 bp, Glycine max
  Intron number 1 from transcript Glyma03g34990.1 (locus Gly ma03g34990) derived from phytozome v7.0 (chr-ID Gm03; pos 42286171 to 42287048 reverse strand)
cggagcttccctcgccgagtcgccacccaactgaggtttgtctttttttattattataattataattgtgaagttttttcttatggtaattgtgttatttttttttattgtttaattatctacctggtttggtttatggtgagtgagttgaagaggaaaaaaacaggactcgtgagtcgtgagtgaagcttttatggttcggtggtgttatggttttttgtcggtaatggccggaatgtcgcttttcggtgacaatcatagccagcccagtctttctgaaaattgttaaagaacagaacaaggcctgtgggactgtggggagggttacatatgtcaatttcatgttcttgttttgtttttctggtttttcataattgtacttttcgatcgtgtttctgccatgcaaatcttttctctctctccattctactgggttgtttggtaaatggctttcttaaagggtgacaaattatgtttttcacttctagtactgatttggttgttcggtaaattactttgtcaaaggatgataaaaataaattatgtttttgtttgttctcttgtttgctgtcggtctctgtcgttagatcccacattccatttactagaattaaatagtttctcatttgtaattttgtttgaattactttgaggctcctgtagccaacaaaaaaggagtcaataactatccacttattaaagagttgttcaagtctaataaatcagttgacattaaaaaatcatgctaataatatgtttataacaattttaatgacacatttaataaaaaaatattattttgtcactagttttagttttttatagtgataatcacttaatgaatgtttctgtggatttttaataggagaaagaaagta

SEQ ID NO: 20354 - DNA, 712 bp, Glycine max
  Intron number 1 from transcript Glyma02g14650.1 (locus Gly ma02g14650) derived from phytozome v7.0 (chr-ID Gm02; pos 13237779 to 13238490 reverse strand)
gaattcggtcactcccttactctctctcatattatgtttttttttcgtcaaacattttgaaaacgaaataatcgagtaatgcttagttttgtttttatattattattattattatttgaacttaatatgggcgtaaaaataaattagaattttatataaattatgaatttttattattattaaactgaccttagttagtgcagcttattttttttaagtgcaaattttatttgtgtttagtttaattttgatgctttattattagtaaaacaaaattgtattattaattaaataaaacatgttagtaatatatttttttaaatattcttttaaacataatctttattatgaactatttttttaaaagagttttactttttaaatttttaataaattttaaataaaaaatgtgttagaattagatgattatgttcctaatactttttaattaaagttactctaagcattatttttaaagtaatttttataaaataaaattaaaaattatcatttataattaaaacccaccaaggttagctgggtgaaaggaaagttattaagtttgtatgatgttttatgtttaaactccattactgttatggtagataactaaaaaaatatagtactttgtttaataattaaatgatgagaagaattatgcatagatagtgtaatatattttatagaatcatctaatcgcaattcatcaggt

SEQ ID NO: 20355 - DNA, 520 bp, Glycine max
  Intron number 1 from transcript Glyma03g02020.3 (locus Gly ma03g02020) derived from phytozome v7.0 (chr-ID Gm03; pos 1807972 to 1808491)
tgaggtactatatagggtatatacatatgtacatgtactgattaattggttaattttcttcaatattatttggtggtttgaatctgtaaaaccactgtaataggccatggtcttttatgttttctggagaagagagaaaataatgagtttattgtttctttctgtttgtggaaacgaggacaaggtgagtggcttggagatcaatcatgcttttgggattttcattggaaatttgggctccaattgtactatttctgcatgcaactctagtcaatcatccagataaataaattgtttgtgtgctgcatccgaatcattgcagtttctggtatgtgaagttataccgcaaaataatccctttttctaatgcttataatatgtgtataacaggcttcagtttatgtgaatttcaaaacctgggtactttttcatttgttaactataatagatcgattagagctttttgattggggatattttcaatataatgaaatagttgacttggtttgttatttcagct

SEQ ID NO: 20356 - DNA, 805 bp, Glycine max
  Intron number 2 from transcript Glyma03g02020.3 (locus Gly ma03g02020) derived from phytozome v7.0 (chr-ID Gm03; pos 1808677 to 1809481)
aaagtaagttaaagaaaactttgaataatttactactcctacgatgttattattttttttgttgatcatcaaaatataatagtttttttaaaaaaattattttataaagaaataaaattttccactgaaaaaaaaaaagtaaactataactaaacttttaagagaaaaacaaatgatttataaattaaatttttgaaagaaacagataaattaaaattattaaaaaggttggtggataaattataaaaacaagttttttcattagaaggagataaaataaataacttataaaattattttttaattaatatttcaaaattagatagtgtttattttctataaagtttagtattaaaattttatttatttaaaataaaaaattaaaattttgggtataaagacaattgaattgtccaatccaagtaaaaacttatacaagataagattttaacaaatgaaaagaattgaaataaaaataattcaaattgtacttattccaaattcgttaaaattttgactcttcgagtttgcgtacaaagtgaaattttgaaatttcccgtcaaaaacaccttataaaaacatacatgcatggcttgtttttcatcacaaaagtttccggtttccctctgacagtctctcgtactgcctcttgctatgcaagaagtctttaccagtcttataaatataggatttgtgtttgtttttctctcctgaaattgattcgaataatcatggcactaataactcaagaaattggagggtatgggataacatcatcaacttgtccttattggcaaattaggag

SEQ ID NO: 20357 - DNA, 621 bp, Glycine max
  Intron number 2 from transcript Glyma03g09890.1 (locus Gly ma03g09890) derived from phytozome v7.0 (chr-ID Gm03; pos 11928665 to 11929285 reverse strand)
ctgcaagtgtgggtaaatttgagtccttttctcatactatgatactatagctacacttcccactgtgtctcacacacagactcacttcaagttcccagcttttgccattttttcccactctccttttttgcatgtcgatttttttcctccattaattggatttaacccctttgtatttttttaatggattttggatgtaataataacttctttatttttcaatttgcaaaactgttgatttgtatgtgcttgagcttgattatatagtttcttttcaataaataaataaattttcaattttgggtgtggagtgttttgactaactgatgcaatgctctttttttttttttgcttgcatgtgcttggcctgttttaatagatgattttgttgagcatatgcacaggtttgatttctttatggccaaacaaagcatcttaaatttttaggcaattttgcaataagccagttttaggcattgttctgtgattaattttatatgtattggattatattgtcctgcaggatgcaaggatcgtattatgattaattttaggcaattttgcaataagccagttttagccaattttgcaataagccagtttggtacattgtcctgcagg

SEQ ID NO: 20358 - DNA, 707 bp, Glycine max
  Intron number 1 from transcript Glyma03g10320.1 (locus Gly ma03g10320) derived from phytozome v7.0 (chr-ID Gm03; pos 12610253 to 12610959)
aaaataagttttgtttttttgagagatcttgaaaagtaagttaattattttttaaaaactattttaggataaatatttgtccgaacttctccttttaaagagaataaaagcccaaattaagctggccaaacacttaagattgagttgaattaattcttccactttcctaaaccgatactttgatgatttggaatttggatggactccacatctaatggtcaagtacattgaccaaatatacggttctgattgttcctcactttgtccgtgggtcccaccaaactttcttctaacgtttttctgttgttacaaagtacaaacaactcagctacaacataataattcattattctcagcacactttctgtctcttgtacttctttgttgttttgccttagtaacttgtggtggctctataagacaagctttccatttctaatcaaacgataagattgttcttctttttgtgcttgttgggaaggggtttcgtttgcttcactatttggctttattttccctgcgtgacaatctatgttatttatcatcttcatgttgaaatttgagtccttggtgtcatctaaccgtgaacaactaaaaacatgttcgactgtgcatagcttgagatttcatttgttttggtgagtattttaatggttctgttggtttttgaagggtatttgtttgtacaagattctgagaatcttgca

SEQ ID NO: 20359 - DNA, 787 bp, Glycine max
  Intron number 1 from transcript Glyma04g31220.1 (locus Gly ma04g31220) derived from phytozome v7.0 (chr-ID Gm04; pos 35447951 to 35448737 reverse strand)
cgtcgatcactccgtcaaactctacaagtatcccggtattctactctttttttccttatttgggaactgaaccaattgggtttggcaaaaggttgatcaaataacttgaattagtatctcattgtcacattaatttttgggtccttagtccaggtgcttaagtgataataatgtatgttcagggatcaaatacaatttgcatttttctcaatttcaagactagtatgacagcaaaaagaattttagggactaaattgaccatctacacgcaagggatttgattaattgcattttggactaatactatgttaatatgttaagaatgtctctcggtaaaaataaaaaaacaaaaaacacgtgtatatgtcatgagttaatttgataagttcttacaagatgtttttatattaactgtgaatatgaactgagttaatttgaccaatttcattttggactggtactatgccatatgtttggctaaacaagttaattaagtatttatcgaatgagtgattatcatgtgagtatttatgcacaagatgtttatataatcaaaataggaaggtcatatgctgttttggagagttcattgaaataagttgaaaatagcttcttatatacatggtttattttcataagctcttcccagtgcacttaacttgagtgagtgttccttttgtcattgtttgaaatttttagatacatatttcaatgttttaattttaaaggattttaggattgatgcttggcaggtggagagtttgagagaaatattacaaggtttaca

SEQ ID NO: 20360 - DNA, 572 bp, Glycine max
  Intron number 1 from transcript Glyma02g46670.1 (locus Gly ma02g46670) derived from phytozome v7.0 (chr-ID Gm02; pos 50566917 to 50567488 reverse strand)
ctcctttgggggtcaaacaagcggttctcttcgtaatcaatcttatccttcttctttcatgcattatattcattcattcactgttcttctcttccacaactctgtctgtgtttttctcttttacttaaaaaaatatttggtgagaaattattgcgtatgatctgaaaccactgcatgttcgtaagttcagccaatattcatatcacacataatagaattgtattctctctcttttttttagtaaattcaaaaacttgttcacatgttaagagaagattgaccgacatgaaaacgtgataatcaatgaattaatcgctagacttagtaattagcttctaccgtgtgacataacagttttttcttcttatatatgttatttgttgaatttggttaattttgagtttatatttgtttggttttttatttataaactttaatggggttgttttgttgttgtggttgttgtttgtttcctttttctcccacaaaatttagtgacatactgaatttggtttgatatgatatgattttgattttgctgagtctctgattggtactgttgcatgtgatag

SEQ ID NO: 20361 - DNA, 492 bp, Glycine max
  Intron number 3 from transcript Glyma02g38700.1 (locus Gly ma02g38700) derived from phytozome v7.0 (chr-ID Gm02; pos 44054180 to 44054671)
tttgaagcttggacgaaccaacaatcgtggtggtaaacatgacattctccctcaattgaaaaataccctgttggattcttgttctgtttttttatttcctaatgagaagaggtcttgtttagataaatttctccaaaaataattacaggaaaaaaaagatagaatgcattgaacttttcgtaagctaaaaattaatcaacctatgcaccttagattttagggaatttaaatatacataggttgattttaactcaggcgaagctcaaactattttacttttttttttcttttacaagtgtttgtggagaagtttatccaaacatgatcaaagacatctaatgcaaactaggctttgatacttttattttccatatgcatggttttattagcaacagttgttgaatttttgtgcacaagcacaaatgtccatatgtcttttttccttttgtgtcttcaggtcttctgatagcagtgcaaaaggaatatttcaca

SEQ ID NO: 20362 - DNA, 555 bp, Glycine max
  Intron number 2 from transcript Glyma03g30170.1 (locus Gly ma03g30170) derived from phytozome v7.0 (chr-ID Gm03; pos 38118158 to 38118712 reverse strand)
ggagaagactcgggagagaagggtaaccatatcaggtaagaacgaaaagagaaatggtttttaatttttttcctcttttgttctttcttcatgaaatctcgtagtaaaaaaggtgaaaaacacggagacccatatcttgattttaagtttttaaccagcatagaaaaagataatattattatcattatttataaggaaaaaattatatgagtggaaaatactgttgaagttgttttaaataaaaggtttttgtagccaccatactctcccacatctaaccaaagtccttgtttcttttatcaaaattggacaactaccgttttgcattagaggtgcacaagtagccaacactcaaatgctggtccccaactacactgcgtttttgttccttcgaaatattacactccaactttcactttaattcacacccttttgccgtaaattttatgtattcacgtacaagtatgtgcaaatgtatgttatggaattgtgggtctttctgggtctggtttgtttgtaggaaaggacgcacctttgattcggaaaaaacacaag

SEQ ID NO: 20363 - DNA, 872 bp, Glycine max
  Intron number 2 from transcript Glyma03g31240.1 (locus Gly ma03g31240) derived from phytozome v7.0 (chr-ID Gm03; pos 39154975 to 39155846 reverse strand)
tgtttctgtttcctactttccaaattccccttcaggtacgtaccggactgagaaatccatagttgttttttaagcaaagcatttatcttactttgatcatgcattgaggtgtgtgtgtcacattaaaaatgcagtctagctaagaaatagtaatagatgcctcgatgacacctgctcaacaatttggggtaataaagatgtcttatcacataaattattagatgaattaggactatcatgatattcactacacatgattttgtattattaattgtttcttataaattaaaaaatttgcatagtcattggtgaaaaggaaaatcttaacggtagtctctatattattctctctcaaactttttttataattaattagaatttattaaaaataatcaattttactcaattttatttttcatttaatataaatcaggaaattattaaatgaggaacaaaatctaaaaaaatgataatttctaataaattttaatcaattataaaaaaatattaaaaaaaaagtattatatatgttatatagagtgtccttaacatttctctcgcccaaaaattatacacacctaataatgctagacattttcaataaaaaatgaggagagactcttaatttactgggtctaatttcttgctcataaaaattcaacatgaattttacactatagagtgtgtcacaaaattactctcacagattttcctttaattcctagtggcccaagaatttatgtcaaacttattgcatacactgacattttcaacaccagaaaaatgtgagcattttggtttatgtttctctcacttttattatttttattggcataggaattggatctagcactgtttcatcaacgatcgga

SEQ ID NO: 20364 - DNA, 733 bp, Glycine max
  Intron number 1 from transcript Glyma04g16180.1 (locus Gly ma04g16180) derived from phytozome v7.0 (chr-ID Gm04; pos 17203616 to 17204348 reverse strand)
caacgattacgagtactacgtccattacactgagtgtaagaccccttcgaatcctcgttctcttcttcaatttgaatgaattagtgaaccgttagggttttggattggcgtgttgtggttccgagggttggttttggttggggcatgtgttgatttagggtttgtttagatacaatttgaattgattttttcgtatggtgttttgttttggattaacagtgaatattatgtcggtggctatgattataattgatatcttatcatgattagggttcactgcgaatcttttgttatgggaacattgacaagaacttggattgttgagttattatttatgaatttatcactagggacgtgtggattatggctgggttttgttttacacaggaaaagttgcaggttagtaggttacaaagaaaggaataatttgggcttggggtgggggtgttttcacaatcaggggatggcagggcagccataactgctttcatggaaataaaagagcataaaaaaaataaaatttaaatttcaggggttgcgtggttgtctattttcttagaattttgttggtaaataatgttatatttaaatgaacaagataaaaccattttgttttggtatcaatgtggttgatgccaatgtgttatccactatttgttctgtttactgtgtaggcaggggtgataagatgataactgctcagtctttttttttgtagtcaataggaggcttg

SEQ ID NO: 20365 - DNA, 598 bp, Glycine max
  Intron number 1 from transcript Glyma04g04590.1 (locus Gly ma04g04590) derived from phytozome v7.0 (chr-ID Gm04; pos 3422775 to 3423372)
gaactacttagtcttccgttacctccacgaatcaggctcgtcctatccctattcattttcctttttcgcacattacattacaatattacattacatgctcatcaatatcaacatctattacggattcttagttaggagtaactcttcacatttctttccatttacatcactctctataccgaatttttttttatcctcactatccgccaacgtgtttctctctttagaccgcattattattattccaaaaccatggtttctacaaagttcgtagattctgtaatgtttgcgatattagggctattattattcttttcgcttcgcctgcttaaatgattacatatcatatcattttttcctctaatatgatttttattaaagaggaaaatgtgacgaagataacgtgattccctgcctgtttgaaaatcgatcgtggatgtgatttttgatatcaaagtgaacactactgattttagattctgcgttttttacatcatgaagattttttaggtggagaccgtgtttccaaacaaattctgaatttcttctgatggctgcttcgtttcaggttttactcattctgcatttgcattcgggt

SEQ ID NO: 20366 - DNA, 775 bp, Glycine max
  Intron number 5 from transcript Glyma04g04590.1 (locus Gly ma04g04590) derived from phytozome v7.0 (chr-ID Gm04; pos 3424633 to 3425407)
gcttggaatccatcagctccacttcttgcgtctgggtgagtacaagccactttgtaaagaaatcatattttttctcaaaagtatctcctccctgttaatccattctattttgaattaagataatagttttttttctctttccgttcattttattggccgtcctttgttcttctattcatgaattgtttttaaaccatgttgtttacttgttccatacaattatcttcataatagggatgcacagagtaatagtgtagccatccaagaatttaaaatttaatttctaactgcttataagtctaaggaaacaattatattaatcgaccattggacatggtcggctggttatgacaagcattctcttgatttttaagttttaccatgggtctgtacatcaaattgattgaaatcctcaaatttaaatacttttatttgatccagtgttgaaaccatatttaattcttcttttctagcataaaaataagatgttgtatttatatacactataaatttaacctgcttagaaaacttagagtatgacagtgtaatttggtctatagggacaatataaaatgttatctatcataaattaacagtgcagtaaatattttctgtactaaaatcatctaaatggtgaggtggcacagtttctgacgctagtgttatcctttttcttatttttctcttgaccaatttaagttaaaaatttgccaatatgtttgtattattaactattccaggtctggagattcaacagctcgaatttggaaaattg

SEQ ID NO: 20367 - DNA, 834 bp, Glycine max
  Intron number 4 from transcript Glyma02g43040.2 (locus Gly ma02g43040) derived from phytozome v7.0 (chr-ID Gm02; pos 47936813 to 47937646)
cgctgcacggttagtgtttctggccttgtaatttccctttagtgtgttaattggaaataggtttattttcctttactgtgttgttctgtttatctaaatcttaagtgttatgcgtgtgtttggtttctggatcattttttgttttttttgcatcatagtgctttgtggttttgattattgaaggtacttgatcgagcttttgaaatcttacagttttgacatcgtttctagaattggcattcttagttgttagtatcatatgatgaatcaaaaatgttttggaattatgcagtacatgaaggaatgttgtgagaccatcaatttatttatttactctcagaagttctcataattggaattgaaaagttaaatgagtagtgacttattaaatgaaaaggaactgaaggagcactaaagaaaggcaaactgctctgttttcattcttacgaaacaatgattttatgcggtcactcaatcactcgttttattgctcgcttcttattcttctgaaatagaagctcaacctacttagctgtgatttttgttttgtgggacttatggtcaagttcttttttcaattcctagtttaacattatgtatataatgttatgtaaaataaatcaaatcgtgactgaatgttacattaatatagtactgattagaaatacagtatataattattatatattacaaaaatggtaaaatacaaataaagaagtcacaacttttgcaaaaaataaaaaaatgaaatcgcttctttaggctttacctgttgaaattctcaactggattctctataagtcagagttaatcattttttttcctctttcagca

SEQ ID NO: 20368 - DNA, 861 bp, Glycine max
  Intron number 2 from transcript Glyma02g38490.1 (locus Gly ma02g38490) derived from phytozome v7.0 (chr-ID Gm02; pos 43893943 to 43894803 reverse strand)
tgaggacaaggaggagcttaatttccacccacaaggtatgtatatatatgtgtgtagagaaattattgaatgatctgatatcatcacatgtttatattttcaaccattttttttatgtgatttgtagctgagttttattattctaactctttattgtaaaatgaaaaaattaattagttatgtgtcaagtgaagatcagttaagatcatagacatataaaatagtatcctgtatgcgtttttattattagtgtgtttcgaagctgttaaagaaggagcaaatgggatgtgaaaactataaaagagagataattttaaaaagtaaaaataaaatgatatgttgttgtgttgattggattaagagaaataaatgaaagataataatttttttgtcttaaaaattgatttttgtacctaaaacattgattcttttgcttaaaaaactaatttttttatctaaaaatcaaagaaaattgattttttgttattgtttagtttcaaaaaattgacttttgaagtccaaaaaatcgatttttatacaaaaaaaaaatcaattttactataattagaaatagaaaattttgtaattttacttcaaaaacgcaagaaccaaacatacctacttcatttctgtattgttaacttatttctttcttttaaaccaaacacaacctgagtttctttaaatcacttctaaaatgtgaaaaatcagatccaagatacaaatcaaataagtttatttttttgtaagtcctcttatgtgagtgagtttttgattcagtaagctaaaaagggttccacattttaatgtcaaagctggcaactttgagtgattggaggctttatgtctgttatgcaggtg

SEQ ID NO: 20369 - DNA, 498 bp, Glycine max
  Intron number 2 from transcript Glyma03g29280.1 (locus Gly ma03g29280) derived from phytozome v7.0 (chr-ID Gm03; pos 37283016 to 37283513 reverse strand)
ggagattcttacatcatcttgcaggtgtgagctgtatccaatattacctcgtgtttatacattgctaaactagaggcttaatgttgtggaaacagtttatgttttcctgtttgggatgagaacaataccataaattgcattttagtacttgtgagattgaaacaaacaatataatgtcaattatggtattgaaactctagatcaaagcacatgcacagaataatagagaaagtaacttctatccacatagatctcaaaagggtgactaatttcaacttatgattctaggggaacagcacagcttgtatggtatatataataatataaataaggaaacccttaagtctttagcagaatccctactcttacaaatgaaagtcttcaataaaattccaatattaagtggagagatatatttctactttttgtttaaaaatattgggtgttgatttcaagtttatttgcagacaacacaaggcaaaggaagtgcttatttgt

SEQ ID NO: 20370 - DNA, 1004 bp, Glycine max
  Intron number 1 from transcript Glyma01g31850.1 (locus Gly ma01g31850) derived from phytozome v7.0 (chr-ID Gm01; pos 43078545 to 43079548 reverse strand)
cattaacagtttggcaggtaaaattaattctttattcatgtatttgtttgcagatttagtttaatttttttttcttattttcatttcctttaattttgctggatttgtttccttttaggatttaggcctaaagttagaaaatacagtatagaaggtgaattatagatgtaggattaagttttgatgggtttctatcattgtgcttctcgacatgcatgcatgttttctcttctcaataaaaaatcgtttttaacttactttcgtatcatgtcactgtcatgttttcttggttaaaagaattaaagaacagaaatcttttgagtttttaataaaagctttccacttttaaaatccttaactgttgagctgcaatttcttaattattaacatggcaataccattttgaactaaatggataatgctctcatgagaatggttttatttatttttttggtttactttataatgatttttaactaattaccagctcatttatgcaaacatgagttggttgtttcccacttttcgttcctatttattgtctttggttcgtcatctaactcgattacctatatttagtatcattttttttctattttaattgaacttttgtatgaggatgaagattcattcctaatttcctaggcgtgaacttggactgtgcactgcagagactgaattatttgcttctgcatattctatgccatagcttagtccaataatttgtggtttcataataaaaatattttttctttaaaccaaataataagatgatttaataagttaggattcttcttcaatagtcatatgatgtaacagcatgagccttgagatggcaaagctctatctctatgttgctagcattgatagtcatatttaactttatgattgaacaatgactttatctaatgcttttttaataaagcataatgattcttagagagtgaaggcttggattaatgcttagtatgatacattatcaggacttcactggaaaaaaggac

SEQ ID NO: 20371 - DNA, 944 bp, Glycine max
  Intron number 1 from transcript Glyma03g40420.1 (locus Gly ma03g40420) derived from phytozome v7.0 (chr-ID Gm03; pos 46183130 to 46184073 reverse strand)
gtggagtcaccaactgtcccctcctcctaatccaggtctttctcattatatatatatactatcttcttatttatatagtgatttctttttatatattcttattttataattctaaaataccataccatttctttcaattaattccttttttatgattattatttcattaattttcttaaattctttctctgtgtaataaatattaaatataatgcataaaaatattatttttttctaaaatttgaattcattattttaatttttatagaaaaaaagtgtgaatttcgattttaatccctataaaatgttttattttatttatatttgtcaaaaatttgaaatcaacgttatttgtatcgaaaatggatgtagctagctcttggtattttccacttttatctaccccttgagtaatatttttcaacgagcaaaatatattttttgtccgttgtttaattttgatttctgttttaagtgttaattttttttagtccctcataaattgtttcatttttttgtccttaaagttaatttcaactttttaactgatcatacgataaacataaactttgtgaaatttttatttaagtttctgacaactacaaattatcttatagtctaagtgtttatttttataacatttctggttatttcaagatgagtacaacaaaaatttggtatcagccagaaaatttgcaagcaattagttgaaattaacacgtgagactaaaaacaaaaccgaagaatttatgagaaattaaaaattaaaaaaaaattataaagatctagaaacagaaatcaacgcaagaggagtgacaaaaatatagttgatcctttttcaaagtacacagagggtggtgagagtaatttctgtttcaagttacactaatctatgaatgcaaatgataggtaacgcggctcaagtgtggcggtttcattttcgc

SEQ ID NO: 20372 - DNA, 616 bp, Glycine max
  Intron number 1 from transcript Glyma02g10520.1 (locus Gly ma02g10520) derived from phytozome v7.0 (chr-ID Gm02; pos 8410699 to 8411314 reverse strand)
gcttacagtgagcactcaacatagtattcttttcattccaaaatgagttttacaagtttatatatcttagtcccatttaaagttacattgcagtttagaataatttaaattacaagtagtgttgcagagtatttttaagactttagtgtaaagttaatgccagacattcgatattcctctgctctctctttgcctcccttgattaggagaaattattatatagtccaagaccatcacatgtttatattgtcttgaccaatctctaagtggcgcatagtctaatttttcaatttacaagaaaaaaaacaataaaactttgattacttgttatataaatattgatggaatctatgatggtcccgaaccatacatagttgcttacatttctaagtaaaaactaagagagtattataaaacaaagtggtaggaatcagaatcactcatacttgaaatagttacatacttccattctaaataattctagctacataatatttgtatacttttaatcaagagttgaaaatttcaacacgacgttcaatagttgtatcctcgattttgattgctagtgaaatgactaatcattggttatttttcgcaggcaaacttaccaaca

SEQ ID NO: 20373 - DNA, 454 bp, Glycine max
  Intron number 1 from transcript Glyma04g39320.1 (locus Gly ma04g39320) derived from phytozome v7.0 (chr-ID Gm04; pos 45555186 to 45555639 reverse strand)
ttcttgaaattgatcccactaatcgctaaattagggtatgtaattgtgtgttccttttacctttgtgtgttttttaacataaaacctaactatgcattaaagtgatggtttttttttttttttttttgtattcataacagtataacgaagttatcggccaaggagctttcaaaactgtgtatccattgtttttgttttcttagcaatgtgtttctttattattttggtttttattgcagtacttcactagtaatttaattcttttacttcaaggtttactgtttttcatatgtaaaattgaaaagacatttgaaatgccctgctcagtttagaacataatgcatagcattttgtggttcgtgattttcatcaagtatttattgttttagtgaaatttgattcaagatatgcattttttccctttatctatggttaattagttacaaggcgtttg

SEQ ID NO: 20374 - DNA, 346 bp, Glycine max
  Intron number 2 from transcript Glyma0042s00410.1 (locus G lyma0042s00410) derived from phytozome v7.0 (chr-ID scaffo ld_42; pos 140447 to 140792 reverse strand)
accaattcccaaggtggtggacaagagactacagtgtaagaccctcttcctgattgtagtttcttaattctcaatttcctgatttgaatgaaaatttgatataagaaaattgtagaagagtttaattggcacacactgtcattatacactatcaacgaatcataaatcatcgttggtatgattaattgtaaaaatacttattataaaagtcaacaaacttagcatttgtaatagttaatttttgataaaataatactgtaaagagtctataaattgtctgtgcatatattgtttattcattgtgaaatctatgacaggcttactggtatcactccactggttcatc

SEQ ID NO: 20375 - DNA, 491 bp, Glycine max
  Intron number 1 from transcript Glyma02g04060.1 (locus Gly ma02g04060) derived from phytozome v7.0 (chr-ID Gm02; pos 3249742 to 3250232)
tggtgcgtatactttactatataattgttactcatatatgttattaacactttttatgtttcttatttctttttcttccgttttttcccactatcagcagcattaaatgatctcagatggataattaaatcctgaaaaatgagctaacaaacctttagttttaaaactttgagcttaaatttctcagtttgcattttaacacatttccttattaaagtgataatttcaacataggatagatgaggtcaaattatagtgataatttcaacataggatagatgaggtcaaattatgaacatctctttggtttgaatacaatgcaaataattagtcacgaaaccaaatgagttttactaacctaacatgcaatgcaaggatagggctcctactttccatgtagcatgtagaaatttgtctagtggtagttctttaatattttggtttctcgtttggcaggtcctaaggcccatatcagtgagctagcggatttc

SEQ ID NO: 20376 - DNA, 169 bp, Glycine max
  Intron number 2 from transcript Glyma03g01710.1 (locus Gly ma03g01710) derived from phytozome v7.0 (chr-ID Gm03; pos 1478917 to 1479085 reverse strand)
aaagatttctttgcttgtgtgttgtctcccacaaggtttgatttttatataattcaaattttattgattgtaattgttctgactgatatttaacaagtttatttcttctgtttttcacctatttaatgatttagagaacttgctattcaaattgcggaacagtttgaag

SEQ ID NO: 20377 - DNA, 491 bp, Glycine max
  Intron number 2 from transcript Glyma04g40660.1 (locus Gly ma04g40660) derived from phytozome v7.0 (chr-ID Gm04; pos 46643606 to 46644096 reverse strand)
tttctgaggagacatttgctggcaaacgaaaaaaggtcatgccgtagccgatcttgagttagataaaggtgaatatgtcaatttttttcctgtttttagcctcagtttcgatgccccttgttgtttcattccttgtgtctcaaaggctttcccaagaaacattaggggaaagagtcatactagtagttcctcagctcttcctattattctggcgttgaaaaggggggaaaatgttgaagtgagaccgctacaatcaaatatgaaaacaggtaattgtgtttgtggccattaaggcaatagtgttctggaagtaacatttttctatagcaaacttatttttcactggcaactgctgtggatatacaaaccgttaattgattttcttgaagcataaaagaaattagttttgccgtatcgggatgaagcaatgctgtttcctgcagaagtaaccattaaatcagagtttgtgctttgtagtgtgatatttgttt

SEQ ID NO: 20378 - DNA, 558 bp, Glycine max
  Intron number 1 from transcript Glyma01g16600.1 (locus Gly ma01g16600) derived from phytozome v7.0 (chr-ID Gm01; pos 20490168 to 20490725 reverse strand)
aagatccttccttagtaaactggagaagcccacaggtacgtgctccttaacatattctggtaagcagtgttgttaatggcggatggcggaaagccaaaaatccatcataaaaatatggcagatggcgtagcggaaaatggcggatctcatggcggacaaaatatatatatatatatatatatatatatatatatatatacatatatatatatatatatatatatatatatatacatatatataattataaataaccaagtaccaacaccaaataaactcattgaaattgaaaaaacaatggattgcattcaaataaactaaaaaaattaaaaaagtttcatgagttcatacaataaaagaggactgaacagaaaaaaaaaacatgatgtcaaatagaaaataaaaataaaaatgggactgtcaaaaataaaaaagggtgtcaaatagaaaaacaaaaaaaagatgcagacatcaaaaacgggtgtcaaacagcaaagaaaaagaaaaaaaaacaaataaaaaggcaccactgtccatcgtccacaacgttcgtcttcg

SEQ ID NO: 20379 - DNA, 803 bp, Glycine max
  Intron number 4 from transcript Glyma03g16440.1 (locus Gly ma03g16440) derived from phytozome v7.0 (chr-ID Gm03; pos 20896150 to 20896952 reverse strand)
ttgaaaggcgaagtggcagtaacatactaatcattgaatattattgtctttctgatataccctttttgctaccctttttgctgcacactaaaagcttgagttatatttgtctcatgtttaatctatattatactggagcttctcattaatcttgatttattatgattttaaacttaaaaccttaatttaatgcatggtgcaatacagagacaattttgtttcatttgtgtagttaactgaatattacatatactgtgctaaactaacaataaatctgttgttatgagtatcatcatcatctatgacttctactattataatgaaagaggaggaaaattgattggtacctgatacttctgttttaatgtaatatgttgattttcttgagcattaggttcttgtttccttgctttagttttggctgctccaatctgtggtttttcttatggatatgaggtatcgtctttgaaatgcattattgttttcaaaagcatattaatggtttgagtaatcaacactcaggggaataatgaaagtcaaattctaatgcatgatgggatcttcaaatgttttctttaggggtattactttggtggatccttagttggatatgaggacaattctgagctggcttcattttctttcccgccccctcaattctttgctttctattaggctgttttcttattctttgtttgtgattttttctttaataaatttttattgggaattgaaaaggaattatctgattatactgaattatttttttattaactagattctattatgtattgcagttcaag

SEQ ID NO: 20380 - DNA, 412 bp, Glycine max
  Intron number 3 from transcript Glyma03g16440.1 (locus Gly ma03g16440) derived from phytozome v7.0 (chr-ID Gm03; pos 20897012 to 20897423 reverse strand)
gaggtgaggtgatttaaggtgctagggacctttttggtttgttttgattatctagatgatagtcatttatgttggttttgtcttgcattttattttattaataaaaacatatgtttgtcctggttactggttgttttatttttgttaagaattgaaacaaatgggtggagcacttgttgttagaacctgctgtcaactcctagggattacaaatacatgacttgacttacaaatgtcatagtgaaacaccccactgtagaaaatattggaagttggaacttcagattttgtaattaggctttaagtaaagatagtatacttaatgccaaattattgtcttctgtaattgacatagttgttgggttgatgaccttatatgtcactgcaacaggcaagggcatcccaataagac

SEQ ID NO: 20381 - DNA, 520 bp, Glycine max
  Intron number 1 from transcript Glyma03g30480.1 (locus Gly ma03g30480) derived from phytozome v7.0 (chr-ID Gm03; pos 38441934 to 38442453 reverse strand)
atcaattgaattcaaatccttcccttgccctccaggttcagtttttatcaactcaattttaaaattgtgttttttgggtttttgctttttgcttcctaattgcataataataataatagtaataataattataataataggttatctattgacagtgtaaatgttgaaaacgttgctattttgtttttgtcttttatcaactcaaattataaattatctattgcttcctaatatctttggtttcttttagtttctctgtattatgatattaaaaatgttgccattttgtttttttttcttctgtttgattttcgatcaatccagttttgttcagttaatagtggttcactgaaccttacgttattgcaaaaaacaaatgaataaaaccagttttaatggtttggttttgttttttgttggtgtcgtaaatcagagtttgtgggatttgaaagtgaccctctttctttttggattgtgttgtttaacattcaggtgtttagttggagaagaaagagatcga

SEQ ID NO: 20382 - DNA, 773 bp, Glycine max
  Intron number 1 from transcript Glyma04g38620.1 (locus Gly ma04g38620) derived from phytozome v7.0 (chr-ID Gm04; pos 44979634 to 44980406)
ctccttcctcttcctctttctcgtccattttagttgtaagactaagatctcatcttattagattcaatttgtctcttcattttatcttttctttgctcccattaacttaattttctctgtattgccaacagcaatctttgaattctcctccttatcaagtcttcctcatcttccccacctttttgaaagtgggtatatatgtccagttaattagctctaaattgtatcgactttatttagcaaccaccttaattttcatatagcttgatagaaattcaatttgtggtaaatttataatagtccctcaaatgcatgcattttatcagtaggacaaaaatatagttctataagtgttgtttattttgttcttgaatcaaaattaaagtttcacctagataatctgcctgtctactgttagagttttgtctcgatgataagtttaataaaaaaaattgtattaaagaatggtggagcttataaagtatcgatgaaattctaagtctaatcagagaagagcacaaacaacattttaggaactatatagtgagtataggttgaacgagaatacattctcatgcaagaaaagtaaacaattcagagtttttgactcatctgctctttggaactctaatcaaacacacacatacaagttttgtcatgtcttttgctattattgatgttagttgtgtgttgtgactcagatgtttatgcaacatgcttgtttaattttgttggcagttttggtgtctaagaacataacctaaaagctcaag

SEQ ID NO: 20383 - DNA, 418 bp, Glycine max
  Intron number 1 from transcript Glyma01g01340.1 (locus Gly ma01g01340) derived from phytozome v7.0 (chr-ID Gm01; pos 970331 to 970748 reverse strand)
cccttcttctgccatcaaaatttgctttattgtaggtatagattactggacaagctcttattcttacgagttatgatcatgatgatgatgtttcgaacactctatgatgacgatgatggtgtctgtgtgtatgtgtaattaaggttatgtttgcataaatttctctgtgagtacttatagaaaagaaaataacaaggcaaaatgaattgagtacaaggatttatggagaaatttatcttcaagttatgcatcttagcttttggataagttaaaggagagagcttccattcattttaccttcttattttctttttctacaaggatctatggagaaatttatccaaatagggcctaactgtttgttccaattccatgatttgagttgagactggttaatcttgtgatgttcagttggagg

SEQ ID NO: 20384 - DNA, 598 bp, Glycine max
  Intron number 4 from transcript Glyma02g07470.1 (locus Gly ma02g07470) derived from phytozome v7.0 (chr-ID Gm02; pos 5919259 to 5919856)
gtgtgttttctccagcaatttcaagtaacatacttttgtaattgaaaattaggagtgtgtcgatctttttagtaagccattttagagtaatcctagtgttcaattcaaatataactttgtgcaatttaccgatactcctctatgttttgttgaaagagttagaagctgagctagaaaaattaaatttagaatttttcatgcatgttataatctcattgaagagcctttaattatcttttttttttgcattgtttgctattattatattcgaaatttgagtgtgtctggatcctgggtattcatgcaagaagttaacctctcaaccttttgattttgtgaaagaactaaaatctaatatagtaaattgatttaggatttttccactcatgctggaatatttcaccatattctttagtagaataatacacaacttctttggtttgtttattgttgctgggctgaaccaaattaaaactcaagtaatatcatcaatttttgaactttttaaaagagaattcccttgcttctaataagaaattgttacctagccacttaccctgcagttctagcatcagtatcaggactacgaactaccaaa

SEQ ID NO: 20385 - DNA, 350 bp, Glycine max
  Intron number 1 from transcript Glyma04g42640.1 (locus Gly ma04g42640) derived from phytozome v7.0 (chr-ID Gm04; pos 48335727 to 48336076 reverse strand)
gcttctggttcaggtacacgtcaatttcactccgcactttcgctttcttcttcttcttcgactttttatatagattttgaatttgaattactcttcccacacgagattaattattctaatttatcatttttggttttgagtatccactaattgcatgaactttcttgattttgttttgggttttataagttttgacaaaatgaaaaagaaattaaagatgggcgattcagctaaacatgcaattgagttcatttcgtgttttggaaattggttttctatggacgagtatttatgcgtgtgtttgtcctttcacagattttgcgttagcggtttcttctgaactcgagtca

SEQ ID NO: 20386 - DNA, 613 bp, Glycine max
  Intron number 1 from transcript Glyma03g24020.1 (locus Gly ma03g24020) derived from phytozome v7.0 (chr-ID Gm03; pos 30683513 to 30684125 reverse strand)
gcctcgacgtgtttggcacctatacacctggctctgtaagtcatcaattttttttttctcaatttcatttattttattttgtaatatttaccctgtttattttttcttttttagtgattactatgttattgatagcaaatatcatatatggtatacttatcgattttgtcagtttgtcgaggaatatgactagctacttttaatagaatctctacttgcatgctattttgttatgttatcaaatcacacatgttgtgtcatgccaactaattaatttcattaaatattggatgaaattatgtcttgaggagctaaaattgtacaatggtgatatttgagagattgaaaatgcaattaagcaatttttttgtttttttttgttttttgagaaaatagttcagcaatgagaataccattgtttaatgaataaacagtgcatcatatcaggttgcttatgaatgccatggttccagtgtaaatactttaattgaagatattctttaagaagacaatgtttgtacttgtagtgtagttttgaaaatactctttgggatcataaatttgtgctggtactaactactaaccgttgtgtaaatgcagccattaacagggt

SEQ ID NO: 20387 - DNA, 804 bp, Glycine max
  Intron number 1 from transcript Glyma04g07650.1 (locus Gly ma04g07650) derived from phytozome v7.0 (chr-ID Gm04; pos 5995512 to 5996315 reverse strand)
ggaattttgaggtgcgaggatttgtttgtttatttgtttttgttatttatctgttttttttttactgtgtggatagataacgtgattctcttgaattactggatatactggtgtctagtttttgtggatggtgaaatcgggtggctattataaagtttgaatattctttattattatattggttgttatgtgagttgattccttgtgaattcagtttatatgtgtgttttgaaactagttgagaaataagaaatcaggtctgggatgtgaaagctataactattagcttcttgtacggagtttgattctatgatttggatgtgattttccacttctaaatagatatagctttcaagtgtgtgatttcttacatatcaacgagtttccaaatgaactattagtaaatgtgaaaatttacgtacgggatgtggaaccaaacacgccgtaagtttgacatacttgtgtttttccgatgtaatgtttttgttataattgtgctttatctttgggaagaatacatgccgcatgtttttttttttgtctgccatttagtttgtactagactactagttttattatgtattggcaaattagagattctttgaacttaaaaatgtaatcacaaggatattttttttgaggttactgtctgcatgtaatggaagtatataatggtgtgtgtttgtgtttgtgtggtattgtttttgctaagtcgaatggctaggacagctgttccagatttggtgctttatagttgacagggtttcttattacaggatagtgagagtgaggaagatattttgg

SEQ ID NO: 20388 - DNA, 687 bp, Glycine max
  Intron number 1 from transcript Glyma05g06080.2 (locus Gly ma05g06080) derived from phytozome v7.0 (chr-ID Gm05; pos 5649079 to 5649765)
gaatcgattactgtagaaatcgtcgattctatcttgtgagtaattgcacttttttttatcaatcgtagctctcgtccacattttcgattttcttcacttttttatttttcttcattactgaaaacctttcactttgtttttttaatccggattgccaatttatgtatatctttttgattcaattaattctcatcttgatgattgtatgagctagattttgttggagattctggtcaattgcattcgaagcgacttgatcaattttttgaaaaaaaaaaaattggggatgtagtttgtattgaatattcacacacccaataaaacaaataaagagttccagtaacagaaccttttaggctttctagtgggtttctgaagaaagattgatgaaaataaggttaggtgttgaatatgcctgcataattgacctggccaattatttttcttttggaatgcctgatgttaaattcatgtgtatgttgaaaaactttgagttgttattgttttggttctttttattaaggtagtaaatggggcataagtttatttatctgtcttgaaattgaacctgaattgtggtcttattgttgctatgatggtttgtttccggttattagtgatggtttatggaaaaaggcttttttttgtgcagaaaacgtattgggcactggccgccattttgaattc

SEQ ID NO: 20389 - DNA, 873 bp, Glycine max
  Intron number 1 from transcript Glyma01g33510.1 (locus Gly ma01g33510) derived from phytozome v7.0 (chr-ID Gm01; pos 45672315 to 45673187 reverse strand)
gtccttagtaactatgttagatggttctcttacgtgactaatgaacttaattactttatctctttaccttttcaagcacactcaaaagacaccagaatccagtattgttttatcttccatcctaatctcatcaaaaagtgcgagaaaatcgtataggaagtgatgaaaaattatagattttggagggttttaggtgcaaaaaatagtataattcattttgaaaaattttaatcattacaaattgtttaattcatttgtaatcatataacatatgtaagtctattaatcatgtcagaataatgtttaatggaattatcatgaaggatcataaaaattgttgaaaatataattttttttgtaaggaccaaattaatattttttaaattttaatacacttcaaatatattttaccttaaataatataatgaataataaaattatagaaagaaaattggagggtaaataagttgtaagagaggcggagttaatgttgaaaataacctttgtgttagtaaagtctttgaacctattaaaactttaggaaaaattttaaaaaaattcttagacacccaataaaaagtgtttgttgaccaggtgttggtaatttgtgtatttaaatatcttcgctcaaaaccttgtgggtgcaccccattttgcaagcatgttaactaaatcacaggaggcatttatacttgtagttgtaatacactaacacttataccgcacccaatgcaagtactacatttgtcgcaatcccatcttctcttttctctgttagaaactagactagaaactcatctccatacttcgtaacattttccctccatggctctctcagacacttccactcccaccaggtaaagttctcacctt

SEQ ID NO: 20390 - DNA, 548 bp, Glycine max
  Intron number 3 from transcript Glyma02g34070.1 (locus Gly ma02g34070) derived from phytozome v7.0 (chr-ID Gm02; pos 38091195 to 38091742 reverse strand)
ttcaaacagaacctactctaccaatatatctaaaggtaatgtacatttttcatattttaatactaagttcttcattttccatgcctgcacctacctctgccagggttcaaaacttcagattaatcttctattcaataatagagcatgagtttgatgtggccctgtgtatttgggcaggcatggatgaagcttactttggcaatcattgcaaccaatagaacacgatcatcaggttcagtcttggacaaagtttcatttcatgtgaaatcaatgtacaagactatcccttcttttcagttaaccagataaataattaataatactaatacacctaccttggtactcaattctcttgaggctttgttgcatggttttactgagaaagaagggtatggagtatgagtagttaaacactaatttcttagaaaaaatatatatgttctgctgcattgagcttacttctgatgatatgttttcttttttgagttagtgatggatcacacataatgagtttttttttttcttatcgtggaatgtgcagttcacgg

SEQ ID NO: 20391 - DNA, 293 bp, Glycine max
  Intron number 2 from transcript Glyma01g44160.1 (locus Gly ma01g44160) derived from phytozome v7.0 (chr-ID Gm01; pos 54920191 to 54920483)
ttactcaggttcttcattcatatactcaactcctcttccttttattcataaaacctccagttcttggatttctgttgtgcaagaaacacttcctttctagtcttgttgctggttttctttgataattatataacatttccattcatatgcgtttgtatgcaatggcactcaaggagactgaagtctgttgatatttttgagttatatgaaatcttatggtaagtttctgttttgtttcttcttttcctaaatattcaggctactctaggcattggctcatcatcggagaaaag

SEQ ID NO: 20392 - DNA, 483 bp, Glycine max
  Intron number 1 from transcript Glyma02g45450.1 (locus Gly ma02g45450) derived from phytozome v7.0 (chr-ID Gm02; pos 49710607 to 49711089 reverse strand)
cttctgctggtaatgttatatatgctaacaacatttcctacccactctttttttaatactttttattattactaaattcaaatatggccttatggggataaccatgaatttctatattagttgttggtttttatatattaaaaacaaaaatattctttctttgatgattggcagtccacaaatatttagaaaagttagaaattatgtcagttatattttaatatttgttgcatccaagtggttacaagcggaaaaaatgaatcagaacttttattaagtttgaaatatttgcaggaaaattatgtgtttaatttcttcactgtttcaaaccttcttgtaattttcttttttatctcgccagtttaaatttctataaaatacttacaaattttacaatatgaagttctcgttcatgtctgacttggcttctgggaacctttgctgttaggatctttatcttcttctcgtgcacagctggatctt

SEQ ID NO: 20393 - DNA, 679 bp, Glycine max
  Intron number 1 from transcript Glyma02g16850.1 (locus Gly ma02g16850) derived from phytozome v7.0 (chr-ID Gm02; pos 15184500 to 15185178)
gttggctgcaccattaccaaggtaaaaaaaaatctggtttttgatttggtggtagcaacttgtttatggtgtcaaaggtttttttgatgcaaacacggattgtcacaggtggttaaggattcggtactaagtcttactttcttcatgggtgtgtattcgaatctcccagaggtcacttttcccgcatggtagcaatgctcgccagggagatcccttggtgcctaggggctaattgaatatctgcaattgggtaggactgcttgcggttcggacctatgcagtaatcttttaggtgggtctctgttggcagccttagcatgccattgacaccctacccggtagtattggggtgctgcccttctatcaaatttggtataaaaaaaaatgtttttatgatgtattatccatatttcaacaatttgttagtattaatgaattggtttccttaaaattggagcatggtctatggagcacagctggaatttggagttgacattgttaccttttctttcactattgatgttgtattgaaattctgaaatcaagatagtttagcatgcttaattggttatggttgtttgagtaattcatcattttataattacctaactttggtttttacctcgaatttttgtgtaagacagggttgtaaaccattattgccttctcctgtattgaa

SEQ ID NO: 20394 - DNA, 891 bp, Glycine max
  Intron number 2 from transcript Glyma02g33770.1 (locus Gly ma02g33770) derived from phytozome v7.0 (chr-ID Gm02; pos 37574282 to 37575172)
accgatatcaggtttagggttttagggaatggttgaattaatgctgttttgtatgcagcaattggcgtggctttgattgttgtggtgtttgcataatattcatattggatttactatctttttagttgctgaatgtttttcttactgattttagtgcctgaatttttttcatcctcctttttagggactaaaagtaaaaatcctaaaattgttttgtcttgaaggtttttgttgagctgaggactagtaaaaagaattcaggactgaaaacaaaatcctgagaagtttagggactaaaaagatagtaaatcctaaaatttttgatttgttgtttttggcagcttccactggtaggataggagatactagatactcaaaaggtgtttgagtggtgttattatactagtgagaaaatgtttcttgctaataaggatttaaagctatttgatttgtaccttgggttagggtaattagactaggcttttttctttttataataaaatcttgcttttaagttttgagtgggatagtatcttagtaatgtaattgcagcaacatttggtttaatgtttggtcttcttcaacttgtgcttttcttggtaaactcattttggggtttgcctcaagtatgtttgcacacctatatgcagaatgaagttcattcaaactttgcaaatttaatccaaccatgcactgctttgtttatttcttaattttattttattggagcatattgtctttttaattgttgtttgctgctgtattttagaggttttaaaagaatcatcctagttttgagaagttgaattttgtggtatttgagttcactgtgtaaatgaggattctgctgtaacagattggtcctgcacagatcgaagcattgtaccaata

SEQ ID NO: 20395 - DNA, 537 bp, Glycine max
  Intron number 3 from transcript Glyma03g28570.1 (locus Gly ma03g28570) derived from phytozome v7.0 (chr-ID Gm03; pos 36490798 to 36491334 reverse strand)
acttgcttaagaaaatcaaggtatgcttcttgctttgctttggtttctattcctgtctcatctctcttttattaaccattttattctccaccacttttcttctcagtttttgtagccaagattgtttttccgttttcacaaagacccttgtagagagatccattttgaaagtgcattcattccgaatttgatgttgttggttaaagttgtcaagttggacttagtttccttaccaccacaaaattcattagcaagtgtaataatcctcctggaataatttttccatctgctattagttttccacccaaaaacaaatcaggttcaatatgtgatggaaagatttttctttcttttccaaaaggtcctacttttagttgctgctggattttatttgagtgaaaaatcgtttgaaaatctatgaaatattatgttctcacttgttccacctggaaccaacaggctcaaaaacttaattagtattctctctgatgttatatttcaggaatcttcatctttgagaaacataccagtggtgat

SEQ ID NO: 20396 - DNA, 744 bp, Glycine max
  Intron number 1 from transcript Glyma03g36720.1 (locus Gly ma03g36720) derived from phytozome v7.0 (chr-ID Gm03; pos 43593671 to 43594414 reverse strand)
gtgccaaaacttccattctcgttaggagcccggtaattcattcatactcgcatctcctactcctttacagacttaattaattgcatccctcatgagcttctttatttgcagttctgggttctctgttttcttaatttctccaagttcattctttaatttgtttttaacaaatttgatctcattatttaaaatatatatatatatatatatatatatatatatatatatatatatgtgtgtgtgtgtgtgtgggaaggctgatgtggtacttgctctaatgtattatcgtgtcgacacatttatcatattagtattttttttttattgaatattgaatgttaagtcaataggtaaattaaaatgtataattaaaatagtgggatcaaatttaaacagaagaagtaaaggaactaaatttgtgaaattgagaaagcaataaaattagaagtgcaattaaggtaaagcctaaaataagtagaaaaaaatattaaaaagtcatagagtcattttcatgagtttaatataaagtgttttcaataacttcttagtttgacttttttgttctctcgtattggttatgaattgatgtggaaaaaaataattaagcacatttataacggtgattatggatttggttagatctgttgttgacttaaacgagttgtggtttgcttgttacgtgttctaatacagtgcatattgatgcaataatgcaatgaacaggttcattttctatcaagggag

SEQ ID NO: 20397 - DNA, 779 bp, Glycine max
  Intron number 2 from transcript Glyma04g01950.1 (locus Gly ma04g01950) derived from phytozome v7.0 (chr-ID Gm04; pos 1338908 to 1339686)
gtgtctactgggatccaccactttcagagaggtcccattattcacctattgaatatctgttgtcatgttatctttttaaaaaaaattaagcattgcatctgaaggatcaatactaaaagggactttgatgtatgccacatattaactgaatttcaaatcatgtgaataatttcttggtttttgaaattcaatttttttatagctttcaagtgaattacaattagtttaaaagtttggatcaaaatgtatgtaattatttcagttggattataaatgaattctcatctttgaggcacatgaaatgcaaatgtaacatgatatatgatttattataatataaatttaatgtttttttctctaatgaattctaccaaaatcccatcaaatgtcattatttgaaattgtcacatcaaatcatgattgatcaatcaactaataccgatttcaaatgtgttatgatagaatccatgtgccaatgaaaggagttccactttttttatatttcatacactctggcatgtcatattcctcttttctgtctggccattaaaaaataaaagaactttttgttcaggtttagtttgcaagagaaagaggaaagtgtgttttggatttaacagttgaaaattggttaactagatcaagtgattcttccattctttaatacatttgttatctatattttcctcacacttggctcttgattatgttcagatgaaattattcaccttttttgttctgcaggtatcagtttaaatatcctcgtccaccaaagccaa

SEQ ID NO: 20398 - DNA, 882 bp, Glycine max
  Intron number 1 from transcript Glyma01g40580.1 (locus Gly ma01g40580) derived from phytozome v7.0 (chr-ID Gm01; pos 52274273 to 52275154)
cttagtgttgttagagccaatacgtttgtggtatgtgctactgttcttgaaattagtcagctctttatagttgcttgatgcagtgcaacatttctgttgtttcaagattagaccagctatgcttatgtgtgttacttaaatataaaaacctgtgatggtatgactaaggagctgaatctttgagtaaagatgattttctttcttgtcgtaatcttttgtattgttgatagtatatgcataaagcaatagtttcctttggacctctgtaattagtcttgttggtttaaaggaaattaatgcaatctttgaaataattgcactggcactatcattctgataaacccctaatactaaggtgtatactacatgtaggtaagaaaatcaaaatgggggaaagggggaatattcatgctaattattttcagctaaccaaattctgagctggcaatgaattgtagcataagaagggaattcagttttgggaaatgagaatacaataggaaaggacaggaagtgtgaggccagccaaaaatggaatagggaaatgtggaagatttgcaggtcccttgaagaatgtttaacattttctttctgtttctcagtattacagagagtgagatacaatctgtaatccttctttttgatagtgatatcagtttcagaaaatggaattctggttgttactatcatcacacctgattccagtttctatcactcccatttaataatctagattatgtggattctatagcattgtttgttgaagtctggataccttgtagcactctcatattgttgtttagtcttatttatggagttgctcttcattcatttttgctgggcaaaaactgcaggcagaagttctaggtgttgatccaaggg

SEQ ID NO: 20399 - DNA, 748 bp, Glycine max
  Intron number 3 from transcript Glyma04g35860.2 (locus Gly ma04g35860) derived from phytozome v7.0 (chr-ID Gm04; pos 42347418 to 42348165)
gtttcaaaacggaatttcagagccacgagcccgaggcatgttcgtaattagtcgttggtttaatttctgtgcactgttctttaaaacatttacattctcaaccaattaaaaatcatttttatatgtgagaaagtaaatattttgaacactcttagaacatctcttctatcattcatcggatacttgttgaagatattttgtattattttgagtttttttataggaataaatactattttgagtttattattagagtttaatttctatctattttcacacaaaaaattataatattagtcggtcaaaaattataaaagtatgactttaaaagtagtcatcaaatccgtaaaaatattatacatgacaatatattattgaattaaaatataaaaatatttatactattaatacataaactatttattcttattataaaatcaagttattatatataatatttgtaattaaatggtcgagttaaaaatgtttaaaatttttatttcattttttattcttatttttttctatatttttctttcatgccaaccatcttagtgtatctttttctctcttttcttcctatctttttctttatcaaataaaaaaaaattatacaaaactgatatttaaataagttttctctaatcattacagtagttcaattctttcaccactactactattattataattattattattggtttatgtagtttgattacctgaagagtgtggaaattgaagagaa

SEQ ID NO: 20400 - DNA, 733 bp, Glycine max
  Intron number 1 from transcript Glyma03g32580.1 (locus Gly ma03g32580) derived from phytozome v7.0 (chr-ID Gm03; pos 40306138 to 40306870)
aacggcagtggtatcggcttcatcctaaaaatctggtatttaatttttagaatcccttcatgtactatatttatttttgaaaatattccttgcctgactgactgatctgcaaatagtaatgttctatattgtacaatacagtagtacagtgctatcaatgatgataaatttttcaataagtcgggttacttcatgtttcacctcagattagaaaatcagtttcctcccttcaattacttgttcatcattgtttaatcaacaaaatctactactttgtttagacaacttctttgtcctctaggaaatttaaccattcttttgcatgttttaggaaatataatatttctgcatgcaatattttgatgtcaaatatacatcacctaagggaattggtagcagttgtctctctatataatctagccctatcagaaagaaattagagcatgagcattgagccattgagggttttgatttttcttatattcgtatagtgaaccatgccatactggtttatgagtaatggctatactgttaatgctaaaagttattttgaaggttcttcatttagacttgaaatgttaacaatgatgcattattgcactaacttgtaggatgtgtctttgtgtaccatacacatatttgtcagaaatgtaagcttatcattttgtataagtaagccactgtgaatattactgtaggattgtgtaaattataaggagccagaatcgctctt

SEQ ID NO: 20401 - DNA, 646 bp, Glycine max
  Intron number 1 from transcript Glyma01g37790.1 (locus Gly ma01g37790) derived from phytozome v7.0 (chr-ID Gm01; pos 50074543 to 50075188 reverse strand)
ctttcagtcaccatctccgactctttctcttatctgtaacttcctttaaccctttccaccccaaaaatattcactatgctactgtttttctgctttccttttgatgattccttttttattctctgcatcgccctcgttgatcgttatgctccttcttttcccttttttttttcttttgtttctcgatctaatgcaacctgaaaaaaatgaagtaatcaccatttttcatatatgctagtactttttaaggtcccaaggtttctttttgcttgatgctgtgtttgtcaatttcggtctttattcttcaacagctacgttttaattgaatcattttttttcacttgtcttttggaatcagtacttctaagaaactgaggtggattcttctgattgttgttttgattgcaatgaatagtaatgattttgagagatataagattggttttgtagttggaaagagggcttaagggtgaagggagaagggagaagggaggagaggttgtgggttcggattccccattgacatttctaatcaaactaacaaactaatatttgctgataaagaaaaaagaatcgtaatgattttgattgatagtctcttattttgtgtgagtgataattgtgatgcttatgtagctaagtcaac

SEQ ID NO: 20402 - DNA, 728 bp, Glycine max
  Intron number 1 from transcript Glyma04g40390.1 (locus Gly ma04g40390) derived from phytozome v7.0 (chr-ID Gm04; pos 46455895 to 46456622 reverse strand)
actttatccgtgtgcttcacttagctcaagagcgtgtaagttaatctccctttgttttctcttgttgggtctgttacgattctttccaaattctcctttttttatttatttattattaaggtgtaatgtttaagtgtgaattaattttgatgtatggctttctgggacggaaaatattactcggaatatgattattgacaggccgcgtgtgttaattgtcgtgttgtctgttgttgtgaaaatcccacttggccttggtttcgatctgtcgcatgtgagcgtttgtttctgcctagaataaacgccgtttgtgttgtgacggtttgtcaaaggtagatggggcagttgaatataattttgttctcgaattagattccagatttgctttttgtgatatctaatttgatttgatgacaatggttggtcaacggctgttaactcttgtggctgttgttgggccttttctttaacaaatattcgtggcgttttgtgaatgtgaataagatattattgagagaccctttttcagaagaataccagataagggtggtttggttttggttagagtgtatcagttcttatgtatctttctagctagcagataaattttgttgagtttgactgaaatctgtgttgttgtggtgaggcatgcagacaattcaggcaaaggccttgaagtcggagtgtgttaaggtttcttaggagttgctgctgtcttgactgaagaa

SEQ ID NO: 20403 - DNA, 959 bp, Glycine max
  Intron number 2 from transcript Glyma02g12010.1 (locus Gly ma02g12010) derived from phytozome v7.0 (chr-ID Gm02; pos 10224358 to 10225316)
actgtgatcctaacaaccctttcgatccatctggggtacttcattctgcacctattgaatttttcattttatcttgtgtagcctccaaaactgtccttttattaaccttgtaattctcatatctcaacttcttcatttacaaatcaaacgattgataatgaatcctgtccataatttgttaatgtgcatataataaagggtaaaatgtgttttagtccatgtaattttggtaaaaattagtattagttcctgtactttgacttcaaccattttggttactaaactttataaaagcaataatttttgtccctcatctccaatggtttttaccgtgataaatgataaaaaccactatttttttgtaaattcagaaataattttttatcagttaaagttcgaaggctaaaatcaaatttcagtttaactgaaagacggaaaacattttaccctacaataaattttgaatcaaaaggacttatggcctcataatcattgtatgcaatttaaaattcataaagtttgtttggttattatcccctcacaagacaaaagctttctgaagttcaactttttttaaatgtcatttttatattcaggaacagaaaggtgatgtccatccctcgctagaaaacttggtctatttttgctatggtggaacccacccaataacaaagagtatattaagaacattgtgtattgttagaattctcaagtatttgtatgcgtcttaatggaaacttctttcaagtttattgtaaagttcaaattagatggtcatgccataaccgctacgtagagaaaagcttaaataaaaaaatacttctaaacctcaaatcataatctcaatatattttaattctgaaaagtattttttctctatgatgattaattttgccactaatttgtctttatatataatgacagatttctgatctcactagtagtttagaaagtaattg

SEQ ID NO: 20404 - DNA, 891 bp, Glycine max
  Intron number 2 from transcript Glyma02g16590.1 (locus Gly ma02g16590) derived from phytozome v7.0 (chr-ID Gm02; pos 14969466 to 14970356 reverse strand)
cttgacaaaattcaggtatacatacactcttttaatctgctaccacattctagaaaaaatgcatgttcagtggacttggtttattttgttgcactcaatttgcgcttatttgctctgaaatttatctctttttgtatcacttatgtactgatttaagcatttgattttataatcgaaaacaattcacttgcaaatcatttttgtttcaatgattccaaaagtagggttagctgatttgtaactggatgacacgtatatttaggattcttaaaattgtatcgtatacggtatgtcgtttactcttcagtactgatgaatgaactcaaagtttaatgctcagtgtttcccgtttgtctgtcatggtcacattttcttgcatgaagcctatatgttattatcagcttttgctttgttacctttttttttttcatttgatttggatttgttgagtgtttttcaattacaccatgtttgattactggagttataaggttgggttggtggttgaagccttgaagggagaggggggagggagaggtcctattgaatccctcccactaacaaattaacaactaacattggcctttcaaaaaaaaaaaccaccatgtctgattaccacattgttctttagtaatgatgataataataaggagcctccaacttccataggaaactgacccatcaaattgatatcctggctctactattgatttggttcaactactatagctcacacaatcacatctagttaatgataaaatctcagatatgattgtaatcaccagttaactaagtgctaaaatgaaagtgatcaaatgtatttagtttattttgtaaagagttatgtcctgtagatgagctgtttcataacgtgtttctaggtggaatact

SEQ ID NO: 20405 - DNA, 216 bp, Glycine max
  Intron number 1 from transcript Glyma02g03800.1 (locus Gly ma02g03800) derived from phytozome v7.0 (chr-ID Gm02; pos 3030203 to 3030418 reverse strand)
ttggtcaccaattctttgaaacagtatccagtttttagtcaaagttctgtttatctttttatattgcctgatttttacatttcactttacaaatgtgttattttgatcttctacttactgaaacaaaatgaagaaaaaaaaatattaataatgggttagtagagccttaactgaatcacagagatcttaatcacacaaatcagtatatagtgggac

SEQ ID NO: 20406 - DNA, 587 bp, Glycine max
  Intron number 1 from transcript Glyma01g01560.1 (locus Gly ma01g01560) derived from phytozome v7.0 (chr-ID Gm01; pos 1160318 to 1160904)
ataggtcgtcctttaaaattactatttttacgttactttgtattcttttttcacattctcaatcaatgacattcattcgtgttgtttttacccaaatttgtttgtaccaaaaaatgttttccttaaattaaaatggaaaactttaccaacaaggttagatattaatgtacgattcgttaacctaaaaaaatgttggactctttattagaagaaaagaaatacttatatataatttctgtaagtttaaacaggtttaattacttattatttatttcttatagttataattttttaaatttctatacttcaaaatatattttttagtcccttttcctgtatactattttattttttaaatcctacacgtttatttttaatttcttataattaaaggaaagaaatactttgttaactataagacgacaacagaatcctccattatggaactaaatcaaactctttgctttctgaatctctaatactcacgaacagtttctgccttcttgcaaagagaattcatggcacaaccagagcgcaaatcaatggatgcagctattcttgtggattccatatctgacatcttaaaa

SEQ ID NO: 20407 - DNA, 815 bp, Glycine max
  Intron number 4 from transcript Glyma04g33030.3 (locus Gly ma04g33030) derived from phytozome v7.0 (chr-ID Gm04; pos 38426455 to 38427269 reverse strand)
cactcaatatatttgaacctcggtatagactcgtgagttggtaacagatgcagatagttgctagaaaattttaaattttaatatatcttgtatgtgcaagttggtgatttgttttcttgtggttcgtccttaagaaacagtagggtctttttcagtgccatctgcctaatgttggtgagtagttgggacttgggagcgaggatatagaaattaaaccacttgatttattataaatatttgaaaaatatataccaattctttatcttgagtagtgaatagtgattaatgtactgttgagaattctccacccagcgtccacggaccaattattgattatcgatttgtacttgtggcacaaatggtcaagtatgcttcataagtggttagtagtgttatgagtttattgaaatgtttaatggtggttaactatgctgggtagacgctggtggacattttcagtgggacattcttctttttccttttcatatattcaaaaaatgttgctatcaacaaaatgtatgaaaaaaattaacatgttaaaaatactgaaaatgttcttattcatattcaatcaattttcatgaaactatttcttcctataatgtatgtattatagttatattttgcattacaaagtttgtattagggattgacaactttgcaaaacttagaaaaatgaaacttagggctttcttcattagtattgaaactcttttttatttttttattttttatcaacactagtattgaaactctgaatgtcatcatatctctaatttattattattttttaaataaaacaggtaagaagaata

SEQ ID NO: 20408 - DNA, 381 bp, Glycine max
  Intron number 1 from transcript Glyma02g08880.1 (locus Gly ma02g08880) derived from phytozome v7.0 (chr-ID Gm02; pos 6873422 to 6873802)
ttgccgtcgcacggtgagactcgcaccaacaccaggcaagttttgtttttgaatcttcgtcgaagaatatcccaaaaggaacaattttgaagcttttttctctaagagtcagagaaacaacaaattttagaagaattagtatttttgttttattgaagaaccgagtggcagtgcttgcttagttgggttggaacaattttcaagtttttcttgtgaatttctgttttaacattaacaaaatgtttgatcctaataacagtattaggatattggctttttgcagctatgctattgctattgctattcatacacgttattagatatttgggaatttgttttgtttcagcacttcaaagaagacagaatcaagcagaacttgga

SEQ ID NO: 20409 - DNA, 742 bp, Glycine max
  Intron number 1 from transcript Glyma02g00590.1 (locus Gly ma02g00590) derived from phytozome v7.0 (chr-ID Gm02; pos 379878 to 380619)
catcagatcccagtcatcaattgcgttaacaactcgtacgttctcttacatttttttttttctctcattcattttcttccaaaacccaacaatatcgtagcttttcaaatctgtgccctagttttgtttctctccgatttcagctccgaacacactcgcggtttcgattcgcgtgcaatgcaatctgattcttgtttcactcttcccagattttactgatgcaagagacccatctagtttattagtctttctagggtttcatcaattttcccaaacgccaatttttttttttaaatttttttatgaaattattgtgcagatattatgatgagcacaaaattgaatttttctttgtgggtttcttttctgatcagaattagagttttatcttgacaatttgagtaataaaagtttgtattaaaggtcaacgtagattaccgaggtaaaactgcaattcagattggagaacaacactaaaagtacaaaagtacctatgaaactgtatctaagttttgtccttgtttatatttgattttattgtgctgaatagggtttgattatgacttattgtaattggtaacttgaaatcattctctcgagttctgattcatatgttttcatgttattggctagctccaaagttaatagccaattttatttgatgatgtattgttgtggacagttttgattaacccgaaatcatttgttctaaaacttggaattactgtcaggtaaggcaacc

SEQ ID NO: 20410 - DNA, 903 bp, Glycine max
  Intron number 3 from transcript Glyma01g22630.1 (locus Gly ma01g22630) derived from phytozome v7.0 (chr-ID Gm01; pos 28595885 to 28596787 reverse strand)
ttaccgttacgcaagctgataaatctggtaaatacttggttctatttttgatattttgctaatgtaacaaattactctttgaaattatgaacgctgatttggtttttgaaattacaaaaatatctgattagttcttgaaatgataaaactgtcacaagtcataaccataatgagtaaaatgatcaaaggttggtaattttaggaactattttttttttctgtttgtgtaaattgtgacattttgtgttcaagtatagggtttatgatattattatcactagtaatacgtctaattagtttctgaaattatgagcatggattaatttgcttttgatattacaagacattatagtttctgaaattaccaaactagtgacatcgttttggtccatgaaattacaaacataaatgactaaaatggtcaacgattggtactttgatacttattgtatcagaggtcactgcaataaagagtaagaaaggatcaaagcacagaataaaatgaaagaaaagcttcccaagtcagagaatggttctctagactcccaatttcattccaaatcttccatatccccgcaatgatttcccctttcccatatagcagaattccccctctgatttctcactcttataactaacttgattcccctcactcacaaagcattacagcactaattctaaatggcctctattgccctcctgggcctacgtgtgtaaaccttcagaggtttcccactattgggccgattcctatcatacttcaggtctaaattgaatggtacttgtaagtttagggattaatttggtgtattactctatgattgttactagaaattttcttattgttatttatttcttgtcatatcagtagctgtagaaaagcctgaacgtgttgtcatccca

SEQ ID NO: 20411 - DNA, 279 bp, Glycine max
  Intron number 1 from transcript Glyma02g43560.5 (locus Gly ma02g43560) derived from phytozome v7.0 (chr-ID Gm02; pos 48342519 to 48342797 reverse strand)
cttgtgaaaactggggattctttgaggtatctcaagaaccttttctaacctcattcatttatacattgccctccaaatgcatgtccttgttagttcttgtaattttcttcgtacttatgatgtgtttgttttaccgtttaaatccattggcatgcgttccaatgcaccgttttctccttgaacgtacatttggaacttccccaacggaaaaaataacacacacttacttaatgtctcttactgtttgattgctttcaaaattgttatagctggtgaatc

SEQ ID NO: 20412 - DNA, 690 bp, Glycine max
  Intron number 2 from transcript Glyma04g37020.1 (locus Gly ma04g37020) derived from phytozome v7.0 (chr-ID Gm04; pos 43494437 to 43495126)
tttccagagtaaacccctaatcttatatatctcggaaaaatgctagcaacatagtctctaacgtactcttttgaacacacttgctagttgctactaccgggtttgaaatcacaaattttggtgaatttcgctcctttttaatggtcggatttcttttgaaaaaaattgtttttttatatatctcttgcaaagtgcaagctcttttaacaattttacactgtaatcacagtttgaattactcctagataattattttaaaagtcaataaatttaatacatggtaggttgtaattggatgagtgtgtataactttttatactattagtgcatacaaattttttctcttttttttttcaacggatctttgattaatttacacatgcatttattttattgtggagtagaaatgaaaaaggataaaataggaaatctcataactattttattagaatcgagaaaatttattgcatttcttgttttctatgtagacaaataaaaaggaatggaatgagtaataattttctttcttcattttgtagtttttaataaattttaacaaacaggaaaatgtgtgttagtaagaatgtgttaaagagtgtgttgctaacactcttcataacttattggtcggattagcatattttggtgatttttgatttgtggattctggtgcaattatttcattcagtt

SEQ ID NO: 20413 - DNA, 786 bp, Glycine max
  Intron number 3 from transcript Glyma04g37020.1 (locus Gly ma04g37020) derived from phytozome v7.0 (chr-ID Gm04; pos 43495223 to 43496008)
aagatcatattggtgcgttgccttgggtaatgcttccttctccatgaaacttctggtttgacttgttattcacaactcaaagcatgagaattttgtctaagggagagacttttgtttgaactgtggttcttaatagataaatacaaaaggtgttttacagaattgtagacttcgctatcaaactcgagagtttatgtaaactcgtgagagtttcatagactctaggagtatttcttactatgagcttcctatatctcattctagatggtgagagaaatagaggaatgatttacattgggaagatttataccacactttaacccaaaacctgagcccgtgggtcttatcctcacttatatggtgctcaaccttcccattcctatccgatatgagacttcgtctcatgcttatattccaacagtatggaataaacatcggagcaaatatttctgttaggtatcataaatacaagaatagtttgcaagaacatgcagccagttaccctaattaacataatttcaagaatatggttttcctgtttacaacattactataattacatattttagcactggatttcaaagaggatgttttgtcaagatattactagttatttttgcaccaaaaaaattgatgttcttaggtattagtattgttactgtcaagagattctaattgattattattcataactatgtgtattgttctttctttatgtctattcttaaccttaattatattggtttgtcaggtcattccagcattggattccaatacaccaatttt

SEQ ID NO: 20414 - DNA, 436 bp, Glycine max
  Intron number 3 from transcript Glyma03g03800.1 (locus Gly ma03g03800) derived from phytozome v7.0 (chr-ID Gm03; pos 3637019 to 3637454 reverse strand)
tcataggtttctttttctcactctatctttctatcttccctccctcattctcccttttcacacaaaagcacaattgcatgcaaagagaatctatcttttactggatttggtgggttatatatggtgaaatattctatatttgtaattttttgagttaagtgttgctatagcttatagattttttgtttttgtttttccccccttttttctgtgcaatatttttttttgaataaataatatataaactgacagtggaattcaatcgcaaaccgcatggtaagtttgttgaattttataataacaaacttaaagtcataccgatagttatacctaaaaaattttacattgacagtgtatgcctattgaacttatattgttaagtaactttcttctctatgtattgactgttagtgtcttatttatgcattcagtgaca

SEQ ID NO: 20415 - DNA, 1002 bp, Glycine max
  Intron number 1 from transcript Glyma03g39030.1 (locus Gly ma03g39030) derived from phytozome v7.0 (chr-ID Gm03; pos 45253932 to 45254933)
tctttggggtatgtatcacttaactttaaatccctttcactcataaaacaaaacaagtttttagttccatgtagtgattaataaccattggttactttcttaatctccttgctgggttgtcctcattaatgatgtctggatagacactgctccccacatgttgtagcagaagtaattctttggagctgtgccttcctggggatgctttttctgtatagttatgtctcttcatctctgggaatttttctcattaatttagttagtctctagtattaattaatacttctttctttctcgggttcaacgagttattgctatccacatatggctaagaaccaaggcactttcttctctgaattttagttttttcctaatctcttttaccagctgtttttcttggagacagttaactgaattcatttttcttactgtaattattgggacaatacgagtttgggttatcatcatctttccgctttcttaatatagcaatattcacattttttcattcttcccttctgtttttctcatccctcttccttgcgtagtaaaacatgcacctaaaatgaaactgtgctacttgactacttcattgtcttggtaatgtgagacttcttactttattacctattatctttctcttgtcacttgatagatattgcaaaaatttaagcacaattaatcataaagacattaacttcaacaaagttttgcctgatttttttgggttgagatagcttgacccattaaacctgttaagaaaatgcaaggacataattaacatttcctttcttttgctctatcacttgcatttctattcaagcacgttttgtcctgtcaccttgccttgcaaactgcaaactagtggacaatatgaaatattttatatacttttactgattaaaattgtgaatttggtaagctttaaagttttgtctttaagataataaagtgttgtgtctctactatttcagggttgctgtgggggactgcatttttgcg

SEQ ID NO: 20416 - DNA, 1063 bp, Glycine max
  Intron number 2 from transcript Glyma02g37440.1 (locus Gly ma02g37440) derived from phytozome v7.0 (chr-ID Gm02; pos 42757633 to 42758695 reverse strand)
ctggtcttcatcgccaagttagaagattgaaacatgtatgtatctgaagacctttttttcttaatttcttttttctatctattcactttgtacttgttatttctttgtttttgttggtgggcatgtatgaaatttaaaaaatgtgttacttttttttttaattgagattttagtatctgaaatacgtttatcactggagtagagtggatgcatttaaagaaatgcggtttagttaattagagtcctacccaattcattgtttaagggaattttgaactctttgctattgaaacaagtagatgttggttgaagacttgaaggttttacattgtatgatgtatgaaaacttaatcgagagcgaggttttaaaaaacgatctacagccgcaattttgatttcaacctcaaggtctttgccaattttatgcattttatttttatttgcatacgattttttttatcatatataattgatatataatcatgtatttcaaccgcctatgtaagttccgctctttgcccataatgctatctactatataatgtagtagtggattattggctttccaccattttccgcaatccgcaatctgcaatccgcaattgatatcactgaaacaaccactggctgtagattacatcttaaaacttgaaactcagaagggaaataaaaaaaaaactactttttttggtcgcttaattcttggaaagaaatgtgcatcttcttggctcccaaaaggaatttgtcaatgaagagaaccttatcaatatgcttgttgtatgtatgctttgtagctttttctcccctttccatagaacaatatttactagaatatttgataattgatgcatgtatgtttgatcctgtcgccagtgataaaaaatgaattatatcctgcttattattccttttattggagctagttggatgaaattatatcatgtttcaaaactcatcttccactctatttgttcttttcctttccatcttccttttttctcatgctacttccaatatttctggtgcaggttgctgaggagataggaacagaagtgaagtatca

SEQ ID NO: 20417 - DNA, 568 bp, Glycine max
  Intron number 5 from transcript Glyma02g30370.1 (locus Gly ma02g30370) derived from phytozome v7.0 (chr-ID Gm02; pos 32409444 to 32410011 reverse strand)
atctcaaagaaatgtatgttttcttccggagtcttctgctattgcattttaattgaaatgaaaggacaagtgattcaatcatttagaaattttaggttcctaaaacctaaaccatttccataggtaggtttttctgtatgttactaatcttgaatattcaggatctgtaagaacaaacgatgaagccaatcaaaacctcattttttaataattcacaagggaaagagtagaatgtgaaatcatataaaatataaactacataaatcagtaccaaaaatataaactacataaataagccaaaagactgataacataggccacataattattcctcttttgttggaaatgcacatgaatatcatgatagctaggatttgagaagcacaagagcaagtaaagctctaaaagattagactatataattgaaaattagatcgagtcatgagaaagtgagaccaaaaaatgtagatgctttggctattttgtttagatcccaatctgtcaactaaccaaggatgatttcataccatcagggacctttcgtacaataatttcaccggtgatctgc

SEQ ID NO: 20418 - DNA, 534 bp, Glycine max
  Intron number 1 from transcript Glyma05g04000.1 (locus Gly ma05g04000) derived from phytozome v7.0 (chr-ID Gm05; pos 3124500 to 3125033)
ctacgaccttcacttctcgtccttcacccttgaaagtaattaataaaaattgacttttttttttttttctccttatcatttttgcaaataaattcattgcataaattgtactcgttattatcttaaatgggttaaccaacaagttgggagaggagatgccacccaatattagtcagctaggtttctaataatgtaatagatattaatttcttactactaataatatgtttttattttttataacactttgacttttctttacaactcaacataatttttacaaattttaattctttagactgatcataagattgattgaggatgtaaaatttaattatacttaaaaaatttgattcttttcaacatagattaattcaacgtgtgttataactaattagatttttcagttttttttaaagctgcacccaatggataataacatgatatgtttaacatattgtttttaattaattttttatttattttcatgacaaatgttatatatattttgaggtggtgcaggtttgaagccag

SEQ ID NO: 20419 - DNA, 337 bp, Glycine max
  Intron number 2 from transcript Glyma01g03050.1 (locus Gly ma01g03050) derived from phytozome v7.0 (chr-ID Gm01; pos 2544593 to 2544929)
caagtgtggacaagaagatacttcaattggtgtggaaggtttgaagatctttgtaatttgattcgtgatttctaaggctttgattgcataaataatagtaatatagttcggaatgatttttccctaaaaacaaatgatggatagtgtattgaaggagtgaaagtttctgtaaagaaataaagtatcgatttgatgtgatgtttacatattgaacttaaaattggattcttgctttctgtattcttcgtttaacttcacttaattaccttgctaaaatggatcaatttggagtttggatagtttacacgaaaatctaggttaaaatttcattggtttt

SEQ ID NO: 20420 - DNA, 743 bp, Glycine max
  Intron number 1 from transcript Glyma04g05350.1 (locus Gly ma04g05350) derived from phytozome v7.0 (chr-ID Gm04; pos 4075424 to 4076166)
gaagccatctctcctccacccgaggtacgtacgcacgtacgtaactaactaactaacaaccatttcattacacgctcgctcgtcgtttccagtttcccttctcgattcatttgacaacgtcttcaactatctttttaactgattctgtttcttcatcgcttcgttaagcaaaaaaccatattcttcgtttgcgtttcatcacacaatgctgttgcgtttgctccaatagaatctttctgagttcagtcaattaagaataggattatacgctcactttagtttctgttttagcgggggacctgacctggacactcgccatgtgaatttcggttatatattaatcattcatttctaaatgcgtaaatgctttctagttaaataattgggatttgtttttgaatttttctctttttatgttacttttctatgactggtaagactctcgcagatgcagattaatatagttttttaacctcttcgcatgcacaaatatttgcactttttgttaacttgtatttttgtttttttttctttccctctgtgaatgagaataagaaagaaccagagggtttacaggcttctgttgcccatgctgaaatcatacatgtggttaaatagagaatgattctttagtttgcccctttttcttgttgtgtaaacatgaaagagatggcttttcgtattcatatctgattttcttgtctattatggctaacgagctgctgaaatatttttgcaggaac

SEQ ID NO: 20421 - DNA, 594 bp, Glycine max
  Intron number 2 from transcript Glyma04g05350.1 (locus Gly ma04g05350) derived from phytozome v7.0 (chr-ID Gm04; pos 4076228 to 4076821)
agcgcttatcacgtatcctgatttggctttaaattgtaagcaaaatggtttttactttttctatatgattcttctagcaatgagtactcttaggccatgattaacgtcattttaatacactttattacatgctaataattactacttcacaaacaattattaaatgattttgtgtttttaatataataaatttttttcttataaaaaataaaataaatgttttattttgtattatacttttttgttttagtttctttaccatttcagttctagttagcattttcctttataataataataatattattattattattatccccccaaaagtcaatttttttttaaaaaaaagaacaaaaattgatgggcatttatagatttgttttaatcataagatgaaaacgccgtctcattaggtagattcaatgctagaattttgaaataatggtagttagctagttttctcttaaaagattttatgatgagaatgccaaaatatagatagaacgatgttttatgactttgttaacactgtttgttttgtttacaaaccaacaatctgaccatttgctttcctgcatgtggtttcatcag

SEQ ID NO: 20422 - DNA, 738 bp, Glycine max
  Intron number 1 from transcript Glyma01g25040.1 (locus Gly ma01g25040) derived from phytozome v7.0 (chr-ID Gm01; pos 33161999 to 33162736 reverse strand)
ggactcgccccactcgcaatttaaggtccaaattcaattttcactttttcttttaactctgttgagttgaagctgtgttatccctctttgtgatgatttgggttaataaaactatgaaatttccgttttcattagttttttgttgctggaaaacgcatacccatgtttcaaaatttgatttttgaatgaaaaatatgttttttttaattgtgattcgtggagttactgattagtagtagaatagggtgtgattttgtgatttgtggttctgtagtttttttattctttgagggggaaacatggatcgtgtggttgaatttgaattgatattattgtgttctgattttgtaaatttgtgattgtatagttatagtttcttttcttcttggtggtagtcattagcaaaattttaatgtttttgaaaataaaaaggtgtgttgtagttaaacgtcgagaggcttgtgttaataatattcatttgactatgatttgattttgttaatttatagctgtagttaaacatgatatatttgcatagtttttgttgcaaaattgtatacccattttggtctatctcaattggttgagtatgcgtgagttgttataaacatctggtagttaagttcgattcctatgaataaaataatttgaaaatttaatacggaggctgaaattaatacaagtagacttgcttttgattttgtgatttttatgattttgtagtgaggaggatcggag

SEQ ID NO: 20423 - DNA, 560 bp, Glycine max
  Intron number 1 from transcript Glyma04g32860.1 (locus Gly ma04g32860) derived from phytozome v7.0 (chr-ID Gm04; pos 38028911 to 38029470)
tgtttgtgtttgggctgattgccactttgtttcaggtgagccttcatatgatgagtcacatgctagagatggagagacttagtctgtgatagggattaggatttactgaatgatataattaagttatacttttcttctttagtttctttttattatttatttagagtgaacggccttgttttgagccgggataatcttatctcttattaaaaaaaaaatatattctattatgttttcactaagtggatgtgaacctttacccttttgaattgatttaaattaaatgtgtttaaaaagaaaaattattaataaattttgcatttttttcttcttttattattatgtgtttataatcttttaaataaattttgtatgatttatttaattagttagttataattgtaagggtagagggtgtcacatttagtggtatcagagcaggtcgaacctttcggccatgtgtgttatgagctttctgtgtttccttgtgtactctgatgtgttgtgtttgttttgtttgattagaggtgtactctattgtgtagtatatttttatttta

SEQ ID NO: 20424 - DNA, 641 bp, Glycine max
  Intron number 1 from transcript Glyma05g02400.2 (locus Gly ma05g02400) derived from phytozome v7.0 (chr-ID Gm05; pos 1771196 to 1771836 reverse strand)
ttgagtggggagcgaaggtatgtattaatttgagtatgcttttgaagccactaaaaatgaactaagggtgaggattttgggcagtgtgcaggtcctgtggtctcattgtacccaaaaccaattttgtgctttggagttttgaaagcaaatcatatagtgacatgttgttttttagaagatatatctatttggattcaatgttaagttgacagaacactagaacagaaaccagtgtatgagtgttattctaaaaagaattgagaaaaaaaaaaaagctgacctcacatgctcactcctcctctctatattctgctaatcttctaacctgatttgccaactcagcatagcaaattccccttcctttttacctatcagtctattgctgtctcttgtaatgaagtatttagaatttgaataatatgtttcttcaggtgttgtgcccaaatccaatagttgttctaagtcccatcttgcctcattatctgacttaggccataactcagtttgttatcaattaccatagttccccccaatgtgtgcatgagttataaatattaacttattaagtgattaaaaggaaattgaaattgataatctgcttatgctgttgcagatgggcctcttcttccagaagaggtggt

SEQ ID NO: 20425 - DNA, 770 bp, Glycine max
  Intron number 1 from transcript Glyma01g44400.2 (locus Gly ma01g44400) derived from phytozome v7.0 (chr-ID Gm01; pos 55089914 to 55090683 reverse strand)
attttgtatctttggttctcttttaggtgcgattctctcactctgctcttaaatcatgacctattctatttggctttggttgtattcgttgatgccgtggcgatttggctttcgtcttcttccgtttctcagtttgattacagcaattattaattactaattatattattaccactaccagtttcgtgtttggttatttgattttctctttttcatacttttaggatcaatggattttagagatttagctcacaagttctctcgttgtattgttactgtaagtcttcagtttttcatatccttacttgccttggccttgagtcagatctgtttgcccgaaatttgatgttctttgaatttaagctctttatttctctcaattcaaatatcatgctgtcatagacacatttttagaccatacctattctttaataaactggtaatctatatccaaatgcgtgtaactaactggtaatattaactcaataaattacctattctgtaagataaataaattatgcttatgaaatttttcaatataacttgattctgttaacagggtccacgctagtgtatcaaggttccaatctaaatgcatgttattgttgcttcatgtttgatctatatattgttgaactcaatgagatttaacttaaatggttagtctatgcaactgaaaaatatacttttccattcaacctaaaatttaaagtccattcattgtgggttttaaggtttgtacagattggaaatctcgggcttcaactgct

SEQ ID NO: 20426 - DNA, 619 bp, Glycine max
  Intron number 3 from transcript Glyma02g01680.1 (locus Gly ma02g01680) derived from phytozome v7.0 (chr-ID Gm02; pos 1230742 to 1231360 reverse strand)
ctacttcggttagtttgttcttacttcttccattcccataattcgagtgcctttaattttttcttatgaaatattttgagtctgttttgaacaacttattttatagtataagcacttgtgcaagtgtgtgatgggggagagattatgaaaataggtaatgatgtattcataaactgttttttagcttattttaataagctctgaataataacttgtgaaaataatttaactcaatttctagaaacaacttatacacaattcataagtacttctatatgatagacatttacttttatccaaacatttattttcactttgtaccatgtgtcaaatttacatagggggatagacttagttagtttcacattataaaaattaagatagaaattattgaagttgcttgcggttgaacagatttatggatatatacacgagaccaatttgttatttttttaattttttttttacattccgtgtccagaaatttcttgaacttattcgagtcattttgtgaaccagtggttggttttattgttgtgcttctttgtaggatgaatttatagtaaattagtgattttactctctaaccgagaaaattgtgttttccacttatcaggtt

SEQ ID NO: 20427 - DNA, 875 bp, Glycine max
  Intron number 2 from transcript Glyma03g34300.1 (locus Gly ma03g34300) derived from phytozome v7.0 (chr-ID Gm03; pos 41769893 to 41770767)
ggttacagttctttgttggtggcaactggaagtgtgtaagtatctttacctctaagtgttttttttaattaatattattcttaaaatgaaatgtttatttctggtgattgagtacttgagtttttttttttttcttacattagaatcttgcagcatcacatttggaatgcaaattacacgccataactctatgcgaatgtattggtttagaataaataaatagcctttgtaatcacgtttccttgtaagtattaaacttacttttttggggtgtgcatctggttctactaatcccatcttggaacttatagtctagtttatggcttgtttctctctctaactttctatagcagtagcagcatagagctcgttttcaaccctttgtttaagctttctattcatttttatttctaacgcaagtatccttcacccctttcttttcatctgccatactttgtttatatctgagaaatctaccactctgcattaaaggatctctttttctttctttttctttccttgatcaatatgtggagctgggaaaatttggatgacagacattattattttaaattgtctttaaatttttaagaaacaaagtttctgttcgtttgtgtaaaataatgaaattattgtctcttgcagtcttaactggttttttgaaacaggcacttcttttttgcattgttcagtagtgtttttttatgtgctcaaccacttaaaagtacaaatgaagtttttgaaattttgatcgtcacggcttaatcaattactagttcggttgactctatgtatatctctatttgattcttattaccttacctttgttgttatctctagaacggaacaaaagactcaatcagcaagcttgttgc

SEQ ID NO: 20428 - DNA, 443 bp, Glycine max
  Intron number 1 from transcript Glyma02g44090.2 (locus Gly ma02g44090) derived from phytozome v7.0 (chr-ID Gm02; pos 48764367 to 48764809 reverse strand)
tcaacaccccttatctctctctctgcccaattctggtgattattcccctttcttcctccttactccttttcctccaattgggtcattcatttcacagcaacgggtttttgtttaggctttttttttgcctaattttgctgtcactcacagtctatgttatcatcgaatcccaagtttcttcgtcaaagttcgtatcttttgctagcttattcttccccactgttacttaatccaaaaagcttggaacttgacgattatttcggcataattaatagaaattaaatgcgggggtttctgctatattaacgtgattgttaatttaatagattcgtgtaaaaaatcaaactcactgcattatgtttttggctgctgatgtgaatcttcgttgttgtttttttcttttttcagacctcaagttctgttggatcttgcatatagttacc

SEQ ID NO: 20429 - DNA, 1020 bp, Glycine max
  Intron number 1 from transcript Glyma03g38780.1 (locus Gly ma03g38780) derived from phytozome v7.0 (chr-ID Gm03; pos 45073746 to 45074765 reverse strand)
tctgcaccttcagtgttacaagatattttctctaggtattggattgttccttattttcaagtaacatgctgtcttggtttgagtgacaaaggttggcataagtgtgcgcttgtggattttgaaataaatttaattcctcgttgcatccctatatgataatttgttgtttgagaggcactgtttctacttcctatgctacctacttatttagttgtgtgttatgaattatgataaagacttttttggttttggtattgttgtttttagtttgcatgccattttttgtctgcaattaatattggattgtgatgttaagaagtcaattttatgtttaagaaggtttttcttcccttaaatgcattacagttttgtaatctcacattagctgttaaactgaaaatagatactttttcttttccttcaagatctctaggtacttgttataaatcagaattttattttattctcgacagtaacttgtgttaggaccaaccaaggtctatctcagttggttgaatagtgtaccggaatttgactcctctctttgaacccaaaaaagaaacttgtgttagggaggatgtaagattcatggcatgaggttgaaaactaaatattttgggggcataattgcccctctctaatttgaactcaaatcaattaacggaagctcacatctattatacaataactactgcagtcatttttaattcactagtgcctttggtgtaacaaaaaatgcagcaacgacattttgacaatcattccaagtgattttctgaattatgaatcagtgccctcatgttcataggaatgcaattttttctttttccagagtggctcataaactattgtgaaagttggtgaaggaacatatggagaagctttcaagattaacaattatgtctgcaaaatagttccttttgatggggacttcagagtgaatgtatttgtatgattactaatttatgaatatccaattgctcaggggaaatatacttgtgggccgaagtgattctgaaa

SEQ ID NO: 20430 - DNA, 746 bp, Glycine max
  Intron number 1 from transcript Glyma03g27380.1 (locus Gly ma03g27380) derived from phytozome v7.0 (chr-ID Gm03; pos 35097254 to 35097999 reverse strand)
tccttctctacaaagagcttggaaggaggctaaaggtatggtttctttcctttctaatttcctttttcttttccttggaatttgattcaacattcaaagggaagattaaaagaggagtttaaattctatgtactgtgggaataatttttttacagtgtcaattaatcaaaattcaattttggacggtcaattaatcagaaatcacggcttgtgtgattttctaaggtagttattgtaaaagttaacaattttaacatatgtgacagtttttaattggatgacaatgaaaaaaaaaaaaaagagaattcaaattctatgtactgtcggaatgaaaaaaatttacattatcaaataatcagaaatcaattttagaccgtcaattaatcagaaatcatcgttggtatgattttttaagatagttattgtcaaagttaactaatttaacatatatgatggtttctgattggatgacagtgtagaaactctttacattgtcaatacattcagagaattgttgtggggggatcttgaaaagtatggatattcattgagacaatttttgttctttctcaatacagttctaattctaacttctaagcaataggattctgttcttatgatgttgtggtcgtttgatgattaattctgctttatgcagttttggtcttttattcttggcctgatatattgctttggatgttgatgttacagaaaaccaaccctgtggtggctgagattttctcact

SEQ ID NO: 20431 - DNA, 764 bp, Glycine max
  Intron number 1 from transcript Glyma03g30020.1 (locus Gly ma03g30020) derived from phytozome v7.0 (chr-ID Gm03; pos 38014080 to 38014843)
gaggattcaagagatccaagcaaggtttgatttttagcattctcgctcttccggtttccactatttcattacgttttggtttctgcttgtttttttttcttttctcttcttttgtgtttgtgaatgtaaatcgaagtcattcttcatttgttaaattgttattaataatttcactaaaaaaaaattaactcaacactgttatggtatggtgctcatcgaggagggaattttctctctggcgcttatgaacatagctatttctgtcgtttagttgtttcactttggtctgttttttcagtagttggggaagtagaaaaccaaatcactatgattaccccgtctttcaaacttaattatgttacataatgaactcaaaacgtatgaaaatttctaaaattctcactcaaaagtaatttcactaaaaaatttaactcaacaatgttatggtatggtgctcattgatgaggacaaattttctctctcacgtttatgaacatggctactactgtcgttgagttgtttcagatttcagattggtctgttttttcagtagttggggcagtgcaaaaccaaatcacggtgattaccccgtttttcaaagtttattatgttagataatgaactcaacgtgtgaaaatttctaaaattttgtcactcaaaagtaattgtgttttaaagttattaacagctttggaataaaatgtactggattaattagcaagagaatgttaactgagaataagtaataatgttttgcaacagaa

SEQ ID NO: 20432 - DNA, 381 bp, Glycine max
  Intron number 1 from transcript Glyma02g12670.1 (locus Gly ma02g12670) derived from phytozome v7.0 (chr-ID Gm02; pos 10967693 to 10968073 reverse strand)
agtgctccttttcgacacccagatttcagtttcaggtatttcacgtttttttccccatcaaattaagatttccccttttcatatatatcagaattttccccattctgttcgaagggaaaataatctgattaggtttccctcttcattttaacttgagaatccaatttttttatttgttattgcattttcttcctggctgccacaaatgatagttgaagaaacgggttgcccttgaaatttgatttggaatttcatgttttgtttgatagaagagttcttattgttgaggttgtggtatttgaatagctgaggtgtgaaattttggatttttgatgtgcaactgtagtgattgtgggacttggaaaggttatttggaagaac

SEQ ID NO: 20433 - DNA, 1070 bp, Glycine max
  Intron number 1 from transcript Glyma02g15650.1 (locus Gly ma02g15650) derived from phytozome v7.0 (chr-ID Gm02; pos 14144480 to 14145549)
ttggcttgccgcggcattgtgtcacgctactgcaggttctgtgatctcttctgttttcaatttgagtgaatgtagtataatttgattggaaaatatcacttgctattgcttatgtgaattgcaacttatgacttatgttacttgcaagattttaaattgcagttgttttgtcgcaatcatagctaatgtaggaaactgattagagcgaatgtagtagaacttgatcctgaaatatcaattgcttgttgaacctgtgaattgaaccctgtgaaagtaggatactccaaattcgggagtccaatgcaatttatgatttacgttatttgcaaggttttaaattgcagttatggtcactgttttgtcgtgttccttgatattgaagaaaactgctgacaattgtgattactttgtggtcataggcacttcaaaaaaccctgattttgtgactgaaattgcagttgcagaccatcttttaaaaccttggttacttgtgttaccttgctagctgagagtttttgtttgtgaaaattggttcccgagagaggtaaatttgttacgaagatgatgagtgatgagccaatgacttattgtgtcatgatgacaaaggatctaaatgaatgggttttacagtttgcttcctgaaagttggcgtttgttgcagtgttgcgttggacaatttgtataggcaagagcttttaatggaccaatgcgacaaatgatgcctttttggaagcaaaaattgtgtttatatttgtttacattttagaattcaaatccccatacaacggtaatgataatcatgaaggtggacatacatttgatataccatcttgatggtttagtgtgtcttgtcttgtcagttagtttcttttagttagctatcagttttcttttcttcctccaagcttttgcaggctctggttctggctcaactattttcttatagcagtgctgtaccaaagagtacatttatagagcaattaagatgtaaaatcacatgtgcattctgttgtctcacttcgtcttgatgtgtaggggtttgcagaatatcgaagttttggaagctcggg

SEQ ID NO: 20434 - DNA, 906 bp, Glycine max
  Intron number 1 from transcript Glyma03g32400.1 (locus Gly ma03g32400) derived from phytozome v7.0 (chr-ID Gm03; pos 40145466 to 40146371)
gtgttcccaccttgtcatcttcctcaggtgagtcactcagataacagattaattatttccaattttgtccccatgtcacaatgagtgttcaaaaatggaaatcaactcaatagttaattttcctgctgtacaaacatcaataatgaataatttattcatttaagaacaaaaatactttattttatttttctcaactgaaatctaaaaatcttttctcaaaaattcaagaattgttgatataaatgggaactctttgtctcttattattaatcaaagtgatttaagattcaattctaatcttatacattacataataaatagtatttgaaggaaaatattatgtgtttactcatatttcctaacaaatagtaattcctactttggacgggaactattttatagtaatacacaatattctgaaaagaaaaactgaaatcttaatatacattaaaatggcaaaacttatatgaaagtgcttttagtattattgtataatcagaattggagatttactttattagtctgtattaaagttgaatagaaatttttatttagtgaattatcaaggtaaagtttcataattaattgaaaattagtactaaaaatattaacagaaatgcatgaaagttttgataaaaataaaatgcattgtgttgaggatacgaaatgatgatattatatatttttgtgagattgactttaaacattgggcaaaagtgacacaaggaggatttaataagtgggattgtgaaagggatttgcaggatctgggtaggtgggtgtgtactctttgtctattgtggttgctttctttagttagagttgaatttaataaaagattgaatatttttgtgtttggtttttggatcaggaggaggaggggggcatccacacacggagaggaca

SEQ ID NO: 20435 - DNA, 342 bp, Glycine max
  Intron number 3 from transcript Glyma02g10940.1 (locus Gly ma02g10940) derived from phytozome v7.0 (chr-ID Gm02; pos 9082421 to 9082762 reverse strand)
cacttcaacaacttgggggtgcagattgtgagtatctaattagtttgcacaagttgtttttatgtgctctaaattatgcaattgtaaccaacaacacttttgacacaagtcgtttagatttctttcctttaatcaagtagttcaagatttaaatcctaattaatttttggatatgaaatatatgatattagaagaaaaacactaacttcatttcaataccatgattagccgaacaaaaaaattatgcaattgtaaataaccacttttgtgtcaaatgtttgatgttttggtatttggtgtttgttgtctgtagctgccacgcccaaacaaatcagggaatta

SEQ ID NO: 20436 - DNA, 747 bp, Glycine max
  Intron number 1 from transcript Glyma03g28150.1 (locus Gly ma03g28150) derived from phytozome v7.0 (chr-ID Gm03; pos 36027219 to 36027965)
accagcttcgcactcttctcccttgcaattccaaggtatatatacgtctgagatttcaccttatacttatactctaacgatacacacaactaactaactaatatgctgtgggtgtgacctagttgctacatatataactttaatttctcccttaaacatatataactggaaatcaattaatttccagttaggaaattaaaaaataaaaagacacacatagagttgtacactcacacatatgtatatgtgcattatttatttatttcattgttaattcttcctttggttttgatgagtgtaattgtcaccttttctttctagctagccagttgtttttgaaagatagagagtggtttgttccttcttttgatctcaaaggttgcatactttttgaccaacaaagttaaatctatgtcttctagttgactagactttaatttcatggaatatgtacatacagcaggatgagctagattaatttctaggaagaactcataaaatccaaagtttcaaaagagattcgtattcatttcatgtttccaaaaagaaaccccagcttgattcgtaaagacattgacacataattgagtttgggaaagtgagtttgcttttacaatgataagttatactattaatatcatattatacagtactatatgatatgtgtattaaatttttccatggttgttgttgttgtttgattttggttcagacagacaaggcttcgcttttggcgaaggttgttca

SEQ ID NO: 20437 - DNA, 490 bp, Glycine max
  Intron number 1 from transcript Glyma03g37480.1 (locus Gly ma03g37480) derived from phytozome v7.0 (chr-ID Gm03; pos 44085527 to 44086016)
tattccagtgtttggcttttacagtacacttccatgtttatatataaatttctgtgtagccatcataaattacgtcaatatcttgttaggatccactttttctttaatgagaattctgtggagatattagagattggtcactacgctaagataggttagttgagatattgctttttcttgtctatgtagagatcttagtagttcagtggtacggtacagactacagaggtatgtatggtacaatattgttttcataatattgtccaattggaaagtggaatttcactatcaaaatttaaacggtttgctttgtgatgaagtatttgcatatctctagagtgtatgtaggttatgtttttaaaaattatttccaattgaataggttgttactgtgaagttggaattgcactttaattcatctccttatttctatcttcttttaaggtggcagtgcttttacttgtagcaataagcactgccgtggaaagca

SEQ ID NO: 20438 - DNA, 834 bp, Glycine max
  Intron number 2 from transcript Glyma01g36150.1 (locus Gly ma01g36150) derived from phytozome v7.0 (chr-ID Gm01; pos 48634174 to 48635007)
taattgttggagtaggacttcaaatacttcaacaggtacaattaattggcattttagtagtattacatcacttgattatattgtgtcctgctatgattgatattccatgcattcatcttaaaattgaatggttattgaggtgttagaattatgtcatgaagaccagtaccctatgaggaagttgttcttttccctcagttgtactttgtcatatatttttatccctcccaacctcatagaggttggggattaataatcgtgaagataattaatgacaagtttagtattaaggtgttgatttgatcatttcaatgttacaagtcttcttcaaatgaatatctttattgtaaccactttaattctaggttgtatggtgtatcctatcctatcctttaatctactgtcactttgcagttgctctacacaataatgccttgaggatcttaggagttgtttggtttcaaaaaatgtttcctgttttcattttttgtagttactaatgattacaatcattttctgtgcaaatcttttgaaaacataaaacaaaatgaaatcacataaaaaatttgttaattattattgaaagcaggaaatagaaatagaaaatgttttctcaaactaaacaagcctttagtttttgcactgttagtattctgttctttccttttcttcatctcatctttctaacaattttgacaaaattcttggacatatatgctaagtacataatgcttcttggtgttattttcctcgcaatgaagacttgcacatacactctagcttcttctcctgtgattctgaaaatgtaatatgtattgcaggctgctggtataa

SEQ ID NO: 20439 - DNA, 657 bp, Glycine max
  Intron number 2 from transcript Glyma03g02940.1 (locus Gly ma03g02940) derived from phytozome v7.0 (chr-ID Gm03; pos 2758598 to 2759254)
ttggtaatgttctctttctgttcatgttttatattgttctattattgttaggtttttctgaggttttaaattgcggttatggccatgtttttgttagaaaattgccgacaaattttgttgatgtggccacaattgtggttgtgtagaagttataaggttaacttggtggttgaagagagaaggggaaggaagaggttgtggatttgaatccctcccactgatattctaacacaaaagctaacaattaacatttgtcgacaaaaaaaaaaaaagaaacaattgtggttgcttgtggttacaaataatcctgaaaccttgaccttgatgttattgctgaaattgcagtcaaagccgctttttgaaattccattaacttgtttgtggattcatggccagttttcaacaaaggtaaaggaggaaggagggttatgttagactcttaaagtcaatgtaaaattcgaaaatttaaaaatttgtccttttaactgagtcaaataatagtgtaattcatgtagtaaattttacttggtgagataaggtttgctgttgttgtattattaggtattttgattaactttttttatttgctttacttatataagtattgctttgtgtgattgctagcagagaggaagaacagtgatataacttacaaga

SEQ ID NO: 20440 - DNA, 613 bp, Glycine max
  Intron number 2 from transcript Glyma02g10570.1 (locus Gly ma02g10570) derived from phytozome v7.0 (chr-ID Gm02; pos 8459528 to 8460140 reverse strand)
ccaaagccaaggaatcttcccaagtcacaattgaggtgaggtgcattgttgattacgatttttggattttagttttagttttttttttcttaatgaattttggatattcgatgctattttgttttgtatcctgcatggtatagacactgttgatctgaaaacagctgaatggctctaaaaattatccatcttttcggagtgccaaaagctgaattgaagttggtttcggttttattttatctttctttccttttttttgttgtttttgaagaatcttcctactttcccgtactagaagcaattcaatcaagcactttcgttttctttctaagattacagtacaatgcatatcttaacttgtgttttacatattcgccttgtaatttactcaagcaattgttgcataaaaggaaaagaaaattattattgattttttttaattaaagaatgaggtagagtcgtgcttggctggttatttttggacttttgttttttgacaggaggttatttttggacttgaacaaataaagtaaattatgtgattgttagtcattctgcatggttgtatgtaatcctattttgtgattttgtttattgtaggcaaatacagttt

SEQ ID NO: 20441 - DNA, 920 bp, Glycine max
  Intron number 1 from transcript Glyma03g34160.1 (locus Gly ma03g34160) derived from phytozome v7.0 (chr-ID Gm03; pos 41627834 to 41628753 reverse strand)
acactgtaaatcttgaattcctctggtaaccacttgtcttcttgatgcaatattgcaatttttgcagtttaattttgttgatgattattattattttaaggttttatatttggctcgattgtgatgaatatttttctctctattactgttttattggaatggtggtggcggcgtagaaacttggttcgtttcgattgcagttaagactaagatttttgtgaacggagaaaaagtgatttattgtgatcaaatcaatgttgcggtgttgtttgattttgatggcacggttttgtggtgagtgtgagtgttcgtgctgttgactgtgacgcaaaagtcaaatgaaaactggaaaacatgattgaagaaaagaaagagaggaaaagggttttattgattcatttattcgtttctgttctaatgcgtttgatttgtggtgttgtgttgtgcttgtgaattggtgaagttgatatgtggaaaatgaaaaggagctttaaacataatgcttcatcagcaatgttttgtttgcaaaaacatgtgtttcatgatggcataaaatgagaagaaaaaaaaaattcagagttgctaatgtaagatatatatatatatatatatatatatatatatatatatatataatatggaattttctattcttgaaaaagtttggtataaaaaatagacttcaaatttgaaaaaagtattatttcatttggcctccagttatatagatttttaaggtctaaatctgcatttttaattgcttaattagaagctattgtgcatgggtaccaaatctccttaaagctcaaactattaggtggtggcataggaaataggaatgtgtttatattcctaatttcttatttcttatcattgatttgttcatatactttctatgcagattaataggttagaagata

SEQ ID NO: 20442 - DNA, 964 bp, Glycine max
  Intron number 2 from transcript Glyma03g42370.5 (locus Gly ma03g42370) derived from phytozome v7.0 (chr-ID Gm03; pos 47620473 to 47621436 reverse strand)
tggtatgtgtgaaattgccgttctctctctctctctctctaatcccaaccgtaacatctgatacaattgtattcacttattgaaatcctgttggaagtttttctggcttcgtctgccataagtggttctgctttgccttgcttctcacttctgttctttatttcaagcatattcttctgcggtcttgcctctcattctctgtaataaagaaaatctctattttggactttgatttgtcaagttttagctcatgtatgagctagttataaaatactagccttgtttctaaaatataagccaactttcctagataatatgttatgtacactaatttgacttatattaaaatacttggattatgtaatttaatatcatatatttatggcttctagaattaatgtatagttatcaacaattcctaaaaatgtagttatcatatatcctatgcagtatttattttaacttataataacaaaatatctataataacttatcatgtgtaaatttttcagtttaagtttagttcaatgttatcatttagaagatatttttcttatccgtcatatttatcacatgtatatcttttgtgtataattttgcatttttgtaggatcttacgatccatgttatgatccttcaatttgtgatctttcatccctctcctgatcctgtgtaacatctcaattttttacgacattggccattattactgatattgtcaaatgatattaataattctccatttattccttttctgtgttagatttattcttggtagctttagtttattgtcgtcaatcatcaaccatgacaaatgaccaaataacttgataattggtattttggggatttgctgattatcttaattgcataaactgcatactgtcttgtgtacttttgtaaatgttagatttcttttgttgttgtaggtatcaaggagtctgatactggtttggctgcacca

SEQ ID NO: 20443 - DNA, 334 bp, Glycine max
  Intron number 1 from transcript Glyma03g42370.5 (locus Gly ma03g42370) derived from phytozome v7.0 (chr-ID Gm03; pos 47621482 to 47621815 reverse strand)
acatcgcccttctcaaaacctatgtatgtatcctccctttcattccattaccaaattagggtttcttttcaccactctattattggctttcagctctgaattatatgtaattgaggttctgttgctgcctgcctagttattcaaattccaatcacacattgacctttttctgccatcacttctccttgtacttgatggatcaaaatatacacttttttttatgactgctcatctgtactgtctgtttaattaacaaaatccttttatgatagacttagactttggtttatgcaatgcagggtttggggccttattccaccagcataaaaaaagc

SEQ ID NO: 20444 - DNA, 537 bp, Glycine max
  Intron number 1 from transcript Glyma02g05980.1 (locus Gly ma02g05980) derived from phytozome v7.0 (chr-ID Gm02; pos 4807340 to 4807876 reverse strand)
ttgctcaggtcacattaattttcttgcttaactcctactaatgaggcacaaaattttgatataattcacctagattgaacaagttttatgggtcatctatttattagattggtggagattattcatctttgtaagagtgaatagcaatgctatcctaattttaaaatcctctttaatgagtccattctaattatctattgtttttccattcaaatttggttattcctacaaataatggttatagagtaaatatatagtatggaccccaaatatgttacttgttattttgatccttgaaagtttttgtctttacaagttggtgcctggagggaggaatttgttagctccttggtaaatttagaaatcaattcgtataggcagagatttttaaagagtaaagcaatagaagaaacattttaaaggaccaaatattatatcgattcaattggttatgagtaggaacttgacacttttcctgcattatttgtattttgttgaacagattcttgaaggccaggaaatttgaacttgagaaat

SEQ ID NO: 20445 - DNA, 611 bp, Glycine max
  Intron number 1 from transcript Glyma04g37350.1 (locus Gly ma04g37350) derived from phytozome v7.0 (chr-ID Gm04; pos 43698484 to 43699094)
ataagttggaggagcgagcctcatctctaagaagggtaggtttgaactaggcttttattaatgtattaatctctattctattcttttatgatgttctatacaaaggcggagctttgaaattgttgtttgaggctcagagtttgttggaattcagaaacacttccagaccaaatacaggcacccttctctaaacttcaaatgagtaatgacattcttattatgggcttttggtttttagcctgtttctgaaacaatttttgaccccattggtatcagctttaaaaaataattatattataaaatacaactctattttcaagctttttttatggtgctactatttctaaattcttagaaaaacagtaaaataggtttttagttgtcatttttgtggtaaatctttgaacttgttgattagaaaaacactttatcttaagaaggaaaaaaaatgcacaaatgggtctttaatttggcaacaatatttaggttctggactgaagtggttgataggctatcttctttttttttttttaattatatcagtggtaaacattgaacttctgcttataaatgtaggagcttgccaacaagaacttgcacttgaagacact

SEQ ID NO: 20446 - DNA, 618 bp, Glycine max
  Intron number 1 from transcript Glyma04g01010.2 (locus Gly ma04g01010) derived from phytozome v7.0 (chr-ID Gm04; pos 586600 to 587217 reverse strand)
ggaaggttccacattcccaagtgcctacacctttggtaagcaaatgcatatctttgatgttgctatattattcattgtcataaattgtaatcaaaatcaaacaattctatgattgcactatattgacaagaattggaatcttagaacatggcttgattcataaagtacgtttactggatctgtggatcactttactttgcctggagaacaaggtttagttgctttgaataatttcaagttctcttgctttgactttccatggcagagatgcacttctttttctatttttcctgggtccaacttgggaaagtacttaattgaattggtgatacaaacattttgatgattcttttttcacttgttttgatttgacaagactaactaagatgccattcccttttttcccttctcttttattttaaaacgactgtacattgcctcacttcaaaatgcattttgcttagttttttttgtaatgattgtgttttggaagcattgttgattaagtttaagatataatgtatcagaggttcatttattatggataaaatgtttctgaatttttattatgatttggttgtagatagagtatttcggggtgactgttccacaaagcag

SEQ ID NO: 20447 - DNA, 995 bp, Glycine max
  Intron number 1 from transcript Glyma04g39890.2 (locus Gly ma04g39890) derived from phytozome v7.0 (chr-ID Gm04; pos 46052860 to 46053854)
atctgggtcagtttcatctctatcctattattgtttattggtaccccctacaacatttgacatttgctacctagtacttttgtttgatctatttctatgaaatgctacatatgtttgatatgattatgatattgagaaatgtgagggatttgtgagagggatgaatggccttgcagatgggtttttgttaatcactcttgcattattatatggtgctagatatagcaatgatagtgtgatttcgttcctcattccgttggttatacttgcaatcttcgtttgttatattagtttgtgcctcttggcttaaaattggagagggtgttatacaaagggggagagagagagagagattgaggatttactacgctatcaatcactttttgaagatgtcgtcttctgttatgtggttgagattccttgtgccccctcccccaactgtaaaatgcaaagcgtgtgccatactattactgtgtaaagtttaattttaattagtacagagactacatacttaagttttgcttttgatgtatatggcccttgaaaaagactttttttccccttagaatttgggtttgagcataactcaaccccaaaagctccccactcatatgtattattttgactatattatgacaaggactagacatctcgagtatctcgagcatgaaggactggatatctcaagctgaagttttcaggattgaacacctacaggtgatttaatagtagttcaacgaacaagtgatctgataagcccaataataatcattaggatagattttaataccattttaaaatctgaatttggatctaactcaattccaaaagcatgcttatgggatggaaaattgtccctcgctcttatgtacactattttagccacatcactagtcaatgtaggatttccaacattaatttttttcctcatgtatggtaagacctgatatatcattcaacagatgcaaccaatgaatgattcctgattttcaggt

SEQ ID NO: 20448 - DNA, 635 bp, Glycine max
  Intron number 2 from transcript Glyma02g13980.1 (locus Gly ma02g13980) derived from phytozome v7.0 (chr-ID Gm02; pos 12333407 to 12334041)
gagaaactgttctcaaggaggtgtttttttttttctttttgttccttcatcattaaccatttggttcttaccttttattgatgttctttttttggtaatgtgttattagttttatgtttatggattagtgacaattgacaaatttgtgccttgtttgattagtgttttgaaaatatagttctttgttttctatatataccgataagaggtggttcctagatgatattgttgatcagtcattccctaagagcttgaacaaaagcatttgaagaaaacacaagagaataagaaaacagaaaacatttcccagctgtttcagtattttggtttttaaagcgcttattttgaaaataattttcaaagcatgatagatgttggttgagaaattggtgtgaatttgttttagaaaacagtttttaaaatgaaaaagtaagaagagaatcaaacatggccttgctttcttttattttcaaatttggaggtgttgtttcactagttaaacacttgctttgttgtttgtgtagtttaatgaacttctctataatcaggtctaataacaacatggttttgtgccttttgtatgaacttagtttccctaacgttatatcagattgaattggaagatccgttggaaa

SEQ ID NO: 20449 - DNA, 802 bp, Glycine max
  Intron number 4 from transcript Glyma01g32900.1 (locus Gly ma01g32900) derived from phytozome v7.0 (chr-ID Gm01; pos 44535567 to 44536368)
tagaggttattaatagagccaaagaggaggattaagggttatttgcgatgttccactcaatacaaaaatgggacccaagcttaaaaataaagaataagatcatatggctctcaagatggggggttccattacacgtgtgaggtgaggactgtatatcctaactagtagctcccatcagcaagttcatcatggtggaagaagacatagaagaaaaatagagactcgatcaaatcaaagtgttagtcaaagtggcattaccacgacctattttaatacataagagaataagattcaatggatctattcaccttgtaagaataattgaagaaggtctctgggatagtggaagctacatatgtagacaaaagggatggaagaactcaagtgatggggagttatctaaaagaagcgtgtatggatgggactttagttccttgatagatgagtgttatgataactgtggcgaagatggtgttaagttgcaaggagatggtggtgggaaaggtgggagacatgacgggaatctctagtgagatgaagatccaatagtcttttacccaacgctcaataggatgactacacaaggtgacaaaaaagctaaaagagtcgatagtggagtcagtacaaaagggactgaagctaaaatagtgtgggggtgggtaaagaagatcttgggtaaagaagatcatagaaggggaaagaggacaaaagatattgacaaagaaagtattgatctcaagtaagtttgtaaggtggtgaacttaaaggcgtcaattccctgcatagttgaggagaacacaaa

SEQ ID NO: 20450 - DNA, 390 bp, Glycine max
  Intron number 2 from transcript Glyma04g43530.1 (locus Gly ma04g43530) derived from phytozome v7.0 (chr-ID Gm04; pos 49081807 to 49082196)
atacaggttactgccttctttcttttctaatgctgtctcttaaattcaaccatacttattaggcttaaatatattttagtttcctaataaaaataatttgatgcattgaatccttaatatattaaaatttttgttttcaatctttgtcgttagttaagtaatgatttgacaccttatcaacatatctttccaatacaatcaggggttgagatggtatcacctcatcacttaattgataataatgacttaaaataatatatctcagagatccaatgcaatggtaaaatttattagggacccaaacacggacctaaaacatatttaagcctacttattattatttgattttttatttttatgttttgcagtctagattggcattgaagcctg

SEQ ID NO: 20451 - DNA, 882 bp, Glycine max
  Intron number 1 from transcript Glyma03g31460.1 (locus Gly ma03g31460) derived from phytozome v7.0 (chr-ID Gm03; pos 39368247 to 39369128 reverse strand)
ggcccgtctctcgttcatcccgtgctgggatccaggtaacccatcttctctttttctcagattttgtgtttttcgttctgaattgcccttgttttcaaccgaaacatcatgaattgaacgaaatttgactaggtttcatgccccacgtgtttgttatgtgctggatgtaatttgtgttcctgtaatggttgtagaagtttggtttctgatgtttggttctaattcaaccataaagcaagaaccttttgttgttttcattatgaattctcaactggtgatagtaattgctcagaattgtgccagataatgtaaattaccgtgaggcgtaaatttttttttttggtcaatttcgtgaggaagttttttttaaaaaaattatttttacagaagcctgttagttcaagtgacaataaagtctcaaacttgagtcttgtgaatgaaaaaaataggatttgaaaggattttttcttttaagtgcctgacttggctcaaattattttaaggatctaaagagaagttgattgttttctcaaaatttaagcttttgggaacaatcaagacgcttttgaattgttagtttatagggtcgatgatgaagtttgaacttaagatctcacccaagtgtgtacttgggttacagttcccttgaatttaactcacctttttcttcaattcacaagtgttgttgcttttgtgctttggaaagtgtaaatgtatatttgatgcctttgaaatgacaatccaaacacactaaacttttaaactttccacaactatgccaactctagtacttttgttgaaattttttgatgcatagatttggttgttttggttttgttggatgtagtttcctgtgggacgtatccacaggcagttgaagca

SEQ ID NO: 20452 - DNA, 638 bp, Glycine max
  Intron number 1 from transcript Glyma01g06030.2 (locus Gly ma01g06030) derived from phytozome v7.0 (chr-ID Gm01; pos 5874616 to 5875253 reverse strand)
tacagagcaggaattgtgcctgtgtcctacagaaggtaattaagtaattaagttaattgtcttttcagtatttttttttttttttgcactcttaagagttttagcaaaatgggctaccttgcttgctccctcttgtcactttcaactttttaaaaggaattttgttgtttttttttttaaactcaaagtttttggaagtttccctgctttctgtccaagtggtaaatgatgcaaccactttcctctaaaagttggtaaatttacagcggaatcactgttcttggcttaatggggtcgattaatgtttagctttataactattttttttttagtttttttatatgtgtagtaccaaatttttaatttttaactgatacaaataaaaagttgccatttcttcatttctaattattttataaaactaaaataaatttatggaaaactaaagagtgagtatttttaattgtttttttatgaaaaaaagaagtaaaacacaaaagtaaacaaatcaagaaattcttttatgcaaaatctccatttatgctgatccaaagaagcaacaagagcaccgtgttgatttttccttggtgtatatttgtgtagggtaccctgcaggagaaggggaggcataaggttca

SEQ ID NO: 20453 - DNA, 437 bp, Glycine max
  Intron number 2 from transcript Glyma01g39600.2 (locus Gly ma01g39600) derived from phytozome v7.0 (chr-ID Gm01; pos 51533256 to 51533692 reverse strand)
ggacagaaacccattaaaggatccccccatccaaggtacataacaacttaacattataattatatcataagcaccttcacatctagtacctataattttatctttgtatatgttaacttgctcgttgaccattcaatttcaaatttcaaaatggacccatattttttattttgttttactaaattgaatcatctaatttgtttccttttttctctttcccgtatgggctaaatttagaaagatcctggcatgcttttttcttttcttttcttttttctgtcctttcccttgagtgttttctatttttatgtgatgttttggagttaattttgaatgggtggagtaaatggtagtagtaatgaatcactgaattgagttgtttttggaattattaatttgcagaggttattacaagtgcagcagtgttagagggtgtc

SEQ ID NO: 20454 - DNA, 710 bp, Glycine max
  Intron number 1 from transcript Glyma02g34920.1 (locus Gly ma02g34920) derived from phytozome v7.0 (chr-ID Gm02; pos 39559468 to 39560177 reverse strand)
gatagctccattgactattttgacatatttggggtgtaagtttctgtttcttttattttatttgttttttgttcggggtgttgaaattgctggctaagttttcttgtttataacaaaggagaaaacttacacccaattgtctgggtgcttttagtactacagttaatgttctccaatctgaattagagttttacttcattaatttgtgtgataaaagtttgcattaaagattagcctagctcaggtgattgaaattccaattctgattgaagaattccattccaaaaaaaaaaaaactgaaaaatataggaattgtatatataagttttgtccttataacaattcatctgtttttcaccttagttggtcaatactcaatagaaatggaaaacaagtatgtatatggatattgttaattcagtttgttttgacggaacataaaactagtaaggtgaaaccgaatattttgggttgttagttgtggtttgtttgcttttgtttattgcttgcttcattttcaagcaggaagaaaaattataatcttttatttgtcataattgagtcttatttgaattttgagtttcattgcaggggctgggaatcagtgggttagtttttgtgatggtgaaaagagaaatatattgatttaatggatgagtttaaaaagttcaaaatcattttttttttaattttaaacagggagaggaagt

SEQ ID NO: 20455 - DNA, 1022 bp, Glycine max
  Intron number 1 from transcript Glyma03g08820.1 (locus Gly ma03g08820) derived from phytozome v7.0 (chr-ID Gm03; pos 10003330 to 10004351 reverse strand)
cagtgccaccaaaggaccaggtttgcttctttttttttctatgcttagtttcacttttttgtttttctttgttggaactatcataattcttttgtttgttcttggtcttcttggggtgtttctcgtttgcatgttaggaacatgattgctttcaagtgggggtgattcttgttgggttctcaaaatatgcttctttttcttttcttgttttttttcttctttcctttttctgaaatttcgtgtttcctagtagcttgcccagtttcttctcaccttttggtttctttttatacgctaaatattctcccttttgtatgagtatgcgtagatcgaaaacttgttacgaaacatttcgaattactgctatgccagacttcttggttctgattccattttcactttctttttttgtttcccttttatgggaatggttatttcttgaaatgtttggcgacttcaacaatttactttgttttttatagcttggtacgattctttccagcatatttcgggtttgaagttttctctgttgctttggtgttactggtggagcctctttactgtcttgagaatttatttcaatgattttgtataattcaagaggatatgtgccaaatgaaagacaaaacttagatgcaatttcttaatacttttagtactggttttcaattggagttggagtttcacctcaataattcgtgttataaattttgcattaaaaattagcataggttacctaattaaaactccaattctgattggagaacaacactaaaagagtcaaattctgattgcagaacaacactaaaagtatttaaagatctaaatccatgttttgttcccaaactaattggcttttctgttatgtggggaaattcgttaagaaatggttgtctagttgctgtatttacattaaataaattgagaacgtacaaggttttggcatgtttgatgagacagtctcttggcccgaataaaatgttgcaggtggacttggaaactgtggagcctcaggctcaaca

SEQ ID NO: 20456 - DNA, 1018 bp, Glycine max
  Intron number 2 from transcript Glyma01g41270.1 (locus Gly ma01g41270) derived from phytozome v7.0 (chr-ID Gm01; pos 52828455 to 52829472)
gttggacttctggtcttatctttgggaaaggagaggtaagagagaagtttggtttttctgaacgatcatttttatttatttattaaaatgttgcttgtcaattatgctgcaaatttgatttgacagacattgtgttggataagtgtttacatggaattagtggcatgatttaatgttcttgctcagatggtttagaaatgcatcttgaacctgaaacaaagttgtcaaatgttgtcttaaatgggttctgatgctagttatctctaaaatacatgcatttctgttaaactgtagtatgttttgtttcttttccatttcaacaatttagttgattctgcgctgtgatatgtacaatatggatctaattgaaatagttagggtaggttgactcagacaaacagattcagtagatggccatagatagttgtaatatattggactctaggaatggggatgtgtttcactcgggtgggggagaaacccttgcagccgcctatcatgtggttcacagaagctattgttatctatgttactgttctttgactttgacatggaacatactaattttgtgtagatatgtcttaagccttggaggttgggggatctgagattgaattatatagtgtattcatgaaagcacccaataaatatttaatatgcttctaaatcataaattttataactaaaaagccagttattttgcacaatcccttgagagacgaaccatgagatatataacataaaattgaagtttggcagagggagtatataagtagagcaccaactttgacatctgtcatgtgattggctcttgtgattaattaaatctttggccaattaccaatgctgtaaaattgtgtcttctcttgccattgatagttatatctcttggcctctcccacctctttatgatgttttacctatttggaattttatcaacttgtgaagggctatcttatttatcaatactcattctaattcatatattttcagggtattattggactggaaactgaat

SEQ ID NO: 20457 - DNA, 613 bp, Glycine max
  Intron number 2 from transcript Glyma04g38450.1 (locus Gly ma04g38450) derived from phytozome v7.0 (chr-ID Gm04; pos 44860262 to 44860874)
gtgttgtgttggatcttcgagaagtcatcaattcagtaagtgtcttataacacatacactgtgtgaaaatgggtactgtgggtgtgtttggtttatcttttcaaaatctgctttaagttttcaaaatgcaaggaaacgatgttgctgagacagctagtagaggatagtactaggcacagagcagagtgtgaaattgagggagaagtttaacaaaatgaagaagatgatgaggaaacatcttctagctatttttggcttttagtttttaaaacgctttttttggaataatttataaaaaaaatttgaataagaaattgattaatgaatgatatggaattgttttagaaaacattttaaaccagaaaagtgagaagagaatctaacagacccttaatctttggtactccaacccatgttttcttgtacaatttgccctatgaaacttatatatgatcaattggtcatatatgaagaatagtttggtttctattaacagtggatgtgctaatttgagttgatagattagtcagtcaatagaaaaaagtccacaagagaaaagtcgattatttgttaaattagtactgctacatttgttattttcaattcttcaggc

SEQ ID NO: 20458 - DNA, 507 bp, Glycine max
  Intron number 2 from transcript Glyma03g30870.1 (locus Gly ma03g30870) derived from phytozome v7.0 (chr-ID Gm03; pos 38727644 to 38728150 reverse strand)
ttttcctagaatcaaggacaccgtgttttctctctgttttttgttttcttgccggattattgttattgatagatgaaatgcatcatgtgatgtcacattttaaaaaattaatgtaaacggtttctcaaattcaccgacacatgaatggttgaattttgaatccacctcgattatgttgtggctttcaatgaacttcactgtgcataattatgtgcaccttttgcttgttctcatatacacgtgtgttaccaacaagtggttgttgtgagtgatactagacttggttatgttaagcaaggtcttaagtgcaaactttgtggatgaaaaaaatgtggttggaagacgagaattccactaaaggttttcagttaggttcttcgacggatattagtcatcggcaatcggcaaagtcagtggatgtttcgtaccaaatatttcgtaacaataacatgctaaccccaaaaaatatacacgtgtgcttggaagcataagtattgctcttcagct

SEQ ID NO: 20459 - DNA, 604 bp, Glycine max
  Intron number 2 from transcript Glyma01g37130.1 (locus Gly ma01g37130) derived from phytozome v7.0 (chr-ID Gm01; pos 49518666 to 49519269)
cttctgttgttctccaacaaccactaattcctcaggtttgtcgattctttaccaatggataatgcctaacaacgtgttcttttgacaacgaactaggacgtgtttggttggaattattttcaaagaaattatagcttcattttaaaataacacacgaaaaaaaaaggtcatcatttttaaataatctgagtcaaacatgtattgaattgtttaatgaaacccattttttttttttaaaagagtatattgaattcttatgcaggaatgcataagaacttttttttttcactccaccccatgtttatttctgttttcgtttcttgttttcactcttaatttataattctgaaacattttttaatcttttttttttagttttaaatgcttgtataagaaataaagaaaccaaaaaaaaataaaaaaaaaaaaaatatatatatatatatatatatagtgtttcttccacaaatccttaaaaataagaaacaagttgaaaacaaggtaattttatagtttatctttttaaattttatgcgtcatgacataatatcatcaaatttttaattaatgttgtgtcataacttttggtggcaggtggtgaatc

SEQ ID NO: 20460 - DNA, 843 bp, Glycine max
  Intron number 1 from transcript Glyma02g20490.1 (locus Gly ma02g20490) derived from phytozome v7.0 (chr-ID Gm02; pos 19815903 to 19816745)
ctccttcctttccacgagcactcctcggttaccaggttctctctatcccattcaattcattctgttagattatacagacataagcactttttatattaatgcaatgttttttctatcaattgtagtggtcaagtcttgcgctttaaagactatgtttaggaattgaaatttattcagaggtgaaaatgaaggaggggagagtcataaaactttgattttaatttgataactttaaaataaaaaaataaaatgataaattaatgtaaatttaatttgcagtcttttgtttaattttataaatattatatacggatatgttaacatacgttaacttattttttttatagatacaaatgaggattggatctagcgggtggggtgtccttcacagcttggggaacagagtttcgaattttagacaatgttgtaatttaagaaaatcaacgttatttgctaacttacatctttaggagtatattagcaagttatacattgattgaatttttgaaaatttggagttataatttgttaagcaaatctctattatgtaattctcttaattcaaaaatatttttctttgcctttccttcttttctttttttccctttaaaaactcatttccaaatatacccagaagagtctgtttcctaacttgtaggaaaaaaattgttgtttttcacctgtttactgcatacaatgatgacgttttggcactcacttgaagtaaactcaagtggttttgacttttgagatagcttcttgttcagttgataaacttataaaatggtttttgatggatcctttgactgatagatgtacttgtgcattggtaggtttgttaaa

SEQ ID NO: 20461 - DNA, 960 bp, Glycine max
  Intron number 2 from transcript Glyma01g37100.1 (locus Gly ma01g37100) derived from phytozome v7.0 (chr-ID Gm01; pos 49486727 to 49487686 reverse strand)
accgtgtcgcggttaagagactagagaagagcaaggtattcaatgttacgtcttttgtttcttccgtggtggatacccagtttagattttgtgatcgttgtgcggtaatggaattaaatttctgttcttttcgtcgccttctccaattgtggttttgtttgttcaggagtaggaagaattttgtttttgtttttggttcccggttctggaggtactatactagtaattttggtgctggagattggtaaatttgtttggagtttgggataaggatgaattttatttatttattttgcttcgttgattggaaagggtttttttttggaatgtctgctgattcccctactgcatctattaatattattttgttccatgtttacctcaactagctcaaatttccggtttcgaggttgaagtttttgtatgcccagttttaatcagacatacaaggttgattaattatggctttctctgcaatctgtatataaaaccacttggttgtgttttctttcccccctcttccttgtagaaaatagtaccagtcgttgacaattccgttttgcatttcactttagctctcaccattatgtcgtggcatcctcctgggaaggtcgtgatagagataattaatgctatatggaattgtgtgaatttgagtgtgttttgtaacgtgttctacaaccaaacaaatcatgtctagcggtgttcattgtgatgtgacaaacctcgtccctgatctgtttccaaacacccacttcaaataaagagtggtagggtaataatgaatctggctagcgctgttgatgcctgcaactggttttgaattaaagtgaaatacgggttttgtgtacagaagttttacacaaactctttttcagtgttttcttattatttatgttcccatttgttttcttatgcggtttcgtgcattcctgaatcaatccttgaatttggtggcag

SEQ ID NO: 20462 - DNA, 920 bp, Glycine max
  Intron number 4 from transcript Glyma03g33040.1 (locus Gly ma03g33040) derived from phytozome v7.0 (chr-ID Gm03; pos 40730955 to 40731874 reverse strand)
ttatagggtatgtacaacatttatttttcatataattataatctctgtttaatctcaaccactttttttaattttctgttctatgacctgtccatcgttttgccttattcaccaatttaaatattcgacgagtactacctgctcataattacactgccattttcgtaaccttaaactattttgtttttgccttattggcgaatatcaatgactgactgaacccttagtcgtgtcagaaccataaagggcattttttgctctattctttttccacaacgttgttctccctctcttgccacgtcgcattacacctgtcgttggttccaattttgacaatataaataataaataattattagtaagaaaattatcccactttatattttttgtttctttcactattttcttcttaaatcaaacaaagcatgagggtgagggtgggtgaatcctttcacagtatgttttaacagagttcttttcctcgttttttttttcttttggtaatgtattcctcgtttcttagaaaaaggtaatatacttgtgaaatgcagttatattcctacttataaaaaatgtgtaattaaaaaaaaaaaactcaattacactagtagtctagtatcatattcttttcttttgagaaaattgttgaatgagatatagaatggttagagcgtttaaagttgaccatagccttttgtacttcgcgaatgctaggaatatgttagttgacacattttatgttttattattaaaaaatgttacatgttcctaataaccggtcaaatttcaatcaatagaatctagaggaaaactgatcacccaataaaaaaaatctcaggaaaaaagcattaactgttcgtaacatttaacgtattgcaatgcattgtatcttgttaggttccaagaaattgtaccgctaa

SEQ ID NO: 20463 - DNA, 751 bp, Glycine max
  Intron number 2 from transcript Glyma05g04960.1 (locus Gly ma05g04960) derived from phytozome v7.0 (chr-ID Gm05; pos 4184131 to 4184881 reverse strand)
tgctgagacacttgatcctacttcactctccaaaggtattcttcctttctttctttcttttgttttgaaggaaatactaaagaaataatgaaaatattgtgcttaaagggtaaacaaaagtattcatccttttggcatacataatcgtattctttttattggttttacattgaaaaattgattggagtgaggatattcgtacaccccaaaagtgggtggaaataagaaatagatagaaagtaaagagaaaataataaatgtgataggtgatgtgataaaacaagagacagatggggtggaaatgagatggaagaaaaagtagatgtatgagaagtattttccaattaattatgggtcaaaagttaattttgagttgaactttattagcttttgcattaaataagtttgtttacattcagttatattagtaacttgcttttaaagttaaaataaaaggggtgagatgtttagttgagtcttattcagacataaattactcactcctaaattaattttacaaaatcaatttcatttaactcaattatgcaaaccccactcaagcacactgagtaatgaggcttcctccaacacatatcaatgactagcaatgatatatgatatgtgtgtggccaatgctgaaagaaaaccatgtatgtccttatgcaactattcatcttctagaatgacagaaaattttgatcattccttattaacaggtgatccaaaagagacctattacattggtcctata

SEQ ID NO: 20464 - DNA, 822 bp, Glycine max
  Intron number 2 from transcript Glyma04g16190.1 (locus Gly ma04g16190) derived from phytozome v7.0 (chr-ID Gm04; pos 17258599 to 17259420)
tcatttacaaggttagcgtttttctgtttcgctgttttctgaaatgtgtcactgtgaactttattctgattatttattgacaatgaatgttactaaagtatatgtttgtttagaatcattttattatcaagtctattgtgtctgatttatggatgggagctactgcattgattgagcatctcttttctcacctctcccattcttttcttttactgaagatataaatttttgttaatgtgttggtttagagtttgctcctaagatttgtttttaagcaagatttgattagctaattgacatgatcaatgcaagtgtttctcagatatgtggattgtcgaatctgtggataaacaaatcatattgtgagttgtgacatatctaatcataagtggcagagtagtagctgtcaatttttttcttttgctggccagtttgatgtgctaggatgccaaggaaaacatctttatcatcgtcatcatcatcatattatttaaattatctgcttcatttttattttttttacttttgatcattgttaatggtcaagtttagtgacatttaagaaattatcaatatagtttgtttcgaattttacttaaaggaaaacatctttatcatcgtcatcatcatcatattatttaaattatctgcttcattttttttttacttttgatcattgttaatggtccagttaatatgtaattatgtattagctttgcaaagtttaaatgtaatttaggaaccgtgtgatgcttattagtcataaattgacactacttaattgttatttataagtaatatgtaatggtggatgaacagggg

SEQ ID NO: 20465 - DNA, 712 bp, Glycine max
  Intron number 1 from transcript Glyma01g04740.1 (locus Gly ma01g04740) derived from phytozome v7.0 (chr-ID Gm01; pos 4359700 to 4360411)
aaccctgtaactttaacagtgttatctattctggggttagtatttttcttcttcaagttcttttaagtacacccttctttggctgacttatgtgagatactatttgaattcactgcaatcatgatacccatttgcttacttggctttctagaatccctcttggttaatgtgtttgccttgttgtggcattgcaccttcacttggaatagttatgttagagattgaaccttcacttggtctaacagttttctgttttctaaaatttgtttgtcccctcaacatatatgaaagtatttgtcccatgaacacatttctgttttctaaagatttgtcctctgaacagttgaacatagcacatgaaaaagagaatgagaaaacatctcctagttgtttctgttttttgttttttataacacttgttttggaaacagatttcaagacttagtagaatttggatgagaatttgattaccgagtagtgtaaattattaaataaaacattttttaaaacaaaatgtgagaagtgaatcaaacaagccctatattttcctatgtaattttgactcatggagagaagagggtttgttgttggcctattagagcttagaagatgtttccttagcgcccattgatgtaatttggattgtcttttggtaatattggggattttcccatggttagatgaaccagttttgagtaattaatgtaggaac

SEQ ID NO: 20466 - DNA, 805 bp, Glycine max
  Intron number 3 from transcript Glyma02g40590.1 (locus Gly ma02g40590) derived from phytozome v7.0 (chr-ID Gm02; pos 45836787 to 45837591 reverse strand)
ccaaaaaatcttgtgttctcaaaaattggcttgaggtatagaagcatttagttttacgtattggttcttaaatttaaattgtactattaatttgttacagtcaagtgatcactcgtattcataatttaatgacatgaaagttagttgcttacatatttgtcatttgtattttatgcttgattgttttgttattttttaacatcttaaataaaatcttttaagattgacatagcatttttctacaatagaataggttgtgtaaaaggggagttgatgtaaatggatataatgctgcaagattcttttacagtttacccacagcaataatatatttggacctctgctaccttcccaaattgtaggaacaatttgctaagaatcaattcagaattaagttacaaccacaatcataatttttcatttagcttgtgggctatgttctttacataagagtctcatgatcttatctactttaaagattagagtaatgcactatgagtctacaacattttacatgtttgctagttattttgtgtttgctagcagcatagaccctgaattgtacatcatcatttgtgttctgaatccttaccaatgataatagtgataaaactcatttatcataacaactaatcaagcataaaccgttatctaatttatagtctagaagtgtgaagtttgattgaagggcttagtctgcaaccagtagagaaccttttctctcatgtttaaagtctaacttgtgtctgtttgttcccttccctgcatagttttttgcaaaaaagaacattagcactgaaattcc

SEQ ID NO: 20467 - DNA, 236 bp, Glycine max
  Intron number 1 from transcript Glyma03g28960.1 (locus Gly ma03g28960) derived from phytozome v7.0 (chr-ID Gm03; pos 36912807 to 36913042)
agtcactctcttactccactctcttcaatctcgaggtccgtactgtttcttttcttcgcagaaaccattgtgcttcttctcaccgtttgtgtctgaattcgcttcttttgaggtttcctatgatgtacttatataattaatttgaattgaattttagcatcttttgaaaacaaaaaatagttcgaggattttgtttatttttcgctgtttctgattgcattgttttgtagtctttg

SEQ ID NO: 20468 - DNA, 333 bp, Glycine max
  Intron number 1 from transcript Glyma02g44740.1 (locus Gly ma02g44740) derived from phytozome v7.0 (chr-ID Gm02; pos 49216019 to 49216351 reverse strand)
gccgcaggaggtaactaactttgcacccttttgaatcacattttcaactcattctaatttcttccatcactacatcaagtttgttttattttgcgatgatgcactgatatgatattcatactatatagtatacagtaggccgttaatggaaattttgttggtgttagtttgcttcatagatttagagtggaatgtgtatactcagactgcaactgtgtaacattgattaaagaatatttcatagaagtagactaaaatactcttatttaatatctcattattttgtaataaattgttatagtctctacaatgcttatactttcagtgttgaca

SEQ ID NO: 20469 - DNA, 837 bp, Glycine max
  Intron number 2 from transcript Glyma03g09140.1 (locus Gly ma03g09140) derived from phytozome v7.0 (chr-ID Gm03; pos 10727766 to 10728602 reverse strand)
tcagcttcaagaaccacgttattcaggttagtatgttgtgttgtgtcgtgttaccttctcaactctggatctctttctacatagtgttctagttccgataaattatttggtgatgctggattatcaagtgtccgctgatacaaatgaatatagtttatataacctatacatgattataaattgcaatagccatcgcagttacagttgtgttgtggtaagtcagaaaatctttatattatgcgaaaatgtgactaatgtggccgcaattatgattgtgcaacactatttaaaaccatgaatctatatttaaattttaggatttaaaccaaaaattattaacacaaaagattggacactttgggtctgacttgaatatggaatcgcaattgagatagtatttttttccaaaattggctgaccagtgaatagaagattaattgggatcaaataaaaagattcaaatacctcttagttacaaaaaaattataatttacgaaaaaatattaataacacttaaacttaattatatgtctctaagatactaatatatcattggtttgggatcaaattccttaaataacatcttgaattagagtttgagctagaatataaaaaacattattagaacatgtgactctattagaaacggttagtaagatttcgtaccagaaattagttacagaaaactcatcattctctacaccaaatttatgatgaaaaaataatcatgttaaatttaacctagatcattgtggtgtaaaaccaccaaatattttatttctagtgactaatttgaattgcattatttttctcgatttcagtggttcgaggtccttg

SEQ ID NO: 20470 - DNA, 399 bp, Glycine max
  Intron number 1 from transcript Glyma01g06730.1 (locus Gly ma01g06730) derived from phytozome v7.0 (chr-ID Gm01; pos 7139986 to 7140384 reverse strand)
agtgcaccttttcgacacccagattccagtttaaggtatttcacgttttttcttcttcatcaaattaaggtttccctttcgtatatatcagaatttccccattctgttcgaagggaaaataatctgattaggtttccctcttcattttaactttagaattgagattacaatttttgttatttgttattgcattttcttcctggctgccacaaatgatagttgaataaatgggttacccttgaattttaatttggaatctcatgtatagttgtttttttgtttgaaaggagggttcttattgttgaggttgtggtaattgaatagctgaggtgtgaaattttggatttttgatttgcaattgtagtgattttgggacttggaaaggctatttggaagaac

SEQ ID NO: 20471 - DNA, 414 bp, Glycine max
  Intron number 2 from transcript Glyma03g39210.1 (locus Gly ma03g39210) derived from phytozome v7.0 (chr-ID Gm03; pos 45377745 to 45378158)
cttcgtcacttcactctactgtaatagagaagaaggtcaattccgatcatctttcattaactattttctttcattatttatttattttaaatattttctctaaattcaaattgttatacctaaaatcttcatctcattccaccaacttagacaactgattaggttataggacctatatggtttttgggtttatgttgaaaggattatactatgtatgatataaagctattccttatagtcgtttgtggcgaactgtgagataaaatgtgttctctttatcacgctctgttcttgcgtactcacctataaagtttgattgttattatgttggatttgccagaattggaattaggttaaagcttatttaaacgtaatttgttttctactttgctgcagttggaacaccttccagcc

SEQ ID NO: 20472 - DNA, 902 bp, Glycine max
  Intron number 3 from transcript Glyma04g38480.1 (locus Gly ma04g38480) derived from phytozome v7.0 (chr-ID Gm04; pos 44879147 to 44880048 reverse strand)
attcagggttagcttcgtaatcttctttgccaatcccatatttctaactgaatagataaatattaaataatttgatgcattttgcacataaattttacgatgcacgtccatttttagtgtgtttattatgttacattctcgcatcttgtggggccatgtgtctaaaaaatcatgtatagtgcattctaagttatttctgtttggaggaaagcatttttcaaatataaaaaaaatagtaattaaaaaatacacactataatgcatcacagtggtgtgtcttcaagccttagagttgggtcataactgtgttgccttgtactaacgactattttgctatgtggatttagaaagtgattaattgtttgttttctgttaatatatccttcctctcactgtgtgttgtggttgttgactttactagatgcaccatcttgaaaaacatgagattttttttcatttttaactgtaatctgctttctcctctgttaccttcctacagcaattcatctgaaccaaaaaaaaaatgatgtgtggttggggacaaaacctttacctgtcacctgatctagtacttacaggcacaattttattattatttctcttttttgggggttttctgggtcctattatcatggtagccaccgtttgtttctggtctattataaggttctctcttgtctatgttttcgtttctttttttgtttttgttttttgcacttcatgttttcttcctctttaactagttgaatatgtagaactgggtaaatgattttattagattctctgtttatacatcttgtttaatagagtcatagtcggactggaaactaattcattaagtgagagatataatttgactttttaactgataggtaaattcagacacctccctgtcgtggaaa

SEQ ID NO: 20473 - DNA, 658 bp, Glycine max
  Intron number 4 from transcript Glyma04g06380.4 (locus Gly ma04g06380) derived from phytozome v7.0 (chr-ID Gm04; pos 4880021 to 4880678)
gaggtaaggtttgaaaagtttggctacttggattgatggcagaatgctgcttttactactttattacaaattacaaatgttttttttaccatgataggatgatttattttacttttttccattttgtctttctcttttggagagcatctcacattcctaattctacttctcagtctaataaggcatggaagattagtatacaatatcttctaaaaaataagagagtaaagagtaaaggaaaaaaaaatgagaagccctatataatcaaaaatagaaaagctaaaacaacaatatctcctctaaaacaacagttcccactgaaactcgcatatcttgattctagcttctctagataaaaccctacagggcttccatctcttgctcagttggattttctgatgtgcttctaaactgtgtctgtacttatgctctatttattgaattgtttgtttacctacatatcttttcaaacgaataatttctggcagaaaaatcaaggtcatatacattgacttgagctactaaatattccccgacagaacaagaggaaaatactgcataaattatgtctagtttgaaatcaatgctgtgttatggatgctcacttaatcccaaaatttcaggtaaggtggttgcaaagttttgtgccaagtttctt

SEQ ID NO: 20474 - DNA, 1066 bp, Glycine max
  Intron number 1 from transcript Glyma02g08400.1 (locus Gly ma02g08400) derived from phytozome v7.0 (chr-ID Gm02; pos 6593867 to 6594932)
tgataaagctcatatcttccgtgctgatcttccaggttagcccttctcaaccacacgcacctactttaacaattcaacttacttttttttgttttatattcgcatcatacatacgcgctgaatcaatttggaatttaattagaaccagttagctatagcctttcatgttcccataccatgcatataacagagaaagtcacaacactcaaatagggaaattaatgttattctatattatcacttttcatcacgatatatcaccacttatattatagtacatatcgctttctttttcatttatctattttcttctccaagtataaagactgtctactgtccaggaattattttccttataccatcattggatttaattcaggaaataaagccatttaagaagggtttgttgttagatattaattagaataataataataataagttttatgagtcttaaattgtaaaagatgaaagttgtaaggttgtaagttataaagccttgaataagtaattatgtgagtatttagtattcttgaataaacaaattatgtgagtcatcactctattttaatataaataggggatcatactcttatatttgatgtgccaaatgaaataaaatcttcttctttcaatgtttggtccaattttttaaacttaaatatctttcaataatttgctgtgtatacgtatttttatttcttaattcttcaatctttgttttgaagaaaggagaagcctagtttcatattttatttatcctttctaatttgtgaagaagttaagttgaattttatttcactattaccctttagttgatgacaaagatgaaaatttatttatatatatatattaattgagaattcataattctttgtggtgatataaaaaatgaaggaaaaagaaaaagagatagcagttatagcatgtgtaattggcgtgtgtgcgttggtttctcgcgggttcagattcgcgaggtccctattatgcaagctgagcgagttgtggggacacaataatattgatggcaggggtgaagaaagaggatctgaaggtgcaggtggag

SEQ ID NO: 20475 - DNA, 970 bp, Glycine max
  Intron number 4 from transcript Glyma02g41870.1 (locus Gly ma02g41870) derived from phytozome v7.0 (chr-ID Gm02; pos 46955520 to 46956489 reverse strand)
atagactaaaggtatgtttctgagcataaatttcatttggatatatacgggcagaggttttgacaggatggaaaaccaagtcaaccttttctcaattttttattttgagccagagccaacttgccttgctactgtatttgtattactggttattgactccaattttagctctacattttaaaaataaataaataaattagtcgaccagttactcttatagcgacaaaaaagaatatttttctgccaactatgtcagaaaagttctgaagctattcaactgttctctttggagttattgcattgatttcagaagaaaatagtaatggaagagcacctaattgatcctgtttggtacctttgacaagtttgtgtgaactggtaaagcatatagcagaaaggggtcttaagtgttgtataatttgagaaaaggaacaaaaggttgtaagcattgaactcaaggtggttggtgttaagaccctatcaatttgaatgtcatatgaaacaagataaaatggaaaaaagaagaaaaacaaaacatggctttacttaacaatatggtgagtctataagaatcaccttctgttctgtaaaccaacatatttttataccaggacattgatgataatcacaattatggtgtagtatagcgataataccatatagttaagtttatattgtcaaagtgatcatgttacattctcttttacaatgtaacttgatgttcttgctcatagtattaacataactggtttctcattttgatggtgtacaggaaaaaactgatgacaatattccaatgcctacctattttcgtttccttgctttacttgcctttaagatatttgcagcagagcaggtttgatccccgtgctttaatttctacgaaaaattgttcaattatatactatctttttgtgtatgttgttatgaatggataaaagcttttctttctgaaattttatgtaggtag

SEQ ID NO: 20476 - DNA, 519 bp, Glycine max
  Intron number 4 from transcript Glyma03g26640.1 (locus Gly ma03g26640) derived from phytozome v7.0 (chr-ID Gm03; pos 34112860 to 34113378)
tcttcaaggccttgtgttggggtgctgtgcagcaggtctcatcacttgtatatttgaaactctgtcttatcaatatcatatgcatagcatttaagagtacaattttcatacatgatcactttcaattaattaaaaatcatgatatagatacttttaaagtatgtagtacaccttctgctcctaacatatgtagtcctagattttttttatataaataaaaaactaataaatagatgaaaaaaaattataaaattaattttattatcattaatttatttatagattttatcgttcattattaatattataaaagatacaaataaaaaaataattaatattacattaaaaagttaaaatgatcatttttttcttatccaacaattattatgacccgaagaaaatattattcaacttaacaattttattatacaagataatttaatgtggatgacgatttgagatttgaaatgtttgatttctgcaggaaatctgggaaacttgcctataattttagttcca

SEQ ID NO: 20477 - DNA, 768 bp, Glycine max
  Intron number 2 from transcript Glyma02g13370.2 (locus Gly ma02g13370) derived from phytozome v7.0 (chr-ID Gm02; pos 11674862 to 11675629 reverse strand)
ggaattgaacagaggttttgtcagcagtgcagcaggtatttttggtttatttgatagatatattacttctcaattttcatacaatcaggtggtcaactcacaacatttatgtaagctccttatattttgtttagttggtgaggtactccaatcctgttggttagaaacaaataaaagttgagcaaattatttgctataaaaaaaaatcaattaaaaatatcagggtttgtttggtttaaagaaatatctttttcatctctggtgttatttctttttgctgttacttacaaaagtgttactttgtttgttttaaaaaattgtctatgaaatgaaatgttgttattgaaaacataaacaaggtaaagagcaagaaacaagatgaaaacaaacaaggtattttttttttataattattagtaaaaaaagaaaataaaaacagaacctttttcttaaatcaaagactcgcagtgcttctcttatttttactgtcatatggttcttctagtggatcctattaatacaataatttaagagttttctttgcctacaacaaatgtagtttaaatggatgtgacaaatgacaatacattattgatcaaattccaatcaatcaatttatataagcacagattgactgttgtagttcaggtgaaatatcttcttgattttgattttaatgtttgtgaattgaacctgattgttacttatggattgaattacaccatttgttttgtttttaaattaggtttcatttgctagctgagttcg

SEQ ID NO: 20478 - DNA, 831 bp, Glycine max
  Intron number 1 from transcript Glyma02g13370.2 (locus Gly ma02g13370) derived from phytozome v7.0 (chr-ID Gm02; pos 11676288 to 11677118 reverse strand)
cactcaaaactcacaagttgccactaatctgtcaggttatttcaagataccattttttctggtgtttggttcccgagaaactgtttagaatatagaatcaaggaacagtagaaggccaccaaatcatttcaatttttttcttcaatctgtgtcagcacccttgttttgcattcttcttctagcggtttgtctcctttttcttcttcagaaaaatgagtcctttcatctgcttcttttttcatggcctttattctgcttcagcacagtttgagctaccaacattttaactttgtccattgggggtttgaatgttgtgagagttggaacatggaagatatctaatcatgcaatctgggtttgatttgatttgttttgttttgtttacccttttgaattttttgtttcttgttgtttggtttacctcagtgtcaatgtccctgtcaaaaaaaggttgagatttttggatgctatttttggctagtagcaggtcagggaaattgaattttctgttcatgaaacaaagtgggatctgattttctttttcttttgctttttccttcttttggtgaaaattttgctttcacaagtttgtgggaatttgttatattttcacatggttgtcatgcctgtttgttttattttgttttcctagtgttcattagtacatgtactttatttatctacagctatatttatgtcttgtgcagtatgtatattatgtacatgtatatgcctgaatttggtataacttttgattttggctagggagtaatgtttttcttttggattgtggtaggctgcttcattatttcacacatctgtgacttcaat

SEQ ID NO: 20479 - DNA, 653 bp, Glycine max
  Intron number 2 from transcript Glyma03g33200.1 (locus Gly ma03g33200) derived from phytozome v7.0 (chr-ID Gm03; pos 40856769 to 40857421 reverse strand)
gtaagaagtcacaacaacagggtagttcaaacaaggtttgttcacaatctctagtttgtggaaataaagaaataactgggttgattcactaaagggggagtgagagagttgagaagagcttggttaaaaagaataagtttctcatttgaaatgtaattgtatgatcccagcgtttcgtgaaaatgtatgtactattatggttgtttatgtttttgtcttttttcctacctcttttctattcgggagaacaaacatacacttaaaaacaaagaattgttttcggtggaattaattacaagctattaaatattgttaaaatttatactaaaattaatatctattataaattttacatcattgtgccgagaaatttattttgatattaaaataaataggacaataaatgcacaaaaatttaggaataaaaacaaaaatgagaatgcaataattgctagcaaaaaaaatagtatatatatatatatatatatatatatatatatatatatatatatatatatatatatatatatatatatatatttaacagttacattttttagggaatcataattgcattttaaacatataacttttagatgtttaaaagactataagatgtaaatgtaattgaagacagtgagagtgcaagaaga

SEQ ID NO: 20480 - DNA, 828 bp, Glycine max
  Intron number 1 from transcript Glyma04g36090.1 (locus Gly ma04g36090) derived from phytozome v7.0 (chr-ID Gm04; pos 42591316 to 42592143 reverse strand)
ttctcggcattctagaacttctcaaagttcatagggtatttttttccctttttcttttctgtttacactgcaaaccaatgacgatgtgcgtatttggtttaccgttgggagacccccaaacggccgttgaataaaaaaactccgaattcctacttctcacaaaacgtgcattagaatgtgtgcccgcatcatatgattggtttggatttaattttaccctgaactcgtaccaatgcaatccatgaacacccctagttcccaaagaaacaccgttttggtacattaagagactctaggtgcgtgtttggtttcatgttagattatctaggatcatgttgaacactagttagcgtgattttaggtgaattttcacatgtttggttttattacattgaagaattgattcttggtccggaatttgattttgtgatgaaacaactttagtagcttctgtattagataaaaaaatttatagcaagttttactacttttaaaataaacaatcacaatcacttcaaaatcaattttgcttaacactcatacaaacgctaatcacttttagtaaatgtagggactaaaactgaatttgcagatattgagggactataaacctattttatccgtttttatttcttctgtagttcttctgcatgtgaaaatcaaaattatggttttacttatacaaaagctgcttctctgatacttgttatatatgtgtttgttttgttaattttatttaaattaaatttcctttgttccttttccgatttcattgttcacactatgctttctttgatgatggtcagcgtgtgctgtatattgatattg

SEQ ID NO: 20481 - DNA, 532 bp, Glycine max
  Intron number 2 from transcript Glyma03g40220.1 (locus Gly ma03g40220) derived from phytozome v7.0 (chr-ID Gm03; pos 46024008 to 46024539 reverse strand)
catccaacttacttgatcgagacattacatcaaaggtatattataatttattcaagggtgcaaatgttacacaaagattcgaaatggtcttttatttctcgatgtttcttgcttattttaatatccttaatgctttttatgccagggaaagcaatcgcattattcgcatatattatttttcattcatcttagatgccttttcattcggactcttaattatttgatcccaatcaagcaaatactttgtagttatttcttacaccgtggaaactagtaagtaagattttatgagtagagccacagttactccaacaattcatgtaaatgtcaagagtaacgactttgtttacaaaatatttgtttttgcaaacataaaaaatataataattatctttttgccggtggcaacatttgtggaagtttcaatatcttcgtggaagtataatttggtacgtgcacattcaccaaaatttgcctttgtgagcataatttagctgttttttttttccttattctatttcagagtgatccc

SEQ ID NO: 20482 - DNA, 374 bp, Glycine max
  Intron number 1 from transcript Glyma03g30320.1 (locus Gly ma03g30320) derived from phytozome v7.0 (chr-ID Gm03; pos 38297361 to 38297734 reverse strand)
gccaatccctgaggtaaacaatttctctctctcacatttccgatgttttctcttcgctctccacgcgaatatatacatgctttatgcagattctcgattttcttcgtctggtatgttttttcaatttctattatgctcgcaagattaggcgcgcaagcgaattaggtcgaaagtaccttaggggttttgatcttcttgattactgaaattccctgtatgaaaaacctatgtgtttgtagaaatttgaattggttgttattgcttctgtaaatataagcttctttgaaacttgcaaatactaatatgtttataattttgttttgttttgttttttggtagttaacagttgattgtcgtttaattgtggcttgtgt

SEQ ID NO: 20483 - DNA, 860 bp, Glycine max
  Intron number 2 from transcript Glyma01g44110.1 (locus Gly ma01g44110) derived from phytozome v7.0 (chr-ID Gm01; pos 54887493 to 54888352)
caacatttttcaagcattgaaaaagctgtaagctctggctctagcctctataccttctttcatctgcatttcaagtcttgtgtaacctggtctagacagctatttttggtttcgatcttatttattttctttgcatttgttgtcatttattaaaacattctttaaatatttagttttgcatgtcaccgtaatcctaatttattatacacttcttgaatattgggtcctgttttagaagtgtcccagaaattgatgtttgaaactttaaatttttttattgaaagatcttaacaaaattttaatataataattatttttaatgataaaagaggccagattgctgtaaattgtcaattttttaactagaaataataatgtaacagcttcatggcaagatagtactagttagtgcacaaggtgcatggttgtccatggtgtaggagccatgtgcctggaggcaagaaccaagcacaccaaaagtgttcatttgtggaaggtcttgaactagaaaaaaaaaagtacgtagaaactgataatgagtacctttggctgttataaccatagcttaaatttaccaacattattgcgttagtacatgccaagtggttttgctttattttattttattttatatgatctgtctctgccacgcaccggccaattgcataccataagtgcaaaaacatcaattgagaatttgttgaggaggcatttattgcgtgtcatatggctgtcttaacatatgtacctacgtaatgtagtttttgatagtatgctataggtttaagtgatgcttcattgttgtttcatttattctggtgaattttgactcgagttgaaaatgcttccgtgcagattga

SEQ ID NO: 20484 - DNA, 859 bp, Glycine max
  Intron number 1 from transcript Glyma02g46590.1 (locus Gly ma02g46590) derived from phytozome v7.0 (chr-ID Gm02; pos 50497678 to 50498536)
ctctgctcagagatctacctggaacactctcagcggtaatgtctcatgctttactaccatctttgcttctcttcctcttcacttactctttaataactaaccaagtgtacgatctgttcgtttcttttttgtgttatctttgatttcgtttttttactttgagctgagttcggatttggataaatggctttgctaagcttcgagctagtttatggtctattgatattatatgcagtgcttagaaagagtttgacgtttctcgagagcttaatctgagaatatcgtatgtgaaagggaaacattagttatttgttgtcagggaaagttttggccgaatgaactgtttgcggattcaactcttagaatttgggtttgagcctcactcaacctcaaaagctaactagccttccccacgccgaggactagacatcttcgatgtgaagttttcatgacttaacgggtgacccgatagattcaacaataattgctaggatcagctctgataccgttttagaatttagaatttgggttttgtcatattcaatcttaaaagctagcttaagaaatgagggttgtcccctatttatacactcttttttgccatttcattagcctattaggatcttcaacatgaacaattttttccatgtaatctaaaggccaatcgctgactgaatacgattcttgatataatctcagagaccattgccactttcagttttagaatatgttcttgaatgacttttgcactttttattattgtttaaggaggaactttcactgtgttaggtgttttgaaacttacttgtatacttgttttgcaggaggtgcgccattggttgtagcacgtggtggattt

SEQ ID NO: 20485 - DNA, 346 bp, Glycine max
  Intron number 2 from transcript Glyma02g05480.1 (locus Gly ma02g05480) derived from phytozome v7.0 (chr-ID Gm02; pos 4404977 to 4405322)
cttgtgtgcttgaagaacaattgttgatctctcgggttagtactcttgcttataatcgtcattttgtcttgttttcttcttgcccccccaagaaaattgagagaagttttgaaatttgaaatgaaggaaaagacacattttgtttctatttctaattattttttattcaatcaaatggattaaaaaaagaggaaaatgctgttttttttcaaataaataaaaatctattttttctttttactaaaattagagtgtaaatcttgattattaaaggaaaaggcatgaaattaaaatgttttctatattttaaagatattaaaggtattgtttttttttatggcaggcg

SEQ ID NO: 20486 - DNA, 886 bp, Glycine max
  Intron number 1 from transcript Glyma02g12390.2 (locus Gly ma02g12390) derived from phytozome v7.0 (chr-ID Gm02; pos 10654379 to 10655264 reverse strand)
cagttctgcctctcttgtttctggccagggtaccttaaaaatccaaactttatcgtcgtttcattcaccccttttgtcgtttgcctctttttctgtgttgcgttttgatgtcttggactgccctttgtgttttttcatgcatatctgtctccagagttttatatttattgggaaatggagcttctaatagaaacactcttcttcctaattgtcctttggattgtgttaaattggctttgagcaagagtatagggattattactatacaaaatttgtagtaatataaattatttgattgtcatgatgtggtcaaaacaagtaaaagtcattattttgtgttattcaataattttgtgctaccgctaaatgtttcgatctatatgatttgatgaaccctatcttattgatcagttgagtgaattatattattgggactagtcatgttcttcggtttttctgatgttcttccccggttgctgctgttgaatctggtgatccctggctggcaacatggatttgttcacgtgtttcttttgttaatagtgtttgcccattaaaagcgatgaagatgtgcatatcttttagattctggaggaagtggatgatttaatttgcttatctttttgttcatggaaacatggatttgttcatgtgtttcttttggtgatccctggctggcaacatgcatatcttttagattctggaggaagtggatgatttaatttgctgtgctgtgtgtcgggtgttatcttgagcatgcttctgtgacatgaagatgtatgatagcttatcgtttactttaacgttaaatcttgtttactgatttttttttaaatcaacactattttcagaacagcagcagcagaagttgtctgagattaaagcg

SEQ ID NO: 20487 - DNA, 1019 bp, Glycine max
  Intron number 2 from transcript Glyma01g40890.1 (locus Gly ma01g40890) derived from phytozome v7.0 (chr-ID Gm01; pos 52546764 to 52547782 reverse strand)
tccaacgacttttttgataacttgccccgtgcctggtatgtatgctgctctctccttgctacttttggggcatatagattgatttatgtgtattcttaacttgctaatggtttggtttttggttatatttgctgcatcagtttgctatcggttatctagtttggctgcaggttgtattcatgctgacaaagctttttttattttatttttctttttctttcaagggtaggggggaattagcttgaatgactcgtaaccatgtaataatcagtattgtatgaaatgcataattaagttaaaacaagtttagcttgctttagaaaaaatatgggtaaaatgcattcagtactttatgccagagataacagggctttggagttggaatcgacctcttaattagattttaaggcatgacctctagttttaagagtgtacttctatatcattatgtttgaatttggtcatgtttagtgagattaacaacatgaaacttttggaatggttggtcaatagaatgtggacttgtggttatgaaataattggagcttcagaaggtaaagtttaaggctaagcatgcttcgttcattggtgtgattggtccatcattgattgttcttgccattgactaagaaaataaactataatcaaatttatgcactttttagaatggtgcacaaaatgtgaatttgaattaacttttattagttatggtatagtgttttttttactgactaatctatttgtgtgagaaaaagaaaatgaccaataaaatatcacacgtagtattttgtccttttatttcttctaatatattgttcgttcttgagttatgactgatatattacatttatataaaataaactgccccatttttcagtcataatacatcagtaatcagttagtacacatactcaacacatatcattacttttgaagttgacaaagaccaatctcactctaatttattatttcattttttggcaggtttatttacttatttattggtattggagtggttc

SEQ ID NO: 20488 - DNA, 612 bp, Glycine max
  Intron number 1 from transcript Glyma01g40890.1 (locus Gly ma01g40890) derived from phytozome v7.0 (chr-ID Gm01; pos 52548029 to 52548640 reverse strand)
ttgcaattttcaacccgaaatcgtcgatttcttctgtaagttctcgcagcttagacccaatcgctcatctattatttctttgtttatttttcgtttaatgaatcgccagagctcttattaattttctgagctacactttactgcgaatagggctcaattgctttctaatcaactttaccattaaaaaaaagaaggaattagggatgtgaatttgcatttattacgttttagaaatgtttttctgtcttttgtaaatcaaacgattgaagtaatgtttggataaaagttagagaaattactttttctaattcttctgaattccagtgaaaaatgaagaaggcaaacattgccattttcggagtaaaaagtacttcttagctctctcaattgaaattcaaacatgcatattacttttttttgtctttttgagactgttaagtgtaaacggacaagttgaagttagcatgtctattaaaattcaaattgaactgcaggtgttatcgacttatcgttgatgtaatagtttctatttatttcttatctgatactataggaatgtgcctgtctgtttctgcagaaaatatatactgtgcattggtctccttttcgaat

SEQ ID NO: 20489 - DNA, 570 bp, Glycine max
  Intron number 1 from transcript Glyma03g24110.3 (locus Gly ma03g24110) derived from phytozome v7.0 (chr-ID Gm03; pos 30777247 to 30777816)
gtcaaacaccacataatcctttcctgcatttcacggtttttcttcaacactctcagtctcgttttcttcatctttttcttctttgttccactggaaaaagaagtaccttacttgtgaagtgggatttagagcttaatctgaagttgggttttgcttcccttgtccaaattccatggctttaatcttctttacttgttttcccttactcgatttcacatgggtattttttttacgatggctactgacgattcaattttttttctgattcatgagtcctctttcccgcaccgttaagatttgattaaatgttttcgttttagtacaccaactgttcgatgaaatgttgcaccgaattcaacttaaattgtatctctacttcaactatagcatgcgtgtcactgcttcttttaacttttctgtgattctttagaaaattgaataaatacgcagaaaccgcaactttattaactggttatgtagtattgtatgttgtagatcaaaattgagttcaagcttcccctatttctctgtgcagcatttcaaccccgttctggagctgatagtgaagtt

SEQ ID NO: 20490 - DNA, 681 bp, Glycine max
  Intron number 1 from transcript Glyma04g16660.1 (locus Gly ma04g16660) derived from phytozome v7.0 (chr-ID Gm04; pos 17748078 to 17748758)
aggcgtactcctctcacctcaagcgatccggcaaggtcattctccaaatacctttttcttctttcttcaacaaaagaatcgtgtcatgcttgatcatgaataaaaggcgaaacccatttgctattgttggttttttatgatgtgtggactgctttagattcgttttcggttttattctcaagtgggttcttgggatattgctgatttcaactgtttttgtttctaaagtttttgtcgtgcccatgtgtttgtgtcgatggttttgaattgggtggtgttgaagtttgaaacttgatttactttggtgtgattgttttacctaaactgtaggtgtcacgatgagttttttgtgttaggcattttaaatggataaatgaattggttttgttatagggaatgtatgatggtttgtgtagtgattccgaatttattggtcattggggctttgtttccatctttgactactgtattggcctagttctagaatgatctttcatctgattgctaatttgttttgttgaaaacaagttctttggtctttggctaggttaattgtgaccagtcctctgaataatgtggtactgttgtcagttttgattggttaccttaaagctatgggcgaaatgtaaactcctgttattgatttgttgagttcatttctttttgtttgtttctgaacag

SEQ ID NO: 20491 - DNA, 865 bp, Glycine max
  Intron number 1 from transcript Glyma03g24260.1 (locus Gly ma03g24260) derived from phytozome v7.0 (chr-ID Gm03; pos 30983807 to 30984671 reverse strand)
ctgacctcaacctctcttacaacttggtaacttttttttaggcaaaattgcatttttatcccccagttgtttccaattttcattttagtcttcttttgactgtcatgttcaacgtccaatcaaaatctgacacgtgaaagtgaaagtcaacgtagtcaacgtttaaatttaggcttggaaaccatatttagacaggaataaaattcgtgaataaatttaaaaggggacaaaaatcgaaattagagacaactagatgataaaaaaatacaattttgcctttttatattcatatgatgcttttttttatagatataaggttgtcccaatgagattggaaaatggtgaagagagaagggagggagagagttgcggattggaatcccccaattgacatttccaacaaaactaacatttgatgataaaaaagaaaaagttcatagatattttgtttaccaatgttagttgttagttttgttagttgaaggattcgaacttacgacttttttctttccctcctctcatcaatcattgaaccaaccttgtaatcccctagggagttataaggttgattggatggttaagggggaagggaagaggggaaatgtcatgagtttgattctctcttgctgacaaaactaacattctaatgaattaacattacatttgccaataaaaaaaacttataacccactaatattatatgatgtgatgcacaacctaatgtaagaagaactattatgttttgagtttgagtgttagtttttttatttttggttttcctgatttatatttgtttgtttgcttaaccattttatgctgttgtgtatccaatttcaggatctgggtcacgtcaggataaggcagc

SEQ ID NO: 20492 - DNA, 778 bp, Glycine max
  Intron number 1 from transcript Glyma03g34880.2 (locus Gly ma03g34880) derived from phytozome v7.0 (chr-ID Gm03; pos 42179338 to 42180115)
atgtgagttaacaactctctcaccttcgcagttcgctctctcattcttttaatgtgtttttgtttgattgaagtaatgaaaactgtaaacgtcgtcgttttagtctggagctttttctgaggccttgtttaatcactggttctgcgaaattgattccactttgtcttcgccgcagtttggtactgaattagaatttggaaaaagttaggtcctgattggatgatcttaaaagaaaataaaagggtataatgaattcaacttcccttgtaagcttttgttggagaagttagatgaaataaaaagtttagtagtacataaattgattttagcttgtgaaacaaaaatcaatttatttttttatcttcttattttcttttcctgtaagtacttataattattggaaatttatccaactggccttagatgttaattcaggactaaccttttattgtggttcttcgcagatgtgaagttggtacttttagagtctgtttgggaaaaagttgttccttatttataggaataataattacgaaaaactgtcaattttgtttttactttgcttcttgatttaaaagatttatagacagaaaaaaaagtaaggtgacaatttgtaagtgtgaaactgaaaatgagagcaggacattttttttatccttgaatccttttttatctattattattattattattactattattattattattattgttattagtgtgatagtgatctttgttattctgtgttcattctttgaaattcaggaggagatta

SEQ ID NO: 20493 - DNA, 740 bp, Glycine max
  Intron number 1 from transcript Glyma02g10160.1 (locus Gly ma02g10160) derived from phytozome v7.0 (chr-ID Gm02; pos 8040504 to 8041243)
tttcggttcttgaaggagaagattaaaactgcaaggctagtgctcacggatgttacaccagtacaattgtaactcttcatttttctctctttctgaccaatgatctcaactcaaccatgctttaagttattgattatttgaagataaaaagaaatccttctcctaagatggccaggatagctgaaaaactatgaagctcttagtcatgcatggaactaaatcatgcatgttttaagttagtggttattaaaaaaaaagttaaaataaaatccttctcattagatgactagagaagtttataattctttgacaagggaggaatgatattatttatttcttagaatttgggagtggatatttgcagccggtgatccaataaccaatattacccgataggctcaacgactactagaagataggataggttctatctatgacaccatcttagaaattaggtttagtctatcattagccaatgtgagatgcaacaaagtacgaaaggaatgatataactcgttttattgaagtcttaagaaacctttctttggtacaatatataatttattaatgtcaagatcaaaggaattggttaaaacatgtgaaactacttgtagaagggccatactttttaatttttttgtgtaatcattttttcgttttaatcaatcatttgatttttgacatgtttgaggattttttttttttttgtgtgtgtgtctgtgtgactggtgctattaaga

SEQ ID NO: 20494 - DNA, 414 bp, Glycine max
  Intron number 3 from transcript Glyma01g26350.1 (locus Gly ma01g26350) derived from phytozome v7.0 (chr-ID Gm01; pos 34829624 to 34830037)
gaggtgaggtgattttagcagctagggacctttttggtttgttttgattatcaagatgatagtcatttatgttgattttgtgttgcattttattttattaataaaaaatatgtttttgtcctggttactggttgctctatttttgtttgagaattgaaacaaatgggtggagcacttgttgttagcacctgctgtcaactcctagggattacaaatacttgacttgacttactaatttcatagttaaacacaccactgtagaaaatattggaagttggaacttcaggttttgtgattaggctttaagtaaagatagtatacttaatgccaaattattgtcttctgtaattgacatagttgtgggttggataaccttttatgtcactgcaacaggcaagggcatcccaataagac

SEQ ID NO: 20495 - DNA, 887 bp, Glycine max
  Intron number 4 from transcript Glyma01g26350.1 (locus Gly ma01g26350) derived from phytozome v7.0 (chr-ID Gm01; pos 34830097 to 34830983)
ttgaagggcgaagtggcagtaacttactaatcattgaatattattgtctttctgttttaccctttagctggagactaaaagcttgagttatctttgtctcatgcttaatccataattccatattatattggagcttctcattggtcttgatttattatgcttttgaacttaaaaccttaatttaatgtatactaacaataagtgcatgtttggatactgtgaagaatcgattttggggctcaaaattgtggtgccgccatgaaatttctgaagctattatgtgttgctgtggcactactgtggggtgggacacgattatttttcactttgttgccaccccaaacatgtgcttaatctgttgttatgagcataaccgtcatttatgacgtctactattatagtgaatgaggaggaaaattgactgttgtttgatacttttattttaatgtaatacattgttgattttcttcagcattaggttcttgtttccttgttttacttttggctgctccaatctttggtttttcttatggatctgaggtatcatctttgaaatgtattattgttttctaaaacaattaatggttagagtaatcaacattcctaggggaataatgaaagtcaaattctaatgtatgatgggatcttcaaatggtttctttatgggtattactttggtggatccttagttggatacaaggacaattctgagctggcttcattttcatttcccccctcaattcttctctttatattcagtggttttcttattctttgtttgtgattttttctgtaatatatttttattttgaattgaaaaagaattatgtcgttatactggatttttttttttatttactagattcttttatttattgcagttcaag

SEQ ID NO: 20496 - DNA, 739 bp, Glycine max
  Intron number 2 from transcript Glyma03g42530.1 (locus Gly ma03g42530) derived from phytozome v7.0 (chr-ID Gm03; pos 47748714 to 47749452 reverse strand)
tccattccatattgctgcaaagcagggtcatcttggtaagatacaacattgcattatgtttgggcctaaggtccctataattgtttcttttctttgtttttgattttgtgaacaattttactatgtaaatgaatggagcttaataccctaaaaagattgtgcttggtgtgatatcttacttattgcttcttagttaattaagatgtaaaccaaaacccaaaatccatgctgtcctttcagtctatttccataaatttgtatgcttaagcagcaagttggatttgtcaacttttgacttgtttaagaaagctgttggacatttgtgtttcctagttaaagaaacaatcaatgtccaggaatgattctattcttcccttcatcgtcaccccagcctgtgcaattgtttctctttatgcatattgaaaatgaaggaaaaaaatgaagttagagaaggcagaaaggtagtagtatcattgtggcttctcagtaaattgacatgaagatcgggttaagattataacttattatttgctaccttatatttggcttcaatggttttactgtgtttcctttcagatagttttgtttaaatttcagccaaactaccatgggtgagaagcctgggtatggagaaccaaagatatttttcacaaatagtatgcctgctattccattcgcttactaagaaaaaaataatcttgcagaggtgctgagagaactactgcactcctttcccaac

SEQ ID NO: 20497 - DNA, 335 bp, Glycine max
  Intron number 1 from transcript Glyma03g42530.1 (locus Gly ma03g42530) derived from phytozome v7.0 (chr-ID Gm03; pos 47749866 to 47750200 reverse strand)
tttatccatccaccttcatcgaccttagcatctaggtattatgaattaatttctaataatcatgatattgtatgattgtgtttgcccttctagtctacggggcatctctgattaccaagttgacaatggagaatatgattagataaaatcgtttttgccgtctgcttttcttcttggcatctttggattcttgatgactatatttatccaatttagcgtgtttgttatatacaaaccagattatacgttttggtaagtttgattagcggtgaaaattgatggtcttgtcattttttttcttttgtctcacagagagatagtaaatttccactcgt

SEQ ID NO: 20498 - DNA, 972 bp, Glycine max
  Intron number 2 from transcript Glyma04g04720.1 (locus Gly ma04g04720) derived from phytozome v7.0 (chr-ID Gm04; pos 3498763 to 3499734)
ttctgcctcagcttgaaacatgtaattgctattcgtctaatctttatcttcataaacgtcaatgcttgattgcagcattacacatactattacaattgattggatattcttctctgaaaaacatagcaatgttattttatacccgtagttttctaacttatttttttagtccctataggtggagtttttagttcctaaagtttatattttaattttcaaaagtttcctaccattaaaatcattaaaattcttgacggagttaaaaaaatttaaggtaaggaccttttcggaattaaaatctaaactagagactaaaaaattcacttattaaacttttaggactaaaaaatcctctaactacagggactaaaaatgattagtctagaatatatagcactaaatggttaattaaacatttgttttatttatttgtttacttgtatatacattaaattaaattgtgtatacaagtgggggaccctcatgatctagctttttagactgttagacttaaactaaaattatgagatgatattagagcctattccaacagatgttgttgggtctatcagttggccacctattattgggctgatattgaaccacccacaaatgtcctgcaatcacctgtaaatgtccagttctacaaacttcacattctaggcgtctaatgttaggtgtgagatggtgtgttggagatcctatgtttactagtaatataaccaaaatagtgtatataagtgaggagtaaccctcatcctatgagttagcttttataattatgtgaccttaactcaaactctaaaagagtctgagtctactagcatcacaatcatgcaattcatatagcttatcttacctagtggaaaaaaacttctttgttattatttttgtatttgtatctaaatctggattatgtctttgatatgggtcattggcgtgaattttgttcaggaatattcttcgacacct

SEQ ID NO: 20499 - DNA, 507 bp, Glycine max
  Intron number 1 from transcript Glyma04g32390.1 (locus Gly ma04g32390) derived from phytozome v7.0 (chr-ID Gm04; pos 37065414 to 37065920)
agtcgaagcacaagtgtactgtaaccgtagacgatgtgaaccaacctctctcttcactgattaccacgtggaactttcaaacgcttcctcataattcacgaactacacccatgaatgaaagaaacatcattgaacaacaacattaacatcaacaaacaaaactcatcttcctctttcatctctctctctctctcaaccccttttaagttttcttctcagaccctctctctcagattcttcaattttgtttactttttttttttccattcacttctttctttaaaaccaccttcataacaaaaattgtgagccaccttcccccattttttttcttctcttaatttcaacacaaaatttgagcttagtagctctttgtacttttaaatttgtgtttttgtcttctaagtggaccaccaaaattgtacttgttcctaacttgttcgtgcaattgtattttttattttattttcagagagaaaccttccaggagttgttctgttgaaggat

SEQ ID NO: 20500 - DNA, 730 bp, Glycine max
  Intron number 3 from transcript Glyma04g39350.3 (locus Gly ma04g39350) derived from phytozome v7.0 (chr-ID Gm04; pos 45567016 to 45567745 reverse strand)
acattattcacagagacttgaaaccagaggtaggaatattatatatgttttccggacatagaattgagttcagtaaacttttgaaaatggaaagcttcactagtttatgtcaccgctttaatgcaaattgcctcatacagtggcatttattgaagactgaagagcattgtttcaaagtaattaatttcatctctgggtaaatactaaatactgagtcctattagttcctgtctagtctctcactagaataaaagaagacaaggaaactcaagttaagttaaaaatttagctcgtgtgcttttgcttagagttttgaatttgtaagttaaggtaactttagatttaaattttgtatttttctgttgagcaggccctttatttttgttattctgcaagtagcagcaatgcaaacttaggagtagttcagaactaaagactaccttgcctcttaaatctttgaaaaatgctaattgctaggaatgcgtttctatgaaacaacttacagatagttagaagtaaaataagttgttgtgtttgttagttacccatttactttttagattctactatttttcctatacgaccatggttggttgtgaggcatttgtaacaaatttcatacaagagattttgctaaaaagcactgttgtaaatattctactttaaactggcgtcaaaactcaaaatgatttcaggtaagtccattaagggcaaacaagaaaaagggaaa

SEQ ID NO: 20501 - DNA, 168 bp, Glycine max
  Intron number 1 from transcript Glyma01g36500.2 (locus Gly ma01g36500) derived from phytozome v7.0 (chr-ID Gm01; pos 48997369 to 48997536)
gccccaccgatacccctccgaggtcttcttttttcttctcaaccctccttcgttcaaaatcgttttttttatttattattattctctccatttttgctcattttgtttttctcgtatatatatggataatcaggtgaaaaagaaagctccagctagaagctcagaaga

SEQ ID NO: 20502 - DNA, 981 bp, Glycine max
  Intron number 1 from transcript Glyma02g08860.1 (locus Gly ma02g08860) derived from phytozome v7.0 (chr-ID Gm02; pos 6858501 to 6859481 reverse strand)
ccaatttcgttggcgcctctgttgcggctgaaaaggtaccctcttaataaagagtagcaagtatcctatgcttgcattcagtgtaaaagtcgtattacactgctttagaccttcatgcataagctatttttttctatatgaaatgagattatttgcttttataataagagttgatggctatgtactgtcagtgtaatacactgtcaacgaatcaaaatcgctattggtataacctgcaaggtagttgttgtaaaagtcaacaaacttgtcatacaggttgaattttggtttttgattggatctctataaaattgctttacactcagtgcataacctaaagtcagtttgaaaatttttgtatgcattgtgaatttaaaaaagtttacaactttcaaccaatcagacatgattgttggtataaatttgaagatagttattctaaaaatcaataaacttactagacatgcccatttgtgattagatgataatataaaaactctttacccggacactacacagactttatactctttataataactaatttaaaagtcatatgtaccacagaaattaaactctttattataattatttactttcgtattagtagggaaatgacaatgcagcaacaagtttaacttaattgatggagtttacatgaatataatgagaggatcctaatcccttaacatttagagtctgattagttgaatgcttagtttaaaaaaattgtctttttaagaggcatcttttgaaacaaaatgtaactgatgttcagaaaataaacatgcttataggatcaagtatatggaaattgaatgaaatgagattgtttaaaatagggtaacaggaaatgaatgagatagaatttgatttgatttagcagtgctaaggaagcgcatgaagtaaaaaaaaagtaagaatatattcactctggatttgaaacaggttagttgaattgtttgatgtgggttttggcag

SEQ ID NO: 20503 - DNA, 588 bp, Glycine max
  Intron number 1 from transcript Glyma04g40090.1 (locus Gly ma04g40090) derived from phytozome v7.0 (chr-ID Gm04; pos 46218327 to 46218914)
ctttggctctctccaagtacttttcattggatcctgtaagtgcatgctatggtttccaatttgccactcatattttcattgagcacttcaaaaccaatgcagaaaagtttcatggggttggggtcgcattgcatttacctgttagtaaaattttgagttattattgacttgattttacagaaaaccaaaacggtgttttctcttttcgaaatatccaaccaaaatcgagacaaggctctgtttgtataattttttctataatcacttaaaagaaaagaaaacaagaaggtgaaatgaagtgagtttttttggagaagttagatgagagagtttctttctataaaagttaagtgcatatatttagcttacaagagaagctcaattcattttaccttcttatttttttgtctcctataagtgcttatggagtagttgatttaaacaggaccctagatagatagtaaaaatattagttgagtcctgtgtatgagttctccacttctgtatgataaatatgatgatgcaaattctgatgctctagctttgcttgcagagtgttgttccagccgatagttcagacagtgatat

SEQ ID NO: 20504 - DNA, 885 bp, Glycine max
  Intron number 2 from transcript Glyma04g40090.1 (locus Gly ma04g40090) derived from phytozome v7.0 (chr-ID Gm04; pos 46218974 to 46219858)
aggtaaccaggttataactcaatttgattaggccattaatatcatcagtgccacatgcttctgcttcccttgctttttcccttcttttcctttttttggattcataagaatactgcatctggttatgcccttgatccatcagaaataatatgatatgctaactgtggttgttggacgctaagtgtatgtttggattagttgtgattttttttttttatttcatttcaataattgcttatatggaataagtttaatgtttcatttggattgtttggaagaatcttttttatgtagtaaaattacaaaaatgattttgaagttttttgaagtagttggttttgtatttaaattaatcaattgttggggataaaatggaaaaataaaggttagctaaaatataaactgttagcttttcatctaagctcccaaaatttgtttatcatcaaaaaactatttcctttgttgagattataatgtttgattgtagtccaaattactaaacatattttgaataatatcatcaacactttttttcttctatcaatcaggttatgtgtccatttggcaaaccttcataataaattcctcccattgtgacacacgtttgagtgtcaaatctgtggctgagattaatcaaatcctcattacattcaatgctaaaaaataattccatgaaaatcaatttcacctaattttaacaggccctgtagtctttaaaagcaatctaatccaaacatgttatatatttgaatgttcctttaacaaaattgatatgctccccagaacttgcatgttttgtgcttttcctgttaattatcctgagttgtatattattcaaattcaaatttaggtgttgaagtgggtagcatttgcagaagccttccc

SEQ ID NO: 20505 - DNA, 591 bp, Glycine max
  Intron number 4 from transcript Glyma03g26450.1 (locus Gly ma03g26450) derived from phytozome v7.0 (chr-ID Gm03; pos 33877378 to 33877968)
ttgttggcgtttgatcaatggtgtaatctggtgcccactgttttactgttgcgaggtttggatttttcattaaaaaaaaaaaagtgataggtagattctttgaactttgaaccaatttaacaaaagaaattatagatagaatgagaaagatatgttaataaaatattaatgtgttgcagagagaagtttatatatttcctcttttatctagtgacttgcatacgctcctgtaggtgaaattgaggggttgttggttgtcatgaattttattttagagtcttcatctataaaaacccatgagaggaaatgaaatatttcactaattatcttctattatatatatatatatataatactttcactaattatctttcttgagctaatttgttaatcagacgttgacaaattaaaggggcttaattttcacacctttttcgtttattatggtaaagaaaattaatagaagagaggaccacattaaattgagattgttcatctagagaaatctagagaaactattagaacaattttaatggtagattgtaaattaagatcttagattattttttcgtgaatttcagattatcaagt

SEQ ID NO: 20506 - DNA, 868 bp, Glycine max
  Intron number 1 from transcript Glyma04g42160.2 (locus Gly ma04g42160) derived from phytozome v7.0 (chr-ID Gm04; pos 47934896 to 47935763 reverse strand)
atttactttggacttgctcgtttatcactctcgtatattgttttcctctcttgaggatgtgtgttggccttgaggctccttttctgtttctctccaattggggattttgttatggtggaagttttcttggttctttttgcttgtttgtgtgatttgattttgccgtgctgtaatttgtgatactggtagagtagtagtgtgttttttttcttgcttttatcaagatttctttgttcccttttgcttggcatgttttcagttgtttaagaatgagctgggattttctgttgagaatgtgatgtaatatatatggggttaaaaaatggtgttttacttcctaagtttttattttattttatagacgacaggtgttctccacttctaagtcgatttaagaggtgtcttataggtttaagctctctaatctatctctttctgccccatatgaattaaaatatgcaaaagttgtgtgtcttcttgttgattttttaacatgaaaatcttgagtgtttttttttttttttaaaaataaaattctaatgctccttgcaaaacatggctaaccgtttttacttttaagtttaagtcaatttggtattatgactttttgttgggtaagtaaaatctatttcttaaaattccttcatttgtctccaatttttggccactggtcagaatatcttgataaaagtagtggttttacagaatatacttattttgattaagtggcatgaagtgtttgtaaattgtaattattctttgttggtaaaggtactgatatttgaagtgcttgtagttattgtggacttaatggaatgtagtaataacaggtttttgtaatttatctctcttcaggtgtagcaagagc

SEQ ID NO: 20507 - DNA, 554 bp, Glycine max
  Intron number 2 from transcript Glyma02g10830.2 (locus Gly ma02g10830) derived from phytozome v7.0 (chr-ID Gm02; pos 8750818 to 8751371 reverse strand)
ctgcggatttaagctcaagtaacccactctcactattatatatggttgcaccgtataaacaaagtgaatggtttagtgttttattttaatatgataataaatttttggcttaaataacttttgggtctttgatatatactctgattttcattttgagttcttcataaattatgataaattatgtcgttatcttcagttaagagatgacatgataccatttcaatcgctaatagatattggaagaacttttaatatacgattgacccataacaatgaaaaaatttatgaaggacacaaattgggtatatatcatgatgtcaaatatatttaagtctaatttatttttataactttatgagagagcttttgaaataacaagcgattattatttttctttctaaatacatgttaagtataaatttaagtgaagtaatcacatcatgagattacatggttaccaatatttttgaagtttttacatgacatgcatcgtttgtgtgtgtgtgtttgttatggtgtgaatgatttcaattttgtactcttttgcaggttct

SEQ ID NO: 20508 - DNA, 698 bp, Glycine max
  Intron number 2 from transcript Glyma04g02740.1 (locus Gly ma04g02740) derived from phytozome v7.0 (chr-ID Gm04; pos 1935270 to 1935967)
ttctctatattcaggttactgtgttttgcaactttcgtttctttgcaagttagctactgtgaatgcataagtttattatcttttgtcttcttataaggacacggacactctgatttgttggaatgttctgtatagttaaactataagattttgactttaatccatcgatcgtgctagagattttacacaatcagcgaattatatgatgccacctgtttgaaaaacaattaaatgctttagcaagcagtgtaatatatttattagttacgacaattatgcagcatattgttgtttccttacagtgaaaatctgttacattgacagttaatcaaatttaagatcagatctatgttgttgttcttcctatttgtaaggttattggtatgattttggtgttaatcccatgccaggccatgaagttagataagggattttgttcagggcaggctattgatttgagattttctagacttcatttttttattctttgttgtatgtgtatatgatgattgaataagtctgattactctttttcctttttatgttcagccacttcagcctttttcttttggtgtattaggactatcgagccttcaagtttaacaacctttttttagttaaaccttttctaacttgttccatgtattcaaatcattgtggcaggtgggtgatcctgttgcagatcacaagtgttggga

SEQ ID NO: 20509 - DNA, 759 bp, Glycine max
  Intron number 1 from transcript Glyma02g36230.1 (locus Gly ma02g36230) derived from phytozome v7.0 (chr-ID Gm02; pos 41621855 to 41622613)
ccgaccttcagagattcgattccttgctctttcaggtagttaaccaaacaacacatgtgattccattctttttcaataatgtaaaatataattgaatgttaattaaggtttaaatatgtttttattgcatgtaaaatatgatcaattatttgtcttaatccttcaatttttctttatttgttttagttttgataaatttattatttttttaaaatgattcctgtatctaaatatgcttattataaaataagaatatttatcacgtcattaatagatagtattgtagactattttcagttttaaattttaagtgtgaaaattaataatcttttttttcaaaactaaaatgaaaatttgtaacaaggatttataaagatattaaaccttttaattaattcaaatgtaatccataagaggattggctggtgtaatgctctgctgtgttcacatgtcgggggcaatctatatagcggaagaattatgtttgattcttctattaggccaatactaaccacgcacggtgagcggattagtctccaatttagtgggtctataggagacattcgtggcctctcacccaggaaaaaattgaatattaatgtagcaccgtattagttgctggatgaattattattgaattttttttggtatttaatttgttataattactgtttggtttatatgtttttttcccttcccttggcttgtgattgtgttatgacagtgggcaaacagcctttgccagggagccaatctgcc

SEQ ID NO: 20510 - DNA, 831 bp, Glycine max
  Intron number 1 from transcript Glyma03g21690.1 (locus Gly ma03g21690) derived from phytozome v7.0 (chr-ID Gm03; pos 27497288 to 27498118)
ggacactcctgaagttggtgacgaagttcaaggtacttaataatatatgttgcattttcttatctgtccctcttaccggaattgttctttggaattaaatgtaaatgaaaaaaaatgaaaatttcaaaatagagcagaacaaaacaaaataagaaactagagctaatgacccacctaggagagttgcatgtgtcaattgtcatacactgtaacacagtctttttttaccagtgatagtaaagacactgtttgtttactttgaattgaaatttaccattgacaatcgcagaagtgatagtgaaattcattgaatatcgaaattcccgatagatttcattcatgcaatttaaagtgattagttaaaggcttaattatgttttgtctttcagattagatggtgctctgttttctttagttctcctaatggaaatatgcatttttttagtttctcaactttgaaaaatgctctttttagtagcgactaaaacacaaaaaaaattatttaagtggagggccaaaaaaacattttttttctaatttaagtgattaaaaattgcaaaattttattttggaaaataaacggcccactaatttgagtcatatttacaagagtgctgctaattgctagcatctcaacctatgtcacatacataaaaatggaaatgtataatgtaaaagaaatgaaaatgtaactaatgaaaattgggtctgatggcactcttttgcagagcttattctaatctcccgtttggttttgtcttgctttaaatttttaatgatttatttaatctttaattttcttttcagttcactatactgggacgttgcttg

SEQ ID NO: 20511 - DNA, 916 bp, Glycine max
  Intron number 2 from transcript Glyma05g04860.1 (locus Gly ma05g04860) derived from phytozome v7.0 (chr-ID Gm05; pos 4019741 to 4020656)
aaattggcctaactgttagaatgtaattttataagggtttgtaaatatttaattctctttctttgcgctctctatcaggatggaggtaccaactatacttgtgtcatttcctttactgttatcatgtgaaagcgcaattttgatattagatgtattacttcataaacaagtaatgtgtgcttggcataaactgtttttcctttgacaaatgagtattgttatagttggatgccttacaattagctggggaaggtaatgagtgcccttctgttaggaaccaagaattgaaataagaaaagaaaggattttattgaccagtaagaaaagaacccaaaataagagagaaaactctacttcaacccttcacaaaggatcacaaagtgctaatgctcaatctacaaatgatcagatctccctctctcctatccttcttcccctatttatatctaataaacccctctaactaactaactagctcattaacaaactaactttcccttctccttatatcctaacaccttcagtagcttgtactctttctgcactgaagaagaaatagaagaaagaataaatagtgatagtttggttctttgttgtcatggtaaatactaaagaaaatagaatttgcttcttgatctttacaaaaaaaggagtaactaactgattgtattgtgttgtgtgcagtgtgtgtgtttttcatttagttaaggtagactggattaaatgtgttgtaaattattttggaaaatatataattggaaatcttgattaggtagcagggtattgaattatgccaatttttatcctctaatgagtatttgatagtgcactaatttattgtccttgtgtgttactttggattaggttgtcaatgctgctagaaagagacctgatatattggtacaagttggactgg

SEQ ID NO: 20512 - DNA, 660 bp, Glycine max
  Intron number 1 from transcript Glyma04g03610.1 (locus Gly ma04g03610) derived from phytozome v7.0 (chr-ID Gm04; pos 2631269 to 2631928 reverse strand)
gggccgtcgaagaagacggcaccacctatcgcaaggtactcttcttcttccttcgtcaatgctcatggagatctcgttttcccgatttgcatctattatccactgttcgattcaaatcttgctataattgcctaatgcctcattaattacttcgtttcttatttattcgccgtctcgtgtctgtgaaagagggagaagaagaacgtgttgttctttagcccaattaggtaacacctgtgtgtgtttggattcacacttaaattattcaggatcacgttgatatatgaattaacttgattttaagttaatttttaggtgttcagtgttgtgtttcacatactgaagaattgattctgacttcaagcaatatttgacagttgtttttcattgcataaaaaattatataccaaactttactatttttagaataaaaaagtccaaacataaaactacattaatccaaaatcgattataactaaaattaatttcatccgtactcaattttgcaaaacttagtgtaattgagcaaaattggcatgtctagactctagagtatgatatactttatgtatctactgatttggttttgtaaccaagaaatgtgctgatgatttggtttggggtatgatgattgtttgtggaatatatatatatataggg

SEQ ID NO: 20513 - DNA, 581 bp, Glycine max
  Intron number 3 from transcript Glyma04g34900.1 (locus Gly ma04g34900) derived from phytozome v7.0 (chr-ID Gm04; pos 41165238 to 41165818 reverse strand)
aggaagccagtctgcttcgtgactacggtatgaataacagtcaataccttgctatactatttaacttggcattcagtagggagatgtgttgggcttcgctgcaacaatactatagtcctgattggataaacttttccattagcatttataggagaagaaaataagaaaaataaaataaataacatcctttcacaagttaaaattactttatgcataggaaatggttaagggagaaggaaagaatgaaaagggcggggattcattctcctcttgctaataaaattaacattctaacaaactagcatttgattataaaaaaaattaatttattcataagttaatttgtagaaattttttcatattaacttattcaaaagttgatttttaacttatgcatagactaattttagtttatggaagaagtttatctcattttttcttctcttataaatgattatagagaaatttatccaaacaagatgcataaagtaaaagctttgtttaccttttgtttttgtaaatactaagcactttctccatgaatagctactctggaaccaacagagaaaaggaaaataaaa

SEQ ID NO: 20514 - DNA, 602 bp, Glycine max
  Intron number 2 from transcript Glyma02g01200.1 (locus Gly ma02g01200) derived from phytozome v7.0 (chr-ID Gm02; pos 889819 to 890420)
ccctttatttcttctgttaaggtgtgtgcttgctttccttctcaccctctattctaaagatcaattttcttaattaccgaaattgagtcttgtgagggagtggggtaaatgaagtcccttagttgtttacattgcttataacacgtacttatgtttttcttagcatcataaaatatctgggtatattttgggacctaataaatttcaagggatagaatctatccgtcaagctatttcaagcaagcgagcagaatacacctttaggcactttgaagtgaagtaatttagtaaatttagtattcaaggcacaatctttcctgcgtttgctctggcctgtcataatcagtaatgattgtctgctaagtgtaacacaaaagatatggtttttgcttgtttttctttgttaagtcaaacatttagcttgtattttgaaacctaagatcccctgccttgttgctaagggaggataacatgacattaggatcaccatctaggcattcttgctttggatccaaatgatttttttttcctcttgcattttgattttatgcaaatgttgggtttgtttcacagatattgccagacaaacctgacctgtcacg

SEQ ID NO: 20515 - DNA, 795 bp, Glycine max
  Intron number 2 from transcript Glyma01g41820.1 (locus Gly ma01g41820) derived from phytozome v7.0 (chr-ID Gm01; pos 53223007 to 53223801 reverse strand)
ccagctatttttctgccaggaacatcagcttcaaggtacgtatcatagtatattatttatagggttttactaattagtacctttagaattttattaagaaattaaaaaaatatttatcataaaagttataaaaaaaagtaaataagtcgcagataatgtattttttttttctttcaatacatacaactggcatgggtggtaacttcgaagcacgaatgggagggacgaagcaactattatggcctgtatatatctctatctattgtttcatgacacagcgaatatacattttttttaatatttttaataatgtggtttactattactagtatcttgggccatttaggtttttatattttactttttatacttgaattctaatgtaattataatcagaaaaaaaattcaaattaattacagtaactagcatgattcattaaaaagaagtcaaaaacaaattgccttggttaacccaaagttcaagatatatatacaactggggtccatacatcagagtaaagtgttttaacttttttaactttgcgtagttataatcaatatatattatacgtaaagccaacatttttatgatttaattttatactatgcgtatttctcttggttttcttaattttgtctttcttctacctacgtctctatttcctacacatttaatttaactttttggaaagtatagctttaaaatgcgtaaagcatctcaaatgagggaatgggtttatattaaattacaattaatactactgactggacatgcagaacacagcacctgcacca

SEQ ID NO: 20516 - DNA, 771 bp, Glycine max
  Intron number 1 from transcript Glyma01g36420.1 (locus Gly ma01g36420) derived from phytozome v7.0 (chr-ID Gm01; pos 48926226 to 48926996)
atctcagtttgtcctgaaacttcttcggagaaaaggtgagattgtatacaggcctttaaaatgtcttcctactcttattcctgaataatgataaaagatgagcattgccttgcctgtttattttctttgtgccttgattttgaaagtctgattttagcactttttttgtacatatttaatcctagaaactgagtaccattactagttgctcctaacgatgtagacaccctgcagttatgaaccattgtttcagctttgagccagtggaattgctactcaatgaggttaaaggataattctgttgaaatgtagtgcactggtagagaaaaaggaccagagagaaatagaataatcaaaatgagaaagttatattgacatggtatgtaatagcattatacaaaatactgacctaatggtcccatttatgctagtaattaggtactataatagtactgctagtaaaagctcacaccatcagtgcaataagaagactaaccccatttaagtaagagaacaaagcataaatcataataactatgaaacaactcttaagattgcttcctcaattagataactaattgatcccatgatatattctaaaggcattctaggatatcaaacaaacacacacacacatattctggtacaaaatttcatttaccttaaacttttctgttttgttatacccctatttttttttcaatatctacattctttcatcttttatgaattgcaggatttgagtcctacttagtaggtgggtgtgtgaga

SEQ ID NO: 20517 - DNA, 737 bp, Glycine max
  Intron number 1 from transcript Glyma01g02050.1 (locus Gly ma01g02050) derived from phytozome v7.0 (chr-ID Gm01; pos 1564869 to 1565605)
aatcccactaacatcgtcttcggtaagatccgcatctttataatgtattttatttttgtattggaatagtttgggtaaaacgttcatagatttctagctctgttatttgttactggaatttaattttttgtaaattattattcgtaatttttttattaccttcttcttgttatatgttttaaataccgagattgtgaatcgttgcttgatttgaattgaggattgtgttgttggtcttattcactggaatcactttgcctggacacgcactcgcattgttcgttgtaatctctttttgaattgaatagtgttatgctaaaattcagtgcaatgagagttatttgatctcttaattacgatggaatacagagttaggagttattaacacactcgcgttgttggttgaaatttgttttctattttaatggtataacatttttagtttgttaaaaataaatttctcgtgacaattttaaattttgttatgaaggttaggaattaggatattccactttatccttccttgtattgaatgtattcctattcgttttacctcttgtcctttttcacttgtttctcggcctttaccgatcccaaatgcgttttagtttgaaaggatggtatgatactaatgattaagcctccaccttctgtaacttttccttccttaatctctgaattgcttctttgatacttttgcagtgaggaaattccagctccaatctcttccaatccct

SEQ ID NO: 20518 - DNA, 827 bp, Glycine max
  Intron number 4 from transcript Glyma01g02050.1 (locus Gly ma01g02050) derived from phytozome v7.0 (chr-ID Gm01; pos 1567223 to 1568049)
aagctcagttgttggagaattccctggctgctgaggttctattttttgctatgtctctcgaagtaccttttattcaatgaactatatttttcttttttttttctttggtgtgtgtgtgggtgttttggtgggggtgagggggagttctaaaatataaattgggtagtttttaacttggtgctcctttattgcaacatatggatcaatatgttaatggctatagaaataggtgttcaacactttgtctatgctttcatttgataattataggaaaattatggaactctttgtttggagatagtatatgggctgaagtcctgtatatttagatgtcacaataattggctttgactgatgattataaacatgactactgctaatgattcaacctgttgcttgaataggtagatccaaagcaatgctgtctggtgctttatagttttgttacatgactgtatctaggaatctaataatagcttattgccacaagaactttgtagtctttaatcatctgccattatccttgatggaaattatttttaaatactaaattaaaatatctgtattttttgaatggtatcgatagtttgttttgctgatttctgccattctttctggtttgctaatctcaaacttttgccagttgcagatttggggacaggaaatagacaatatatatctatctaacttgtccttttctgttttctatttcttctattgacatacttgcaatttgttaatttttattgaagcttgatgagttttgaatttcacttctgcttgttgctggtttacagatgctgatcagaaatagattttactgcaga

SEQ ID NO: 20519 - DNA, 755 bp, Glycine max
  Intron number 1 from transcript Glyma01g11670.1 (locus Gly ma01g11670) derived from phytozome v7.0 (chr-ID Gm01; pos 15085020 to 15085774 reverse strand)
tcataattgctcccagccttcaagaaggaaagctagtaagcatacatttaaatttagcgcttcaatcctttttgttactccaagtgctttatgtttttatctcttatgtctaatgggcttaaggaaaatgagaagatgcccctttgattatgaacctacatgctgcacgtctaaacgtatttgtttccgccggtgacaacgcttacgaaatcttattagtttatccatttgtgggcaatttgaaccttcatgatacctccttgatcaccatattttatctgtttccatcgcttttaaagttttatttttaattattagtggaaattaaaacaaattaaagtatgagaattcagatcagtggtggtaaagtaagtaaaattccttactaaacatttggcccagtataaacttatcaataaaaaattaaaggaaaagaaaataaaagttaaagaaaatacaatttttctataaattaaaattaattcattcacttcatatattttcttttttggaaaacaaaattcttatctaatatttttaaaagatgaaatgcaaaatttgattttaacttacgtgtgcaaagttttattcattttgttttcgcatttattctattagttctaaggcgatcgaacccaaaaggtggagtaatttcaaatttagatagatacataactgtaaaaaattgatagatgtaatgcactataccagctttctgagcttcataaaacatattcatctcttatgattgacag

SEQ ID NO: 20520 - DNA, 638 bp, Glycine max
  Intron number 1 from transcript Glyma03g37960.1 (locus Gly ma03g37960) derived from phytozome v7.0 (chr-ID Gm03; pos 44422255 to 44422892)
gtgtggaggatcgtcttcttcatccctcccacaccgtaagtcttcttctctcctccaatcaaacttctcaacaatttcacttcattagattaactcgttagcttctctcgttttccgcctttcatttcaatgcccgcttcgcaatctccttcgtttgcggagttttcgacgcttttttttccctcgaattttgttgttgataatcttcaattgtgaatgttttcgaattaatagtttatcgaggagctgcaactactggttcaagcacttcttcataaattgtctgtttgtcgaggcttattaatcgaactcattcatttaccttaatccgtgatgttttcttttctgcaccagtagttgcgtcttcgtgttatcgtgtatattaatttatggatagcatttgttgaaacctctctgttccattacaatcgcatttagttgaaattgatccataatgatgcataactcattgaaattaatggtaaaatgtatccgtgtcgtgttccttaatagaatgaataactttttctattagtttattgtttttcctttccactttattttagtggatttcagtattgctacttcatttgtttgggaatgcaggagttcagttcagttagggtatctatttttta

SEQ ID NO: 20521 - DNA, 656 bp, Glycine max
  Intron number 1 from transcript Glyma03g33620.3 (locus Gly ma03g33620) derived from phytozome v7.0 (chr-ID Gm03; pos 41138734 to 41139389)
aaacgatcacttctgcagcagcgatctcgaagtttgtcagtccttccatctctcatctcacattcctgttttgacctaacttatgctccatttccattctctattatttttcctcttttcatttttcaccttgtgcaattgaatcctgagcgaaacaaaaaatacctaattagttagagtctatattggttcccttagaattggaatttaggattgattcggatgaatgtttcaatggcacgtgttaggtttccatttggttcccttagaattggaatttaggattttgtgtgtgtgtgtgtgtgtatgtgagctcagctgctgaaacatcagaatcagctatgagtagtttgtttagttgaatctagattgtaattttctcttaactaaatctttatgatatgagtatatgaccggtgaaatcatgtgttattaccttgtatcgggttgtttttaaattttaaatcaggaagaaacaaaaaaacaaaacaagtgctataattataaagaaaaattgcttgtggattataagcctcccgttccccttttgatgtgttttcgatttggatccatagaaagtttattcacttttcttatacttgaactgatgtcatgggataggtcttcttgggagtgtggctccttgtgtgctgtat

SEQ ID NO: 20522 - DNA, 1007 bp, Glycine max
  Intron number 1 from transcript Glyma01g27840.1 (locus Gly ma01g27840) derived from phytozome v7.0 (chr-ID Gm01; pos 37303471 to 37304477 reverse strand)
agaattgctctcttcgttgagccttctccttttgcgtgagttggtttattagtctttaattcttcaatgtgcactgttgtggtttccaattctcattgaatgtagaatgttttggaatattgaaacccctcttgcctatttagtggttttaatctttttttattttgttctatgttgaaacattggagttgggctggaacagcattgaattttagtttctgcagcagttgacttgttttattgttctgattcagcgttgactctggtttttggtgaattgactgttgaggttttgtagatcatatggatttgatcatttgaatttggttttcatgtttttttaatgaaaaaataataataattaagaaagcttttattttataatttaattaagctagctttgtcttcaactgtttaggaataacatttctattaccttaataataattctgtagtctcagcatcagaaagtgcatctctgcgattttctgctgcttttaactgactcaggcttgtgaattaaaaatgttatgtggacaccctgttctagtagatacctggagagaaaaagagataaaagattgagaacaataaatgtgacatgtgatatgatgtaatgaaaagaaatgagggtgtcaacgaggtgttacactatgcaggtgtccaaaaatcacaactcttttgacttcgatgtaaaattgagtgacaattattttaaaaaaattaagggcgagctgcgggatgcatgtcaagaaccccaattagacattagttttaaaattgtgagtgactagagattaattttaggaaaagttggagggaaattagcctcacatgttttctactttctgtctgaattacaatcccaatgagattattgcattacacttggtactattgatttgcgatcctttataagatgtgtggtgtggtgtctgctgtggaagaaaaaacatgttcttcaattcgaacagaatgttgattccacctttatctattttgcagat

SEQ ID NO: 20523 - DNA, 701 bp, Glycine max
  Intron number 4 from transcript Glyma02g44930.1 (locus Gly ma02g44930) derived from phytozome v7.0 (chr-ID Gm02; pos 49375622 to 49376322 reverse strand)
aggagtgctagcaaatagcaatgttgtctaacacactattgttaggctaaaatttatgaaaaactaaaaaatcacgagagggacttattaaataagaggtggggttcacaaaatttttaaattttccaatcaatttcaaccaatactagagagtttgttcaaaagagtgtggtggcatttctcgctatgatcttctataccaataatatcctttgaattggaccactattttttttaatacagtggttagagaaatttggggctggacagagtgttgacatatttgataattttgatgttgattatggacaacacttcctaaaattggatgaatttgtttgtgattccttcagtgggttagctgacaagaataatcaggcacggacatatacatgttacttaaattgtttgccagaatctatttcttttcgattttacatcaccaaatttttcttgtcatacctatttaatttttggtttaccttgctgctatgaagtacgaacacagttgaagatgaatgcactttttcttataacttatcctcactcttttatgcatgtgtatctgaatgcacgcgttattctgtgaatctgggtatcctctggcccactttattgtagtagttaactgttaattagagtaacatcatctaaattcaatacttgccaatttcaggagaggaagtgggggacaaggtttt

SEQ ID NO: 20524 - DNA, 918 bp, Glycine max
  Intron number 1 from transcript Glyma02g40890.1 (locus Gly ma02g40890) derived from phytozome v7.0 (chr-ID Gm02; pos 46097255 to 46098172)
ccaacaaggtgggaccctttcacaatcccaggtcagattttaaatctatgtcactctcactttcaacaattcatgtttatgcttcagatttcagaacatttcaatcccaacgttcctgaaaagatattttaaaaagaaaaaaatgtattttttttgtgttatgatgggttaccattttgaggatgagatttcctcttgaatttgggtgccttgcatctttcattccctactgctgttctgattatgtgtaatgaagggtcaatggcctcttcatcttatggcgtggatttggattttggaacctgttcaagacttttttgatcagagaaatctagttgtttgagtgatgaaagggattaattcttcactgtggatgaggaagaaatgaatgtggcttagaaactgtgatatttgttatgaatactttctatttcacagtaggaaactcaaaatcaagagatattagtttcctttgtttcaatgtcgaaatacagaaattgtaggcagtgttcaatggaaataaagaatgaatccaaacgatcaggctggcagagttgacctttaaattattttaatataatacttaccttctcaatcaagtaatgttctaatgcatcccttctgaatttttacctctaccataccatttccttttattcaagtttgattattctatggcctagaaagaaagtgcaatatttttttactgaaagactactaaatccattaatcttaatgcctgtatataagaatgtacattcggatagtctaatgcatgcattaattactaaagcgtagtatcatatgcataaattccatcctcacaaaagaataatgactttattaattctttgtgctttcccctttttcttccttgccacagtgagacataccgatatttcgatcttcccttttgct

SEQ ID NO: 20525 - DNA, 234 bp, Glycine max
  Intron number 2 from transcript Glyma02g01630.1 (locus Gly ma02g01630) derived from phytozome v7.0 (chr-ID Gm02; pos 1172121 to 1172354 reverse strand)
tctccaggtactaagctttggttaaagtttcttcattttgttttcttgataagtttctatcgattatgatttcttgatgctattaatcctcatttcttaaaaataagaaaggagttgtctgtgtctctgcgatccctttttcttttcgtttttgggcctttgaatttatttatttttaatttgatgagctcaaagcgttctcttttattttttgttccttgtttttgcagcaat

SEQ ID NO: 20526 - DNA, 658 bp, Glycine max
  Intron number 2 from transcript Glyma03g33990.1 (locus Gly ma03g33990) derived from phytozome v7.0 (chr-ID Gm03; pos 41488410 to 41489067 reverse strand)
ttcaactttttcgtggtgacaccatcttgatcaaggtatttctggttttgtgctgcaatatggtgttttacactgtgtttggtggttgtgagagaattaggttttgtagattgtgattattgatttaaggatggaagtatttgtttatttggggataaaaatacgttttttgtattttgaattctttattgcgtattagtgtttgttagctaacatagtgttccctttacttctaaggatgatggttattagggtttgggcacaagagaaagtaactgcttttcatgcttgtttgcttggtatgagaggctgtgtttgtttgtttgttttgtatctagagaggggtgggactgagagagaacagtgctgattattgtggcttgaaacagattgttaacattctgtgctgaatgccttcacttatagttgtaactaatttgtatgtaaatacctctggtaatttctttttgcttaatttgacttgaaaaggggacgttctatatcgttagttttgtcccattgcgtgtttcgtaatgaacatactctacacataattgagctgtttcattttttccttcaggataacttgttccctatataatcattatgtttcttttctatgtttgatcctttaggggaaaaaaagaaaggatacaat

SEQ ID NO: 20527 - DNA, 741 bp, Glycine max
  Intron number 1 from transcript Glyma04g36580.2 (locus Gly ma04g36580) derived from phytozome v7.0 (chr-ID Gm04; pos 43101307 to 43102047)
catctcgggaggaaaaagttagcagtgtgaagactgtgagtttactttaaagccattaaatattttttcttttattgaaatcatcccatgtctaggcatgcagatgtagatgtttttttaatctcatgtttttcttgattcattaaatatttataggtttctagccatccaatttgagatgtgattgatacggtatacttgttgaagatggaaacatttttcttgttcctatgttatcattaatgaaaaaacttctttatatgtttctttcaagttgtgaaaatgctgtagctgttatgaattggaactgagtttaaaatgctgtatttcttgggacaaggtgacctggtgatacaccagtattctaacattattttcccatacttcctttctatttgcagaatagcttcaggatttaaatatctactcaattcagataatgaggtttattttatatggatttttttttactgtcaatggaagctgttcactcaacagttaacttaccatgattgattttagattgctttcttctgatcactgtctttccatcctcacttgtttttatagcaaagtggaatgttgaaaagccaaaactgtaatcttgacactagtaatttgttatggtcatgatcattgttggtgttgctgttactattattggctttattgctattgttgtagtttttgttttattaccaacaaaataagtccatgttaatatgttatagggcttggttc

SEQ ID NO: 20528 - DNA, 989 bp, Glycine max
  Intron number 1 from transcript Glyma04g09970.1 (locus Gly ma04g09970) derived from phytozome v7.0 (chr-ID Gm04; pos 8256664 to 8257652 reverse strand)
cgcctccgataaacaccacaatttcctcgctcgcggtaagacgatttccctaatttcccaattcgagaaacaaacgtgatcttcatttggaattgttcatatatagtactcgttttgccttttagatggtaatttaatttgtaggtgtcgccattgcgttatatttaatgtttgatgattaatagtttcgattttaaagtatagcgaatgcttcttagagagacaacttgaaggaactgaaggagaggaatggaacctagagaattcttcctgattgttattgttttcgttttctgaggacttaaagagtttgtaagtaatttaaaaaatgtaatgtcatgatggctggttatctttattgagataagttgggctgtccttaacacaagacgttgtcgagcataggcagtggtctcgttttgattctggatgggccctagtgcacgccatggttgttgaattcgtggaagggtagtaaacttcaatatgcttaaatagatagataacgaagaatggcatgcgtatatataattatcatgaaatgaaaaaggattaaagacaagcaaatactaatcagggcactggttaaggtattataagtgcatagtttttatgaaaagtgttattaatatactcttgccacaatttccaatgcatctccagtgtgattttcaatatgttttttttatagttttttaatcattacccttggagcatggatagcaagactcttaaaagataataaaatagtagtaataaattatggattatgaacggcaagattgagagtcctactctttattgttgaaaatatgccattcagtctttattttagtaattttgctttcttgaaatagtttccctctcatgttccccacttctttctatttttccttttattttatataagcatttcaattaaattgattgtacatatattgtgatgtattgcagattccgaggtcaataaggttggcatcaagagtgtt

SEQ ID NO: 20529 - DNA, 879 bp, Glycine max
  Intron number 2 from transcript Glyma02g04730.1 (locus Gly ma02g04730) derived from phytozome v7.0 (chr-ID Gm02; pos 3871004 to 3871882 reverse strand)
gtcactcgctctcaaagcacagtatttcacggctcacgcaaaaccaccatccgcgatacttttgcactaacaatatgggcttgagaataggttagtacttggtcagatggccccaacctttaacatttcttgcacaagctccttaatcgtgtttttctgtgtgaacaaatatcgttatggcctaacattatatcaaatgatcctgactcttaggcagtagtaactaagagggttccttaaatatgtcccaaaattgaatgtcttggatattagaactcagctcgtcccaattattaattgtcgacaatagtaagctggccaactcaatcaatatgccccacctttcctgtttaaccatccattggaaaaaaatcctatctagaaaaatagggaaactaaatagctgaaccaaatcctatctaattatattacataagtatctaaattgtcgctacctctgcttctgcatgctttgtatctgcgtgctttggcctggaccttgtcaaatatgtcattgatgtgtagtggacaagggatctatcatagtcctgagatgtcattgatgtgaaacaaacaaaaatagtgaaatagagactcatggtggcatcaattagaaacatttacatagaatgttaatatagtgatttaatggttataagaaccttcagtttgcaatgtaagacaatgagctgggtgactgcaagcaaagctttcaggcctggttccctgccccccctacaattcttcttttgctcatgataaacatatctctttgtattcgatggcaaagtaattattgattgaaaagggaagggaaagatcatcattgttgttgcaattgcagatcatttgctcttttttctttggcttgaaagaggc

SEQ ID NO: 20530 - DNA, 641 bp, Glycine max
  Intron number 1 from transcript Glyma02g47360.1 (locus Gly ma02g47360) derived from phytozome v7.0 (chr-ID Gm02; pos 50965354 to 50965994 reverse strand)
ttcgagtctgtttcgaatcctattcgatttttaggttttttatttttatttttctcttttgtttttgcgagattgaattaataataataataattgtttggggttgaaggaacaactgaactgagtcagattttgatgtgtggaacctagtcacgtgaccagctactaagaattgaagagttaatttgttcaatagttttagtttgcgctttgaagtatttttatcctgagaatgagaaatttctggatgcaacttctaagcttaaaaccttttatgttattcaggcaggccaatggttttgttttcaaaaaatgtgtgaacttggattcctggagcatcttagcttaattcttctagtgattttcaaatgaaagagcttaattatttccattttttcatatttgaagtatggaacattaagtttgtcgatcacagagtagttaatgttgaaatttaaaatggtatagcttagttactggtgcactatgaaaaactatggtgttgtgggggtccatgaatgtgcttagttaataattttcagatttcagcatctatcattaaagataagattgtgggaatccaattgtttgttcaattgctttttgttatgcttatctttcggtgcagacaagagcagagt

SEQ ID NO: 20531 - DNA, 693 bp, Glycine max
  Intron number 1 from transcript Glyma02g15300.1 (locus Gly ma02g15300) derived from phytozome v7.0 (chr-ID Gm02; pos 13800147 to 13800839 reverse strand)
ttacccctgatcttcaacaaaagatcgttaaacaggtgcaccgtctttttggtttcattttaattctaatcacagtatttttttttctttaacaattttggatgatctctaatcacttatgattttacattaattcaataagacaattatcattcttttaaggtttaaatacatttttttatatctatataatttagtattttatttttatttttgtttatgtaatttagtattttattttaaatacatttttttgtcgttatgtgattttattttatttttcttcttaaaatactttaagataaaaaataaaatcattttataaggaataaaacgaatgcaaaattcactaattaaggtaggtctaacatggtgatgtttgaataatttacgtataatttttagatttaaatcttattatcgtcattatataaaaataaataaataaggaatgccattaagaagatgtggatgatctacattgtgaaattgtgtgtaaaataagattttgattattaatgccattgcttgaaacaaatttatgtttatatattgaataaagggatttatttaggttgaatttttaatgaattggttatggaggtttttgtacgaattttgttattgtgacatgcaaaggtttcattgtttaaagatggtggaatgtaataggtggagtatcagttcagtgac

SEQ ID NO: 20532 - DNA, 712 bp, Glycine max
  Intron number 2 from transcript Glyma03g30970.1 (locus Gly ma03g30970) derived from phytozome v7.0 (chr-ID Gm03; pos 38820856 to 38821567 reverse strand)
agactacttgagctttgtcgcaggatcatccgttggtgagttgcattgcattgcatcatttgttgctgccagttactcacacgcactttgattttaactttgtagctcttattacaacatgtgatcacgttttgtttttgctcattggcaaataggaattgagtgatactcgttttttaactcataattgaatgtagaaactaaagaaaaagaagagagaggataaatgttcgggtgaatttggtaagagaaaaaaaaggctatgcaagtgtaaaacagttttgtactgtcattcaatcatcacatgatgtaggataagtttgttgtcttttacaataattcaatgatgatttgtgattgaatgacagtgtaaaacttaaatttgacatatttgatctcaaattgagtgttagctcaaggtagcttgtgagaagcaaaatttggactgttgtctagtgtttttgctatagaaagtagtggaaggatgataatctcattccaaaattgattgtaattgtacatgagatacaaatagaaatcctaagaatagatagaatatctacaatttgaatttaagtaaattcaaatataagatacatagaatttgataactgagttaggtcaacagtccaatatttgctagagcaattttttgcttggatatttttctgagtttatacatgtgaacagtcattcatgtagcttctggcag

SEQ ID NO: 20533 - DNA, 898 bp, Glycine max
  Intron number 2 from transcript Glyma02g16370.1 (locus Gly ma02g16370) derived from phytozome v7.0 (chr-ID Gm02; pos 14778032 to 14778929)
tcttcattttcttcctccttagcacaagatacttcgtaagtaacacctaatccatatttatatgcataaaatacctaatatattatatatctaataatcttataaagttatttatttatttgcttattgacttaatataacaaattatatatgtggttcatgttgcgcatctttgactctctttcccaagcaaaggttgtaatatgttgacactgaacaaagaaaaagaagcacggccagatgatatattgatatacgctctcaccaacagacatgacttaattataactgtaaacggattagtttacattcctatcactttaatttttttctttgcattttatttatgcccgtcgtttctagaaacgggatttcaatatcagcttaattaatcttttggaattgagatctattttcaaacctaacctggctagtttcttctctctagctttaccaacaaaatagcaaatttcctcagctgcaattgacattttatccttctttcatcatttctccagctgcttctataacaaaatcaaagtattaattatactaaatggtaaaagaacaatgatatacaaatatccacttattttaaacagatcactaacacttctcaattttttttatatttttttatcacaacataaatcttatatttatatttttttatatctctctagatgtcttaataatataatgggtgttcatgattatcataatttacttaaattaatttaacttgcttagaaatttcatttcctcgctgataattaatgacttgcagaataggtgtggttaagttttctcagttaattaaatttaaaaaatggattgtgagtttagtttgtgttgtcgtgcagagcaaaaaacgaccaaggtttttttgggtgtcagc

SEQ ID NO: 20534 - DNA, 473 bp, Glycine max
  Intron number 1 from transcript Glyma02g17180.1 (locus Gly ma02g17180) derived from phytozome v7.0 (chr-ID Gm02; pos 15500675 to 15501147 reverse strand)
ggatttgcacgtgtggagtgctccttctattagtcttgaagatttgatcactaccacagcttcttctcaaaaggtgtgtgtgtgtgtgtgttaaccttaattttgtttttggtcacatgttatacaactcattaccccggagatataagggggattgaatggttatggaaaaaataaagaagcaaaagattgtaggttggatttccttcactaacaaaactaatattctaacaagtaacaactaacatttacctatcaaaaagaagaagaaaaatagaactcactaaagttttaagatcatactaaactttgggaatctccagcaagtatattatctggtgtgaacatttttttttttgtgaaaacagaacattcaactgaaatgtgtattttatgtccgaaagaacttttttttatcaaattccatttggaatttgcttatatttttttattttataaagggttggtaattt

SEQ ID NO: 20535 - DNA, 459 bp, Glycine max
  Intron number 1 from transcript Glyma04g33360.2 (locus Gly ma04g33360) derived from phytozome v7.0 (chr-ID Gm04; pos 38963414 to 38963872)
gcacgtaagtgattattatatgttctagttaagtatctataaattatggagatgaaactctaattcttattagagaaaaacataaagaaaagaaacttataaaattgtatcgaagttttgtcttaaactaaaatgttcttttatagtagtatctagagttatttttaatttgttaacggtgtgattttttttaaaataaaaataagccttacatgtataaggataaaagtttaactaaatcaaataatactataatccaagtagaactttctttgattgtaaaaaaaaaaaagtataactttctttggaacggtaacataaatcacatagattgtgaaactttcttttcctacatatttatgtatgtatctattcttcccactgaaaatgggtgcactcattataattattaacactattaacacatgttttgtggtactattagtcttcctggtgaca

SEQ ID NO: 20536 - DNA, 771 bp, Glycine max
  Intron number 1 from transcript Glyma02g38730.1 (locus Gly ma02g38730) derived from phytozome v7.0 (chr-ID Gm02; pos 44077170 to 44077940 reverse strand)
tctcacttcaagggcaagtaccgtaattctctctctctctctctctctctcttgctttgatctatcttagtagtaatcgggactttctatatcttgttgtttcttgtttttatctgctgatccggcttttctttgttgtgtttgtttgaatcaatttgaatttgtctgcgttgatttagatctgagaggttcagatctggctttctatggaatttttttatgaaaaactagcgtgcgactgtttatctatgtgctcttccaagggtttttgttcaaatcatcaagttagtccatgaagtatcactctatttcctaaatagtctttgatttaatgaaattatgtaagcagtaccttaaagtgtttaatatccatgaatttagtccctgaattgatgtattctgctaacattgagagattaatttgatgaatttttcaaatcttgaaggattgtcacataatttctaatactttagggactatttgtataatctcattagtttaaggactatttagggatcaaattgatagattattcgtttttgttttagtcatagaattttgcatcacgattgatattcctttgtcttcaacttcttttaacctcacatccttgttcaactgatgaaggttcaacatgttgctaatttattttgttcatatatacttgggtttggcttttttttatgtttcttttttgggatttttttttaattttggtgtggttaatgtttgtgtggtgctgtgtttttaattgatggatttgcttgcag

SEQ ID NO: 20537 - DNA, 808 bp, Glycine max
  Intron number 1 from transcript Glyma04g41700.1 (locus Gly ma04g41700) derived from phytozome v7.0 (chr-ID Gm04; pos 47554572 to 47555379)
ctttcaaaaagaggtatgtatggttctaaagtttccatacaatctttaacatgcaaaaagaaattataagaaaaatgtgactcatgcaactgccattgtggttgcattatgatcatgttacacccacagacggatggacatggggacatgcagcagccccgagtccctctcctccttcacacttttaatttacataaatatgtatttttaagttaattaatataaaattgtataaaactaattatttatcttattattataataatgattaacgtttatttatttattattattattactgtaatggttaaggtgataattcgaattaaattgtgtaaaattaattatattattattcttatgataacgattaaggttattatattttaaaataaaaattaattttaattttatgtgtaaaaatattaaatattttttaaaattattatttattaaaagttaaacatttaaataattaaaaaaaactaattccccgtttaatagatttctggaatccctgattacacattaattaaaatcttaaaattaccaccaaaatcaaattcagaaaccattcttcgaaacctttatactgataatgtatatttataagtcagcttgttttgatgtccttacccgtgttacgtgtactgcatgtggcctttacaacccattagggttgacctagaaacttccacaaagtcttagttcaaaatttattattattattattattgtaaaaaaaataaaatggcctttacactaacatcatcatgaactcctttcatcgcagaaacactttgccaag

SEQ ID NO: 20538 - DNA, 700 bp, Glycine max
  Intron number 3 from transcript Glyma04g42440.1 (locus Gly ma04g42440) derived from phytozome v7.0 (chr-ID Gm04; pos 48204015 to 48204714)
ttcttgggcatctgattcagctaagaacattaaaggtttggcagcctgttaaatataaacagacaaccctttagtgttagttgttacagtttccaactttaatctctcccttcgcttcttttagctaacatatatagttgaaacttgaaacccaaaagttatgtggagtagagacttaagtatgcttgtttttttctcaagttccctgtccactgtttctgtgcttttgtactttttttgggttgatttaattattagtatatcatttaagaataatgataaaaatatggtttgagtgcaatgttgacctaaccatttgcatgtttagttaagattgtagatttgagagactaattaatttctgtgattttccaagaaaaatgcttcaattttcctttcctatttcctctctgtttgagcgccttaatgtgatgtgactatgaagatatggctatatcatctgttaataaataattactttgccaattcttatttcaattaaaactgtcttcacgaggaatacaaatttcacctctaatttttcttggatattttgatctcatagtatcttgacattatctgtaactgttattcattgttttcattcagtgtagtttaggtttactaggttctcttaattcctgaaactacttatctactcattcaatgtttttttttactgcagagaaacttaaaaata

SEQ ID NO: 20539 - DNA, 803 bp, Glycine max
  Intron number 1 from transcript Glyma03g36800.1 (locus Gly ma03g36800) derived from phytozome v7.0 (chr-ID Gm03; pos 43650723 to 43651525)
tctctgccattgtgtaagcccttctcactcttattcaccgcttgttctttctttatttgtatttaagctctctttgaatataaggtataaatgttttttcagttgatctcttaaaaatatgaagttttttcagtaaaaaaactcttaaaaagatttttagtcttgtatccaaaagactagtataatataacatgaaacttattcatgtatacacatataaggaggtctatttagctagttagagagtgccaaaagagttatagttttaatcaatttctttttgtaaatataatttgaaaaaaaaatgtgtatatttaatttttaataataactattcaaatgtctaataacttacatttatttaaaaaaaaaatataaacattcactctattttgaaatcgattttaagtggaagacaagtgagatccaaagggggaaataatagatgtgataaagaatgtaatagaaaaaaaaaagagatggaagagaatatgaatctatgaatataattactctttttttattacttacactaatcaaaattttatgtacactctttatatgtctatattgattagtcaaaaaatagatacttgctaaaggtatttttgctcctaaaacagcaatttcttgtttcttcattttgtgtactggaattcagaaatgagcgtcagaatttgctaaagtatttttccaacttttatccgaatatagttaagacagttagaggtttgttgtttccattgtgatctgaaaacaactcaaatctggaacaggtttttcttggtgataaacgcgatagc

SEQ ID NO: 20540 - DNA, 703 bp, Glycine max
  Intron number 2 from transcript Glyma03g40500.1 (locus Gly ma03g40500) derived from phytozome v7.0 (chr-ID Gm03; pos 46235478 to 46236180)
ggttcgcccaaggaagcttctttatcttgcaattggtatgttgctttttcttgttattgtatctctcgtctatggaacaccaagcatttcccaatactttatcttacttgtagatgatgctcatggaagaaataagattgacaccattcctctttgtgagcaataagcagaaaattaggatggcaatgatttataatttctattttgtttttagtaatgtcccaaaagcatgttcattgtttggatttgagaaatgcatgaatcatatcctatatattttaagagtagtcataatgccataccagatacatatcatatttgtgcgtcatagtttctcatcgtggaggatttgcccaactgctcctttaagttataaatccatttggttcctaacttctcattatgccttctgttttttttcgatgattagtaacttttggcacactcctgtatggttgtacattcaaaatttagtgcaaatattttcaagtaaaagactcagataaatgtttgtaaaacagaatagccagtaaggaaagttagaacttttaaatatccaatttttggaagcctgtaatttttttgtctgtaatgttatgttattgtatgtttgatttaactttgaatcgcttcctcattcctaccatttctttccatatgtacttttctcgccccttaagacggtgttgcaccaagagccaaa

SEQ ID NO: 20541 - DNA, 748 bp, Glycine max
  Intron number 5 from transcript Glyma0095s00250.1 (locus G lyma0095s00250) derived from phytozome v7.0 (chr-ID scaffo ld_95; pos 36196 to 36943)
ccaaggaagagcaaatctggggtgcattcttcaaggtaacaagatgacatgagtttaaatataattatcggtgctgctctcagttctctttgtagaatattcttttcatctgtttagaacagagaatcagtgatcagtcccaatagtaatataaggttaatgtcaattgagactgcatcaagtacaaagggaaaatgtgaggtcaaagacaatagaataggagttcacaaaaagccaacacatacagctaaatttcactaaacggaaaatgtagtgtccaaaatgaatgggttagactaatttaaacttaaatcttcatatcacttttgaaggtaatcttagagcttaagaagttagagttgaatatccattacgtaactaggattgccagttgcaactaaatttcaccgaggtaataacattgtaagttcctaagagcaaaattataatctaagcaagttcggttaggctctcaagtggttgacaagtcttgtttaggtggtctttttggccttggttaacaagaaaatcgagtgttaggtacaaaaattggaaagctccactacacataatagtggtattatttatttgaatatttgtttctgcattcatggttagtttgcttattttgaccgtgtgactctccccatttatgaactttgagacttatatcttatgatatattttgtctattagatgtgatgaactatcaggtggaagggtcagcagtccttgtaggcacagagta

SEQ ID NO: 20542 - DNA, 820 bp, Glycine max
  Intron number 1 from transcript Glyma01g45390.1 (locus Gly ma01g45390) derived from phytozome v7.0 (chr-ID Gm01; pos 55693600 to 55694419 reverse strand)
caccctaagaactacggacctggttctcgcacttggtatgttactcatcttcgccaaatggtgattcaggatgagttgatccttttccctctttgttccttctcaatttgattatgcgattattattaaggtttttgcttttaatttgaagcatttaattttatcccccatatgagtactttgaatctgtgttttttctgataacaagtattttcctcattatttggttttgaataagtttcgtaccatcactattgcaatattacttttgttcttcgttaataattttaaagaggtgactcttctatcctgatgtcataataagatattcttttaaccattgattttctcttcattacgttactttgttgaaggttgagtgtgtgcttgggtgggtgtttaaaaatttgattttgaatgaaattaattttaaaagtagttgctttttcatcattgattttggttaaatgtaatttgattctgagtaatatgaaaagagtggtgtatgcattataaaatgtatgtcttattatattggtatatggcacctttattttcactcttttttcataatcataccaatatgtaatacgtgcttctctgttttaatgtatgcattttattttaaaactatagcaattttgtttggctagttttagactgttacaatttagatattctcagaaaacatatttttgacggtccaagatcggattagaattctagtgtgcgagttatttgttaattgggaatgtggtttactgttctttcctgttttgcagccgtgtgtgtgggaatcctcatggattgatcaggaaat

SEQ ID NO: 20543 - DNA, 567 bp, Glycine max
  Intron number 2 from transcript Glyma02g39190.1 (locus Gly ma02g39190) derived from phytozome v7.0 (chr-ID Gm02; pos 44448029 to 44448595)
gagggtatggatttatagttttcaatagtatattaggtgaagagatagatacttaaattttcttgtataacaaagtaacatgtaacatgatagacatgagagaaaggaaaacatcatattgtattacatcctcatttagggtgaaattgttgagaaatcctcttaattaggaaagatacattgttatgtttttcctttacttacattaattaagaagttcacattagcattatttatatcatttcctctatcttcatatgtccatacattttattgtgtgtctattttgaattaccaaataaagagtttggactgataatccccaacaacctccttatagcaaaaacacaagaaaaccaatccaatatactaataatcatatttcttactttaattagattaactaagccaaatgttttggtcctacctggatatatgccttatatatgtatatagactttgtttcacgtacattatgcagctttcaatgttggtatatatctgaaactcattgatttttttagaactgtaggactctgacttcttccctgaaactcaaagcttgtc

SEQ ID NO: 20544 - DNA, 745 bp, Glycine max
  Intron number 4 from transcript Glyma04g10060.1 (locus Gly ma04g10060) derived from phytozome v7.0 (chr-ID Gm04; pos 8327816 to 8328560 reverse strand)
tagtttggtatggcttttatgaaatagaaattatccatagtctctcctctctccctttcctcttttatgtatgtttgatggatgtatttaatccttttctgcttgaattcctctttgatacgggtgctcaactgctcatgagccagtaggcttactttggcctggtattttgattggatcaaatttttaggctaaataaataatgacagagttggactggacccaaagtttaggcaaaatgtgcaaattttgatatgatgtatggctaatgcataaaatttaaaagtggaaaaatggtacttttataatttatatttttcaatcaatgagaatgtttatacataagatatgaaatctagaaattctgtagtaagcttggtcaacatagggtgtgtttgtttagccgtttctcccaccttccaagaaactaaaagtgactgaagaactttgtgggatttccgcacaatggaatttaaacgtgtttaaaaacacactcttaaagagtgacattatagagtgacaaaaagatattgatttaatttttaaaacccaatcccagcaaagattagctttgagactggttgggttattggccagaatttggtcttgagcacccctactcttttcatacaattgctttcatataatatcgattgattgtgtttatttaatctaaatctttggagatcttttacttttggaaataacagaagcaagactcttcagcactccatcttttaagtag

SEQ ID NO: 20545 - DNA, 986 bp, Glycine max
  Intron number 1 from transcript Glyma03g19460.1 (locus Gly ma03g19460) derived from phytozome v7.0 (chr-ID Gm03; pos 24727431 to 24728416)
gcagaccagctccaaatccgggacaggtatatcgacaattatgttatttatttattaatttaaactatcttttgtttagttgtattgaaatgttcatgttcattggagctttcttagtcagatgaagaataaatcgatgttttaatgctagattgggatctgaataagcacaaagacacatatgtatgtattcatatgtatgcatggatgcatgtatattgtatagtttctttggctaggtgaatttgtgtgtttgaaatgaatcacatttttgcctgtaagaggaaaatactgaatctcgtttttatgttggatggtgctattaaaatgtgttgatacttgatactggttgggaactgaatgatggattgtattttcaatttgatgggttttcaactttttatgattacttgactgagaaaattgatgcttagatcgtgtgatcacataatgcatacatttcgctttggagaagaaaatatgtgaatttctaaactattgtgtttctggtatgtgacattgtatccttaacctatacctagaggatctactctctattgaattcagattgatactctgtattattggaaatagtgaatctagtaataacttgtaacttcaagcctcaaggacttgcacaaatgtttcctgttgctgtaacattggctaacattttggccttaacatgttaattgatgaatttggatggacactggatttgattgaatacttgaaaaccacacgtattaagaactcagaactgacatgccttgcttgaatgcaaatttattctgaacttgcgtaatacattaacacttatgtacttctagagcttaaccttattttacttgtattaaaacagtgcacttattattcagtctgagttaaaagtagcaaagatgtgaatgtagaagttttattcagccttgtagcataaggtggatttgttgatttattctctgctccaacaaaattgcagtctaagg

SEQ ID NO: 20546 - DNA, 945 bp, Glycine max
  Intron number 2 from transcript Glyma02g37220.1 (locus Gly ma02g37220) derived from phytozome v7.0 (chr-ID Gm02; pos 42562860 to 42563804 reverse strand)
attcggtatcgttgtttttccttttgcttttcttgtttgattcctaatctgtgatgtggaataattaggggacggttatttaattaattatccgatatgaaatatatgatttagggaacaactgagttttattcaacttgggtagtgtgtaaaggtttatggttaaactaataaactctaagcccgtctctgtgtttgtgtcggggttgattagttggaaacttggaatttcattttctgatttaaatgtgccactttttagttggaaatcatccctggcttcttgcttaggttttgttagtttttttatgcaaaagccaatgtgaactgttggagagcatgattgaatgattttttatgggaaggggattgaatcttggaatttgatgtgagatctgataggatggactttggaacttatttcactctcattgttatgcaattgtcaatttctttaaattcttataaatagatagatatgcttacccaggtttgaaatttgaatttggtggtgttctactctctcttggctattaagctataggaaagaggcctggaatgtattgcatctactatctactactctattatctaatttacatttccattgatatcatggaaattgaaatagtttggcatggctgctgcgtgtagtcacaatgtaccctgttaaaataatttggcacgctcacttggtgttgctacaatttactgtggatacactggtgctgctaactgctaagttgaaaacatattattgaattttaatcactactaatacagaaatttccttgtttatagttcttctttcccctcattttcttaattgtcaaatggtaaaggctttcagtcttttacaagttgcagtcctttggtcatgaatgttaactactggtatttacttttcattattgaaggtagattcgtcttctggaagtacacttg

SEQ ID NO: 20547 - DNA, 178 bp, Glycine max
  Intron number 1 from transcript Glyma02g14150.1 (locus Gly ma02g14150) derived from phytozome v7.0 (chr-ID Gm02; pos 12641270 to 12641447)
tacatttcttcacagcccaacaatttataaaccaggttagtgatataaaagattgtaccttttttactttttatttaatggattatttgatttgtgtagaattgtgtacaaattgagttttttttttcttctgttttggttccttatcttgttgttgtgaattaggcgaagcataaga

SEQ ID NO: 20548 - DNA, 559 bp, Glycine max
  Intron number 1 from transcript Glyma02g46680.1 (locus Gly ma02g46680) derived from phytozome v7.0 (chr-ID Gm02; pos 50573092 to 50573650)
ttactggagtgctggtttgacggacaaagctccaggtttgaattccttcattggattttgattttttggtttcaatctgagctgttaggagatggtattatggtgtgactgtgtttgtgtttgtgtttttattgtgttgttaactgttgttgtgacactggtgtttagggttgatggtgtttttaggccttgataaatgggtcatctttggtttagtgcctgtttggatgaatcataaacccttatagttataggagaagaaataagaagaaaaaaggaaataaatcatcctatgttttgccaatatccaaactttatcccttaaaagttaaaaccatagtgttttagtcccttgcaattttagttttagggggactaaagtttgggtactaaaaaaatcaaggactaaactaaagattacccatttttcagggtctaaaaacatcattaacccctagggtttatgttacgtggtctcggagttgtaatttgaaatgatgatgctgctgttatttgatttctagtgttacacttttttggtggtttaatttgtgaggga

SEQ ID NO: 20549 - DNA, 799 bp, Glycine max
  Intron number 2 from transcript Glyma04g09470.1 (locus Gly ma04g09470) derived from phytozome v7.0 (chr-ID Gm04; pos 7703619 to 7704417)
catttctttgctaattcttgaaaacaggaaagaaagtaaggcaacatttatgtaatcattagtgaaaacatgtcagctgaatgaaaacaaaaaactaaccaaatgcaccttcacattttccctttttagttaaactaaagtttagcgggaaaggaggttccattccaatgttagagcatgtcacaagcctcaatgagggttcacagtgttcctaataaatgacctaccaatgaaggataacctgtagggattaaaaatacctttttgctgacgctagtagattttactagttgagccaaccatcgttgacaatgatgttatccctttgattgttatgtcttgactgcatttcccttttgttgaagaaatataatcaaaattgtctttttcataattgaggtagtgattgcccctcttctccataaagggagaagtatggccaagcacaattttaaagaaggtctaaaaaataaaatggactttttttctttaatgaagaaaaaacagaagagcaagcttccatagaggctaattggatgaacttctgtctggcactattgtcttccgcatggtttaaaagtagttttaaagttttaaaaaaaaataaagaattaccacacctttatctatgaagatttcattcttaacttagaacatctaagtagcttttaagattaagctaaaaaggtcaggacagacactacctattgcctaaatgaatttaagtattttgaattgttaaatgttaagctttcttcgagtcatatctatcagttttctacatgtacagcatataatc

SEQ ID NO: 20550 - DNA, 773 bp, Glycine max
  Intron number 1 from transcript Glyma04g41440.2 (locus Gly ma04g41440) derived from phytozome v7.0 (chr-ID Gm04; pos 47281246 to 47282018)
gtgccactgcctgctggggtttgttccctttatcctgcaattgatttaaaatgttgtcttatgtttttattcaggagagaaaagtggtaatagtttttaaacatttatcttacactttagtactttaacctgttaggaacacttcagaagcacatagatcacattactccaataatctcaccatgatgcctcattgccaccagaacgttatccccttcttgaagtgtgatgtcagtccctttctaacacttgcttggaacaagctgtcaacatttagatgttctatatgaacaaattaactgaagcctcaaatgctgatttttgttttgtttttcttcttctttttgtatagggtggcttatcattctgcaattgtctagcatagttgaaaggaggtttctcgagttatttactaacctcttcaatttctttataaaaactgagcttcttgtacctgattttggaagctgtgttaactacaatgatttgcgtcccataattgccattgaaattgactaggcttattccatacttgatactaatataggttggaatcttgtttatatgtatataacaatgttatgccaaactctatattctgttgtgttttgaataggtgtgtatgagaatgatttttttttctctcattttgtattttatactacattgaatatgatattgattatttacttgaaatagtcaagtttcttatggttatttccttttccctatgaacagatttatattcaggacattccccattcaaaagcaga

SEQ ID NO: 20551 - DNA, 990 bp, Glycine max
  Intron number 1 from transcript Glyma02g45930.1 (locus Gly ma02g45930) derived from phytozome v7.0 (chr-ID Gm02; pos 50039194 to 50040183)
gcactcaatttggcggtggaacccttcacctaaaggtcgcttccttctcaagtgttggaaatctaggtcacttttttttgttgaaaaaaaaatcaaattttatgataagtcattcttgttgtaatgaactttattttatagtactaatcggtgaaggactagatcaacatcgtttggtgaaatctttataccgagtggttaacggaaactggtcatattcatgacatatttcgtagtagttttttttactttaaaaaaattgcttagggagtaggtgtgattaagacttaagagtattttcttaaatattggaatgccatagattatgttttgtgattgagttgtaatttggtggattttggttggacgtgttgtcatttaaaaggttcagaaatctgcctttggcggtcacctagcttgtattacattattataggagattaagttaagtggatttaatgtcgctcggtattttgtattagtcattggaaaatgtttgatgaacacccaagaacctattcattacctagagagagagagaaaaaacataggcatgatagggttcatgatgtgataggaagagagaaataaagacaaatgagaggtgtcgatggggtgtttaaaataaatggtggttcatgtatcatttctcttagtcattagagtagtgaaactcttacaccccatttttgggtgtatgggtggaaggaagagagaaagagattgaaaaactaaagagagagagagagaaactgatggatatgacaaatgatgcaatggaaaataaaaagagaaataggaagaaaaataggatagaagtgagatggaagagaagttgggtgtatgtttagtattttcctagtcattattagtctatgcagttctataattgtattttttttcctccctctctctctctctgtgcatgtatggatttgggattcagcggaaactgattgattattatctatgtgcttatctaggttagca

SEQ ID NO: 20552 - DNA, 550 bp, Glycine max
  Intron number 2 from transcript Glyma01g41690.1 (locus Gly ma01g41690) derived from phytozome v7.0 (chr-ID Gm01; pos 53128781 to 53129330 reverse strand)
gaccccactaggtatgtttgtctcttagattttgaataggtgccaaatcgtttttccagctattctgcacccatatgtactgtttaattttacttccatgattaatttctcaatacacaaagtaactttagtccttaaaagtaatttgacgattgcttatgctcttattctttaatgaaagaacttttaatagaaatttatgttacagtattgcaaaatttgccatattgcccagcaagttagtttgatatttctggagaaataatcacacttattttttgttagttctcctggaaaagccggcagaaataagcaattatttcttcaaaataagctacaccaaacacacacaagtcttctagctccttatcacttgattatgttaatgtttttatcgaattactatcacaataaatatcagcaagttatggattatatgatggactttttgtgtaattattaaaggaatttatatgcatgttacaatggaaagtttagttcattatactccaaattgttgtgcagtgctgttgagaaaggaaaccttggt

SEQ ID NO: 20553 - DNA, 935 bp, Glycine max
  Intron number 1 from transcript Glyma02g31490.1 (locus Gly ma02g31490) derived from phytozome v7.0 (chr-ID Gm02; pos 34474673 to 34475607)
ccactgtcaccagaaccatcgtcgaagtcgtgaaggtccggtaacaattcttttctgtttactatacatgattctgtcttgtgtgttttttttttcttttattctaataatatactactcctgtccctgtcctttttttttaattacactaaaacttgtttcttataacaaggatagagagtattaaatcaagaattaatttaactttgaagtaatgctttagtctgtggataaaacataaatagtgtttcttaagtacttctagtgttgttttcaattaaaattggagtttcatttcaagaacttattttgaactttagtgtaaatatttatcatgtaggtgaaatttcaatattatcatagaacatcactaaaggtacataaagaagtgcatctaagttttgtccttagtctaatacgttaatttttgaacttatgaaacatttggcagatttagtaattgtgttggtaatttaaaaactagaattgagtattacttgatgttgatgttattagtgactaataatttcagatactacaataatactttgagattttttggtgttaaattaactgatgcttgtaattttttgttattactctttttctatacatttcctttcgtgatgagtgtgggatatatataaaaaatggcatttactttgttttctgttgaagaacgaactgtttttgtgtatctcactcatcaatccttctgcaaatatattttacgtataaatggcattttaacctttaatttgaaatatgggagccaggtataatttgtttgttggcatgtatgaagattctttgctcttcactgcacctatgtccttggaatgcttctctccttttatttgattgttggttactctaaatctgatgttaaatcatgattattttgtatttttttgtggtgtaggtgtgccacgagc

SEQ ID NO: 20554 - DNA, 705 bp, Glycine max
  Intron number 1 from transcript Glyma02g47200.1 (locus Gly ma02g47200) derived from phytozome v7.0 (chr-ID Gm02; pos 50869142 to 50869846)
aagaaaccaggtatcctatgcacttcaacaacttttttcagtcaattttactgttagtgatgggtaattgtacttattgacaatattatagtgtactaatggcatgagtatgctttaaaattggcttggaaagtttgataccatcgttttattagttgaatatgactgttatttgttctccttgaattagttatgaacttatgatatttcgacaaaaccttattggattgttgaagataggaaaataccaagtgtcaagtaatcataaagttatcgtaattttaatttatccccttaaaaagagcttggaggaatcaaataccttcacatacctttttcactgtgatcagttcgtggcatttacttttgaaagagtagaatcttttgttaattgcattttttttctatctagttgaggacataaatcatgtaaaatattgaaaagcctaatatagaagttttaccaacttctttttctttaaaatgtaatttcaagttgacgaaaaacaatatccaagaactaacagtaccaaataggaactgacaaataaattgtaaactatctgtattgtattgtctggaataacttccatagtcattgactcaaccagagaaacaagtttttatttttatttctagagccatgcaacttttttgtggttaaaatttgaaattgtaattttcatttgcactgtattgtacagg

SEQ ID NO: 20555 - DNA, 278 bp, Glycine max
  Intron number 1 from transcript Glyma04g02360.1 (locus Gly ma04g02360) derived from phytozome v7.0 (chr-ID Gm04; pos 1638843 to 1639120)
cgggtttcgctccttcttcacctcctccctctaccgttagtcatacctaaatcctttcttcttcttattattattttaaggaacaatatttgactttttattttatgctatactcaatttttcagtattatgtatcatgttgattcctaaaattcagcaaacacagaaacagtgtgtggagtgcacataatttgtgtgctgacctcaattgtcattccctgagtgtgctgtattgaattgaaattttggttttctttattctggaaattgcagttacc

SEQ ID NO: 20556 - DNA, 765 bp, Glycine max
  Intron number 2 from transcript Glyma02g08050.1 (locus Gly ma02g08050) derived from phytozome v7.0 (chr-ID Gm02; pos 6312595 to 6313359 reverse strand)
cgcttggtgccacggactcgtctcttgcggtgaaggtgagacagataaagattgttgtataaatagaatcatgcgtgtttgatttcacaatggagaataattgattccgagtttaaaattgattttaaatgaattttacacgttggagaataatagatgattctgagttcaaaattaattttaaattatttttcacatgtcaaaaaaaaagaaaaaaaattcagaattaattattagttggagcaactttagccagtcttgcattgcataaaaaaaattaggtttaaatattattttagtatgtgtaatttaatgtttttttcattttcgtcctttcaacaaaatttcgttctaatcctgttaagatgtgtttgttttattttttttttatctttaacatgacatttttttcattgttgaaaacattttttactgttcaaaaagtgctatttaaaggttttaataatgaaaaccaaaacaaacatattttataaggactaaaatgaaaaaaaaaatacaatgacgaaaataaaaaaaaaattactaaattgcaaggacgaaaaaagtatttaaactataaatttatattaaattttactcataacttataacaaaaacattcaaacaaaaatcaaatcaattcaaaatcaattttaatcaaaattaattttgcagcaattatagaatagaatagaagattgttttaactgtttgtttagtttttgttcagaagaaagcagcagaggtgtcttctgagctcaaagg

SEQ ID NO: 20557 - DNA, 591 bp, Glycine max
  Intron number 2 from transcript Glyma02g23610.1 (locus Gly ma02g23610) derived from phytozome v7.0 (chr-ID Gm02; pos 23965091 to 23965681)
tcatttcctgctttcaggtacgtagggacggacacaagtagaggctaggatcacgatcaatagatcgttatctcatgcccaacactggacaagcgggaagcgcagctgggggatagcctagtatcctttaaactcccagtaattattgttgttgtgtctttaaagtaaatatcggatgcctcatctactctaaagggggttcaagtaagcgaactccgacccgtagagtgcgcatacttgtgtcttcccaaaaaaaaatacaggttagctcgcctgggcgagcacccctgcacctggaaacataaaaacgagggagagggagtttttctccacccaaaactctcccccctcatttaaaaccacaaacacccacgggatttatggattttcacccctaggccaccatttttgcgcttttgcttccattcttagtgtttttggtcactccatacaagtaagtgcactaccctttgatttcgagctttccattgatgccttttatgctttgaatgatatataatttggccaaatgcgtgagacaatttggggtaaatttgtgctttttttctttgaattggggggttgtagggg

SEQ ID NO: 20558 - DNA, 772 bp, Glycine max
  Intron number 1 from transcript Glyma04g32230.1 (locus Gly ma04g32230) derived from phytozome v7.0 (chr-ID Gm04; pos 36684404 to 36685175)
ctgtcagaccaaccaagttcacgtcttcgacactcgtacgtagcttccactttctcctcttttcttaatgggaatatttcttttcttgttttttgaaatcttggttttgttttttcattttttttattataattgattttgtttggattgtcattttctgcttctgctgtgcacgatgcatggtgggttgttatgggtgggcggggttcctatcaagcactgtgctttttgctatttttttatttgttcacttttttttccatctttgttatattttattatttggtctctcgttgttgttgaatcttgatgatcagatgcattcactattgggaaatccgttattttctttatttttaatttgttttgagatgtgggaacgagatttttttgtgtgtgtgtacagtgacgacaccaatattttaacctagaatttcatgtaaattactcaaatccgtcactaggcggactaggtttgggaatggggatttttattttttataggtagaaattgaagacaggatatgagggagtttaagacaatactgctcagccaactgagttaaaccccctgattggaaatgatgattttggtaacttgaatggtgtactaatttatttttctatgctttgtggggttacattctttttggaagtgtttctatgtatttattctgttgctgtgtctagcaaattaatgtgcaactattttatgattcatgtttggtaattttcagtgaagcagagttggagtgaaccagcaattaagggc

SEQ ID NO: 20559 - DNA, 917 bp, Glycine max
  Intron number 1 from transcript Glyma03g08980.1 (locus Gly ma03g08980) derived from phytozome v7.0 (chr-ID Gm03; pos 10270729 to 10271645 reverse strand)
cagtgccaccaaaggaccaggtttgcttctttttttttctatgcttagtttcacatttttgtttttctttgttggaactatcatgattcttttgtttgttcttggtctttttggggtgtttcttgtttgcatgttaggaacatgtttgctttcaagtgggggtgattcttgttgggttttcaaaagatgcttctttttcttttcttgcttttttttttctttcctttttctgaaatttcgtgtttgctagtagcttgcccagtttcttctcaccttttggtttctttttatacgctaaatattctcccttttgtatgagtatgcgtagatccaaaacttgttacgaaacatttcgtattactgctatgctagacttctgggttctgattccattgacactttctttttttgtttcccttttatggaaatggttatttcttgaaatgtttggcgacttcaacaatttactttgttttttatagcttggtacgattctttccagcatatttcgggtttgaagttttctcagttgctttggtgttactggtggagcctctttactgtcttgagaatttatttcaatgattttgtataattcaagaggatatgagccaaatgaaagacaaaacttagatgcaatttcttaatacttttagtactgtttttcaattggagtcaaattctgattgcagaacaacactaaaagtatttaaagaactaaatccatgttttgttcccaaactaattggcttttctgttatgtggggaaattcgttaagaaatggttgtctagttgttgtatttacattaaataaattgagaacgtacaagattttggcatgtttgatgagacagtctcttggcccgaataaaatgttgcaggtggacttggagactgtggagcctcaggctcaaca

SEQ ID NO: 20560 - DNA, 723 bp, Glycine max
  Intron number 1 from transcript Glyma04g07330.3 (locus Gly ma04g07330) derived from phytozome v7.0 (chr-ID Gm04; pos 5689380 to 5690102)
tgtaagcgatcttacatcgtgaatcattgataaaggtcagtattcatcttcttcattttttattagagttgtttcggttcatgtcatctttttcaatttcgacgttgctgcttcgatttgtgatatctgcctgcgcgaattttgattttgttacctcttttcagaccccttggtttattttatgttgtatgcttttgtgtatcgtagctattttaaatttatgatcacttttcaattaatcgcgtagccaattttcatttggaatttgtgttttttgattggaacatatgtcggaggaaaaattattgtctcgactaataaacatttttgaattttaaattaattcgattaacgcacctagactgattagtaattagtgagcttaatgttttaaactgcggttgcggttttgtcttgtttatttattgtgggaaattgcagacacttgtgatcacgatacagctgcaatcatgggccacaattacggttgtgatgcggttatttgactgtcgctgacctttttttgaaaccttggcacttggcaggattgttttttcatagttgacaaatgttgttcaatattttctttgagtggaacacgaaaataatctctaatcctttagggtatctattatcaataattttgcgattttcttctgtgatagtaacatttatttgtgaaacgtcactggttcgtgtctgaattgaagaagtgtcatcacc

SEQ ID NO: 20561 - DNA, 350 bp, Glycine max
  Intron number 2 from transcript Glyma03g33840.2 (locus Gly ma03g33840) derived from phytozome v7.0 (chr-ID Gm03; pos 41322413 to 41322762 reverse strand)
cctcgagaggtatgtatatgtgcttcagccactagaaaaagcttaaacctttttttcttcaagctttaaaccttagtattttatttgtttctcaacctcaacaaggattttctattcatgccttccatgaccatgttgtcaattttgaaatcttagttattttccagctttattgatagtattttgttttcttttggccaatgcttttcatgttatagatataggttaaatgcatcagattacgcattcctgcaactttcatcattactaagtggctctttctttgaattcttttgctttgatgcccctttgcagctaactggtgaaacagtgggagaagtaaaagctgt

SEQ ID NO: 20562 - DNA, 1025 bp, Glycine max
  Intron number 1 from transcript Glyma03g20380.1 (locus Gly ma03g20380) derived from phytozome v7.0 (chr-ID Gm03; pos 25908781 to 25909805 reverse strand)
tgtggtttcggattaccaaagctcttctggtgaaggtaattttttatttttttgtatttcttgttaatatatatatatacacacacacactgtgtgtgtgtttccatattagctaattttatgattttttgagatcctttaaaaaaattattttttgagctttttcgttttttgaatattcaatgtaatttatttaactgtatgataaaaaaaaacgtgatttattggcttattccagtttgaaagtttcataaagttaactattgttcaattgttcgcatatatgatttcaaaggctgaacataatcaagaaaagaagaaacttaatttgacaattatgtcccatgattttggaatttggagtgacattttttaggatgtgcgttccccgcacataaaatcgaatcgtcgttcaattttaaacggtgaatcttaattttaaaatatatattcgagataaatgcagatcaaccttatccgaaattttgaatagtatcagtgtttcatatcgcctaataatgttacatccctctctgccatccctggttgaactattacttgatgaaattgctactttttttttttcccccaaagatctttggtacatatataaaaattacattgaactccaatataatttaagttttttgtagggagtgttagttttctaattttgttagaaatatcacaaccttctttctcccttttctaaccagtgacacaatcttatatctccaaatataattcattcaattaagatgagtcagtgaattcatttaaaaaagataaagttgtcatttttctttttcatgatctattaatccgtaaaagcaaatgtcatcgaaaaagcaaaatgtcctaccatcaaatcaggcacaatatttcgtctttcatgcatattgtaagtcacatgtagtttaactaaatttttatgtcatgtaattctcaacttgaatcttgattatcaccttccttgggacatatatatttttaacaaatgttccaattttttttgtttttctcag

SEQ ID NO: 20563 - DNA, 506 bp, Glycine max
  Intron number 1 from transcript Glyma02g18260.4 (locus Gly ma02g18260) derived from phytozome v7.0 (chr-ID Gm02; pos 16871422 to 16871927)
ttgggtatttcattcactttttttccccatcttttttcgaatccctttctctaaaaatttttaaatgatacagtctggcttggtaggtcacacaagtttaaacattacattccgtaagcgccttttctaaaatcttcgattacattctttagttttcttttgagtatttaaagcccttaattcaaccgcgacgaattatgatgcttacgaggcaaatcggtttgtgctaacgtgtttgtatttatagatagtgtctctctttgagtctctgtaatgaatgtaattcagtttgtctattagataataaaaacaattatttcttacctatgacatggtaacaaataataataaaaaaaaattattgttgtgttttaatcatttggtctggttaactaagttccttgatgttctgggatgatggcgataatgtttaactaagttccttgatcattttacagcgtttaataaaggtaactaacttttgtttggagtctcagtctcagagt

SEQ ID NO: 20564 - DNA, 543 bp, Glycine max
  Intron number 1 from transcript Glyma02g45270.1 (locus Gly ma02g45270) derived from phytozome v7.0 (chr-ID Gm02; pos 49600942 to 49601484 reverse strand)
ccaagacattttacttaggtacttgtttatcttttgatttgagccttatctcattcattatttctgtttcaaattgaatttttgtcctcttcttttaccacatcataactaaataatgtctctacgtgtcaaaaaaaaaaattactagttcaagttacgtgttcatgatcttagttaatctttccatgacatgtaatcaagtttttcaatttacgaaaaaaagttaataaaattcaattttgagttatgcagagatggttggaaataatgacatctcagaccacgcaataatttctcctgacccactacaatgttattttaattgaaatgtttctttgttcctaaaccttatggagtcaaattacaaagttcaattcatcttatatatgccttatgttttgttgtgctacaggcaagctacttagcagctagattaaaatatttttactatttttaatggattttaaaattctaattgttaatagtatattttgctgttgaattgactcatcttgaaaactgtaaattttaggcacacaattg

SEQ ID NO: 20565 - DNA, 1036 bp, Glycine max
  Intron number 1 from transcript Glyma04g02020.1 (locus Gly ma04g02020) derived from phytozome v7.0 (chr-ID Gm04; pos 1393696 to 1394731 reverse strand)
cctttcgcttctccaccgtacgtctacaattaaaatcgcgtgaatattcatttctatatctaggtctcagaactttttttcttctctatattgatggaaattgaaaataaaaataaaataaaatgttggcattaatgtgcagttttcatatgatattggatctgtagttggttgaagttaagttactttcatcaacgaattcaaatgtactgacaagtttcttatagcgaattgaaatgttcatgcattagtgattcgcgttagcctgctcgctcaattagtcaattagtagtttatgctgattccccggggagtggagtgtataatggtaatgcatgtgaaatcgttaagatagttaattaattaagaagcctgctatgctttttttggcattctctttcatattttctaacttttttggaaccaacaggtgaggtgagatgttggtcatggccatttctggtttgtaattgtacgagactagagtgcgatgagagtagttttatacactttaacccagtccagtatgtaagaattatgatgcatcgaccatattggggacttgaacgattaattaggttaagcaaagttgccaacgaggttaaatatttttttgtaatattgagttgaatgcagaaattgtgaacgtttatataattatgtactgttaaataggtcaactctatttgaattattatgcgtgtgtttgaaagggagtttatctagatgttaataatgacatggtgctgaaatgttctgacctacatttaaaagcaaggaaggatgaagcttgcctttcatttttactctttggtgatagctgaaatgttctagttgtcacacggttttcttgagaaaataaacgaatctttgttttgatgaagaggttatatcattgaattttaattggctgtcgtttatacttcatacaacctatggtgataactgaatttttttttaaatcttaatggctatgctgctttatgccatgatggcaacagatcatttctgaagcaggaaaaattctttcctcgtt

SEQ ID NO: 20566 - DNA, 862 bp, Glycine max
  Intron number 1 from transcript Glyma03g40790.1 (locus Gly ma03g40790) derived from phytozome v7.0 (chr-ID Gm03; pos 46446874 to 46447735 reverse strand)
gcctgattctgattcttggaagatttgtagcccgggtatgaacatatatatacacattcatgattcacgtttaatagatgattttgaattggaagaaagatttcgttacttataattataataataatgttgtttaactggaataaaattttctttaatgtaatttcttataagaaataaaaaataaatatgcatgcatgcatggctccttttgctagctaattttgttattattcttgaattatttaccataatttcatttcataatgtatgcatgtcattcctgcagccgatttcacaactattgattcgaatcaatctttgaagcaattgtactttcattttattttttttgtgaaaatagttatactttaaatttgcttcatgcattagtatttgtatctgatacgaaataatcttgaatatctcaaccccccccccccccccccaatgtatttatgaagtgtttaagcttttaaaaaatgttatgaaaatctaatatattagaaattagaaacttaaaagaaatacctttgatgaaaaataaataaaaaactgatttatagatactatatagaaactgattatttgatgataacaatgatttttattttatatgtaataatttctaaaaagatatgttcttaatttgaatttacagaattataattatatatttattatgttttatgagtttttatacatattttgatatgtatcttgcatataccatatcctatatatgctatctgtgtgcatcgtagtgatcaattcgttgatatctgtgtgcatgagtgcttaaaattttgcgttgttgcaataatttgctcgctgaatatgtatgtaggggacgaccctgaac

SEQ ID NO: 20567 - DNA, 867 bp, Glycine max
  Intron number 1 from transcript Glyma02g44490.1 (locus Gly ma02g44490) derived from phytozome v7.0 (chr-ID Gm02; pos 49059380 to 49060246 reverse strand)
catcgtcatcaacgctcccatttcctaaacctcaggttggttcttcttcttcgtgttcccgtgtttcgctttttctctctctctttctttcaatctcaaaccacagctatgatcctctttcgcggaattcggtaattcgccttgttgttggttgtgtgggggactgagaaactgcatgtttggtttcgcgttttgtgggattcaggatttcgggcctgtttggattggggaagtatgaatatcacggatcctcgagagggaatagcgtgctgatttttgaaattttgaccttgattgcgtttttctttatatataattttgacggggatgtgtgtgattttttgtattgagtgcccattgcggcaatatgttcttttttccagaaagtcgaaattttttggtgatagaaatatcgcatatcagtgttatgggggattgtggtttcatgtttggttatcaagaatttggattttttgttaagggtgggatgatcttgtgaaaatttgggagagtcatcatgtcacggcctttggaagaaagttaggttttttgtttcagtttgaccacaagcatttagaagaccatttttttccttttacttactgtgttgattaatgtagaagtggaatggcggtttttttgtcttagagttgattatttgaaaaattcggcgtgattgaatggttgaacttccgtgaaaaatggtacaggactgtgtgatacttgcactctctgttggctttttaataagtgttgtgcatccttctggtaaattcaactgaaacattctcaattttgatgctgtgacattccggtgtagagagggatccagctaacagttgtttcccgctgaaaagttgcttcccc

SEQ ID NO: 20568 - DNA, 300 bp, Glycine max
  Intron number 1 from transcript Glyma03g38190.1 (locus Gly ma03g38190) derived from phytozome v7.0 (chr-ID Gm03; pos 44586734 to 44587033)
agcttcatcacccttcttttgcatcatttatatctgtaagtagcatttgcttaccaagttaaactgcttcctgttttgtcctatctagaccgttacggttatggatctgagttttatttatattttttcactttcttctgtgcttcctcttttgtcgtttgagtatatcaaatgaaatactactattttctgctgagttttttcttttttttagtattggtctttttcggtgtagatctgatgctttcaggagaataattatcccttctaactgtttttctctcactggatctagtgttg

SEQ ID NO: 20569 - DNA, 878 bp, Glycine max
  Intron number 1 from transcript Glyma02g37610.1 (locus Gly ma02g37610) derived from phytozome v7.0 (chr-ID Gm02; pos 42986096 to 42986973)
caggtaagaacaaccctttacccaattttttttaggattaaacttaaaatagaattgaaagtaccgtctttcgatcataatttaagttaattattggtaatccgtaatctgaagctttaattttgattgtataacaattgaaaaaaaaaacttttcattacatctttgtttcttatattactattttaaaaacatagtaaaataaaaaatagtacacattgtaaaaaaaaattctataaaaatatagtatttaacttttttagggataaaaattgtaaaaacaaagagacatcctcaatattactgtgacagctagggtgctaattaaactgctaattaatgaaatgatgaaactattagctgaacattatatttaaacatcaaccagtcttagctatagtaattaaactagttcctttttttagaagaattaaattaaactagttcctgcgccttagctagagatctcttgaaaaaacttgtctatcatgcaaaattttagaagagttggagagtcaaactaacatcaacggggaggagaggataagagtcaacattgaatcattgaccacttataccaacctacaattacattattaattgttaataagaatatactccttatcacatgtatgttccaatttatattaattagtttcattatataatatgtaagaaccggagagtaatttcaaaaccaaaattttatgaagcagttgagaatgagagtattagaaactaaaaagtgtgttatcatttttcttttttcttttttcaaatgaaaattgaattttgtttactttctagtttctaccttctccattcatatcttgcataatgcaggctccacattctccgccactctcgtgcaagactct

SEQ ID NO: 20570 - DNA, 333 bp, Glycine max
  Intron number 3 from transcript Glyma03g08170.1 (locus Gly ma03g08170) derived from phytozome v7.0 (chr-ID Gm03; pos 9017939 to 9018271 reverse strand)
aagcttgcgggtaggtcacaaaaatatccatacaactatgaaaaattataacattaatgatttggataagaagacacgtgcaataaattgagagcttttgagtttctataaaagtcaattatataaattgattttagtttatgcaaaaaaaaaactcaatttattttatcttcttatattgttttttcaacttttggagaagtttatcttaacgatattgtacataaaaatataagttctatcacatgaaattgaattgaagtgagaacacctttggatatttgtgtgtgctatgaatttttaggattgcggagagtgtgggagaaggtgtaa

SEQ ID NO: 20571 - DNA, 897 bp, Glycine max
  Intron number 2 from transcript Glyma02g04800.1 (locus Gly ma02g04800) derived from phytozome v7.0 (chr-ID Gm02; pos 3931139 to 3932035 reverse strand)
gtgaactcatagttgctgacgcggaaaaggtacattgattattagtgttaaggaaaaaaagtgtcatgcttaattttgaggtaaaggaaaaagaagttgagattttaatcagttataaaagacgctggatggagaaataaaaaggatgcatcaccatcacttttaccaataattgattaatttaagtgatttatactcagtttctaactcgaacgtaattctcctaaaaaaaatcgaacgttattaccatctattaaaaaggatgatctataataagaaaaacttaaagagttcaagtaattagtctgaaaattatgaaaattacgacaagtttctgaatatgtattggtcattcaaattagtttttttttatacttagtgtttagattaatgtttgtaaatttaagtttgggttaaatttaagtttgtaaagtgagtttacaaaataatccaagtcttatttctacaaattgagtttttagtcaaaattttaatatgctaatgtattttctatgcataatcaaatatgtcactaaatagagtttactctcacgggaattaatttaattgatgaaatatttattgaataataattactattctttttactgcaactaattattatattataatattattcacttacttatctttaattattggtaatagcttttgtgtttagaaaatcgtttcttttctaagtttatccataaagatacaaacagtagcctttctaatttcagaataagttaatcctagcacttacataggtatccatttaattattctttgatttattttttacttcttgtgtacattatcatttgtgagcactcagtaatccaattaattaatgatgcagggactgctgagagtgtcaagtgaaagggagattga

SEQ ID NO: 20572 - DNA, 252 bp, Glycine max
  Intron number 1 from transcript Glyma02g04800.1 (locus Gly ma02g04800) derived from phytozome v7.0 (chr-ID Gm02; pos 3932386 to 3932637 reverse strand)
ccaacgttatctttttctgaatccttttccacgttgattcgttcataccgaacctacacgctacactacaaaataaacacatgttgctgcctattttcaattcgtagtataatatttgattatggcatcgtaattatcatatatcatattcacaacaactccatcgaaaagtactatgtacacactctcttccaatacctgaatattattattctttcttgtagccaccaccactcttctaatgtctaggtt

SEQ ID NO: 20573 - DNA, 635 bp, Glycine max
  Intron number 2 from transcript Glyma01g45080.1 (locus Gly ma01g45080) derived from phytozome v7.0 (chr-ID Gm01; pos 55501296 to 55501930 reverse strand)
gttacaattgcccccaaccaactacccgtagtgagtattcttcatgtttttacctttttctctttcatctattataagagtgtcagaaatatattctctaacatgagaaattataacatgattcaaaactatcatatcatgatccatgaatcttcatgtgatatataatcaagatatatagattgaaatcatgatagtttgacatcatgtaataattttttcttttaatctagctttgctaatatactctttattattagttagaattgattgaagactataaaatcattaggtaagatcattaaatgaagaatgagactcatacaattttgtgatttatgataaatttttagtattaataaatagtgtgttttaaaaaatgtgtctaacaagaataagtaaatattaaggtaaatattaatccgtactcttagaacatttgttaagaaactaaaagaaaaaaaatattaaaatatataaaattatcttatacttcataacttttttcactcaccaacacgcataagaatatattaataacattcatatgatagatgggttattaatattactacttgtattcttgtttttgagttctaatctaactagtagaatcatgttttacagaggattcc

SEQ ID NO: 20574 - DNA, 894 bp, Glycine max
  Intron number 2 from transcript Glyma03g32410.1 (locus Gly ma03g32410) derived from phytozome v7.0 (chr-ID Gm03; pos 40154417 to 40155310)
gttgtgtgcctttttcttttacctttttactttcaatggaattatcatgttttaaattttatttttggacaataaattcagcagtggaagtcaaggttaggggcagaacttgtaggtgcataatctaccgtcaagacctaaggcttaagtggtttattaactagcaaatatctaatgccagaccttgcagctatttctttttatgatttttctattcaagttttatatcattattgatagttagtgttttttcatcactgttcatataagagaaaaagaaacgagttttaattatctacaagaagaaactttacttttgaaagtggagtttaaagttgtaaacaactggtctagtttacatgttcctgtcaacagaatagtttattaccagcatatcaggactaatagagtagatgtgcaatgctattttggtatttctgttcactttaatttcaagtggcttgatatttagccaagcttaatatggttctcaatctttgataaaatgaataacctttgtgtgtaaataaataagtttgcgcatttaaaaattgatttcattttaacggttgactaatgcaaggagtacaactttgattttttaatttggataccatatgttttgagtcaattctgtatcactattctttccttcagttattgcaaggattaaaattgatgctgaaactgttctgttgaaggatgaattttatattactaatccaatgcttaatgtatatgtacgagtctttcaaaaattctgttttgtaatgcttttgctattgttcacgaacatgctgctattaaaccaaattatggccataccctattcattttcattttttattaccattagcagctgccttgtctgctgaagaagatcgactgtggaat

SEQ ID NO: 20575 - DNA, 1011 bp, Glycine max
  Intron number 1 from transcript Glyma01g28820.1 (locus Gly ma01g28820) derived from phytozome v7.0 (chr-ID Gm01; pos 38704161 to 38705171)
tgattctctgttctctgttttgttctgtttcgcgtgtaagttcctctgttcctcttttttccctttctaaggtattcctgttcttaaaaatatcccctttttattttattttctttaggggttgaatttcttggcttcaatttctatttggaagatgagaaaaattcaaagtttgatttttgtttttttacttttttttgtggtttatgattattgaggagttaaaaattaaagggtgatttaggaggagaaatttgcatagtttttgatgttttcatgcttttcaattttgttctctctctctctctctctctctctctctattaatttgaatttgtttacggtggcctcaaagcatgccaaggggaaggatacatatgactcggggagtttctatgcgcttctttttgtatattcttatatcataattttgataatttacactgtattttgatttctgaattttgatgaaaaaatcaacttaatgtgtgaattattctggtgctacaaaatgtcaaaaatgtgaatttctacaaggtggtttccttggtagatatgtaacatttggtcaagcatcagttaaccttaacaccataagatttctgaaactttagtttttaaccgtgccaaatgacatcgtaagattcatgtagccgagttcacctactgggataaggccttgttgttatttgtgagatcagtagtagttaaccccatagtttgtgtgtatgtgtgtgagagagaattatgctgttgctacaaattctcaaacttatcaatttctataagctggattgctaggtaaatatgtaacatttggtcagcatcagttaaacaccatatggtgcatttattataccctaattttagtggggatcctgttttttgtattgagctaatttttctgtttaacttcttgaagttctatctgtcttttgtcctcttttattggaattttctaattcctttgttttgattgctgtggattgtcttcagacaggaacttaaaca

SEQ ID NO: 20576 - DNA, 699 bp, Glycine max
  Intron number 2 from transcript Glyma05g03300.1 (locus Gly ma05g03300) derived from phytozome v7.0 (chr-ID Gm05; pos 2531272 to 2531970)
gattttgcatcaggttagacatatatcatatgtgttacatatcaattcaattttctcataccaattcctttcacagcccttaaacaaacaaattttgatttccttaactaataattaacaactaatattagtccataaaaaaataaataaggatggggaggagcacacatgaatctgatactttttatcactgtttgtatttttcgatttatttaattcaaaatatgccgcgaattgaatctagtactacaattatatctgctatgaatgtacaattggtgcgtgatcagtgttttttttttacctcctctgaggtcatggatgattgcatttatacttttttattgaaaaattacatctaccttccttatatctctattgtattttcaagggtaccatgtgtctggtttgtgaataaaaataagatgtgtagttttttaaaaatcatgagtgtcaacgtgtaaaaataataatacataaaataagaaaagtagatttaatttttaaatcaagaagagaataagtgtaattaatgctaaacttaagggatgttagtgtaattatctcttaaaaatgatatgatatacctgatgctggtggttgaagtcattttctttgatgtcttaattttcacactaaaccaatgtcacgatattcttgacagtctgaacctacatctcctaggtgtccatccactcc

SEQ ID NO: 20577 - DNA, 289 bp, Glycine max
  Intron number 3 from transcript Glyma02g07610.1 (locus Gly ma02g07610) derived from phytozome v7.0 (chr-ID Gm02; pos 5993398 to 5993686 reverse strand)
taccagattgtgtaagtatatattgacttcttcactcaacaagtaacaaactcaccttcctttttcaccaccatcttgttcccccaatacacagaaatcatattcaagaaaaattcaaataagtaatgaaacaatttatatataactactaaaattcgttactaaatttttgtggtatcaatgaagatatttttaccactaaatttgagtctctttatttttggaaatttgtctacataacattattattactactaaaagaaatccaaatgtggggtgtgcagtttct

SEQ ID NO: 20578 - DNA, 560 bp, Glycine max
  Intron number 1 from transcript Glyma04g13950.1 (locus Gly ma04g13950) derived from phytozome v7.0 (chr-ID Gm04; pos 13744654 to 13745213)
acaggtaatctacctattcatgtattataaattctatccatagcaataaacttctgactaaaatacatagaatataatggccatctgcttctttcaatcaaaaattaaattattgttcatttgtatataacgttaacttatccataattgtagatggacaaagatcaatttacaaccgaattatgcaagctgtcaacaacaacgagggcggcatgtttttcctatatggatttggaggtacaggaaaaacattcatatggagaacattgacaagttcattgagagcaaagaatcaaattgttattgtggttgcttctagtggcatagcttctctattgttgccaagaggtaggactgcacattccaaatttaagattcctgtaccaatttttgaaaactcaacatgcaacatacatcaagggagtcaattagcagaattgttaaatcagacaagtctaattatttgggatgaagcaccaatggttcacaaattttgctttgaagcacttgatcaaagcttaagagacattattacaaataaatcaagctccaatcaaatc

SEQ ID NO: 20579 - DNA, 638 bp, Glycine max
  Intron number 1 from transcript Glyma02g15190.1 (locus Gly ma02g15190) derived from phytozome v7.0 (chr-ID Gm02; pos 13699361 to 13699998)
actacctccacaactgctttgctcacaccggcgaggtaccttgcaaattctgatactttttcaataagatgcgaattagcatgattaattttaccagcttgaatgtgtttttttagtttgaataagcttgatttgtagctggaagttacttctcatgattaattaccggttacttagggtggcatctgaagttccttgatctctctctctctcttttgtgtatgtgtgtgtgtgatttgggttttgatgaactgaaattgatgctataataaagtgagttttctgtttcaaatttctatccttgggattgcgaatcgaaggaggcagtactttgggcggcctaagtggtcccctaatctgagggttcatcactgttgacctaattttcatcaaattaatacattcaagatctctcaattgtacactggaaaaaagcggctaataaaacctgtcctttttttttttttaaaaaaaaaatatttgcatcttgaagatccctcgttgacaatcagccgattcaatttacgggcatttgtgaagtttgaacctttttgcttgtgagcttccatgttgctttttgatgatgtgttgccttatatgcaggttgtttcggccaaggtcattcggaataagcaaac

SEQ ID NO: 20580 - DNA, 1048 bp, Glycine max
  Intron number 3 from transcript Glyma02g34490.1 (locus Gly ma02g34490) derived from phytozome v7.0 (chr-ID Gm02; pos 38729225 to 38730272 reverse strand)
taattgatattagacagtttgcagctgtaggccaggtgtatatgttcaaattgatgcttcagaattaggtaggaacttggctttgcaactaattattattagtctttcttcaaataaatttcttagctaggatacattttcatatgtgaatattcatgttacctttgcaaatttgtgatcaaatgagggccacaagaagggagatcaaaagttataccgaagggtgatcaaatgagggccacgagaagggttggagtcctagtggcaataacagtttctttggtcgtggctgcagttgctggaatactaataatacttggttggtgttaaagaaataaagaattcacatttttgttcccgttctcataaagaaaaatttctttgtatcgctttattaatgtttgtagtattgtattagatgaatgcatgttatttgacaaccatacaatgatttgaacaacaaaaaccatagaagtaaatagtgtataggttccactgtaactaatttggttcaccttctttggtcaacaactgcatgctaaataagaagtttgttgaattcagtttgaaataacaggacaaaaagttttatggatgttgaaaagtcatgacagacacttgttctgaattcttccttcaatggaggctatttataattgcagccaatttataaatcatattctgcgtaggaattttttgttttttcagttttgtctggataatgtgttggaaaagataaatcaaaatgaacttttaatttattatcccaaaattaacttagttaaaactgaaacactttttcatgtgtgtaatttctacttggaggtactagctctcttgtttccttaattatttttttgcatttgagggagggaaagtggaataactcatagtaggatataggaaattttcattttatcaaaagatgaaattctagtcctttcaaaaattgaaagaaatgtgctgaaatgtttatcacaatctgaaacacctacttatactatttcaaagagatcagacttcaatatcaaatcaaatcaaatcaaaa

SEQ ID NO: 20581 - DNA, 486 bp, Glycine max
  Intron number 1 from transcript Glyma03g25820.1 (locus Gly ma03g25820) derived from phytozome v7.0 (chr-ID Gm03; pos 33201354 to 33201839 reverse strand)
gcgtccaaagaggccttgtgcgtcccctttctttacaactctctattttgttacctgtttctcgatataattcatctgggtctatggaaaattgggatttttacatgaatttcgtgatatttctcggtatcttgtgcctatttctgggaattcccaagaaattttaaatggggtggtgtttttggtttctttttccttttttatgattgtttattctgaaattttgtgttttgaaaggacgtgttttctatttttggattttcagaaaatgggtccatgaatgttttggtgagtttttggtgttttgggaaattgagttttcagaagatggatttgcgatttatggattttctgtaaatgggtcgatactttgattttatgttttgaatttaaggttatgcatgtgattcgaagtttagtaatatttgactgaaaagtggttctttttcagattggcgagatcattagcagatttgagaagaaagg

SEQ ID NO: 20582 - DNA, 519 bp, Glycine max
  Intron number 2 from transcript Glyma04g38520.1 (locus Gly ma04g38520) derived from phytozome v7.0 (chr-ID Gm04; pos 44919651 to 44920169)
ataccctccacagcagaagtcaagacgtatataaggtaaatactgttgttccaccacatattagtggcatttgtggtggctatcatagagacaaacttggctgttcaaaaaaccgggagaattatgttgatatgggctatcaggagtgtcactgatttttctcatgttgtgtgtgagcaattagaattcgtgagagtggtatgtgaagttttgaatttaacatggcattaattatattcttgtactatgattcttccaaagtattttagaaactacaaattgagtatcacctgattcacctctttgatagtcacttgtgatatgtgggttgtggtagatatcaaatcggtatatttttttacagcaaatttatcacgtattgtttccagtcaacattgttcaatcttctggcatacttgaactaatagttggatgactctttgatatttgcaataaaagctgaaataccatgtctcatggttaggttgtgctggtagagatcaagtgaagataaatttg

SEQ ID NO: 20583 - DNA, 465 bp, Glycine max
  Intron number 1 from transcript Glyma02g00270.1 (locus Gly ma02g00270) derived from phytozome v7.0 (chr-ID Gm02; pos 66308 to 66772)
tggacacttcgtcgagcttctcttcgtctcaggtaactctctttcattctcatacatattttcaaaattgcgatgaataggaaatctcttctccataatcactacttccaataatccctttcatcaaactcgtaatgtaaccttcctttaacactccgacacagtagactaatcatctattctaaatacaagttttatatcactcaaagaatagcggcgatgcctcctttcttcgaccttagcatatcgatgtttatgactaaccctttatgattaatgtttaagcacagtgaaatttgcctaattttatgaattagggttttgagttcgattaggctaatgatcctctcataaactcttcattttgttcttgtttctgctcattcttttgcactgtttgtgattaatttgtgcttgctgtttattctagtacgagccaaggacttaacgcgggagctacccgtg

SEQ ID NO: 20584 - DNA, 674 bp, Glycine max
  Intron number 1 from transcript Glyma02g14520.1 (locus Gly ma02g14520) derived from phytozome v7.0 (chr-ID Gm02; pos 13144702 to 13145375 reverse strand)
gaattcggtcactcccttactctctctcatattatgttttttttttcgtcaaacattttgaaaacgaaataatcaagtaatgcttagttttattattattattattattattattattattattattattattattatttgaacttaatatgggcgtaaaaataacttagaattttatataaattatgaatttttattattattaaactgaccttagttagtgcagcttatattttttaagtgcaaattttatttgtgtttagtttaattttgatgctttattattagtaaaacaaaattgtattattaattaaataaaacatgttagtaatatatttttttaaatattcttttaaacataatctttattatgaactatgtgttagaattagatgattatgttcctaatactttttaattaaagttactctaagcattatttttaaagtaatttttataaaataaaattaaaaattatcatttataattaaaacccaccaaggttagctgggtgaaaggaaagttattaagtttgtatgatgttttatgtttaaactccattactgttattgtagataactaaaaaaatatagtactttgtttaataattaaatgatgagaagaattatgcatagatagtgtaatatattttatagaatcatctaattgcaatt

SEQ ID NO: 20585 - DNA, 387 bp, Glycine max
  Intron number 1 from transcript Glyma04g00750.1 (locus Gly ma04g00750) derived from phytozome v7.0 (chr-ID Gm04; pos 422350 to 422736)
atcaggtagcatgatcttggatatgtatctgtttcttctatgttgtcttttttttttgtgtgtgtgtatgtcagtggggggaggaattggcacaatttcatcacaatacttggattttggttacacttctagaccatgttaactattatggatctacactcatggttcaagtgacataaaatccactgtccggataagcatgctatattacaacttaatcttttagtttcattgttttagtttttacttgtcatgctggatcagtggctttgatcattatctctttccttgtctccccatttttgattttgctatgagatctaatctaaggtatttttacatttgtgtataggtgtttataagagactttgtcccaagtgctttggc

SEQ ID NO: 20586 - DNA, 607 bp, Glycine max
  Intron number 1 from transcript Glyma03g37390.1 (locus Gly ma03g37390) derived from phytozome v7.0 (chr-ID Gm03; pos 44014733 to 44015339 reverse strand)
gctggacaaccttcagctccgcaacacttggtaagaataattaaatccttaatttcttactatagttatgatttgagaaattaaacaatacactctctaaagaaaacatattttaatatactatctattaattttgtgtttttcatgtttactataaccaattcgcttccttgttagaaacttctttgccgtgaactttgacctaaaaattccaagctaaatctaactctggtcaactacttaatgaaaaagtcaaatgtacgtgagaagaaaaaaataagaattagaaagtgttactacctatttaatcacacgttacattttcattgaacgatagggaattaaggaaacaagaaatagaatataagtaaataaatttcaattcatgaaaataataccgttttaattcttgcatggctgataaaaaatccgtgcatgtaagattttatatgataaggacctttcttattttaaaagtaatgtaaaatatgacgaaagaaagttatccaaaaagaatcattttctccgaagagtactatatcatatatctgataactatatgatgaatggtgcagctgtggtagggcaaggattcgtgggtgtgaac

SEQ ID NO: 20587 - DNA, 569 bp, Glycine max
  Intron number 1 from transcript Glyma01g00670.1 (locus Gly ma01g00670) derived from phytozome v7.0 (chr-ID Gm01; pos 389552 to 390120 reverse strand)
ctcaatatctagctttcagaacatacactttttgggtcagtaaggatttatatttcagtttcccactactttccttatccgtgtcagtgtgactttaactccgtaagtttcttggcattaggtaaagacttatagtagttcatgcaattgagtgtagcaataaagttatagctctgcactatattgtcaaggtcttcctaaccagtgtccttatggcattggttatggaactaaaaggagaaaatatttattgtggaaatcataggagagcggaaaaaagatcagtgcaatttttcgcctcttaataaaaacatttatactttaagttccttaaacaatgcccttagggcactggttagcatttgcctaatgttaatgtccactctgagatgcttgaacttctatggaccaagtttacttatatctttgtgtggtaacttagctggctcatggaagaatttccattagaagcatttgatcatttaatttaacttttctcttgctttgattcccatttttctagttcctaatttaatgtggatttatcttttgtgcaaccagagatcctt

SEQ ID NO: 20588 - DNA, 831 bp, Glycine max
  Intron number 3 from transcript Glyma03g41090.1 (locus Gly ma03g41090) derived from phytozome v7.0 (chr-ID Gm03; pos 46627087 to 46627917)
actccgagggggtaggtgtgataacatgaatttgaatagttcttaacaaatttacttgttacacgaaccaggaatctccctgctattgggagtttaacacattcacgctgtggactagttgtaactgttggatgaagatcagatggatcatatttttctcttaaatcaaacttaaaatatgtaaatggaatttaaaccgctcaatcttcatccaacagtgatgattcacgactgtgtgaatgcactgaatctggttcccttgttatacccttgcttctcttactataactgcacgtaatttacttatctttacttcaacaagatccttatctttacttcaacaatatgttaaatattttaaacattatttaacaaattcctaaaatctaaattattcattttcaagctggagacatgcaaataccattatttattagagcgaaaaaggaaataaaaaataggggataatggtgtgaagacaaagatttgggtgatgtcagcattataattttgtggaagctaaagatattttcagtttttaaatgtaaaaataatgtgcaacattggggattttgtactgcggaaacatagcttaaatcttgtagttaaagtgaaagtggctggttaagtcattgtgctacagatgagtatagagccaaaattgtggagtccatttttttgctgttggaacagctaaactgatttaatcagattggtagtacatgtattgcttatccctgttctttttatgttcagcttatttttaaagagagatatctttatattgtcctttaaaagttgattgttcattgcagaacaaaataaccttag

SEQ ID NO: 20589 - DNA, 640 bp, Glycine max
  Intron number 1 from transcript Glyma02g08120.1 (locus Gly ma02g08120) derived from phytozome v7.0 (chr-ID Gm02; pos 6360431 to 6361070 reverse strand)
cttcatccttgtttactgcactgctggaatctccggtgtgttatcacttttcaatctcatagacacccttttaatttgcttgcgtggacttcaatctcttttgttggattggcttggtttcctttctatattctgatttcttagcatccaaagagggaaagttgctttcttagaactctaatttaaggttttaaattgcggtcgcgctgttatggtttcgtggcagtccttgatgttgcgggaaattgcagacaaatatgaccaatgtggcaatgtggttgcaattgaccaaaattatggtcgcagactgttcttaaaatcttagattgttgtagaaatatcaagcatacccccatttaggcaattagcattctcggtttggttttgagtgcttatgaaatgatataatggtgttcgtcaaatttaactggcctttcatgtttaataattccccttttctctcaagtttctaagcctccaaactgaggaagctggtgcatttgtgcttcttttcttggttggaagtaaacaaatatccatggcttgatttgtttgcaaattttggtttcctattctgaaaactgtaatttttctatccaatgtagggggtcacataaacccagcagtgacatttgggctc

SEQ ID NO: 20590 - DNA, 553 bp, Glycine max
  Intron number 3 from transcript Glyma01g23760.2 (locus Gly ma01g23760) derived from phytozome v7.0 (chr-ID Gm01; pos 30705409 to 30705961 reverse strand)
gtggatttcaggaacgtgatcagaaatatctttaagtgggtttttgtttttctaactaatatgctgataacattgagttttatacaatgtgttctttgatgttttttggagagagaaaatgtttggaacttggaatattctttattgtgcgtgacatcttccctacaactggactaataaatcaccatgggctacagagatatgcttaaattcaccttcattgctgtgctacttgtcttgattctgttacggggaggagagatttttcaataaaaacttgtttgaatggctgatataataatttacctcaattgacaaaatacatgtttaaattaagcttgattgttgcaatacctgtctcttgatttgtcttatggtgttatacagaagggagagagaggggagggggtaggtcttggggaggacggattttcagtcaaattgtattcaataagcattgattgtatcttgatttcatccattgatgactatttagaacttttaataatcatttgttggttcatttgcagttacaaccccaataaatttgttg

SEQ ID NO: 20591 - DNA, 493 bp, Glycine max
  Intron number 1 from transcript Glyma03g36140.1 (locus Gly ma03g36140) derived from phytozome v7.0 (chr-ID Gm03; pos 43164541 to 43165033 reverse strand)
actccttcttcagtttctacaactgagtttcatatgttagtactgctctcctttgtttcttctccttcttggagtttacggttattgtcaactcactctatatatggagcttgacttttctgttttttggtgtgtgtgtgtggtattttttgagagtattttgtttttgtggttcttctagtggtgtacttggtttatgtatctgggttttgtattatgtatgtagcttcatttctggtttactgtttgtacttttctgttggtatagttgttgggctgtgcttttctttgattgtaattcccatcttacttttgtctccttctaattatcttcacttttatgtcccgctttcaagctaaagtcttcagttttattattgctttggctttctagattggtcttattaacttattattattattgattattgataaggcatggaaattgaaatttgtgttttgatgtatatttcaattcagctcctttctattg

SEQ ID NO: 20592 - DNA, 627 bp, Glycine max
  Intron number 1 from transcript Glyma04g43400.1 (locus Gly ma04g43400) derived from phytozome v7.0 (chr-ID Gm04; pos 48984184 to 48984810 reverse strand)
aaggtaatattttcatgtttttgattatcagtagttgactgaccattcttgttgttctaatttacatttatttttactttgaacatgtaatttgtcatatgagattttaagtggatcattatatgctgtttttactagtatcaagtgtgaacaaattctttccagaaatggtgttgtagtatcactttatatttcttctattttgaaggtggtcagtaaaacaaatatctactatatgaactgttcggcaaacataatgttaagatggtaattgatgctaggacaatgagcaatcaaaccacttcattttccagtcctgtaggaagaaacgaaatagtaggaagaaacgaaatactaggattttctatgcattgtataaacatggcaaactgaagaacttcatcaaacaactgatgtttcatctttgtgcagagaatacattttgcatgttctactttccaatttctcgtcagtgttacagcctaaaacaaaagtgcctataagcattgttttgtaaacttttaaaatggataataacgaatttatacttctgctgtaattataatacttgtatttttcttattcttgaccaatgtgctgcttttgtttccttcaggcatctcaggc

SEQ ID NO: 20593 - DNA, 692 bp, Glycine max
  Intron number 3 from transcript Glyma01g07100.1 (locus Gly ma01g07100) derived from phytozome v7.0 (chr-ID Gm01; pos 7646716 to 7647407)
tgtttacccctcaagtcctaggtatgttttgtttctttataatagatcttgctttatatacatatatactaatcctcaatgattgcttaattctctgaaattaaagatttttttttacactggtgataagttgttggctgcttccatggtgtattcaacccaatttttccatttacagactatgaaggtgaccttgtccttgttttttcccattgaagttagcttttcataaccaatttgcctactttgctttggtgcccttagagggagggctttggttagattcaacttggattagatcatctgcaaaagcaacctatgatattttttcttggtacaacatacttttagtttttttgaatcaatactttagtttacattagacgaaagccaaaagaccaatttttggggttcatgtatccaccgcctgaataatcagatttacccacgaaccatgacatcatgattgccctttatacattagctgccatgattatgatgttccataattatttttgttttgtccacttcattcccacaaacttgatccttgatctatgatcataaaatatttaatgaaactatttctatgattagcatatagtttatgttacaaattattaatatactactatagtctatgtgaagaatacaacttataagccgatttcatttggcttccacttgcagca

SEQ ID NO: 20594 - DNA, 875 bp, Glycine max
  Intron number 3 from transcript Glyma04g36940.1 (locus Gly ma04g36940) derived from phytozome v7.0 (chr-ID Gm04; pos 43435910 to 43436784 reverse strand)
atagtccttgtctcaaactcaagcctgtcaccaaggtaacaaaactgccatattttagtccctggagttgtgggtctgtcataaagaaaaaatgttgatacgctgtcaatagcagtctctgtcaaataaatacctgaaagaaaaatgtcatatgaacacctaatatgctatttgacaccaagagagggagaaaaaagagaaaaaaatataggtattataggatttatgatgtgataggaagagagaaataagaaatattagagaggtgtttaaaataatgaggcatttgtgtatcattactctatctgaaattgtaatttgtttaagagtttaatggtgaatacactatcatgcaccatccgatcacaaatcactgttatattgatagtggtttgtgattgattgacagtgttaaattcttttacaatgtcagtgtatagaccttttctctttgtttaatcaaataaatttaaaataaatcacttattatcattttgattcctaaacatatgttaatattatcactttaagtccaacatcccagaaattgtaatttgtttaatctgagtccttaaatttaataatttattatcttggttcctaaacatatgtttatgttatcacttagtcacactgactcacacacagtttcaggatttttttagattttttattttattcggagactaatgtaacagtgcccaccaacttcgaagatgaaagtggttgtttatgacactaaatttgaatttataattcatgtattgaattttgaatttgaatatgttattatatgtatgtaatgtaagtgatgtttaattagtgaggtgttttatgcaggttgttaaggctgggattttggaggttggtgtcca

SEQ ID NO: 20595 - DNA, 1023 bp, Glycine max
  Intron number 1 from transcript Glyma01g35970.1 (locus Gly ma01g35970) derived from phytozome v7.0 (chr-ID Gm01; pos 48419428 to 48420450)
cctcgcccaaccagaggtttgtttcttcatttcctattgttagatttaattaacaattgtttctcatgattcaaaacaaaaaggtaaaaaagtgggaaacgatggctcaacttggtatttttatgtcgacatattttttttatcgataaatatgttaataattagtaatgttagtttttgttagtacagattcaaacttgtcatctcttcttttcttcatttctctttttattattagtcctaccttatatctcaatatttatttatataatatttttttataaaattactttccctatctttttttatatataattatgcacttactttgttttccatttttctctcttcttctactatttaatttctaattttaaaatgatttaagtaaaatatgaacatgtctcattttattttagtttgtacttgtagtccctaaaaaagtttgactcatctgactcctaaaatattttctttcaataagtgtttatcatgtcataactataatagcctgtgataatttaaaaatgtaaacaaaatggattagatcaatcgatctccattcttcaaattagttttaactatagagaagaaataacatgtatatataccattatgcatcattgatttaggaggcgtctaaagaacataactacaaaaaaacttatttaaatctatgaaaacaaataaatttatttaataattatagccaaatttgttatatataaatattcaccaataaatgtttattaagtaattatttaattaaagtgtttattcaactctactcaaccgcattcatagtactgcaaaaggtgctacgtacagatctacccatcattttttttataaagatatattcatcattctattacttacagttcgtggttttgatatttggtatagtttataagacgaatatttcttacttagttcccacaaacggacaacttcacttattggcttttttgaagtgtgaacggttgttgattttgaccattactaggcaaatagtggaggcat

SEQ ID NO: 20596 - DNA, 733 bp, Glycine max
  Intron number 1 from transcript Glyma03g37670.1 (locus Gly ma03g37670) derived from phytozome v7.0 (chr-ID Gm03; pos 44204485 to 44205217)
cgtcgcgccagagtccagacatagcgtcgtgaacagtgagaaaacttatctttcgttttttttattatcattgttatgcactgcactgtgttattttgggtgtttaactttcgagttttcctcacaaagcgtagaagtatggagggtcaccagtttttcaggatgtccattgaacagtgaaccccaattgtagttctgaagtcagaacttattaccactcatttactgataaaataattagagttttatgttcttggaattcatcccattgatataatgggccttgactagtttggttttataaaccattatatagctaatgtcttccttatgacataagttcgtcttaggcggcgcttatgcttcattattagatttgtgatgtaatactgaattgctacagataatcgagagtgaaaaccaattgcccctcgtggttaatggtttattgacgatagtgaaataatctgtcatataattgtagtgttgtcatgtaataattatcaattatcatgctaatgggaatgtaatgaagcatgtttcaaatgaaggcaagttgaactcaaagtgattgctaaccagatttttgttcccatttatctcgagaaaagcaagcctcttgattgtgagtgatgcttgtcttttgatttacatgcatgcatctagcttcattagcttttttgttttttttttatcaggaatcataatcagaagcacttatatctcccattgg

SEQ ID NO: 20597 - DNA, 592 bp, Glycine max
  Intron number 3 from transcript Glyma03g37670.1 (locus Gly ma03g37670) derived from phytozome v7.0 (chr-ID Gm03; pos 44205606 to 44206197)
gggctccaacctatacggtatgaattcatgggttgtttttggacttgttgtcctacatttttacttctgttggccacatagtttgactttatttttaactttattagtagaaaaattgcccacccaaagtttaatccttaaattttgattaatgggcacaaaaatgttgatacagtattgggttataatgagttactttcagtatattggaacctgcaaaatgattgtattaaggtcatgtttggataaacttctcactaaataattatagaagaaaataagaaagtaaaatgaattaaacttctataagttaaaatcaacttatgcacttcaacttttatagaagttctctcatctatcttctccgaaagttaaggtgcataagttgattttgagttatggaagaagtttgatattttcttatactttttatttttttctcttataagtgcctattgaaaactttatccaaacagagcctgaatcactgtttttggtttgatggaaaaagtgacgaactgacgctgtatgtgattgtttctaagcaataactaaattgtaatatttctggcaggttgtgttcaatttgatt

SEQ ID NO: 20598 - DNA, 939 bp, Glycine max
  Intron number 2 from transcript Glyma02g03770.1 (locus Gly ma02g03770) derived from phytozome v7.0 (chr-ID Gm02; pos 3005990 to 3006928)
ctcgtgatcaacatcagtggcttcatctccctaaggtaatatatgattttcctttttttttcttccctttatttagctcacttttattttattttattataaccccatatatataatttctctctgatgcaccaagaagctcctgtttcagtttagaatctgagtatttgaccaatttgattgcgtcttgttttgatcctttttggcactgagagagaatgggttaagagttttctccgttttgtacatgtgtatgttctcttgtctgtaaaaaaactatggaacgtggactttgaaaatgttcaaattggaacatctaattttcttcttttaatctaagctagtctgtctagatctacctctcatttgaattgtgcttgctatcttggtttaatatttttagcctaattatgtgttaagcaagtgttaaattgctagaaagtagaaactatgcaaacgctttgagttttcatttcctgctgccatctatatgagtatgactctgcagtttttaacatgatcttgagctgcaaaacttgaaataattgaagcatggtttctctccttagaaaggcaatacatgtgatttgcacatttaagtttttttcatttgttgtcaacattgatgtcagagtcaagatttttttaagcataatttaatgttttagcagcacctactattttgctttgatgttttttaactatccaaaccccttctaatgcaatcttactttgaagttgaaccctgcttattggacttcaaccttgtttggcaattgaatggaaacacgttccttctattgaaaaaataataatttaatttgcttcttgtcaataagtaatccacttgttgtcaattttcttgtcacttgataaatgacatttcatatttactattcatcagattatcccctttggcacttcaagtactaccaatat

SEQ ID NO: 20599 - DNA, 527 bp, Glycine max
  Intron number 2 from transcript Glyma02g06370.1 (locus Gly ma02g06370) derived from phytozome v7.0 (chr-ID Gm02; pos 5059924 to 5060450 reverse strand)
agagtgaacaacagtctaaattggcagcaaggaaggtatgatactgttctttgtttttgtcatttatttctccatcatcctgttcttattaatgttttttttctcaaatggaggctctggtgaaccaaaccatttgtggtagcttggttttgaaactattattcctgtttttggagtagagctcttaaatcatttggctggatggttttaactctttacatgtgtttaatatccatcctcaaattattttcttcagttagtgttgtgcagctcattctgaaaaatttacattattttttaaaattttctattttccccctttcggtatgcttgtattatccaaaagcttggcttcccagccaaatttaaggtactgcattctgctctttctcaatctttgctggaactgtttaatccatgtttgctgttcttttctcactgtaactatgtagtgtttgattactaattggttccttgggtattatgctttaggatttcaaaattcagatcattgtcggctcttgtga

SEQ ID NO: 20600 - DNA, 739 bp, Glycine max
  Intron number 1 from transcript Glyma02g06370.1 (locus Gly ma02g06370) derived from phytozome v7.0 (chr-ID Gm02; pos 5060432 to 5061170 reverse strand)
aaacaacagcacttatttttgcttctggcaaggtatgctcctttgctgcactgctatggctatcttttagatgatagtagtgcattttgttatttttaatgctgtcctcaaatttgtagttgtgtgattctcttgttgaattctgtttggtatctcttctcttctattttaattaactatgtttatcaaatcaattgacaaactggtgttaattagaaactctataaaagtcaggcttgtctttacctttagtatatcattgtaggtgctagtaatgaggttgccaacatagttgtcacttgtcagaattccatgaatcatttgattctatatagctgatgagagacaaatcatggagcaacctcaattgcccaatcagtaatttatgtaaaattaaaataaggaagatattctctttctaaacatatttttacagttttatttagtggaaaactatatattttctcttgttttaataattgagcatgaaccttgcaatttataatatctttcccattcatgaattagattctggtctatgattcacagtttgccaaccatggttgcaaaagtagaaatttgtcttttctgctttctgttatggccctaatttttctattacaaaaccaaattaatacggtacccttcttgtaaagtgcttctcttatgaactttaaatttaattttttatgactattgactaggtttgtactggagctaagagtgaacaacagtctaa

SEQ ID NO: 20601 - DNA, 642 bp, Glycine max
  Intron number 2 from transcript Glyma04g40540.1 (locus Gly ma04g40540) derived from phytozome v7.0 (chr-ID Gm04; pos 46562224 to 46562865 reverse strand)
acgcccaaggtcctcctctgttccttccttctcgtatcgttaatttcataatcacaatgttttctgttttgtatttctttttttttatgtatcactgttaatattgattaatggatttacatatatagatttacatctgagaaatgttaactatttagccttgttgtagaaaatgaacttgatatgtttactctatttggctaatatttctgtgcttatgattcttatataattttgatatttctctcaatgagaaaaacgatgagtttacatgcactgacagtttaaaaaataaccaatatgaaatcattgttaactaatactataatttttaagctacttattataaaagtttacaaacttagtatacatgatagtatttctcgttggtttgttgagactgtaaaatatctttacactgtcagtacatatgttatttattcaaaaagggattgtgctatgcagttgtctattgatttgtagtgttacgggtgttagggttttacctgaagaaaaatgcaatgtacatcttttaattgttcgtcttctattgcaacaccatatctgtttatctgttttcttggactaaatggattttaagatgcaggtgctgctgagggtgggaagcagagcagaagtgag

SEQ ID NO: 20602 - DNA, 963 bp, Glycine max
  Intron number 3 from transcript Glyma02g36370.1 (locus Gly ma02g36370) derived from phytozome v7.0 (chr-ID Gm02; pos 41826940 to 41827902)
aaaggacaaaatattgcctcacatccaaggtttattccatcactgagtgttgcttgacttcacaagttaaaattcattaataactgacttgtcacaactttttgttataaaatatacattttaacatgtaaaaggttttcttaggtgtgaatttcaggacaataagtgggtaaaagaattctcacatttagggggggtggggtgatggggtagggactttataagaaaaaagacccatgaagaacagttgcttttaagaaatggtatggaagcaataaatagtaatatcaaagagagaaggaatgctttcctatactcttgtatagcatgtattggtagagaaagtaccaaaaaataatcaggaagtcaaggttaaatacactttatccattaaaatgcactagggaatcatattcttgttcaccagagaagttctctgcttctagttcaagattttccttaatgaagggttttgcctttgacgcacattttgattaactggtgtctggtgtcaacgtataagaataatttataaaataaacaagggagataagtgtaatttttcaattaagaaagttataagtataactagtccaaacatcaagggaggtcaatgtaattggctcttatgacaaataaagcagtccctgctttctagagagtggacagcatagattatagtaattccagaacagatagtcagctacatctggaaaatctatattttattaagttacaattacaaacaaacacaatatcaaaaccctgagttcataaagtagtgtaatctctccatcacattgtattatcttagtaacttctaattagcatattaaatgatcatatgatgaggtgaaatgccaagtgttaacatgtttttcagatttggtttttgatgtgatctaagaaagtttcatttgattttcagattccactaggagtgattttagccattccaccttt

SEQ ID NO: 20603 - DNA, 1032 bp, Glycine max
  Intron number 1 from transcript Glyma02g14740.1 (locus Gly ma02g14740) derived from phytozome v7.0 (chr-ID Gm02; pos 13294410 to 13295441 reverse strand)
ttgacaagctcgaaaaaattcgagtcctttcacaggttctgatttttcttttcttttttcttttcacttaaaataattgtttttgggtttttaatcaataccccacttttttttttggtgttttctttaatgggttttgcttctttaccttttcctagaatgattggagtatgctcttaatgattttaacttgattttgtgaattttcggtgatggggttctaatttcttttttcttgttatctttgttcttgtcgttgtgatttcatcactgttttatcaattagtctttggttttgttcggttgtggagaaaatgggcgaaggttgaaacatgacatgcgtaatgcgcatgcatgtggggttcttgttttatgcaaagactcaaataatgacggagctaaacctcttatgctggaaatttaattgcttttttagttagtttttgggttcctcatgttacgaatggaatcttcaatattccttgttcagtttggaaattcaattgctttgtatcagttacagtttttgcctttagtgaatcatcattttggttcgtgaaagtgtaatgcattgtcacataaattcatccttgaaattaaagaaatttctaataagtctctagaattcattaagtccttaaacataactacttattgccattttggcccctaaacatttattaatattatcattaattcacaattttcttatatttttggactaatgtgatagacagattgtattttcaggaacttatttaaaatttccttagttttagcttttagctagggactatatgtaagaactaatgtaacagactcaaatggtggtttactcttttttttcctaacaagcaacagtgctaacaagaaatgtagcgtgtcatccaatcatgaattgccatataattgaaaaattgacctttattcatgtgtgatttcgttggtaattggttaacagtgtaacaatctttatcgctgggagttgaaaattccttaagagtttgttttggtatttagagtgcttgtaat

SEQ ID NO: 20604 - DNA, 793 bp, Glycine max
  Intron number 3 from transcript Glyma01g04050.1 (locus Gly ma01g04050) derived from phytozome v7.0 (chr-ID Gm01; pos 3524919 to 3525711)
ccagctttcacttttatacttgctctcatttttaggtaattttttttttctattgatgtactaatgtgactttgtacaactcaaattgtaaataataggatcttgaggatgcttgtttcttgaaaattttggagtctggtgcttaattagcctttaaccaaaccagtaggaaatatttttcttcataaaaccaacagtcgatgtcatcattaatttggttttatttagaaggattttgagatatgttgtgttatcttcacacatgaaaaacgtctctcaagaaacaaatggtagttcagtttcgtaactttccttttgttttatttgaaatattttggattttatttctgcgaaaaggaagaaggaagaaggagacaaaaagactttcaaagaagtggtcaagtaaaatttcacaatacaaaatgtttttaaaactttggtttataacatctccaaatagcatcatgtgatccgtttaacttacctaattcagtgaaatgtaactttgctgttactgttttagattgctatttgctattgggacagcattaaaaaattagagaaatcatggagaattattctttttttattctttatctattttgaagacaatcaataaatagattcatatcaagacctcagcaaaattaaatcgattgaatcctagttaaacaatatggaactatcctttcttaatttatgtcaaacttctaaattctaattgcacttaatttatgccaaacttctaattgcagtgttctttattaataatatctcaatttaatggtttagg

SEQ ID NO: 20605 - DNA, 579 bp, Glycine max
  Intron number 1 from transcript Glyma02g07390.1 (locus Gly ma02g07390) derived from phytozome v7.0 (chr-ID Gm02; pos 5884047 to 5884625 reverse strand)
ccacctcgaccacgccgccgcctgcggcagctactgtgagcattttccccctttacgttgtggatgtgaccaaaatttcataaaaaaagggaattttcggaggatttgattgaatggttttgctgtttcttttttttttttggcggggtttgattaaatggttttgccgatttctgagttcgttggatttttggtgttgagtttctggaggaaagttttgagttgcatcactttagtgaaatatatatatgggtttcgtagatttttttatttttccttttaatttttttttctaaataggagggtgagtttataattatggtcttgtatttctattgtatttggccaatttaagtaattttgataccattatgagctatgagtaagctaatcaaattttctaatactgatttcatatccaattttgtattcttcttcacatttgtctgtgcagttggattaagcatcattctcacccattttgttttgtgtgaaactatgaattgattacattctcagtgtttatttatttattaaaatttaggtcagttttcacttgtaatttgtcaactcagcata

SEQ ID NO: 20606 - DNA, 1062 bp, Glycine max
  Intron number 2 from transcript Glyma02g37090.1 (locus Gly ma02g37090) derived from phytozome v7.0 (chr-ID Gm02; pos 42424624 to 42425685 reverse strand)
cattgaagcaccccaacattattagattcaaagaggttagtaaaagtaaactcatgctcctaataatgagttaaagaatgtcttttattttcagctaaatgataaaattctgcaaaatagtagattcgtttttggtcttgaagactcctactatttggaccacctttctgttttgttaatccgtgcttatatgctcatctaatttttagatgttatttttttaagcctttcttgtttaatttacggtccaaggtctttaacttgcagtcgcgatcatggttttgttgtgtttcttgaaattgcgggaaataacaggttgcaaacactaaaaaaaaccttgactttgtggctaaaatctcagttgcaaaccttttcaaaaccttgttcctgtctattttctattgtgaaatatttctttgccaatttttcttattggcactatatgagcatgtggatattgccagaaaaaaaagtttaacatgtgaaatgtgagatgtagagactagagaatgtgtgtggtggtggtggaaagtagttaccactttcatggaagataggaacttgggaagttagctttgggaacactcattatgactttgaatattggtctaattttatattttggtctcctactttgttattctaccttttactgaagtgggctgagaatcagaattgaacttagaataatacaaaggtccccgcatcaaacttattcggatgaatttatcaaaatattttttttttctcatgatgtattttatttcgaaggtgcgattagaaaaaaaccattcatgaaattccttcttatatttcatttttcactaattttctgttttctcctttccttgcttggtagttggtagttttctgttcttccctttgaataaatttttatttatgatgaaccatgtactatttattttatcaatgcaaacatgctttcattggaataatattccaaccagtttcaaaaagaaggaaaaaagatcctttgtgtgagctttgatgatgattctacttgcaggtcctgttgacaccaactcatttagccatagtaat

SEQ ID NO: 20607 - DNA, 356 bp, Glycine max
  Intron number 2 from transcript Glyma03g29090.1 (locus Gly ma03g29090) derived from phytozome v7.0 (chr-ID Gm03; pos 37039065 to 37039420)
ctcttctgtttctactggtaagtattattcctgttccttttccttctacaatttttttttctttgcttgtgttgtttgttttttacgtggattacccaacataataattgataaagggtaatcatatccattttccttggtttagtttatagctaacaaaattaacttggcaaagtaatggaattggtgtgtttgactaaagttgttgttttttattgattggctttaacttttaatatttgacttattttttaataataaattttagaaatttaagtttgttttgttgtttgacttgtttccgtgttatttgctcctaataatgttttgtgcttctttgatgtttcaggaactat

SEQ ID NO: 20608 - DNA, 760 bp, Glycine max
  Intron number 1 from transcript Glyma02g12870.1 (locus Gly ma02g12870) derived from phytozome v7.0 (chr-ID Gm02; pos 11137111 to 11137870 reverse strand)
cactccctctcccttccttccatcccaaccacaaggtaagttctgcttcgttttttttccccctttctttctcttgcttcctccccctttgatttgatttgcgtttctgggtagcaagtgagtttttttcctcctacccatttcgagtttccttgttgcctttcgatttcgccttctgggtatttttgtttcgaactcaaatgccacctattgtaacttttttttatgatttgtgcatgattgggaggaattgttttttgtgaattgttggtgtgtggatctgttgttttggctggtttcgtgtgaattgtgtcgttagatctgattgctaaatatattatgcggaaatttggattccacaatttgtctcttgtttcgtatatgtttttgtgtttgcatgtgtgtgagttatcgaacatttcaatgatttatttatccgtttgcattttccttgccaatattctctggatctgtttgtctttttatgattgctttacttggaaattatagatcttgttttccctgtgactatactcttgatttttcgaaattcgcttttgatgcaatgttgtatgtgtggatattagatgaattttgttgtttggtgtttcaattgtttagttttggatcttgatatggttggttaccttgttgactggtaatgaacattttgagggtgaattaggcaatttgcattgtcgatgtgttgttttgagtttaggccttttgtgttacgcaggttgctgagaagacataaaaa

SEQ ID NO: 20609 - DNA, 328 bp, Glycine max
  Intron number 1 from transcript Glyma01g41910.2 (locus Gly ma01g41910) derived from phytozome v7.0 (chr-ID Gm01; pos 53272382 to 53272709)
tccgtttctctgaaaagaagtttatcataaacacggtaggtagaagatgatcatcgcacttattagggtactctttttcactttacatataagattttgttttccgatggttattccccatctgcttcttgtttttgtctaattatttgctggcttcgtgttgctcaagtttaatttttgtcgttttatgtattagtttttttagataaaatgattgattatcgattttgattttttgagtgattgccgaattatcttttctttgtcagacaatggatattttatttttcattttaattgaattttgttaatcataccttcagttgga

SEQ ID NO: 20610 - DNA, 585 bp, Glycine max
  Intron number 2 from transcript Glyma05g02520.1 (locus Gly ma05g02520) derived from phytozome v7.0 (chr-ID Gm05; pos 1893291 to 1893875)
cgcatagggtaagttaataacaatactttttcggcctcaattgttcatctggagtagtccttttataagttaactcaataacataaaagaagataattaagaatagccatttgggcatgattaggatctggtggaaattagggtgacaatgataagttccaccactcatttaagatgtaaagatctgatatagtcttacataatttttcaatcatgttttttgtttttatggcaaatgttagtgtgttagaaagggattcaaatccatgacctttcccttctcccttaaccatccaacccatcttatgtctctcatttttcaatcttgtgtgttattgcatcattaaaatatgtttcatttaagccttttgactatgataacattaatccaataatgctcatcttagaaattgaacagtttaatgacgaagtaaaacatgatacatgcttgaatttaccatagtgcataagattttatcaaaacttagctgaaacgtgatagattgattgcataataaatttcttataagtttttgcatatactttgtaggtgggctattgtcaaagataaagaggtagcaaaga

SEQ ID NO: 20611 - DNA, 1036 bp, Glycine max
  Intron number 1 from transcript Glyma03g39920.1 (locus Gly ma03g39920) derived from phytozome v7.0 (chr-ID Gm03; pos 45832809 to 45833844 reverse strand)
ttcttctggattgcgtggagctattcgattggtatgtctgttgtcgtagtttccaattacttactacttacatgatcttcatttttctcaatcctagcatgtcgcggaattactttattattaaagcttctggagatgaattgaaattcaaaagagaaatggattggaacagaaatttatcttttattcttgcattctggttttcatctttgatctaataactgtgagcttggttaaaattggactgcctaacacgttttatatctgtaagatgctgtgacttactttttttcatcgtcagaatactcaaatgtaaagcattgtttgccacttttcatgtttttatataatcagttttggtaacatgttatgtttctgaatttggaaggaaacgagatacaaatgaaagcttatgtgaatttttaaaatacaagataaggaaaactataggtgttcataattttgcaaagtaggttgtatttttgacagagtgatatggttttgtcttaataataactaagtaataaatatgacaacaagaaaactggtcaaaatttaataaatcggcacaggataccttcacatggtgactgactacttccaaaatgcactggggatgatggaatggtttcttgagagtgtacatcactgaaaagaatgaaagtgatccaatattggtgggcttaacaagattgatgcctttgttattaaacattgatgagcttaacctgctaatccttttttccttttaaccatccacaaaggggggtgggggataggcaattgatccctttgttggtaaacattgagtcaagtgtagccagaaacatttcaagattttgatataagatcaaaattattttttatttttttatttgattcttgaaagataaattagattaacagttgttgtgaaagacatgatcattccttttatttgataataactatttaattttgttcaataatatttcacataactcttaaaaaaatgattcactacaatgtagccaatcattcttgtgtaaaaaacaat

SEQ ID NO: 20612 - DNA, 521 bp, Glycine max
  Intron number 1 from transcript Glyma03g16140.1 (locus Gly ma03g16140) derived from phytozome v7.0 (chr-ID Gm03; pos 20489597 to 20490117)
cctgaccttatcagttgagtgctcatgcatgctatatgttattaattttgccgtagaattatgtttttgattccttccaaaattttcaaagttcaattttagtttctttaaaagtgttttttttttctttcatttttctccctccaaaatgtttatcttttgttcttcaaaatgcatttacttttgaggctcaaaaagtgttttagataatactttatagagggtgaaaacaatttagatagtaagtgagataaaaaagtaaacatttcaaaattagaggggttaaaattggaaattttagaaggatcagaagcaaatttaattcttgattttttttgtaacctcattttatagttatttttagttgctttcttcttaacattttgttttaatttatacctatatgtgagcatttttaatccgcgggtatatagataaactgtttaatcttttaagccatgcatataaaccgtgtcatgtatgtaggtgagaaaattggctcagaacccacattaccatat

SEQ ID NO: 20613 - DNA, 956 bp, Glycine max
  Intron number 2 from transcript Glyma02g41610.1 (locus Gly ma02g41610) derived from phytozome v7.0 (chr-ID Gm02; pos 46680580 to 46681535 reverse strand)
tgattccggtatatttttatgttatttactgaattaaagtattatatatgtcaatgaaatgagtttgtcatttctgttgtagattattgtaatatcatccacctgcatatggttaaatttgtaaataggatctcgttttttattatcaccattgtaattatagtagggggtttttttggtgaattgtaattatagtagttaatattattaatctgcttgaagttactctcgagcctgacagattgttgtctttatgggcaaaggttgataatgtgatgaagacaattattttattttgacattatatgcctttattaagtgacagttgcatgtgttgtatcaatgttgttttgaaaggatatttttgtatcaatgtacctcatttgctctttgctatagtagctgattacccagtactatatcagcaataatagtgttaatatgtataattatttttcaagatggcttggtaattaataacaattattcattcatatgtactgcataatacatataaaggaaattctccttatggtccttttagaagtttgaagtagataaagtaaaaaattgtaaacgtaaccttgttaaatagagtgcggctgttgaaaccaaaacttgttgctacttttatagaggatatgcccttatagggaaaaaaataagtattaacatttaaaataaccataaaaataaatgtagaaatttaatttcttttaaatattgaaataaatgaaaagaaatccaccgtacatgtgattgtgcatattggggaggccagtatgtaataatggcaagttgtgattagttctgacaacaggaatattcaaatatatattgtctttagcaatcttgtcttctagataatattagagttccaaaaataggatcaaaataaaatcaaccaagtgtgttggagtgttgaaattatttgtttgggtatttccagtttgtag

SEQ ID NO: 20614 - DNA, 734 bp, Glycine max
  Intron number 2 from transcript Glyma04g42830.1 (locus Gly ma04g42830) derived from phytozome v7.0 (chr-ID Gm04; pos 48474618 to 48475351 reverse strand)
ccattggagcaaagtaagtttaagtaatctgtgcccttatttactgtttagtgttgaggaaggttagtgttttagtgatattcactgcatacatttcttctataatagatttcacattgatattattatgcttttttttagctggagattggagactaccagcatctgcaaatctgaacaattttgctctactataatcagttcttgctatttatgctactctagaatcagatattagattaagtttttaaaatttctatgcctaataagtgaaacagagtggcccaactgtctacaactaagtacttggtgcgttgaatgctttatttcttttcaaactataatatgctggaaaaaaatatttcaccattttattatgagatttagggtaccccctccccgtgcccaaaagggttgctaaatcctgataagtgataattaaggttgatgcatatactgatttgacagtaaagcaataaataaattgtttgattcactctctttgatgcacactgcactctttgtatcctttaatctaatattttttccttcaagatttcttctatcttggaagtgcattttatccaacttctgcccctttaatcattagaataatcttaattttgttttttttttatctaagccatgtatttgtgataataataactttgttttgattttatatttttggtacgacagggaacttgcaaaagattttgtagtggctggcactg

SEQ ID NO: 20615 - DNA, 1024 bp, Glycine max
  Intron number 2 from transcript Glyma02g42270.1 (locus Gly ma02g42270) derived from phytozome v7.0 (chr-ID Gm02; pos 47332858 to 47333881 reverse strand)
tgagggaagttagcgaacagattgccaagtacaaggtcaagtaacatgctctgtgtttcttatgtttaataatattctacattactgctatgtaattgtgaggttgctatgtaagtaaagggatcttggttgtagtagtttgatccttgttttgcaatctttccatgatatctatgtttaagtgatgacaattttactccacaactgatagtcaagcttattaaaaaaaactaacacacacacaaaaaatgtgtaactaaatacacatctcctgggagtttctttttagtctttaattgtactgcagtttcttgcaggacaatgatatatgtggaggaacccctatctttgtatgacacacttgcgattcttttttccattcaccggaaaaaaaaaggcttttgacctaagttgattgtctgagtgagattatcaatcacaatttaggtgatagcattaggagtcatgtagcagagaagccatgttattacaactaagttttgtatgttgctaagttaacacacttgggtctgcaagaaagacgacttcacttctcaatgtggcaatgcctcactaagggtgtctttccaaaaccattctctgttcaacgtgaatatatcaattttctttagtcacattcaatttctcggaatgtgggaaatggagggtggaacacctaaacaaacagactaaagcatttttctgtcactttttgttgattctacagtatattctacacgttaagatttagctacatcatttgctaacctcatttattatttgcaagttagattagtttgcttcaagttgcagtatttataaactttttactaatcttcactgtgcccaaaattttaatgtgggtatgccatagtttgcattaggactaagcattatggtaaatattcttttattgagtacagtgtggaagaattgcttccctatcgaggaacctattagaaaacttccttatcagaagccttatgttttcactaactatctgcaggttgttcaacctattctc

SEQ ID NO: 20616 - DNA, 749 bp, Glycine max
  Intron number 1 from transcript Glyma04g01190.1 (locus Gly ma04g01190) derived from phytozome v7.0 (chr-ID Gm04; pos 744726 to 745474 reverse strand)
ttctctctctctgtggcacttgatttcgtcaaaaggtacgcgtgcttcggcgtcatagtcataagatgtttccaatttgctatcactgtattaatattatgtaccgaaaatcatgtttatgcacccaatttcaaaatcactagtttttttttcctttccctcctcaattactagaatattagttactgctattgttactgttcaaactctggaggtttccttgatttcaatttgattttgaagactaacagatttattggatcatctccgactcccttttcaattatttttggggaattttattttgttttaattgtctcgccagtgatgtgaggttggtacgatatccgtgatgagggtaaaatatcgtttttttttctcgtcatatacaagtttttcccctcttcctgcagattctactgttttgaatttcttgtgtgttcgtcactatcgatattctattgttttagatcgattgcgaagtttgttttctgtctttaagtgggtcactttagtgtccccttaaaattagaaaagaccgattgtacttgcccctttttcaattctctaacttaattttggccgtgttcattttttttgtggggtgctttgatttgttttttggaattttgtttagcttcagctagattactggttgagtgacagtgagtaacatgcttttgactgttatgttattgatcgttgcaattgatggtgtgccttttttggttactgttccaggcaaaggg

SEQ ID NO: 20617 - DNA, 945 bp, Glycine max
  Intron number 1 from transcript Glyma01g37320.1 (locus Gly ma01g37320) derived from phytozome v7.0 (chr-ID Gm01; pos 49680870 to 49681814)
gccattggcattgttggcgacgccggtgttaggtattctcactccttttctactctctctttttctttcgaaaaagatgcgtgtagttataattattttcttgcatatggtttggtatttggttcaaggccacattcacttagtacactttgactgttctgtgtgttttgtactggttcctgattttgaatttcaatgatcggtgatcttctgtggcaatttgtactactactgctttattgattcattaatatgcgtttgtattgtagaatttggctgagtaagtatagtgacataatgttttggttgctcgtgctaggtgcttcatgtattgcgttggtgctgatttatgcctagttgtaatttgtgctttgatgaattgaatggtttcaaacttgattttggttaagtgtgagtttgaggtgaagtgatattcggcatttgtttagtgtttgagagaacttataaaaatggcttgtgatttgttcatatgttgctttctacctgcgaaaacagcttacaacttatatgaaaataatttaacccggttatcttttcaactatagttttttgcttctagtctaacatgatttttagagcaaaatcacttttaacaacagataaacaattttttacagcaaaatcatgtttctgttccaaaacatttataggtagaattgattttcaatttattctacgatgaagatacagctattatgacctgactaacctctttggcagcatgtaggatattaattaatatttgtctattgattgaattgaaagtcccataattatctaatggtgtggtatcgctactgctttcaatatttggatgcttttttaactgagagattgctcaactcttactggataaatgtgtttaatctcgattttagttattgaatatgacctgctgaaattggactgttttttgtagagcaa

SEQ ID NO: 20618 - DNA, 197 bp, Glycine max
  Intron number 1 from transcript Glyma03g35780.2 (locus Gly ma03g35780) derived from phytozome v7.0 (chr-ID Gm03; pos 42886532 to 42886728)
tctcttccaaaaacacttcctccacccaccttaaagtgagtgatcaaaatcaccaccacctccttcttcttccaattttctttctttttgatcatatgattagacctttttgtttattatttatatttgcgtgccttatatatattttttttgttgttttgtttttcttgtgtggttgcagaaaacagaggacagcc

SEQ ID NO: 20619 - DNA, 511 bp, Glycine max
  Intron number 1 from transcript Glyma03g01900.1 (locus Gly ma03g01900) derived from phytozome v7.0 (chr-ID Gm03; pos 1695186 to 1695696)
ggaccaaggtgggtagttacctttattccataacttatatgaagttctataggtgtttttgatgttgttctttgatcagaattggagttcgactttgataacctattttgatctttaatataaacatttaatatgtggataattaggtgagactttaattgtggagtttatttgggtaaatgtcttcataagtacaccatgaactaaaattagcttatatatatgttaaaaataagctatcggagaagctaatatgagaaaattagttaattttaacttatggagaagccaacttcatttttccttcttattttcttctcctataggtgcgtatagtagcgaagtttatcaaaaattggaaaacaacatatataacgcttatattactacatttgagttttgtccttatttatactcttcttcatatatattaagtgccttggtgtttacttgtctaaaatgttacgttggtgtaggaaatttggctggataagaggacaggtggggtgtg

SEQ ID NO: 20620 - DNA, 976 bp, Glycine max
  Intron number 2 from transcript Glyma03g01900.1 (locus Gly ma03g01900) derived from phytozome v7.0 (chr-ID Gm03; pos 1695746 to 1696721)
agatattggagtcgcatttcaactgaagagtcaaggtgagattattgtaattgaaactgttgctcgggctaataagtaataatttatagaactggcctatgcttgactttgttttgttgtgttttcatctttatgggttgaaatacaaaccatttttttttttgctggatttttatttttaagcccttttgtggtttaagatcacacatttttcaccttgtggctttgttatttaacttaattataaagctcgaaggttgaatttttcatacttctccaaatccattttactaatattcaaggttatctaataccaaatttcttatgtaaggaactaaatgagtttagttatcagtgaattatttgaacttggtaaattgagtgttcatttaagttcatttgtttgactaaatgaataactatatttgtagttaagtttgattatttaaatgaatcaaacttaagatttgtaggttttacattaacagtgtgaataactggtatatacatgtacaacttggacagttgcaatttatatttacttaaaaaactgtaactttgtttattatcttcttatatattacttaatgtcaattttcaagagtcatgctttaaatgaatgactatattttttaaaaaaaaattgtcattttcatcatcagtgatttgatctccaatcttaatcagttttatgaatacaaaactattttattacagttttaaattgccttctagcttgacattgttatcaatttagtcatggtcgcatgtatgttcttagttcttactccattactttttctcatggctcctcaattttaagttttatccaccttctgctggaacacataaaattaggaacttcaaaattggatgacccctgtttttgtgtgtgctatatgatgaagcctgatgtattatactatttttgtccataacagattccacacagttgcttatcttcaacaaatttggt

SEQ ID NO: 20621 - DNA, 902 bp, Glycine max
  Intron number 2 from transcript Glyma02g43530.1 (locus Gly ma02g43530) derived from phytozome v7.0 (chr-ID Gm02; pos 48288157 to 48289058 reverse strand)
acaataagaacacgccaatactagatacggcaacggtacatattcttaattattcctacaacattgtttgggtaaactcttgtcattgttttggtaaactcttgtcatgttcaaaattattaccctaatttttttcagaattttgattgttcaatgttcctgtttagtcttagttgtcaaatgactcgtagttatctgttagactcaataaacacgatgtggaaagtcattgtattgctgatgaagttgttatgtcatcaactaacaatgataagtttagaaccttaagttagggaagacaatcaacttaagaaatcaaaattaatgattattattattataaaaaagtgaaaaattagcaataggaggtccaaatatacaaaattagagggacaaaatatacatatttactatatttatatgcaatttttaaaaaacgaaagagtgcaaatgcatccgctggctgtaatgtggatttgtgacttccaattagtattgttacttgacggcaagaattaaaagtggtcatggagaaaaaaaaatcagtgactttgactgaccaaaatttaaaattaggaactaaacataaaaagcttagagattaaaaagatagtgaattcttaaataacgtacttatctttaaatttaatcctctataaatataaaattagattaacaattatttttgtgcattgctcaagtatttttttaatcgaagtagaaaattataaataatttaattaaaagagaaatttttcaacaaaaaataatttccgactacaagtttatttaaaaattgctacaaaagtgatactactctttaaaaattggtgtactatgtgcttgtcaatttttggtgaacttatttttctcttcatgcaccttcctagggacaaccttac

SEQ ID NO: 20622 - DNA, 635 bp, Glycine max
  Intron number 1 from transcript Glyma03g34700.1 (locus Gly ma03g34700) derived from phytozome v7.0 (chr-ID Gm03; pos 42033322 to 42033956)
gttctcaagtacgtatccatcgtactctcatcatcttctttttcttcctccatcaactctttttgtagaatctcaatcttatatgtaaattcttctaccatttctgtattttgtgatacgtaaactcatatgcgctcaaaggccgttgtgccttaatgttgcttgttctcattccttgttatttttgtgaatttggtttactttttcctttctcattttgctgccgtggtatggttacgttttttttttttaagttagttgtagttgcgttctataggataatgatatccaaattgaaattgtattgaacattttccgatgcgcagaaaagtcattgcacaagatttacatcatttttcgttgttgtttaatggcttcatttcagtcctgcaacgaattcttttaaattttgacctaatttcgagctgcttcccaaaagctgcttactttttcgatttttagaagcatcagtaggttttaaaacagcttttgagaaatatatcagacgcattgaagatttgaaaataattattgctaaaccaatcagtgtcttgagcattatgtttgatcaaatgaataatcatttttcttagaagtaatattaatatttgatattcctgtatcagaactgaact

SEQ ID NO: 20623 - DNA, 923 bp, Glycine max
  Intron number 1 from transcript Glyma02g08970.1 (locus Gly ma02g08970) derived from phytozome v7.0 (chr-ID Gm02; pos 6940600 to 6941522 reverse strand)
cagttaccctgcatttcttcaagagggtctttgaggtatgtaacttctataatagataaaaagatcaaaatacttaattgattgggttatgggttatgatgggatgaataataggagacttttttggcatcaaattgttctctctcttttcttttcttttcttttttttttgtaataatttttcactttaggtttccattcattttgaaaagtgaaaacccatcttgatgtttcgttaggatgatgaattatagaatttagcaaggttttaaattttggtccgctgctaccttttggggtatgaacgattgcaatagtagttgcatcagtgcatttgtttgtaatttttcacaacgtggaagattgtaacaaactttaatggcaatttaaaaccttggaatttagtaacctgtaacagggttttaacatgtacttgatatgttgcggaaaaagagttcaaaagccttgatgccgtgattaaaatcatggttgcggaaaaagagtactattctaatttgatttctcatttatttttagaatcagtcttactgcttttgctaaggaagttttagaaattagtacccctatcaaatacttgataacaaagaattgcagctgcattttgattggaaatgattgattcttggtgtgacatgattgacaaataaatgtgtctcttaagcatgtagtttgggattttgatctccaagctaatgtgtatagaaaaacatttgttgaacaagatcaacttcgtcaatgcattcagtaacttgagagattagtccctaactcctggtagagggaattttactaagcaacccatagtgttctgttgttgttcttttattggattccacctcaattaagaatgttgttttttctttaatgtgtaggttgtgtttattcacaaatatagtggtgcc

SEQ ID NO: 20624 - DNA, 877 bp, Glycine max
  Intron number 2 from transcript Glyma02g00680.1 (locus Gly ma02g00680) derived from phytozome v7.0 (chr-ID Gm02; pos 467257 to 468133)
tcattgaccagaatagggtatgccctttttcttttctttctctgattttggtatttttttttcgtttgattaggttcattgggtgggtgcttttttgtttgttttggtttctcgaggttggagcaaaaaagtatatttttttcatctgggtgttggtaaattgtcgtcttggcttttggtgctagaagaattgtactaatccgttgttttatgtttttggttttttgaagctgttagttctgcttagttgttttttaattgggtcataaggttgtactgtgtgtgtttgtgtgaacatcaattggttctgcttagttgttttaggtattggtatcaatttgttgtgtgataatatcaaattccatttaaagagttagagttatccacctcgctgatgtttgatggatggttttaggtttttttattccgttttatgtctcttttttgaagctattgattagaagtgtttaaattgggtcataaggctttgtatactttatgtgataatatagcaatgggtcttggtgttaaattggaatgtgataatatcaaatttcgttggagtttgagaggtcaaccttgcagctaattttagtggatgcttttagttttttttttgctgttttatatttctctgttttgaagctattggtttttctgagttgtattttaattgggtcattaggctttgtatactttgcttatgtagcatcaactcactaaatgaaattttgagctgtggtaacgtcaaattccattgaatattagaggtgtccacattattgataagttggatgtgctttttacagcttttgggtatttgatgtcaaaaccatgtagcataatttttctaccatttgttgacaggctcttgttg

SEQ ID NO: 20625 - DNA, 976 bp, Glycine max
  Intron number 1 from transcript Glyma02g43700.1 (locus Gly ma02g43700) derived from phytozome v7.0 (chr-ID Gm02; pos 48455317 to 48456292)
ctccaaccagagcgctcctcaggttccaaaaaagattctattttgttatgcttttttttctattttaattcttcttctttttatcctagttctgttttgttttgtcttgtctttgttttatttttttccccatgttgcagtgtcgtgtaatggaacttgtatgctaatgattctgtttctttgtttcaaccatgatgtcccaattcttgtaccagcatgctgttgcagtcccaatgttacgtcagctttaagcaaactgcagttctgttgtacgcatcttaaaaagaaaacaaacaacaataatgctgtaaaaaaggtgtcttgtggataaatggtataattttctgtaaacaaaataaatttgattaattttatgtaacaagtaacaaaccaaccgtttctgtttataattttccgtggattctggagcctgttccctgtttataagaattgtaggtggaaatggttatgcataatataattttttcaagagtgagatgcatgtgaaattccgtttttagaagaaatcaaaattcattatgcagtagacaacttcaattcctggtgtatttcacacttttactactaaaatcattcatgttgaactgaaactaaacaactgtttatcttacgttgtactatgtactatgctactgtatggtcttttatagtatttcttaatcaagccatcttaattgtgttgcatctagaactaaattcaagaaatctcagagctagctgagaggagttaagcttggtattttttggttgtagtttgggtttgcaatcttacattggtttcttgtttgactgctttaggctaaaaacctcttccctggcacaagctcaatacttgttattatttaggcttttaattgctatgattgcagccttgcaggatattattcactttttttttgtcagctcatatatatgtgtatgctgagtgttgtgtttttttgccagcccatttggg

SEQ ID NO: 20626 - DNA, 247 bp, Glycine max
  Intron number 1 from transcript Glyma01g27910.1 (locus Gly ma01g27910) derived from phytozome v7.0 (chr-ID Gm01; pos 37407859 to 37408105 reverse strand)
actaaagaaaaagagaaacctttctgccaacccaggtttcttatttattatatgtctaatattcaaacttgtaagcatagtttatttttggttttggttttggtttgtttgttgtatgtgtttgtcttgtttaatgtttatctcaattgggttaaacttttcctttatttttttagtttggtgtttgtttttttcttcattgttttatttagaccctaaagctgaagttgtcagcttgtctccaaag

SEQ ID NO: 20627 - DNA, 555 bp, Glycine max
  Intron number 2 from transcript Glyma03g05430.1 (locus Gly ma03g05430) derived from phytozome v7.0 (chr-ID Gm03; pos 5687512 to 5688066)
tcaacttactgttgacttgactccagatattccaagtgtgttttggtattacctattcttagtttccaaatcttacaacccttttgagtttatttggttaaattgtctaattaagccatattcattaagaacttattagatgagagcttcttccaggacttgtttgggtaagtttatccaaaaccacttatgcacatactagtttgtaaaagctctctcatcttttagagaaactatacaagagagtttctacaatttagcttatggagaaactcatttcatttctttttcttattttttttctcctaaaagtgcttccagattagtttatccaaacagaccctaaaagcttgattgtataacttagtaaataagctaaccaaacttattttgataaccttctttttgaaatttaattgaaataagctaaaaatattctactgaatggccatatgctacttctacaagtccaaataagttttatgaaattcttcctaatgtcccttggtctgtgtctaactagcttttcttcctcaatgtcactcaggagaagct

SEQ ID NO: 20628 - DNA, 860 bp, Glycine max
  Intron number 1 from transcript Glyma01g33660.1 (locus Gly ma01g33660) derived from phytozome v7.0 (chr-ID Gm01; pos 45865503 to 45866362 reverse strand)
ccaatcgaattttgcttcttgctgctctctctgaggtgaagtttatttatttatttatttgtttgtttgttgttgggtgtgggaataggagtttgatgtgtagagtggattttgaatatttgatttttttttgtattattctgtgaaaatgaagcatcatgtcccatgaaagaaatggacacgaaattaagtggcttatgatgtgaaatgaggatagaaatgtgtgtagggttttttaatgggtagcaataagcatattcaatatctggattgatttggacgtttctgtataaaggagtatgctagcaatgtgttaatgtatggcttgctaaaatactcctaaaaatcaagtgggagtagtatacatatctacagcaaatgtattaggtgaggcatttggcttctctattgtaaggaacaaataatatcagttaatgtgaaaatcaatggttgatattccaatacattcatgatgtgttatttatatgtacctaatattgactgttgtttttctccgcaatgaccaagattatttattttatcctctaaagtgactaattgagttgcttactttagagaagttggacccattaggtgagagcgtggggggaactaatcttgaatatacaatctgagtcttgattatccaagtatggttgtatgaacaatgttagctctagaagataaaccctcccccaaaacacaaattagaatgacatttcaagttccatgtatgtcactttcattctattatttttacaacttttagttacttaacagatgtcttgttcagcataaattataatttattctgtttttttttagggaacaactgttgtagacaacttgttgtatagtga

SEQ ID NO: 20629 - DNA, 710 bp, Glycine max
  Intron number 4 from transcript Glyma02g37380.1 (locus Gly ma02g37380) derived from phytozome v7.0 (chr-ID Gm02; pos 42723402 to 42724111 reverse strand)
cgatcattgcagtgagtaaagttattatattctgggaattaggaaagccctgggtagaatattttttctttacaggattgtatattagctatttccatttgttattattgctttatgaaatggcaaaatattgtcttcatataaataaattttgattgcaaaagaagtttatcacataatcttgtgtatgttccattgtaagaagaattttatttaggtgagaacccccattttttatttgggagtgggggggttggggttaactgaatatatgttatttttttattgaaatttaacacaatcctgttagataggaatcttacatagaaaagtcttatgataatagaaaagtcttatgatgaaccctttttttgaatgatagaacctaggatgggctgtggctgcattgacatcagggtagcttctctctcccttttcctagctcttgcattggagagattagtgattgatataaacattattattactaatgaaaaggataaggtttactaatatttagtgctcgctaatctgtggctacaacaagaatttttataagctgcagaactattttgaggaaataatctaaagtacatatttctggatgtgtaaagtgtcccacatgacatctgtttatagtgaagtgagccttttccttaacataatgataaccccatttgatgccaatgactttcattgtattcatccag

SEQ ID NO: 20630 - DNA, 588 bp, Glycine max
  Intron number 2 from transcript Glyma04g06810.2 (locus Gly ma04g06810) derived from phytozome v7.0 (chr-ID Gm04; pos 5273584 to 5274171)
tcgttggcgacgataaagaactcgatcagttcttggtattttccttctttttcttattttttccttcgaattaattatatatgattaattagtattattcttttttattttttttatttttcctctatgtgtgtgcaatggaggattttcactttttccactgcaaatcttaattttaaactcgtgctttgaatccgatgtcgttttttggattgtctttgaagacaatccacagaacggtgaaaagttttctccgctaagaaagtgaaacagacatggttccttgcttgcttgctttcacggagaatgaaattattcaaattaagtcagatgtagaatgatggttattgtttgaaattaaatagattggaaacaagtggttcgtatttgacacctgaattaatataaccccaagttcagatgattttactgttacgtctcctattccatatccttatagatcttgattatgttctttgttgttttttcatggtgtgtgattttttatgtgatggagcttatcatctgctattatacatttacaactgacaattttgatattttcttaattgatgctgcagtcccact

SEQ ID NO: 20631 - DNA, 987 bp, Glycine max
  Intron number 1 from transcript Glyma04g10200.1 (locus Gly ma04g10200) derived from phytozome v7.0 (chr-ID Gm04; pos 8435887 to 8436873 reverse strand)
gtactcaaaccggcactgctgaaggctttgctaaggttatatttcctttttccctgcttccgctggatcgaattgagttgaaccgaatgttctggatctttcaattagaagaagaaaatgattcgtgtgaagtataataattgcgaatttgagtttggtgaaggaagaagatatcgtagttttgacttgtgccatgacttggttaaccctaggttatgatagtgataagtgatactatttgtttgatgttttcatgttgctattggaaatgtcaaggaatgaggaatgattatgttgttaatgtcaatttgaaaacaatagttcattgtgatagtcaaaaggcctgcctacggggatcaagtaacagagtctctctagttgcttgagatgcttcgcgtgactttcttattgatagtagtacctatgaaaaacccaaaaaggttccgcaatttactcactgtgatattggatatggtaaagtagtcaaaagctttaaaagtgtctgttattgggactgttctcagtcgatattttagggttttgtaaattgaaaattttggtattttgtttttaccatggattgatgcttgagttgttaatcaatgtgacagattagttcaaaatagtccaacactagtgttttcgttttctacttttcctactcctaatgccttttttgggtgaagcatagcctgaactttgtgcctctttctaggcttgctgttcccactaatgtaacatgtcttcatagttgggttattgtgaatattctaaatttagcttgaaaataattgccagcttatgcgaatatactttatgtgaggatgatactaactttcccttttccataatgcttgaaatggttacccctgggacagctacaactttaaatctgcaggcagttatgtgccagttttatataattacttagtttttttttaatatatttttaattacaggcattggcagaggagatcaaggcaagat

SEQ ID NO: 20632 - DNA, 801 bp, Glycine max
  Intron number 1 from transcript Glyma01g02990.1 (locus Gly ma01g02990) derived from phytozome v7.0 (chr-ID Gm01; pos 2478000 to 2478800)
ttcaaaggtaaacttattaaaaatagttatatatctttttctttttactaaaatacactttttttaatttgatctttgtttatatatagagcgatgataaatttatttttgaaatataaaaattttaattttaatttttgaagatgaaaaaattgtgacaaaattattatttattaactttcactgatgctatttatgatagagcttacataggatattcaagaacaaatttgtcaacgctctatatattcaaggacaaaaataactatttatttaaaatataatttaatcttcatttatcttttttttaatcgttacaaacataacattataataaatacttaaaaaaacaagcataagttagaacaaacatcataatgaacataatattgattgataaatataatttgttttttaagtatttttttgtaatgttatgtttgtaatgattaaaaaatgaaaaagataaaaattaaattatatttttaataaatagttattttcgtttatgaatgtgtaaagtactaacaaatttgttcttaaatttgtcacgtaaatttttttattaagagtagtacataaaaattaatatatgaattaatttgtcatatttttttttattttcatggattataaatttaaattttcatcttttaaaaacgaatttattaacactctatacatttatggatgaaaatagttatttacccatattattccaagatcaattgcgttcctaaattatatatatagaatatgcaaatttcctacaccttgaagcaaattctgatatctttgcag

SEQ ID NO: 20633 - DNA, 877 bp, Glycine max
  Intron number 5 from transcript Glyma04g07750.1 (locus Gly ma04g07750) derived from phytozome v7.0 (chr-ID Gm04; pos 6058134 to 6059010 reverse strand)
tggcgattgaggcgtgttagcgaactcttcgcaaggtacattaaaaaagaatgaaatcggaacgagagcaaaagcaactaaccaaaatcaatacgcacttaaataatatccctcttccttgttaagggtgtaaattacgaagatataataggagcgtgtgtaagttgattagagttattgtcaacaataaaattgggaatataagagcagttcacttaagtgcatgcgcgacctaattttcaaattttgaaaaagtttttttataacatatttcaagactaaatatgtacaagtttagagtttagatttgtaatattcatgtttgacgagttattactaacataattcatatgctatatatatcgtacttttttctcaagaaaatcaaaatatatataatttaacctttttaagagtataatttaacttaaaaacctatttaaaaagtaaattataataagatttttaatagacttataaccctacttctaaataattaattaacctaaatttttttgtaaggcaaaggatctaagtctttaaataaactaataaatataatatcagactcgtttaacaaataattaagcttgacataacctaacttacatttaagctaagtcattaagtcctctgcaaattattctacttctttctatcactgcttttactcaaattaattaattataaaaaaaaaaagtctcaaaattaccgcctatttctctttcgtattgtcttacagtgactgaaaaaaataatgcatgtatattccacagggttaaataacaatggctttgaccaggttttcctatttgtgactgaaagtgcaaactgttttccaggctagaaaaagacatacgaatcaactactcagcaa

SEQ ID NO: 20634 - DNA, 941 bp, Glycine max
  Intron number 1 from transcript Glyma04g24910.1 (locus Gly ma04g24910) derived from phytozome v7.0 (chr-ID Gm04; pos 28584571 to 28585511)
gtcccaagctttgcagaagctttcttcgattctgggtatgtctcttttgttgttctcaacgttcaactttgcagctttttctccttttaagcaaaaaaaacaaaaaaaaacaaaaaaaaaatgtattcttttgttttttagattggtgaatgttcagttggtccaattggggttttgggggtgttttaagttgctagtgttgggaacattgttggggcggggcgagtttggtcttttacggttaaattgaagcgttatgttaagatgatgttttatgttaaggcatctaagattgatttgattttgaagaatgagaatatgctccaataagcctggggggggggggggggggggaataaactattaggaaagatgcatgaactaagaccaatataactttaaaactgaaagctgcgtacttggacttgtaatatgggtaattttttattattgcaattactagtcagtctaggtaatttacttcttcgagaggtccaagatgaattgtagaacgaggaagtagatttggccatttttgtttattttttggggttctaaccctacgtaagcactctcgtattggaatgattgcaaaactgaaaggatgttttgaagagttgatttgtgggaatttggcatgttgctggattctgatgtcactgattttgagcaattattcaatgaatatagagaaatatgatagtggtcaattgttgtcaggtttgatttgttctgcaaaatgaacttctgttttatctctgcacattgttaaggtatttattctgtttctgcatcattttataaattggacgtttcctatcaaaatccagattaaattttcatattttttgaactttgaaatgcagatgctacattgctttggataatggaatcttgatctttgttaattcatgacttggcagacactattcaacctgctg

SEQ ID NO: 20635 - DNA, 934 bp, Glycine max
  Intron number 3 from transcript Glyma02g00540.1 (locus Gly ma02g00540) derived from phytozome v7.0 (chr-ID Gm02; pos 325459 to 326392)
gtctcaaccacgttacctaccttattgagcaggtcttttttaattgttgttgacgtggtttttgttgtcttattattgttaattgttaatagtactgccaaggttttaaattgcggttgtggctgccgttatccctcatcattgtgagagattgtggatgttttaagtgtaattctggctgtagagaactaaaaaatgtgactgaatttgtagttgtagactttttttaaacattgagtattgctgtaaatatgcaatttgcctgtgaaatatgttagttgtgttgtttttgtcgtttggaattgttgagttcctagcctttagtgaataataatataggagaatttgggtttttaatcgagtttattctgatgaggatattgatgttttttgaattgtgaagcttcctgtgtttggatatttgataaagaatgaagtaagaatataatggagtggaatgaatttatcattctattgctgagattagatattcgtatgatgtaatggaaaaacagagtgtttgtcttgagccctttggagggaaggaaagaaaaagagggtcattggtggaaacaaaatgcatttcctctctttttgccccattttgttccaacttactttaaacaattcaagcgatggagtctgatgtcattattctgttctgttccattgcatttcttttcatcaatccaaaaagtctaacaagttcatcttattagaaatctgtctgtgaggaatttctttcagagcaaaacaaaacaagttaaattttttgaaaactaaataatatattttctcttattattgttgttatttgatgcttggaagggaatgaatgaatatgcatagacaagtaaagattttcttgtggtatttgagtaacatttcttttatttgttttgtcagaacaaggcacaactggttgtgattgctc

SEQ ID NO: 20636 - DNA, 730 bp, Glycine max
  Intron number 1 from transcript Glyma01g36270.1 (locus Gly ma01g36270) derived from phytozome v7.0 (chr-ID Gm01; pos 48753143 to 48753872 reverse strand)
ttgtctttctctctctgagttctccacaggatcaggtacttgtgggcctccttctctgcccatgcttccaaattcgatccttaatttcgttcaattcttatctattctccttaattccgttgaatccagattcaattcttgattcattcactatctgaatttaattcaaaacgtatcgaaataatagtgttttcgtgaacgaacaagaagctatgcatgactttgctgctctggatacataactctctgaattcaaaattgcttttgttgtttgctgaattgtgcatccacgtgcacgctctgtttggtttcccggagattagtgttttctgttttgttgttctgtttttcgttttcgtaattgagataaattgaatcgattgtgctagattttgatttttctccttttttcttctggtcaggaaccgaagcgttgaaatggggtaatatgatgatgatggtgatgaatcgaatttccatttcctgatgtgaggaacaaagcaccaccaccaccttggctaggttcatgtagggtttgttgagaatcttatagttttttattttctttatcaaattcttcgcttgatcaggaattggatttgtgagttagaacaggaaataagagagagacatttgattgtgaatggatttggaatttaaattgtgtgaatattttttaattgtttgttgagaagcattgaattggattttacttgaggagtagtatatt

SEQ ID NO: 20637 - DNA, 297 bp, Glycine max
  Intron number 3 from transcript Glyma01g44380.1 (locus Gly ma01g44380) derived from phytozome v7.0 (chr-ID Gm01; pos 55067225 to 55067521 reverse strand)
cagacaaacataaagcagagcgtcaccctgatcctgtaagctgtttttatttatgcagaatgctgtttttatgagatggtttagaaagtacttttgaatgtttattaaataataataatatgaagcgtggtttgagtttgtttttgtttgtgatttgtgatttgtgatttgttattgaggctgcattagacgtggaagaacatgagttgattgcttacttagtaagtttctccgttaattgtttttcttaaattttgtacaggtggaagaagcaaggaagcaagcttcaatcgttga

SEQ ID NO: 20638 - DNA, 635 bp, Glycine max
  Intron number 1 from transcript Glyma01g40840.1 (locus Gly ma01g40840) derived from phytozome v7.0 (chr-ID Gm01; pos 52477490 to 52478124)
acatccttcaacaaagtttccggcgtctgttcgaggtgcgtttctgtttatgcgttcagacttcatagcttcctttctgctttcatggttttttttttttttcacgaaagaacatagcagatttatttttgcttttatttcatgctctgttgttacttctcttataaattatttattgtttattttatgatttactgattccttttaattgttgctcgtggcttactctgaagaatatgaataagataacgcgttagagatgttaatgttagatctgaagtacctaatcttctcaaaggcattattttccttaccacatcgctcacccaatttttttgcaataaattttaagttatttcagatttgaaaattccaggggatgtggtcttttgaaaattcctcctctctttcatttccttgcaaaaacaaagagacaaccttcgaattcgcatgctctcttttatttatttattaattaattcaattgggtgcacgtaaatttcattttcattcttcgccgcttacatttcaatatattaccatattctttttgctccgcttcgcgtgtgtacgtgtctagggttcttaacaattaacagtttcaattccgtaatgtatcgttgcgagtatgcagc

SEQ ID NO: 20639 - DNA, 439 bp, Glycine max
  Intron number 1 from transcript Glyma03g33130.1 (locus Gly ma03g33130) derived from phytozome v7.0 (chr-ID Gm03; pos 40793328 to 40793766)
cagagacctaaaggtagtggataaaatccttgcttactctgttttttttttctttgtaaatgcgcttttgaactgcttgctagcttttgcttatagtgttataggtgtaataatgtcgttttcattccatcatgaatttctagtgttatcatgtcttgtgatttttttgtcctttgatcattttccaaagtgtttcttttgtcttctctttttctcatgcgtgcgtaattgcgcatgaggttcttcttctcacgcactttcaattactacttttaccaaagattgtgagcagcagtgtgtctctcttttggtaattcaaacaacaatttcagcaatcacttattaattaattaagcccgcacctaaatctttcactctaatcttgttgttgaattcattttcaggaagcaagcgggttcatagacatagaaaacttcag

SEQ ID NO: 20640 - DNA, 125 bp, Glycine max
  Intron number 2 from transcript Glyma01g42290.1 (locus Gly ma01g42290) derived from phytozome v7.0 (chr-ID Gm01; pos 53580596 to 53580720 reverse strand)
gacctcaaagtggtaattcttatcatttcccttctctgtgctctgttttttcttattatgaagtgattcttgctagatgaatgctctgttttgattctcttatcctgcaggctgtggctggtttc

SEQ ID NO: 20641 - DNA, 837 bp, Glycine max
  Intron number 2 from transcript Glyma01g22170.1 (locus Gly ma01g22170) derived from phytozome v7.0 (chr-ID Gm01; pos 27750400 to 27751236 reverse strand)
tgacagtctacctggatgtatgtttctcccttactaaaattttatttaggcttaagtggtcacaaatataggtgtattgtcggtgttatttatacaattatttggagctgtcttataaattacagtttcataataattttcttgtctatatcttataacgcatgcagctagaatgtttagttattagggtgcctcttatacctggagctggttttcagcttatttctattattttcttcccatgcaaacatgctttaacaagaaggaaatattcattgactatggataaacatgcattggcatcggtgctgaaagctaaaataagcaagtcgttgctactttgttgattatcaataagtgactgttcaatttttttacatgatttatgccattatattttgtatcaacttgtaatattttttcatcagttttccacttaaaaataatacatttaaaggaaatgattggtgagttatgatatttcagttggataaaaagcttttctctccatttgagaaagcatatacacaattttatttatagtcttctgaaaaaacagctggaatctgagggagtaggactttaatttctcatgatattttttaggatttctctcatcatgtatattaaatttgattgtgtgaatttattttatgatgctctgtctggtagtttctcttttttttttctattttttttctaacagattagctgtgctctatttatattgtattttgggtgcaatgctggttactaatagtctctctaagatattaatttcttagtgttaatgaccaatcaaattaatgcccttctatatgctatattagggatatc

SEQ ID NO: 20642 - DNA, 362 bp, Glycine max
  Intron number 1 from transcript Glyma05g03190.1 (locus Gly ma05g03190) derived from phytozome v7.0 (chr-ID Gm05; pos 2440231 to 2440592)
aacccgtgccactgctccctcatttcatacaacaggtccccttttttccgattctgtttccttttcgagttccaacttcatcatcactcccttgcttaaaatgttatgttttgaacgatgacacaaactgaaaaaccccgagtttttaaatgctaacaaatcttgggcagaggaactttcctttcattcattttcattgatattgtaaagttttctcaagtttagagcttttgcagcactcgtaaaggaagatcaatgattcattatgtatgcttaacagttctccttttttgttttttttcttccgttgatttctattatttgcagggcacctgtatcatcatttctggaaggcaaaacct

SEQ ID NO: 20643 - DNA, 945 bp, Glycine max; identical to SEQ ID NO: 16171
  Intron number 1 from transcript Glyma01g07550.4 (locus Gly ma01g07550) derived from phytozome v7.0 (chr-ID Gm01; pos 8344952 to 8345896)

SEQ ID NO: 20644 - DNA, 1020 bp, Glycine max
  Intron number 2 from transcript Glyma01g07550.4 (locus Gly ma01g07550) derived from phytozome v7.0 (chr-ID Gm01; pos 8346111 to 8347130)
gccagaacaccggcaacttcatcacggtattatttgtgcttattatcttgtatttaatttcttttttttccaagttaagttattataatttaggcactgtgtcaagaaccaactataccaaaagctaacagtgattaagttattataaactgctagatgaagacacatggtgacatgaatggttttatattatggcgctacaagggattaagtctggtacactgcacacacttacaaaattaggtttgattgtcccctatatgtgttttaattgtcttatatgtattgtactgtgataattttgttactgtgggttcatatagatgatcttatttttcacctcacatgttgaaaattcaaaataattaggtctggatgttcaatctagttagctatactatctgtactagtttggaaattatcaaatatttgggaaacaaaattattatctgggttcttttcttactgctatatgcataagaatcaaaaggttggttttgcctattcaatgagagtgaatctacttaatcatctatttaggatttgttttctatgcaatgaggataaatctacttaattatgtatttaaccttgaatatcagctgtcagcactgactgttattatgaaatatgaataacttaatgttcatattgcttaatgttgacttcctatcagtttattttcaacctggacctaggtattatttaaactgtagtgaaatacctatatatcaatgatagtgatagagcttccatcttgtcttgtaaacagaattcgacactgtttgcagtcaattagcatttaacatagtgggcaataaggcttggttattgtactagagtgatgtcttacaagtttgaatctacaataagatacattccacaacattctgaagagatacatgaaaagtagattaatagcttgtctgaccatgcttagatttattttctttggaatttatctggattgatatttttcttttcaaatttggctgcaggaccgaccctcaaccaaggtcc

SEQ ID NO: 20645 - DNA, 597 bp, Glycine max
  Intron number 2 from transcript Glyma03g27490.1 (locus Gly ma03g27490) derived from phytozome v7.0 (chr-ID Gm03; pos 35215509 to 35216105)
tggtggattgtgggcagagcttgttaacaacagaggtcattaatttccattacaatttctctaaaacttttaaatgataaaaaatgcaaacacaaaaatatgtttcacataattcttttgaatttatgtactaatattcttagacgccatttctatattcttcttctaaaccaccaaaacatgtaacacttaattagatagcacctcttttgagcctttgcaaaagtctaaaagaaaaactataaattcaagtaattgcactatattgctatcaataaaaattaatccaattgataagaaataaactcatcatcacaaaaatatgagtttgatttacactattgaaatacaagtagtatttctgtctgtcttattaagtcaagagactcctgataagttctcagaatttaactcacctaaactttacataactaaggatttcactaaattactattacacattatactttatataggagatgatgttttaagtacacagtgttttcattacattgctgtggtgatagaatgttttccattcatatattaatttgtgattcaggttttgaagctgggggcacacaagttccatcaaat

SEQ ID NO: 20646 - DNA, 764 bp, Glycine max
  Intron number 1 from transcript Glyma01g06540.1 (locus Gly ma01g06540) derived from phytozome v7.0 (chr-ID Gm01; pos 6785453 to 6786216)
cctctcaacaagacaacttacctcattcagcccttgtaagcatctctctctccctttttatttaatgttgggcttatgataaattttgaatttcccccttcttttttctgcatgctcgaaaagctagagagtaagggggttagaagtttatctctggtataatttatgttgttatgttatggtgattgttaatgtggcatgaatatataaattattaatatgctgcgtgtttgatttttgttttttttttttgtttttatatagaaatggttgagttatacttatgtggttgccagggaatgatatggtttgttctggaaggaggtgtggaattatttgagtaacattaggtggtgtaccttggggttgcttcttgtgagcctaaattatggtctattgggattcattctgtactgttttgttggggatatgtgacacaatctgagtactggaatgatatgtctctttattaataataatatctttcttttgccttaaaaaaaaaaacaatatgattcatgtgtttttgtgtcttaaactctggcagcttatttgactagctacttttttagttttctcaaggtttcggagagggatagctttgatcggtatcactgtatgtctctgaattgcttttgttttgtggatgaattgcttttaatccgtattgctgtatcaggtatcacttttaagttttatgattttgtttacttattaaagttttaattttttctttgcctaggtgttgttgtgaccgaactgtt

SEQ ID NO: 20647 - DNA, 693 bp, Glycine max
  Intron number 4 from transcript Glyma01g06540.1 (locus Gly ma01g06540) derived from phytozome v7.0 (chr-ID Gm01; pos 6786635 to 6787327)
accagacaattaaacttggaggcggtctacgacaggtaggtctctagttttttgaaaatttagaacattccattgacaatttgacatttgaattcctgtctatctctgtttttgttggctctacactacatgtgcatgctcacacacatgtatcattttttacaatgatagagagttaggtactatggggtgccaaagtctcatatagagcaatatgttatgctcggtggagtacttaagtggcttggttctactcccttaacagaaactttttaagggatgatttcccaagagcttgaatgtttatcagacgataactaattttggaatgcctttttataccttcatacttcctttttagtttaaatgcatgttagacacagtacagattctcagctctctcaagttttaaaatcattttggtcaacataagtatatgagtttctcttagatattatgaagtggcttttttttctgtttagcaatgaagtgatatggaactcaaaactttgttatcgtaaactttcagggtgtgttgcttttgattttgtattttttgattcatcctcctcatttatcatcttataaacagaaaggaaataatacatgatgattgttcttgctttttgttcattcttttcaatcctgttaataataagggactctcgcttatgtcaattttctaggattgtg

SEQ ID NO: 20648 - DNA, 766 bp, Glycine max
  Intron number 5 from transcript Glyma01g06540.1 (locus Gly ma01g06540) derived from phytozome v7.0 (chr-ID Gm01; pos 6787373 to 6788138)
ctcataaatactgggttgaaaattctcagaagagggtgagtatgattctgtggtcatgagctatgtattaatgtgtaaaagcatggctttgactgacatgacaatgctgacttttcattgttactggttagtatgctcctttcttagtgctatatgaatttactgtccaatttccaatagctataaatatgttcctttaaatcaagcataagtttatcttacatgtattcctggagcttttttagtagaaggggctaatatacttttgatctacaacaagatggctaaaccaaagatggtgggaataatatcctcaaataaattgttttgatttcagtgtaatgccatttgtaagtgtcaaaatttgtttgtcattacattggaagatagtatctgtcaaagaaatttgtggaggacctttttctatgtttgctttgggtctattttacaccctcttgaattaagtaaatattcaattgcagtcacaaaattaggttaaatgtctgtgcattttcttccattttaatagtttcgtagatattctatcatatatgggaattaagttatcgctgttaagatgaatatcagtttacattcttccagaagaatatcttctaaagtgcttataattttttttagcattgaattatgttatgtaatttaccttctcgttatgtatggagtaggattttaatgtttcttcccctaggaacagaacaatgctatcttttttcttccatattctgattcttttgttttgttcagt

SEQ ID NO: 20649 - DNA, 715 bp, Glycine max
  Intron number 1 from transcript Glyma01g03820.1 (locus Gly ma01g03820) derived from phytozome v7.0 (chr-ID Gm01; pos 3266727 to 3267441 reverse strand)
tctttctgcttccactactcctttgttctctagaggtacttattgcttatcatcacttccaagatcctggggtgattgatgatttgattactttttctgcttggttctgagaacatgtagagcatgaaaatgaattgattttcaattttgtatttttcttatttgattaactgggtttgtgggggatttggattataggatcattttctgatccttaggatataatagttacctatttgtttggagatggttggattgatcagctgttattttttttgtaaagagagaaaatgaaatgtgttataaaaaattatatgatcattgaccaagtgggggagagaggatataaaaagtttgaaactttaaaaggatccacaagtgaaagtgctatttgtggtgaggcattctgaactgtccttttttgtctggcccctgttccttttcagctaccacctgtttctttcacagtttcactgccccttcaagtacatgttattactttagtgtataaattggaggctacttcctgggaccatttcaatttatgtcacatgccaagatgatgaatgatcataccttttgattggtgtttttaggccttggttttgctttggggctttcattaatggtcttatttatttttaataaattggccccttttttcttcttctgatattcaggtggaagtggtgctcttggtgcagggctcagtaaa

SEQ ID NO: 20650 - DNA, 865 bp, Glycine max
  Intron number 1 from transcript Glyma01g01830.1 (locus Gly ma01g01830) derived from phytozome v7.0 (chr-ID Gm01; pos 1394504 to 1395368)
caaactccacccaccttgcatttcaaaaatcaccggttcgtaatccaatcccctctcccaacttcacagcttcttcctcgtcttatttctttctttcggatttgaatttttttgaaaaaaaaaaacatttttttattgttgtctgctatttactactgttcagaacaacgtggagctataaattagtttactggggtttttgtttgttcggtgatgggtgatgtcacactcgtcaatttgagttttggtgtgaaactggaagcaatggattgctagttcagtttcagggttggtcagtgaaatggtttaagcttctgttctggttttttattttttttatttcctgattattgcctaatataaggattttagacatctggtttgggacagtgaaaaatttagtcttctcatgttacattggatggtgggatttttcaggatgttgtaggttaactcatttaacaagattcaatgatttaccttggactataagtatttagtattgatcaagggaaacattttttgtcatagattacacttcccttccccatgctctctaagtatgaggtttaaagtagtgattttgtcccacagtgtaccttctttctcaatatgattctcaaagttctttgtgttgaatgtgacaaacaacactacttgcatttagttctgatctgatggtgtctgcttcaagatactggttcaagttgccagctatttagtgatagttatagacaaagtttgaattcccctttacttaatgggttttgattgttgaatgatccgggaaaggatttaagtatcttcgacatgtggtctaattgtttgtgtataccgtcctgcaggtttgcagttagttgcagtt

SEQ ID NO: 20651 - DNA, 877 bp, Glycine max
  Intron number 1 from transcript Glyma03g27240.1 (locus Gly ma03g27240) derived from phytozome v7.0 (chr-ID Gm03; pos 34859701 to 34860577)
actgtgccccaccgtccattctcaccgcttatcaggtaaacctccaaaattatcttattttttcgattttgattatacccagaaaccaaatcgcttaagaatcttctcagttttcataaatggtccttttggtgtgtactgtatagctcaaaaatgaattttcaatttttttttaataatactgatttctgctttggtaatggaaagattcatattttctgtgtattcatgccacctcagattttttcaaaaaacaaaatgcaaaatcaacaagtcttatcccactacttgaggtctgctacataggtcacacgatgccattcaacacagttaaataccacaatttcagaaattagaaatattattaagtctatgatctcccttggtaataaataaataaagttgaccaaaattcatggttttaaattgcagttgtggttgcattgtgatgagtcagaaaatctttatattgtgggtaattgcaggaaaatgaggctgcaattgcatttgcgatgagtcaaaataccttgacattgtgccgcaattgcggttgcagaacgctatttaaaaccatgccaaatttaacaaaaataattgctggtctaaaattacattagctaaacttctaagtacttaaaaacataattttttatgtgtatatagttgttagctgtgtttgtaattttgtactatataattattcgtattgtgtgtgatatgtaactgtatactgtgtctgtatatgtgtgtggaaatagttgttagctatgtttgtaattttatatgatatatgattgtatagtgtatgttgtgctgatgtgtaaaattgaaatgtttaacagaacttgtgtgtaccgactaggaagtgtgcagtcac

SEQ ID NO: 20652 - DNA, 936 bp, Glycine max
  Intron number 1 from transcript Glyma03g27500.1 (locus Gly ma03g27500) derived from phytozome v7.0 (chr-ID Gm03; pos 35224311 to 35225246)
ggaattcgcgactccttctctcacactgcctataggtaactaagtaaactctacttcactagcactactttttttttttttgcaatttctgtgtcaataattgattattttgattttaattttgttttctttcatcactcccccggaaattttagtgtatttcgtcgtttagttttttttttttttttgtttacagaggtatctaatactctacttcactagcactactttcttttgcaatttctgtcaataattgattattttaatttgctttctttcatgaatctcgcagaaattttagtgtatttcgtcctttaattttaatgtgtttttttatataaaaaattgaaatcgcgtgtttgaaaactgtgaactatgatgaggagctctgtgatgatggtgttgaattggtggtgcggtgataattcattgctagtaatgagtgaaatttaagttagggagtgtgtatgctgaattgtgtgtctaaggttgggagggtataattataattattatactaataaggtgttagtcacggttataattataattatagttattagaatagctattgcttttttaaaattggtcatggattattattgtgtattgggaggagctgattggccatgattcgtgaagcttacttgcttttccattatggttgcttaattttggggaattggtggaaagggaagtgcttttgttttacttggggctgtttctgaatcagatattgagacttgttcgcctcgtagtgatgaactaaatgtgctattttataagattcttacctccttcacactgtctttagagtaataaaggtcttctgtagtcatgtgtgttttcctttctattcctttgcattggaagataattgaacttactctcatttcactttcttttttttttagtattgtgaagaagctagagcct

SEQ ID NO: 20653 - DNA, 858 bp, Glycine max
  Intron number 1 from transcript Glyma01g22120.1 (locus Gly ma01g22120) derived from phytozome v7.0 (chr-ID Gm01; pos 27654603 to 27655460)
caggtaaatttattagtcaaccacagctgaaaaacacaaaaaaaaaattaaacactgtagaatatatagctactccatcataatttcatggccatttatttaaggactaggtaaaaaggatttgaaagaaagaaagaaagtacaaaaaaaaaaaaaaaatcaccacttacaacttttctttcaaagatttcgatatgctgataatataaaaaaaaaaaaaactgtaatgtaaccgtcacactctctgtttttgaatttgactccattaattaacaatccttctttgaatgcttttgttgttctttctttctttctttttaagtgtaatacctttgatttctttcgcagccacttttcaaatctctctagctaaaatctctagttcttcccttttcatcacgtgcaatgtaatcgtgactttgaaatttaataaatccttttacaccccaaaaagaatgtgaaacattcattatcaaatatctatactttttttttctcttcctatctctcttatctcttcacctcaatccaccccattttttgtgtatgttttgtttatcaaccctcttatcaaaatacacaacaaaaaccatttctgaaagaagaaaaaatatcgtcattgtttttgcactttattattaattaacaatcaacgacgtctcaaatccaaaggttgaggcaaaggtataaattttctttgcattcacatgaggaggaattatctatttaatggaaaaatctgtgttcaattttcactttgtgtaaaattctcttaataaattctgtgacctaagacaaaaaaaaaaaaatcaacatcatctcatacaaaattttccctaacgcattgcaacatagcag

SEQ ID NO: 20654 - DNA, 844 bp, Glycine max
  Intron number 1 from transcript Glyma03g38730.1 (locus Gly ma03g38730) derived from phytozome v7.0 (chr-ID Gm03; pos 45039340 to 45040183 reverse strand)
ccaccagcttctgcagtagcttcaagcttcgaaaggtttttttttttttaatattttgatcattttactgtgttcaagttcaacccacttgattcgtatctgtaacatcttgtttctgttttgatattcaatcttttgatcttcaaacattatgagtttaaccctgttgacttctagtaactacttcccccttcaaattacccattgattctctttatattctttactttgaagaatctgttcgtatatttggcatgtgggtattacggatctgtacaatttgtatttgtagcatcagtaaagtgaactgattctgtttattattatttttttcataccctttgtgtttatgtgctaaacgggtgtaatattatagcttgcgtaggggacaaaaagataaaatcaactgcaaataacgttggttataataactgataagcttaggattaaaatcgtatcatgagcttttcctttctgcatcgttgaccagacacggaaaaggtatatgttagctcaatgcttcttcttttttttttttttttgtgtttgtattttgaaaaaatttactctgttagatgaccccgtattctagattgtttaggaagctaaagattttcttgtttagtaattactgccaggaaagtgaaatatttgtgaaaagagaatatatttttctgattatatatttatctgagattggctgtgtggagaatatactacaaggacttgagtgtctcaattgtttatttccttgtttcattttatttgcgttctgtgtaaaattaggaatgtattcaggtcaacttacctttggatttccttgtaaggcagattttccttgacc

SEQ ID NO: 20655 - DNA, 433 bp, Glycine max
  Intron number 1 from transcript Glyma01g07670.1 (locus Gly ma01g07670) derived from phytozome v7.0 (chr-ID Gm01; pos 8441104 to 8441536)
tgagcagcagggagaggccatcgtagttgagagaggtggttggtggagcagtagatgccttttataactaaaccataatcacaaatcctttattttttgttttgaaaatttatgtaaataaaagtgttttgaaattgtgttaaaaatcattttaactccattttagccaaacatttcttgttttgaagtttgcattaaccaaaatctagcaaccacctcaaatgagtctagtaattgattgttgtaaaataaatgtacactttttagaagagatggaatgagtttttgattctttactttttatttatttataataaacacttagttacttttattgtttacttggcattgctatgggcatgcttattcatttttttagggggttcagtataatgatgtatttctttttcttttttaattgtaggttttattc

SEQ ID NO: 20656 - DNA, 502 bp, Glycine max
  Intron number 2 from transcript Glyma01g36760.1 (locus Gly ma01g36760) derived from phytozome v7.0 (chr-ID Gm01; pos 49197468 to 49197969)
cttctccgcgatcttgaccttctgcttcgcattaggtttaattcatctttcccttttattaatttttcattttcattcgttgcattttcgctccaacgcttgatctgcttctgtttacctcgtatcatgggtttggccttttttttttaatcgttcctttatttgtgtgtgtgtatattgttgtcattgtctggtgttgtacgatgttgtgtgctttcgattaagacagaaaatgtgtttttttataaataaataaaaagtgaaacttgaaacttggggtgggggtctgctatttgttcgttggattgttttgcttaggttgtcttatttgattattttcatattaaaaaacgaccgaagtttggttaatgcttttcttctattacctagtgttttaaacattaaagtgtggtgtgtgctttttttaaggacaatgagttctaatgtgttgtttttgtctgctgcagttggcactttgttgggggctttgactggagctttg

SEQ ID NO: 20657 - DNA, 404 bp, Glycine max
  Intron number 3 from transcript Glyma01g36760.1 (locus Gly ma01g36760) derived from phytozome v7.0 (chr-ID Gm01; pos 49198085 to 49198488)
aatctgggattggttgtgtcttatacttggtgagttactcacctttcagaatgcagttctctaggtgcttttgatgctgttgttcaattagaattggagttttaccgtagtattttgcataatccttggatgcaaacctttactattggggttagctagatggaattccaattctgattgaagaacaagaccgaaaaacatttaaagaatgccatgtaagttttgactcttgtcaaattgggaacatctgttgggtattatgctcatgatgtagctatatgattacaatggaatgtattgttggtttgtaaacttattgtgttgtagcctcctgactccttagttttctttatcatttagaattgcatgttgtgtaacctgatctttttgagttgtgcagattg

SEQ ID NO: 20658 - DNA, 554 bp, Glycine max
  Intron number 2 from transcript Glyma03g29240.1 (locus Gly ma03g29240) derived from phytozome v7.0 (chr-ID Gm03; pos 37229104 to 37229657 reverse strand)
gtggaaccaaaatcagaataagaagggaaagcaaggttcggttcggttcggttttgttcttttctattgttcttcttttcgggtttcaacatgtgtaaggctgaatttgcttacgtgtttcgttttttttttcttctgttgttcgtgaattggttggttggttgaacaacggtccgtggttgatggcgccagtttatttgggtgagttcgaaatgcggtgctttcttcacttgttcttttcttttggggcgtgtttggataaacttctaaataaacacttataggagatgaaaataaatcaaacttattttgttaagttaaaatcaacttatgcacctcaacttttaaggaaattaaatgaaagagcttctatagaagttaaagtgcattagttgattttatttcatcttgctatttaattttcttccgttttcatgaagtttatccaaacagggttttattcttccctatcatcattatcgttgaacttgctggtgctgcatattttcttaagatgatgatgtttgttgttgatggattctggacaggggcgt

SEQ ID NO: 20659 - DNA, 806 bp, Glycine max
  Intron number 1 from transcript Glyma03g02170.1 (locus Gly ma03g02170) derived from phytozome v7.0 (chr-ID Gm03; pos 1912068 to 1912873)
aaagcacaagaagcaaaacaggtgtgctttttttattattggtttcagttataatatcttcatcctagttacttgattgctcttttgcatttttaaatttctttgcctcatattatataaaatggtcaaatttaaacttgcaaatcaaatattgggatgatttgcatttatagattattttcatgtagaactaactttaattgtgatgttgaatatctatggagtttcttgtatttaaacacttttctgatatttcagttactgttgtctaatgtatgtaatctctactaaagtgaaaatgtcgcatataagatgtaatgtaaaaataatgtgataaaccattgtcttgtaggggggactagacatcattattttttttttcttttatcaatccaaagattatgcctccaatcacttgtatatgtgtctacctatataactatatataaagaaagccaaccaaaaatggaagaaaaccaataattaatccacaaatggaactttagtagaagaagatttatgtattagaaaaacagacaagtaaacaaatttagagttgtgtttcttttacttactgctttcttcttggagatcgatgatttcaatgcgctgtgatcagggtgaaactaaaaatttcacgttatataccaaaaacatttgtttgctaaatcttagagaatcattcatgaccatggagacatggccaagaatcttagaaaatttcaagtcatgcttagcatttcagttttgttgttgctgacatttttttaacttcttgactttttcaggagaacccctcaagtttt

SEQ ID NO: 20660 - DNA, 349 bp, Glycine max
  Intron number 2 from transcript Glyma03g02170.1 (locus Gly ma03g02170) derived from phytozome v7.0 (chr-ID Gm03; pos 1912886 to 1913234)
accaaggtggaatcagtgagtccctaaaaacaaatgagcttagcattaccttttttttcttctgccattatcaagtcccgtgtaaattatcttttccttcaactttttaagacttttaagtaggatttttagtttaaaccttttgaatctgtagtatatgcaatgccataataaccctttgtttgtgccaatggatgctagacataagtggcccagggtggctgcatgatgtttgggccttctaatctaagggaaatatgtattgcaagagagaaaatattttatattgtgatttgtggtatattaatgatggtaatatgcttctttttagttgtttcatattagcagc

SEQ ID NO: 20661 - DNA, 520 bp, Glycine max
  Intron number 1 from transcript Glyma04g11010.1 (locus Gly ma04g11010) derived from phytozome v7.0 (chr-ID Gm04; pos 9264340 to 9264859 reverse strand)
tggagccactcaacttttttttaatcatttgtgtaagttttctcttccctactactactttcaatattttatttgccactttttgtttcctatgataaaaaattctactttttttcaaaaaaaaatttcaacgctgcaaattggatgccctgattttgagaagtttattgcttagttgtattctgtaaacatcattttggattgtaggattctatatattatatcagttgggattatttctttatggggtgacattgtacggatcaagacacaagcatttttttagcttgatttgtttggccccacttacatggttgtctttgattgatcctccgtcaaattcactttgccatttatattcatcttttgtagtttgcttcatgacaatctaaaaataatgttaaaaggtcatgttctacttcatgatattttcgtttgtttcagttcttgtttgtgaaagttacttgtgattttctatgttgcagatcccctgtcacttgtcagggatcaccgagcaaag

SEQ ID NO: 20662 - DNA, 474 bp, Glycine max
  Intron number 2 from transcript Glyma04g13180.1 (locus Gly ma04g13180) derived from phytozome v7.0 (chr-ID Gm04; pos 12759434 to 12759907 reverse strand)
tcaattttacccttcaggttctttccagtccttatctgtaacaagtaatttagtgtttgtttttacttttgatacataccagtacttaatatttccttagaagattggatggttttatgtcttgatgacataagttgtataataattggaaccagaaagtcgtatcccctttggctagctgatttttgtctcatatcatttctgatttcagttcaaattattgtaccattcttctggtcttatatgtcgtaaatgcaaattattacatgacatggattttatatttctaggtattaaaggttttgactttctgtaccttaagtcctgtattttccttttcaccacattgattttatatactgatatttgttttgcatacaattggtacatgtggtaatttgtctgattgataaagcagacttccgattccatatagttgataatttgattgaattattgcagaaagcctatttt

SEQ ID NO: 20663 - DNA, 607 bp, Glycine max
  Intron number 2 from transcript Glyma01g04810.1 (locus Gly ma01g04810) derived from phytozome v7.0 (chr-ID Gm01; pos 4398993 to 4399599 reverse strand)
agttagtatgatgcacatggtttctttcatagtaatatatacctttacctttaattggctatagagtttaattttctacacagtacactgatataaagctttttccattattaattaattattataaccattgagtacacgatcaatagatatcatgttattccagtttaacaaatgatttcaaatttgaatataatatgcaattacctttaatataacaagaattttttgcctacacagtactcttacttaacttgaacaatatattgtcttcattagagtatatatgtgtaatctatacaaaaaaatagatattatcttatatatgattttaaaattaattattacaaaagttaataattttacaatatatatttatttatgattggataatgcatatatattttagttgattgaataagatatacgagttgttatgaattcctctttatatttgatttccatttcggtgaataagaaaatacatataataattaaactcttagttatctatgaaccatatcttgtttaacagaaacatttactttgataataatgcatatataaatggaaacaggaggtggccgaggcttttcaggtgcaagca

SEQ ID NO: 20664 - DNA, 667 bp, Glycine max; identical to SEQ ID NO: 16925
  Intron number 2 from transcript Glyma02g44540.2 (locus Gly ma02g44540) derived from phytozome v7.0 (chr-ID Gm02; pos 49088751 to 49089417 reverse strand)

SEQ ID NO: 20665 - DNA, 864 bp, Glycine max
  Intron number 1 from transcript Glyma02g44390.1 (locus Gly ma02g44390) derived from phytozome v7.0 (chr-ID Gm02; pos 48984398 to 48985261)
ttgcactcattaccaatattattctgaaagtacttgttagcattcttaataaataaactaaaatgtgaactgtctacagctagcaagccaatctcattgataatgagaattttactttatcaattcactggaataactaatgtgatattttcctaggtacatattcggataatctaattgtagaacttgtattatacactattctttgcattaattttatgccacattgataaatgaagattgcgtaatttgaaaccatcttgccgagaccgaaaacaaacgtacgttttgtaacaaaaaagactacgtaattatatccttcggttttctgaatgaacctgttatcctcatgtaaaacctgtcccatttcaaagtcaagttatgccacaagatcacacacccttttgacaatggcatcattggttgacgaggtcgaaaaaagttaaccgtaaatagagatagagaaaataatagatataataaattatactgtatgataaacaaataaaaattagataaaaaaaaagattaaatacatattcataataatccagtgaacccaccctcgacgtcactataccaattttatttggagggaaaagttttattgtctcttctacaatcttcttaacgtcacgtatttcaaggggtaggtatttttggtaattgaatagaaaattactcctatttcaaaggggaaactaattggtcaagtgctgattaggtaattaaaacgaatatctttaaaaacagaaagcaaatcagtttatttatgcaaaactctacagtcctctaaacataacagacaaaaaactaaatagtgttccatttgctgtggtgttatgtccatgatttgtaaagttg

SEQ ID NO: 20666 - DNA, 802 bp, Glycine max
  Intron number 1 from transcript Glyma01g45390.3 (locus Gly ma01g45390) derived from phytozome v7.0 (chr-ID Gm01; pos 55693618 to 55694419 reverse strand)
caccctaagaactacggacctggttctcgcacttggtatgttactcatcttcgccaaatggtgattcaggatgagttgatccttttccctctttgttccttctcaatttgattatgcgattattattaaggtttttgcttttaatttgaagcatttaattttatcccccatatgagtactttgaatctgtgttttttctgataacaagtattttcctcattatttggttttgaataagtttcgtaccatcactattgcaatattacttttgttcttcgttaataattttaaagaggtgactcttctatcctgatgtcataataagatattcttttaaccattgattttctcttcattacgttactttgttgaaggttgagtgtgtgcttgggtgggtgtttaaaaatttgattttgaatgaaattaattttaaaagtagttgctttttcatcattgattttggttaaatgtaatttgattctgagtaatatgaaaagagtggtgtatgcattataaaatgtatgtcttattatattggtatatggcacctttattttcactcttttttcataatcataccaatatgtaatacgtgcttctctgttttaatgtatgcattttattttaaaactatagcaattttgtttggctagttttagactgttacaatttagatattctcagaaaacatatttttgacggtccaagatcggattagaattctagtgtgcgagttatttgttaattgggaatgtggtttactgttctttcctgttttgcagccgtgtgtgtgggaatcctc

SEQ ID NO: 20667 - DNA, 790 bp, Glycine max
  Intron number 1 from transcript Glyma02g46490.1 (locus Gly ma02g46490) derived from phytozome v7.0 (chr-ID Gm02; pos 50430159 to 50430948 reverse strand)
ctaagtggaaggtaaccaaccctctctctctctgctcaattaacacttatcatgcttttgacttacttgttttgttatttagtgaacatatatgtagaattaaaagaaataccatctcattgaaatgagctgctgaagttaaagcctatgtatgtgctgattgttttgaattattgatttgcgtgaaacgttgttatgataggtgcttaaggaatattacattatgtctatcttggttgttgtgaatgtgtccgagttaagaaaatgaggatagcagtgtgtttggatatgcatcccgcacgcgcgtaatttagaagcaacaacatgtagcttccattccaatattgacctgaaaacaagcgtaacgtgtgtagtcaacgcattaccaaacttgcactaagaattttgtgttcctggcaccacgggattcacccgattcttatgcaattgttttgtatttttttatggagggaaaaggaatcttttaaccagatcactgtatacttataagctttaattacttggcttggcttggctaagctagtattggattatttttcggttagttttgtgttgtcactcttattaatcttaaactaccttcttgagtgggctttttgtcgagtttgttggaatgttgaactctgttaatcagacaagtattttttttttccacgcacaagtaagagcattaatttatttatagtatgcatgtaatgctaagaatgatgctataccttttcttttggttagttttttctcctttatttactatcattttggttcccag

SEQ ID NO: 20668 - DNA, 909 bp, Glycine max
  Intron number 2 from transcript Glyma02g09420.1 (locus Gly ma02g09420) derived from phytozome v7.0 (chr-ID Gm02; pos 7374233 to 7375141)
tgtcgtgggaagggattttctgccacgtggatctggtaatcttcactttcttagcatttatttcttattaggagtttaataactatttatatgagcttgactgttaatataattattaaagacttaataaacttaacatataatataacagtaatagtttgtgattaaataataatataaaattaacattttatatatttttttacagtggtatgttactaatcagaaaatactagtattagagaatagtactataaaattatttaatgaaaaaattattaggttgtccatgattcaacttgtttaaagtgatgccaagtgtgacatgacatggaaaggtatattgatgcttgagctcatccagaaaaaaactgtagcaattttctttttctttagtaagttgaagatcgagagattttgatgcaccatttaattgatcttgcgataagggtttcattgagttttggaaggtaaagtttggcttgctgaggttactttgtcaacctagccacatctcatgaatggatatgtttgtttcagctttgaaaaagaaaatgctttcatgacgtattcaaaaaatatgtaacttcatatcatttgaacttttttattttttttaaacatgttttttttaatttaaagtgattttttgatatctaaatagttatttaaaaaaataagtctagtttttcttgctttgcttcgtaagccggattttattttttatttttttgaaattttcaatggctagaacggggtaatggccattttcctttcatttgaaacaaatattgttcattattccgttgatgacagtgaagagtgatttttttattcatctgaatgcctttatgacattatctttcattattaggtattgttacacggaggccactagttcttcaactt

SEQ ID NO: 20669 - DNA, 712 bp, Glycine max
  Intron number 1 from transcript Glyma02g14690.1 (locus Gly ma02g14690) derived from phytozome v7.0 (chr-ID Gm02; pos 13271047 to 13271758 reverse strand)
tcccttactctctctcatattctctctcatattatgttttttttttcgtcaaacattttgaaaacgaaataatcgagtaatgcttagttttgtttttatattattattattattatttgaacttaatatgggcgtaaaaataaattagaattttatataaattatgaatttttattattattaaactgaccttagttagtgcagcttattttttttaagtgcaaattttatttgtgtttagtttaattttgatgctttattattagtaaaacaaaattgtattattaattaaataaaacatgttagtaatatatttttttaaatattcttttaaacataatctttattatgaactatttttttaaaagagttttatttttaaatttttaataaattttaaataaaaaatgtgttagaattagatgattatgttcctaatactttttaattaaagttactctaagcattatttttaaagtaatttttataaaataaaattaaaaattatcatttataattaaaacccaccatggttagctgggtgaaaggaaagttattaagtttgtatgatgttttatgtttaaactccattactgttattgtagataactaaaaaaatatagtactttgtttaataattaaatgatgagaagaattatgcatagatagtgtaatatattttatagaatcatctaatcgcaattcatcaggt

SEQ ID NO: 20670 - DNA, 919 bp, Glycine max
  Intron number 1 from transcript Glyma02g35230.1 (locus Gly ma02g35230) derived from phytozome v7.0 (chr-ID Gm02; pos 39952724 to 39953642 reverse strand)
acaagactctcgatctcttgatctccactggtaaggcttcgtttcggatcatttgtttgtcctaatttgggaaagttaaatttcatttcttttcattttattttcattacgtcatagtcattgcaacttatatctcctagtccggggttattacaacttaacaattgtggttttgagtttgagtaccggatatgtagtagaattcaatatttaggatatatttgttgctcacaataattatatttgactagagcatgaatacctgacccaagagaaattatatgtggatgtaataattttatacaacgaagggagcgacaaggagatagaggtaaaaagaatcgtttgagataaggtgattgatgttataaaaagagaaagaaaaaagaataatgttggagaattgtgaataatataagtaattctctgaatttcttagatgtcacatcaagttgaaatatagcaaccaaggtttttggttccttaagcaagttctatcttagacacttcagtcgtatgatgctcaattaaattttagttgcaactcaaagtagattttgggtttatatatttgaaaaccagaaataaagtagtaaatttacaaaaacataacgaaaatttactagtaggagagttgatctttcatattcaagcctactgggacagagtcatgattaatttctcattttcttcatcattgtttcaattgaagaagaaatagaacttaatggaatcagtggatagtttattaaaatgcaaagttgtatttcttccaaattcaagtctgtgaatgtgaagcacttttgggttcaatgctgtctaaatctcatttgaagcaagttttggaggtcctataataatctgtgtttttcccttttttgcaggtgagagtgagactttccttcagaaggccattcaa

SEQ ID NO: 20671 - DNA, 966 bp, Glycine max
  Intron number 1 from transcript Glyma02g47380.1 (locus Gly ma02g47380) derived from phytozome v7.0 (chr-ID Gm02; pos 50978289 to 50979254 reverse strand)
gattcattctctttggggggcttttgtggattaaggttagtatttgcttgattagggaagtctttatgtgacctgggtggaatgattctgtgtctgcatgtgtgaattctggcaaggtatcacccaaaccaattttttttttctcttgtggcttgtgatgtgggaatgtttttctggttgcatatgtgggagaattgggattttggtgcatgtactaggataagataaactcccaattttggtgatattctattaagtgtagctcactagctagtgtgtatctgcttctgtgaacaatagctatggttgcatgttggaatatcacctggtgctgtttggttgtgtgactaaatatatggcagaaataaatgttgctgattatgattttgttcttctaggggcatttggtttctgggcactgtccaagagttgaaagattttttctttttctttaaacagttgcggctcctgctgaagatcaagtaatagcaaaatggaaactatttttgttttaagcctctgtttgcttaacaagtattatcttttcacgatgaattttaataattttgaatgtgggtttatcaattttctttaacttgcatgtctactatcaatcagcatgctgcattttaagagcctttcattcattaatgaagctatgaactagtactattgtaactttctgtgagttgtgcttgatatcatatcgatcaatttgtacctctagaaggtttggatatcaatgtttctgagacaattatgggtatagttttcacttcacgggattttgtttcagaaataccttatttacccattcttttaattccattggagggtctcttattgtaaaggggaataaccactgttgctatcaacttttatttatcttgcctttgttttagcataaggaataaaatttgtaatccaatattcttttgtagggaactagggatctgaagataagat

SEQ ID NO: 20672 - DNA, 603 bp, Glycine max
  Intron number 2 from transcript Glyma04g42170.1 (locus Gly ma04g42170) derived from phytozome v7.0 (chr-ID Gm04; pos 47955079 to 47955681 reverse strand)
attgtacactgatcaaggtataatttctcaaaataataaattatgacttttgttgtggtttgtgatttgggcattgagcttcttaagaagaccagcttatgtggtgtttaaagttcagaacctagattttcaaacttataggtcaaatgagatttcattagccctcagtgacttcaatctaaagtcaaagcttcagtcaaacataatttgactttaggatcatgatcaatccacctaggaatttgcagaaaccatttttttgaaatatttcgttctgttctacttttaagtccatgaagagaagtaattacaaaattcaaactgaaaattaaacagataaaaacactgttaaaatttaatccactatgataaaagatttctttattccttgtaagtgatgtgaaccataaggatacccactgcatagtcatcagaatatcatttttcttagttcttgaaagcatcatttatttggagacaagtgactgcaatatgcaactgtaacgctatactctactaatggatttttattgccccaaccccccccccccaaaaaaaaaaaacacaggttgatagtgttaacaaacctggaattctgctgga

SEQ ID NO: 20673 - DNA, 717 bp, Glycine max
  Intron number 2 from transcript Glyma02g14620.1 (locus Gly ma02g14620) derived from phytozome v7.0 (chr-ID Gm02; pos 13208414 to 13209130 reverse strand)
gaattcggtcactcccttactctctctcatattatgtttttttttcgtcaaacattttgaaaacgaaataatcgagtaatgcttagttttgtttttatattattattattattattatttgaacttaatatgggcgtaaaaataacttagaattttatataaattatgaatttttattattattaaactgaccttagttagtgcagcttattttttttaagtgcaaattttatttgtgtttagtttaattttgatgctttattattagtaaaacaaaattgtattattaattaaataaaacatgttagtaatatatttttttaaatattcttttaaacataatctttattatgaactatttttttaaaagagttttactttttaaatttttaataaattttaaataaaaaatgtgttagaattagatgattatgttcctaatactttttaattaaagttactctaagcattatttttaaagtaatttttataaaataaaattaaaaattatcatttataattaaaacccaccaaggttagctgggtgaaaggaaagttattaagtttgtatgatgttttatgtttaaactccattactgttattgtagataactaaaaaaatatagtactttgtttaataattaaatgatgagaaaagaattatgcatagatagtgtaatatattttatagaatcatctaatcacaattcatcaggt

SEQ ID NO: 20674 - DNA, 854 bp, Glycine max
  Intron number 1 from transcript Glyma03g36240.1 (locus Gly ma03g36240) derived from phytozome v7.0 (chr-ID Gm03; pos 43246579 to 43247432)
gatagattttggattgtctgttttcttcaaaccaggtttggataaatcgttcattttattttccccttttttggtctaatcaacatccttctcttattgtttttcttccgccaacgtttgtttttgtttttgggagggtaattaattaattaacctgctctttttactatttttttcaaataagcaaaagattaagatgttaaacccatgttaatttactattttatgtcttcttatttaaaaaataaaaatttaagagagttatattctatttataaaaaaaacaaaatattaggatattgagtgtgttaatctgttattttatttattttatttaaaaaagtgtacaactgatttagctaccaatatcatatggaaatctccttgattaggcaaatgcttgcgtgtaccactcacagggagttatttgatttttcctctcgtttttgtcagggacaatgtatctgggtgtcagtctttttttcacagtgaatgagtcaaatttgttgtattaagataatttaatttatgaacggaaagtgtaaaaaaaatattttgttatccaattacagctatgggtcatgtatgaaaaaattgttaactttagttataactattttaaaagttatacctaatacaatttctaattgtttgataatataagagttagtttgatttgagaacatgcagagctttcccgaagaattaaattgtagctgatgcttccctcaaaataattacttgaaaaacttacattttctgcttgtttaagttacatgattgttatgtgtgtttgtcactaacaattttcatttacaggagaagtttttaaggacgtggttggaagtccttat

SEQ ID NO: 20675 - DNA, 995 bp, Glycine max
  Intron number 2 from transcript Glyma01g02440.1 (locus Gly ma01g02440) derived from phytozome v7.0 (chr-ID Gm01; pos 1989787 to 1990781)
gggtggagaagctcattgaccagcttggcttaacggtaagggttttgcaaccaatgaaatagtcctacatgtactagattaatctgctaccaattaattgagctgtttacttattctaaactcagaaaatattataccaataagtagagtaactttaaaagaattaagtatcaatgtttttagggttttggctccttaaaattatatgcacttctctctaaagtagtatatatgaacttaatcatgtcaacagctaataaagacgtactctgatcgaaataatacatgtacatgtaaaataaattatggaattgttacattttgactatcattgtcgtgctctgtattttctgcaatgtatcttgtattttagtttactcccttctatctttattataagatataattaactaattgagcaagtaagattcagatatttgattaatttagttaaaacttaaatatgcttttaattttttaaaattaagtattattttattccttcaaatttgaaattatttttttaattctaaaaattcataaaatattttttttagtttttttaaagcatgattcaaatatagaataaaaaatttataatttttaataatttttttattgccatattttatttttaaaaatttatgattcaaatataaaataatttttttatttttaataatcaaattataacagtaaaacatacaaaaaatataaatcccgtatttcttgtttaattcacacttttcaaaagaataaaaaatatttacgaatttcacggattagaaaataactttaaatttaaaggactaaaaaaataacttgaaacataaaacatgtttaaatatttagttaataacattaaatttatttattgtaattggtattttgttttcttatcacatgatcgattaattgcttaatctctaacacatgcatgtttgtgttttggttgatcagtcatctcgaaacacctacataggagacgaaggtac

SEQ ID NO: 20676 - DNA, 809 bp, Glycine max
  Intron number 1 from transcript Glyma01g36170.1 (locus Gly ma01g36170) derived from phytozome v7.0 (chr-ID Gm01; pos 48666769 to 48667577 reverse strand)
tagcactcgaaaagagtctccacaaagttgggacggtatgtatgcagttaatgaaactctgaacctctctttctgtaattattattattattattgttttcgttaactctctgtttgtgcgtttccctttgaattcaactgtcttttccacgtctcttcaatttatttcagaaaaacggtagtggctgctctcaatttatgtcccctgtaatttaatttggaaattgaaatatcttttttttttccttgctgaattttggtcattggacctacatatatagatgaataatttactgttagctatgacattacgttccttatcttgtgtttgcggttctcttaaattgtctttgtgagaaattttcaaaacaccaatttaaattaaaaaaaaattcttccttaaagttgaattgattcattcaacttgaagaataattttttgtttcgttcaaattaagagttcatgcaagttagttataacaattttaaattgaagttgttattgctgggttttaattttttttcataggagtgagttttttctggtttcccttgttttgaattcccgaggacgatttggagagtagtagtatttaattagagtatcttttttctttgttattgaaattcaggcacataatttgaagtgttagtgttagaaatataggagtatcaagttgaggggttggtctgatttgttgttgtgatcatgatgggtgtttattggaattctcttgtgtactcttttcctcacccatttgaaattttcttcagtggcttggacaaaagaaaaagaaggctttgcttga

SEQ ID NO: 20677 - DNA, 945 bp, Glycine max
  Intron number 1 from transcript Glyma04g38420.1 (locus Gly ma04g38420) derived from phytozome v7.0 (chr-ID Gm04; pos 44827855 to 44828799)
tgcttgtggcggtgctcacaccctcttcttaacaggttcacttttttgttatacttcagcatattcagtattctttggttttcttttaacctctgtttggaacgagggaaaaagagtggagaatgaaaaaaaaagtttgaaatttttaattggaaggaaagtggaacgaaagaaaattttgaatttttggtttcattttttctttccactttctcttcaaccgttatccatgttttctttctatttatttattcgtttaattaaattgaggatttaaaaaaagcggaattttgaatcgttttctgcttgatcgctaaagtaaggttatgacttcggaaaggttaatctcgtgtaatagtatgaagtgcaattgtttatcgattttatgcacaggcattgttaagagtctttttttgtggttcgtgtgggagttttgtagggatgcaatggggattatttcttgagttcattggaagtggaatgtctttaacttcctagttgctggtttagcttagtaacagctttcactgtgctattggattggatggtataatgtgacagtgtttgataggatgggccttgagatgcccaaatagatggcttatgaattaaatgccttagatattatcctttttatgttatttagtttttttttatcttattttcctaaaattgttagatgtttccacttgtatggttgatatttcttgtgaactcctatttaacagggtatgtgccgtgtaatgaatcatcaatgagaatatgaatgtttatcttttagctttctttgtatctttctctttagtttttaggagtagtgtagcatagagttctctcgagcttatcagtgtttaacattggtgatgagtttcatgactattgaaagtccatgactccttataatgtcttagttggagttcataaattgtcctcctttcgcagagg

SEQ ID NO: 20678 - DNA, 441 bp, Glycine max
  Intron number 1 from transcript Glyma05g01390.1 (locus Gly ma05g01390) derived from phytozome v7.0 (chr-ID Gm05; pos 906088 to 906528)
cttcctctctgcaccttcctctgctcctttcctcggtcagtattcactaactaacctttttttttttttttatggacatatgttaaagtttattagaatgttagtttttgttaatagagtgttgaaagtatgaccttttatgtgtttttttcttctttaatcatctgattcatcttatatcttcgtattcacttactaactaatctaacatcttaagatatatggggaggttgactcaagagttgggaaagaacaaaagaaagagagatcgtgagttcgaatatactggactaacatttgtaacaaaaattaacaaaatagcatttgttcgttaaaaaaaaaaaaaaaaaactaatctaacctctctctcaccaatttttgtttttgacttatgactaatggatggtgtttttgttataatttggttcaggttcgagatcc

SEQ ID NO: 20679 - DNA, 398 bp, Glycine max
  Intron number 2 from transcript Glyma05g01390.1 (locus Gly ma05g01390) derived from phytozome v7.0 (chr-ID Gm05; pos 906875 to 907272)
gtctcctcaaggagaaagacaagttaaaagctgaggtacttcaattaaagaagaacgaaatttagatgcagtttgttttgagttttttttaaccttgtttttattattagaattggtgtttcatctaaataacataacctatgttgatgtttaaagcaaatttttatcatagtatcatataaattatcgagtcgaaactttaattctgaacaaaactaacgacacaaaaaaaaaattgtccataaattaatgttcaattcacatctatatctatattaatacaaatttgatcactttctgttttcttttttttttattttggctgacatgttataatttgtgtgatgtttttgatcggattaggtggcgagcctcactgagaaggtgcttgcaagagg

SEQ ID NO: 20680 - DNA, 769 bp, Glycine max
  Intron number 1 from transcript Glyma03g34900.1 (locus Gly ma03g34900) derived from phytozome v7.0 (chr-ID Gm03; pos 42205200 to 42205968)
atttctccagttttgttcgccagttaaatacctatgtgggtactctatgtatttttattttattttttatgtttctattgtaagtttgtaactggtttgatttgatgaagatcaaccatgtgtaattatttgatttgagacattgttttgtcaactgggaatgaacttttttttctttttcaagtgtatcctaagtttctcttgatgctttaagataatgtattatgtatctaactttggaatgattgtatgtgtttaagcaggtacagtagtgagccatttgttatttgtgattttttttgctttcttatttgtctcttgttaaaagtgaacttccatgttgtggacttttctatgttagcccctatgactactgatggagctgtgtgataagaatatggataagaatatggttcagatattgttctatgtggattgtagcactagaactggcagcagaaagaatgtctctctgagtgtctactgtaagtagggagtggattgcatcctcagcaggtagtgttctatgtttctgtgtggcgttgtgtatgctgccagaacttatatactgttatcattttgatcatttccttttgtttgtgtaaagcttgttttggattcacagattgcaaatttcaacacagcttcatctgctcctctaatgacttgaactctggtgtgtctaaaccaaaatttatttttctgctccattgattctcaattcacttggcatttttatccagggattccgcaagattgacactgaaaa

SEQ ID NO: 20681 - DNA, 993 bp, Glycine max
  Intron number 2 from transcript Glyma02g14430.1 (locus Gly ma02g14430) derived from phytozome v7.0 (chr-ID Gm02; pos 12975050 to 12976042 reverse strand)
ctgccccacaaccagaaacacccaattctgaagcggttagtgatttattattattattattattattattattattattattattattattattattattattattatatgtttttagtcctttaagtttagggctgtcttttttagtctcctaactaaaatttgcagtttttagtcgccaaatttcgtgaaatggtttttttagtccttgtgactgattttgtacggtttagatgaacaatttgtggctatcatgaaggactttaaaagcattttgggaattggagggactaaaaaaatgtaagttttaatttgggagactaaaacaaacaaacttttaaatttgagggactaaaaatatatttaagtcttattttactgttattataaatgaaaaatgaatttaatttatatgcactgtaagtataaaactgtgttacatacatatctaataacatttaatcattttactacattaatataaagtgagttcttattgaatgtctgtgtaatattgttttacactgagagtgcatataaatgaaactcaaaaagaaaagaaaaaatgggttatttgtatggtttttagtttctggatttttctgactgaggttttattttgcttgtaatttatgttattattaataaattacaaaaatgttatcttgttttaacttttttttttcttgcctcaatttgtgacccattctgttattgactttttatcactttattatgtagttgtacatctaaaattagaagaatagcttttaatttcctccattatgatattctgaaggcaacttgtttttgataagttgtaatggaattacggtcttaatcgtatatttctcttgttggtacttggtagagatcatgatgcatgatcttcttctcaaatatttgttttgtctatagttctttgatattgatatatatttatactttgcatttccagggtactagtattgacttaaatcttccaagaagaag

SEQ ID NO: 20682 - DNA, 691 bp, Glycine max
  Intron number 1 from transcript Glyma02g04570.1 (locus Gly ma02g04570) derived from phytozome v7.0 (chr-ID Gm02; pos 3737914 to 3738604)
aggttggttcgtctctacttcgtgttgaatgttctgtatcgggaacgaaccaagtccgtatggactaattctaagacaatgtgtgcactttagtctgtgactacattaaactgtatttatttttttatgttgaaaaaacatagataaagttcctttgctgttatttgtattggtttcgaataaaattggagtttttcttcaataatatgcataattctttaatgcaaacatttattaagcaaattatcgaggtgaaactttaattcttattggaagataagaaacagtacctagatgtttatagtataaatctttaaacggaattgaaatttcactttaataattcatgtaacaaacattaaaagtattatcgaggtaaaactccaattttgattggaagacaacacaaacaatggacgtagttcttagatgtttttagcataaaactttaatcggaattggagtttcactttaataattcatgtaacaaagttatgctacattaaaggtattaccgaggtaaaactccaattctaaccggagaatcgcgacaaaagcacctaacaatatatatttttgagtttttttttctcggttgatgtgttttaactgcaatgtttttcttctttttttggtcatgtccgtgactgtcacagaactcctaggactagtgactttcctggttatcctt

SEQ ID NO: 20683 - DNA, 880 bp, Glycine max; identical to SEQ ID NO: 16270
  Intron number 1 from transcript Glyma03g35450.2 (locus Gly ma03g35450) derived from phytozome v7.0 (chr-ID Gm03; pos 42647825 to 42648704 reverse strand)

SEQ ID NO: 20684 - DNA, 719 bp, Glycine max
  Intron number 5 from transcript Glyma04g36000.1 (locus Gly ma04g36000) derived from phytozome v7.0 (chr-ID Gm04; pos 42513242 to 42513960)
ccaagtacgtttttctttaaagaattgacattgtttgctccctagttctgttcctggtatctttttgtttttctttatgaaagaatttgaacttttgttttgaaggaaggaaactttagttataatttatatgatttaagacttggatccataagtgatttgcaatgaaaaggcttcgatgttcatgtataacgtttggatggtaatgatttggaaccaaatgttcttgcagcattcccttcaatcctccatttccatagctacctctagtctgttagaattgagggttgttgatgggaacccgagccatattggtctcaaccagtggccccaatacagagaagagaagcttattaaggtgtgcacctgaaggcccaaacacccaggccttaactctcaccttaggcaagaagtggaatgggagggaaaagttaataatggaatataggggaataatggaatattggggataggggcttttatttgaattgtaattggaggtcagagagtttctctcacttgggggcttagccctttcttcttgtattgcctattttcattgcataatatgctgaactcaataggaatatcattggtgctttcagttgtcttgctttttgtacaaatttccacatatgatagtcatattctcatatcataggtttagttgtactttttccttgcttcttaacattgaccagatcattgcattttctaga

SEQ ID NO: 20685 - DNA, 388 bp, Glycine max
  Intron number 1 from transcript Glyma04g03970.1 (locus Gly ma04g03970) derived from phytozome v7.0 (chr-ID Gm04; pos 2912583 to 2912970)
caactattcttgctttccttgaagcgcaacttcaggtaggtatatgcatctatttacatcaatgggctttgatttaccatataggcatacgtacagttttttttgcgtattaaaaagaggcattaaaccaaattataagttgtttgaagtaaaaatggatatttaaaaccaaatatacagacaccaattcttttctacaccatcagtttcttaaaaatatataattaaaaacaaaacactgataattagcattttcctgtctatattcgtggaaagaaaacgtcaagaatcatggataaagcacattatcttataagttaattataacttaatgtggtctgttaattaataattaacgatctatacatgcaggagttggacggtgagg

SEQ ID NO: 20686 - DNA, 693 bp, Glycine max
  Intron number 2 from transcript Glyma05g06090.1 (locus Gly ma05g06090) derived from phytozome v7.0 (chr-ID Gm05; pos 5678395 to 5679087)
tgaagtagacactgaaactgagagtgaaggtatgctttaggctataatactatatgattttttcctgtttagcttgttctttttctttctctttttcatttgtttcccttctttgttctttcaattttcattcagcttgctctcttaaagattcaatactgggtgtgcgtgaagataatccacttagaacacaatccatattcccaagtcaaacatcaggcaatacttttttcctttgcattactatggttctttaaaagaagaatatgtgctctttgcttttatgcaccttctgccattgcttgctctggttacataatcagttacaggagcaactcgttatgaaatatagaatctaaacacagtatctttccataggttgcatagatttgttccctctttttggaggacatgggaaacctgtgttcttaaatgatgttcaattaaacttgacaagttacacattatatgttgatttttatggtgcaagtatggagctgaaatgttccttggaaaaacaaaggaagtctgaagcaaattccaaatattttactagcttcaaagtacacgaaattaaattcttaagtcaactagcttgactaattttgtgaagttcgaatgattgactgtttttgacacttgattgagttcagagtgttaaaaccaccataatatgttgattttgtaattcag

SEQ ID NO: 20687 - DNA, 787 bp, Glycine max
  Intron number 3 from transcript Glyma01g28830.1 (locus Gly ma01g28830) derived from phytozome v7.0 (chr-ID Gm01; pos 38711709 to 38712495 reverse strand)
attgtacagtgcatagaaatttctttggcagccaggtaaatgcatgtgctatgcattttaagctatactataatctattaaacaaactgttgacaaccatgacaacccaaatgtacaacgaagcctatttaattgttggagatgaaaatttcagcttagaattctttttgtgtgtgtggacgtaaaggggaagggtcattcttaaatggcgccaatggagaaatattgggggctctactgtcattgtcactaactcggccataagggatactaatcaaattcctagagaagcttttaaactctcttcctttcctcttctacctgcttccttcttgggtcaagtttcttattatctttaagcatcaaaactaactaatgtaccctagtgtccgaaggctcctcactatgcaaaggtgtggctgagggtcattgtatgcaactttatatgcaaagaggttgcttccggatgcaaacctatgatctttaagcatcaaaatctaaaataattgcaaatattcagggtttttgcatgtttattttgccaaaacaaaattctcttgttttaatacatttagcattcgttccattataactgataatatttatggatttctatgcatgtaaatataatatatgatacacaaagctacatgaaattagtgaagggaataatatgcttggtttgaagaacaaatatttttgtgcactttgataatttggataacatttaactaaaatacatacttatttagattcaaagctttgaggcagagctttcagtgccaga

SEQ ID NO: 20688 - DNA, 822 bp, Glycine max
  Intron number 2 from transcript Glyma03g12140.1 (locus Gly ma03g12140) derived from phytozome v7.0 (chr-ID Gm03; pos 15106963 to 15107784)
gcagacacacctgtaagcaattccttttggttcatctttcttaaaagtgaaacagaaaagtgaccacttttcatcttttagaaaatatgcatgtttatagtttctgttctagtttaatttgaacaattggttgtgttaaactgttgattactgttttgtcacaaattgaatctgtcgatttaggacagcattaatctgtaatacattactcttatcagaataacctatttttttattacttacctaacaaacagtttatataaatgaattaatgatgtctgttcagcttccatttgatggcatacagtattttttgttaaatacaaagtagttaactggcctttgaattcttagattgttgttaacctacagtatggtagaacttgtcttgggtttttttacatgctaatgattttattaattattaattttctttgttaaagatcaatcttcacattttatattgctgctgtgaccaatatgatccagccaaaaattagtttctatgcatttatcccttatgtggataatgtataggatattttgtgtcttatagcatattcacaaagatttaacttcaatattttaaatcgagactagaatactatagataatatatttattatttttcttcttcaaaatactcttgaatggtgtgtaacgtagagcaaatatattttaacttcagtttttgccttatatgccctggttgtcaattcttgaaggtttttagaaagaaagaaaaatcaccatggctttcactttatcttttaatgatttatatcaggtagtaacattctgggaaggggagatagttgatac

SEQ ID NO: 20689 - DNA, 253 bp, Glycine max
  Intron number 1 from transcript Glyma02g01900.1 (locus Gly ma02g01900) derived from phytozome v7.0 (chr-ID Gm02; pos 1371202 to 1371454)
tcttgacttggaatctagaaaagcagaagaagctggtaatttcccattattttttctgggattttgtcaaaattcagtttttgaatcccgggtgctatgatgtttaattataatcctttttctctctgatatttttgcttttactgaattttaatggcttgatgcatgtcactttcttatgaaaaagcaatctggattttgtattactgttatcctgagattgaaagtcttcaaaatgcagcattcagaagat

SEQ ID NO: 20690 - DNA, 510 bp, Glycine max
  Intron number 1 from transcript Glyma04g07870.2 (locus Gly ma04g07870) derived from phytozome v7.0 (chr-ID Gm04; pos 6139982 to 6140491 reverse strand)
cactacttatcatttcggctttccgaaaaccggtggtaccgttatataacttatattcattcacctttttttttctgggccaaatttagatgttgttccttcaatacaaagttaagtcaaatacagtttcttaagagttcttggccttgttttcctatcaaacttcttaggtgtttttcttgttgtttttaccagaaacagagagaaatataggtataataagtgatacgatgtgatgagcagagagagattgaaacaaatgatgaatgtcaaagtagtgtttgatatataaaagtttatatatatcattgttataggtataacttaccttactgatgtgaaactccaactttgactgtggaacaatattagaaacgcttaaagaattgcatctaagtttgcttttttgctttgttgatgttattatggatttaattaatgtggtagcaatggtattgcgtcactcatgtaacttttgtgtgcagcattgagagcgcaatttctccttga

SEQ ID NO: 20691 - DNA, 509 bp, Glycine max
  Intron number 2 from transcript Glyma05g01150.1 (locus Gly ma05g01150) derived from phytozome v7.0 (chr-ID Gm05; pos 729595 to 730103)
gttgagacctcgaaaaacaggtcagagattctaatgttttcatgaacacgcatatgagataatctgatatgtagtttcaggctcaccacagaaataagaatttgatttgtgccggtagttttttctgtgtgcaattccttttgtaattcttaagtttagttggagaaaacttccttatgtaattcttagggttcaattggagaaaacttccttatatgatctgaaacatttgatgtattgagttgatgcaagtgtaaatataaaatatctattattctgtgtgtttaaactacaaagctatttgttaggacaaatttaaatttgaccataactattgataacaagcagtggtggcagcagtagtattgatgttatactaatagtctaatagcactactgcactacattctagctgtctcttgcatgagtagtttatgtggactttacaggttcttcatctggattcagttcttgtaaacttgatttgcttcaggtcttcttctggtaaa

SEQ ID NO: 20692 - DNA, 723 bp, Glycine max
  Intron number 2 from transcript Glyma01g41210.1 (locus Gly ma01g41210) derived from phytozome v7.0 (chr-ID Gm01; pos 52791239 to 52791961)
gagaacgaagaaggcaggcattgtcggaaaatgtaagttttctaatcacattatgttctaaattccatataatatttcaattaaagcttcgagttaagctaatgtatatatataaatatgccgcggtttggtatgatggagttgttattgattatgcaatttgttgaaagatttgaatctttactaggcgcaggcagaatggctaaaatactttataattggagtgcattttgcataggcgatggtattatgagtgtagtggggtttagattttgggcaaaattaaggtgccttatctctcttgcattttagcacttcactattttaggcatttactattcagtactctatgtttggataatggatttgcttgaagtgaagtgaaatgacattgagttccactatttcatttgtttaaatgaaatgtaatataatgcctttgattccatccaatgtctctcgttttctttcctttcaatctgggaatatgggatggaacaaatttcaccccccctctttttttggttctattataagaataccaaacgatataattgtaattttattctattctgtttcatcttgtttgatgtcatttcactcacaataactgcaagaaatttggattgtcactgaatatgcatttttgagaagacattagtattgttggattaaaatttacagaagccatttcaacgtgttttcttatgttaggtacccgat

SEQ ID NO: 20693 - DNA, 630 bp, Glycine max
  Intron number 1 from transcript Glyma01g39120.1 (locus Gly ma01g39120) derived from phytozome v7.0 (chr-ID Gm01; pos 51109485 to 51110114 reverse strand)
acaaagtaatttcatcttcttcttcttatagtttaacaaaagcctagctgattttttttctttctttttctgtttgattgcaacttgcaagatttttagaagcaaatggtcgtgtaagattgtcagcttcttctaaaaatgaagctatataacataaaagctcctaaaaattatgacataatcttaaataagttattctaaaccaacgtggatcaattgacacatagttgttgtgcttaatcaatagtttcgagtttgagtcctaaaaatgttgactttgagaaaagttttattactcataggggtcttactggactttagcacgattgtttcttgaagaggatacttcataaacaaaagttctaaataattgaaaaataaaacgtttcaaagcttaaacaaagaagtactttaaccttacgcatggttttttttttttttttttaatttctctttaggaattattcttatggatcatgcaattgctttctgtatgaagaagaggtgtaagctttttatccaaaactgaaactgggttctttcacttctcatgagaaaaacgtagtcctgtccttctgcttttcctttttctttttctttttcatgaatacagcttgtatcacagatttg

SEQ ID NO: 20694 - DNA, 718 bp, Glycine max
  Intron number 3 from transcript Glyma03g39910.1 (locus Gly ma03g39910) derived from phytozome v7.0 (chr-ID Gm03; pos 45827875 to 45828592 reverse strand)
gtgtttgcggagcgcagcgtcatcttttagggaaggtaactagtaacaactcttgctctacccgtgcatatgtatatgcgattttgttcatgcatctgcatttttgtaggtttattactgtaacgtggccttcatgcttttgttcatcccttattatataatttgggggataattttcattgccacccataattctatttgctgttgcttttttttccctctatctttgtggttcctttggttgattttcttgtgcaaattttcgcatatgtgaaactgacatgttttggagctgaagaattctcttttatcttaattgttagaaaacagagaaattaaaagctgctccttttttttatgaatccttgttaaaataggcatgcggttaaaatccccggaaatcctgatgatggatgttattttgtgccataaatttcttaatagatttatttcttatgtgaaccatgagatcctttagttgaattgggtggttgtcctgtatttttgttgatcaaatttgattcagtatgctttctgaactattggttgtgccacgcgtgttgctttcatatgggtgtttctaggcaccaaagttgcctgctttaatgctttttgcaaatagccgcctgctttagtgctttagtgcttttgtgcaaatagtctcctgctttaatgctttgtgcaaatcaagaaaaagatacgcttgtttctttctcgc

SEQ ID NO: 20695 - DNA, 729 bp, Glycine max
  Intron number 1 from transcript Glyma03g38600.1 (locus Gly ma03g38600) derived from phytozome v7.0 (chr-ID Gm03; pos 44912078 to 44912806)
atagataggtaatgggcggattgggtatcttttcgttagaattttgattcgtgattaggtatccgtgaatctatccattaaacatgtaaagggtagtttttttttttaaaataattttcttaatggatcaatactacgattaattcaactcaaaatcaatctggtcatccacttgcttgctacccttagttttgggtttttgtagagctgttgagctcttaccccaagctccagtttcttcaggaagagtgagtttgccccttataagttacaacagattaccatattgacttgcaatgtgttcttctagtagtgtcatgttgtctgatgactgagatggttgtagaatatgttatattacaacattgagaccagaaggtttttttttatcattgaaattgactaaatgcaatttgacttatctatgtcagcggtgattgtcaatttagaaagtatagtagtaaccgtggtttccttgaacccccttttgtattattattattattatttggtattctatgatcctcatcataactaacacctttgtgggctggaacttgagaggccaaatgatgtcttaaacacatacaatctgaaatagtgttgtaatttttgccgttattgctgacatatacataaatccatcattgatgagcttctgactacttctgtcaccttccctgtctattttttattaataatttgcattaagtctaattttgcagctac

SEQ ID NO: 20696 - DNA, 440 bp, Glycine max
  Intron number 2 from transcript Glyma03g38600.1 (locus Gly ma03g38600) derived from phytozome v7.0 (chr-ID Gm03; pos 44912820 to 44913259)
gcgtggcgcgagcttggaaagaaggtgagttgacttttatatgcatatggcatatgttcttttcattgcaaatttgtatcaaatatgataattatccagtttgtaggtgattgaacttttcccgtaaaaagtattatgtcgtagctcattcagttgctgataatgttctttatgttatctgaatgcagagaatatatatgaattttactagagctttgtcgacaacaccatttagacatgtggcaggatcaaattttgcatccatctttactgtgcaatctgtttgtgcatcagcaagatgtgtgccgggtaatagacatgctttgtgcttttaatattgtattttgtgctcttattatacattacatacttagctactcaagttcttttaactacattatgcagatttcatcaacctatcatctctgggagtggctggt

SEQ ID NO: 20697 - DNA, 963 bp, Glycine max
  Intron number 1 from transcript Glyma01g01410.1 (locus Gly ma01g01410) derived from phytozome v7.0 (chr-ID Gm01; pos 1023323 to 1024285)
ctgaactacgctacagcttccagcgcaattttcaggtatctaaccattacctgatccctaataactttttcaacctgtcagctatgtttgatttaggaaattagtttgtgagattgatacttattctcatactctatgattcactagtaacatagtatcatgctctagaacctttaattcatcattatattataaattgcagcgtatccccagttttgcttttgctattacattttatgtgcaccttacatgctaatgctatccatttctcctttgttatcatatttatagtattatagacttaaatggcgcttttggtcctcaaggtagtgtgattgtgcgattttggtccctcaggtaccaattgctcgcaaattgggtcctccaagtattgcaattgtgggattttggttcctccaagtattgcatggcactgggtgatgacgtaacaactaatgttttgcctaaagacatatgctgatgtgacttaattgcactttttgatctcttagaattgcaatgcctaaaggaccgagttatgtcagcatatgtgtttcaaatgtcatgttatcatccaatgccacaccaacaaaatttgttaaaaatttaatgaaagactgtcgaaaccaaaatcacataattgcgatacttgaaggacacaatttgtgcaattggtacttgagtggccaaaagtacaattaagccattattataaacaactacaagcatgtttggaaacctgttagcatcattacaaaaaaagacattcagacatctcaaagcatgatttcaatgtgggtttagttggacggaactaataaccaaacacacgctatgtatcattttctttttttgtggaattgatttagcatttagtattcttctccaaattttggactaatgtattttttttattttttttatataatgcagtttcttcagcgtgtttttagcattgacact

SEQ ID NO: 20698 - DNA, 825 bp, Glycine max
  Intron number 2 from transcript Glyma03g01510.1 (locus Gly ma03g01510) derived from phytozome v7.0 (chr-ID Gm03; pos 1310025 to 1310849)
tgaaaccccgtttcaatcatttcttttaagccgtggtaagtgagaacgatcagtttagggattgaatgcagtggtatggtgtggatggcaataccaatgttgattgttttgcatttggtatgaactgctcaatatgttgacacattataatttgctgaatgggaaaagctagcaacacattgctaaattttatcaagaatcacaaaatttagtagctttcattccttatttaattaacaatgggagtgagttacagtgtacgttggtagtatttttcttctgtgaataaatggatattactagtctattgttgtcttggtgggattattttcaatctgaaggtaaaattttaccttttgaatttttatcccattttttagatatgtttatgttactcctgtccattgtatgtctttgaacttagtttacagctttcaaaatacaagggtagaaagaacatgtttgatgcaaattacattctgtttagctaaccttcctttacaagttggaaataatcttataccggagatggtggctgatgaatgtttctgttaaactttagtagtgcactacttctttcccaatgtgaaaactcggatatttaaattaggtgaggtctgtttttgatttccactgtgaatttgactatgttgtcttgcttgcatcaagtgcattctagtaatgctaatttatgtcagtagaaggatgttcttatgttacagtcagaatctttggtagcttttaccagttatcttacatcgacttccactcattcaattcaacatttgctatcttgttttttctagacgcttatcaaagcttgaa

SEQ ID NO: 20699 - DNA, 818 bp, Glycine max
  Intron number 2 from transcript Glyma04g09890.3 (locus Gly ma04g09890) derived from phytozome v7.0 (chr-ID Gm04; pos 8159280 to 8160097)
tgattcggaggctttctcaagaaacggagttagaggttggtaacgtatcttaatttaccgctacaccatggtattgccatatgttagtaggaaatcggagtagcatccatgtgattatgtgaatattcttcatatacatgtttctgtgtgttttagtatgcactggaaattaagaaatgcaaaattgcagtgttcttttcttcattttgatttattgtattatcgtaaagggtgtatgggttttaggtgattctagcatttgctgttacgcttgcataaagaagatcgaataattgaacgaatacatgtaaatatgtattttgaggtgcctcgagtgatcagagatgctgagtgtgttctgactacgctcacatatcatctttttatacttattatgtctttgagaaatcgttgtatattattactcaaagttttaagaaatggtccgtgactgcaattttggccgcaacatcaaggtttttggggttatcgtgaacacaatcacaattatggcctcatcagatgtgtttgtctgcaatttcccattttccagcaattaaggattgcgatgaaaccacaatttaaatcctcaataattatattatattgattagacttatcgtcactaatcatgagtttcttaaaaatgctgcactatccatagatttccactaacattctcttcaagtttctgcagctgtttgctttcttttctgtgcatcccccaataaaaaaaaaagaatctaatcatcctaaatattgtcttttctgggtatccttttgctcatgattttaatagggtcacactggctgtgtca

SEQ ID NO: 20700 - DNA, 642 bp, Glycine max
  Intron number 1 from transcript Glyma03g38200.1 (locus Gly ma03g38200) derived from phytozome v7.0 (chr-ID Gm03; pos 44594842 to 44595483)
ttcctcaactgcacaacattcctattcaattccaggtactcttcaatgtctcttaccttttttttttttatattcttaatttcactattattttctaattttgaggtcttttttagtgtatgaacattttttttttttttttgcaaaacgtgatatggacatgtaatagtttgttttgttttagactgatccgtaactgttggcttcgacatcagtagcaattttactttgattgacggaaattcattcgttccgattgatttgccaattaaattctgtgtgtgagggaaagttgatgctgtgttgtaaaattttcatgcactaatcgtagaaatgaaatggaggaggttcaattactggttcaagatcaaattatggtgaattaataatatgaatcaatgtaattggacaaaaatttcacaaatacactatttccttcattctttatttcttttgaattgttcaattttgcgattgcatgctgccatgatgtatcttctttttagcaacgaaaatctacatgaaggtagatttttttttcttttttaattttaaatttagactttatatttgagtttagtatgttagctattaactagtatgaactgatggagtggtgaatcattatcagaggaaagaatc

SEQ ID NO: 20701 - DNA, 486 bp, Glycine max
  Intron number 2 from transcript Glyma02g30800.2 (locus Gly ma02g30800) derived from phytozome v7.0 (chr-ID Gm02; pos 32983787 to 32984272 reverse strand)
tgttgagtgtgtgaatcgcctcggaggtgctgagagtaagggcttgtttgattcccttttcacttttttgttttgaaaactgttttctaaaataattctacactactcagcaattgttttgataagttttaaaaattgtttctaaaacaagtgtttcaaaaaccaaaaatcagaagcagttggtagattccatccttttgttttcatcttgtttaacctctccctcaatttcacactctcatttgttccttacaccaccctccacaatctgtttgagtaaccttgtttaattgcattttgaaaattaaaaacagtttttgaaatttgaaaatagaaatcaaacatatcctaagtaacttgctaatatttttcattataatattcaacatctgatatttttcattatacaaaacaaatattcaacatctgattgtcttcttggctacttgattgtaagaagcaacaccaaaagctatattaaggctg

SEQ ID NO: 20702 - DNA, 662 bp, Glycine max
  Intron number 1 from transcript Glyma03g30790.1 (locus Gly ma03g30790) derived from phytozome v7.0 (chr-ID Gm03; pos 38645977 to 38646638)
ctaaggttaagggattccctgcttggcctgcgacggttagtgctgcttgttaatttttaagtgaatgcttgaaattttttgattgattgtgctgttctgtctagaataaacagaacactcccttggattgcaattgcatgttatactgattttcttctgctgaagtatggtgtagtgctcagtgtttgcctggtgctaatcgattaattcgagtggttgctttatttttgttttgttttttgatgcgtatattagattttattgaaagtttttgggtctgaccttgattatctgttttgccttagcttaagcttgtagttgtactgtcgaattttgatgttacacggagattgggtttatcaaatgattatattgtggtgaattttttattaatgacttgatcggggcctagaggctcccggaatttgattgggaggagctgtggagaaggtaagagactagggaccataagttaaactatacagatctgtgctttgcgttttctatggtcctgtatggcttatatgtttgttttggacagttgggcacttttttcccctgctttttgattctctgttatgaagattttgtttgctgattaagttgctctgttttttcctggggcaggtgagtgagccgcagaagtggggttactcagctga

SEQ ID NO: 20703 - DNA, 649 bp, Glycine max
  Intron number 1 from transcript Glyma02g44070.1 (locus Gly ma02g44070) derived from phytozome v7.0 (chr-ID Gm02; pos 48749754 to 48750402)
ctcaattttgataccttgtcacttgttttcaacaggtttgattttttgaactctttagagtgtgttcatgagaattaatcattggtgatgccatgaaaaagtggttgttttaccttgataaataattgattatttcttgtcatgaagctattccaaacacactattagttaatcattcaggggtcagtacgcatgtatctttactgcatctttggattcacgttaaatcatgttgaaatatcagctaacttgattttaggtaagtgttcttgtgtttgtttggttgcatgttgaagaatcgattttgagtttgaagcaattttagatagttttatgtggtcgataaacaaatttgtagtgagtacgttcactcagacaaactaaatgaattttctgtagtttaaggattaattttttatgttcatgtttttttaaaatgttaggggagaattaaaggtgtggttttcctttagaattttgatttgtttccgataattgaggagaggatgtgtggagaaaaaatgtagtatagaggactggtatttagatgttgtttgtgggagaattttatttatttataatgagttttggtgtttggtttaatggtttttcaggtcgagtagatttgcaaggctccaaggtattcagt

SEQ ID NO: 20704 - DNA, 730 bp, Glycine max
  Intron number 1 from transcript Glyma03g32680.1 (locus Gly ma03g32680) derived from phytozome v7.0 (chr-ID Gm03; pos 40457563 to 40458292)
ccaccgtctccggccactgctctccaggtccgttctctctcacttttttttttctctctgcgcttcttcagccactttcttcccctttttgcttctcctcgatctcgccgctctcggttcctctgcgtttctctttctagatttgattttctcgcagcttttcaatttccccgactgagattccgctttcatcatttccatcttttttccgctgttgggattcgggaagaacaaccccctcttaatatagccctttcagtttcatcactgtgctctttgtgttgtgtttgtttctattctagcgattctttttcttttattttattctgttgatgacgcaagaggtgatttgatttttcatgtcaattcgctgtcgtatttgaacactatggcttattgtgcttctcttcttactctctccttcgcgcatgtttctgtttactgattgaaaaaacacttcaagttcacactgtatcagttctagtagcgcttgttctagttgttttctaggtatccctaaatttgattgcattagtgtttggatcttgtggttttctgttgatgagctcttattccacttttaatgcatttggcgtatgcttttttttttttttgtgtgtgtgtgtgtgttgtatttcgttgttgttcagcttacagatctaggtgattgatctaggtgttgtgtagggattgtttttaatctaggtgatttgtgtgtgcagctgttgaa

SEQ ID NO: 20705 - DNA, 623 bp, Glycine max
  Intron number 2 from transcript Glyma03g32680.1 (locus Gly ma03g32680) derived from phytozome v7.0 (chr-ID Gm03; pos 40458400 to 40459022)
aaacaagctactcacagacaggcctcatcgcggtgatctccctctttctctgtgtttactctttttggtttttcatgttgtccttgagagttttcttttttaatcccccaaagttgttgctttgcttggtagaggattttctggatgatctgcttgctttggccatattgactctttggtagttggtattgtaactgatggttttcttaaatttggtttttggcattttcttgttagttttggggtttattagcgtgaaggattgaggtgatgactaagagggaacgtagaaaaagagtaatttgtggtttgactgtagttccctttttgctgcatatagtttttatttggaacatatttcctttgggttttcgttgaccgagttttggatagacgcatctctcttggtgatctgtctgattttatatattcttgggcaatatgaaaccaggccggaggtttctcttaattgtcaattgctttttatacttccaagttgcatgtaataattgtacttatgatttatgctcttgaaatttcgttatgccattttattatccaatctcactcttcactgaattgtacctggattgcagcatcttcactctccagaagtcaatcag

SEQ ID NO: 20706 - DNA, 701 bp, Glycine max
  Intron number 3 from transcript Glyma01g38290.1 (locus Gly ma01g38290) derived from phytozome v7.0 (chr-ID Gm01; pos 50446493 to 50447193)
tgtaccatcatctagcttgcagacacaaaaaccaggtagataatacccgaatctggaaaacattgaaatcttctcggtcgtttcttttgtcgcgtttgatagggttaaaactagaccaacaaaacatttgttgtttttgtgggtggtgtttttcttctttttttttttttgtctctgtgatcttggagcttactggtttttgtctgctaccgttctttgttttcatctgtgtgttgtgtgctttgtatattcataacatcagagtaagtgatataagattcggagagttaatttaagtaataatattgtgaaagtaattaagtaatggaattataaaagtaaaccgcggaaaaggtgttctttggaactgtggtatgtaaactatgcaattgtggacaaagaaactcaaaagattcaaaagctaaaaagggaaagaaaagctttgttttttggggggtggaagggggaatggatttgagaaaggaaaccattatttgttcttttcttcccaactttaacacagaaagaaaaggcacatactttgcaagtctatgcatcgtaagtggctgcttctttactccccttaattattatcaatagttaatagtaatatcattcttcatcttcttaattactacaattttcccccctgttttgatctttcagagttgcctgaaaattccccacaaatcatagaagaa

SEQ ID NO: 20707 - DNA, 606 bp, Glycine max
  Intron number 1 from transcript Glyma02g45340.1 (locus Gly ma02g45340) derived from phytozome v7.0 (chr-ID Gm02; pos 49637688 to 49638293)
gcaagtaacttccctggccaccatattagcacagggtacgtaccaacaattcctttcatgtatatatatatatatatatatacatacttcggctgttgagtttccagaacattgatcttcctcacttgcactccaatgaaatagtagtaatatgttttaggtttttagcagtgcaccgctacgtacaaaacattaaaaacctctatattcaaattctaatttaacacagactaattaagcatctcttacctttttaatgttacagagcattctaagaagatttccaaagcaaaaaaaaaaaaaaaattggagacattttcaatggttgtttcatcaaaacgaaaagtttagaatttgttgagatcgtttctttaggttttggtgggaaacaccgagagattccacggttagcatgattagagggatagaatcaaagtttactattttttttttcttaacattttaatttattattttttatgagaaataacacttgtttggtgtgtgagaaataatccttcatataatatagtactgttgataaaacaaataatgtgttgtgctcctacaggtacgaaaccgaatttattgaaaagatagctgaca

SEQ ID NO: 20708 - DNA, 781 bp, Glycine max
  Intron number 1 from transcript Glyma05g02740.3 (locus Gly ma05g02740) derived from phytozome v7.0 (chr-ID Gm05; pos 2108684 to 2109464 reverse strand)
cgagattgggctgggacatccctgaagttcccaaggtaactttttgatcctaaaatctcagatctaatattttttcttctttttcttgcgcttttatcttttctggtgtagatctggtggaatttgtgtagattgggtatgtttggtccaggtaacatgtttttttgcctcgcagggttgatgtgacgattttttatgttttgtttgatgcatctgttaggtttttcccttttaatttatattgcggaactgtgtaccggtaaacaagttgatttgggttcttttattccatttttttgtgattattctgtgttagatttctgtgtttgttgacatgaatcactgattgtgtttgcatatgtatctggattttgtcacaaaatacatgttatgattaatatcttcagatctttcattttcgtttaataatatttgatgttatcatttgcaaagaggggaactcttatgtaagatctagtctttgaaaccttatattaattgaatttggagaatgaattgcctgtctattaatacactctaatgtgaattatggaaatttgtttcaatactcaactattttcttattatgctctcaataatttattgtgtgtactggatcacccttgtttatttcattgtcagttttttttgttatattccgaggtggtggtgagagcataggttgagttaatgacagtgggatgaagttttattttttaactatgagtggtacatgaatgaatggctgtgtaggctcaggtaggattgttttgtggacaag

SEQ ID NO: 20709 - DNA, 830 bp, Glycine max
  Intron number 1 from transcript Glyma02g38260.2 (locus Gly ma02g38260) derived from phytozome v7.0 (chr-ID Gm02; pos 43619041 to 43619870)
ttcttcttcacccttctgatctgctaattctcaaggtaaaacattgtcatcttcagcttctaatgtttgctttcacgttttttttttcttgttacctgtttgtttgaccaaggattgggaaagcctaaaatctttttttatgttggttgttttttttttttgctttaatggctccaactttggtatgcagaatctttccctcaaatggggttgcaaaaaactgatcaaactttcagtcaatgttttcccttttcaaaattcctttagttttaggccattaaaacaagtatcaagcttactctctatgtgagtgtgttatacataaatatatacatacatgtatgtttgtatttcaacatttttaagtgtctttgttgaagtggtgatttagtgaagagttgggcttataagttcttcatgtcatgccctctctttttttctctagtttgatcaacacttgtccaatggtttgttctctttctgttatttttggaaactttgttctatgactatctccactacaaagtaattaatctaatgcattttatggacatatattcatgatgattgttacaatggttttaatatagtaattcatcaaattgcttctaatttcatgcatcttaggcacaaagagagagagagagagagaaactgaggtgaatttgttaaggttgtttattaatgaaattgtgaccaattgtgtttcagtattggttgtttttgtttctagtatgtcagtttgaactttgaaggttccgtgacagatgttgttacttgttattgtttgataaggtattcaaaattgggtggttttcgattgaactgtg

SEQ ID NO: 20710 - DNA, 597 bp, Glycine max
  Intron number 1 from transcript Glyma01g42180.1 (locus Gly ma01g42180) derived from phytozome v7.0 (chr-ID Gm01; pos 53490774 to 53491370)
ctacgaccttcactattccccctacaccctccaaagtaatccatctcttccctctcttcttttcacccttaaacttttgcttttactatatagtttcattttctcaaagtcaacaaattaggtatatgtttggctgcagcaggattggccatgtgaaaggaattaaaatcatatatgatatatagcagaatgcaaaatattgtaaaaaaaaaaaaagaattatatatgatatatagcacacaaaaaatcataagaaaaaaacaaacccccaaaatgtgtactttgtttggtgatattgacagcgagcaacaaaatcaagaagaaaaaaaggtaaaagtaaatgaagcatatattaactttgatttagtttgattagaaaaaaaagtagccaaaacaataataaaacacatatacagggtgttgttgatgcgttttgattattgtttttaagtattagagatagaaaaaacatgaaaaattccttgacgctaatgattctttatatcatatgtgtaatgccttcatttctcatgtttttatttttgttaatttttctcctgagtgatagtcgttgagacggtgcaggtttgaagccaa

SEQ ID NO: 20711 - DNA, 988 bp, Glycine max
  Intron number 1 from transcript Glyma02g41190.1 (locus Gly ma02g41190) derived from phytozome v7.0 (chr-ID Gm02; pos 46366264 to 46367251)
aaggttagtgacttgacacttttacccctctcccccctttttgttttctttgctaactctcctgttatgagatcctgtgttttccactattttgagttatgcttgcattctgaatctttcattgccctttattttgttttctctacttagtttggcattgttttagaatcactgcaaaactcacttttgtttaacctgcatggttcttcttgagcctttacttgttcagttctcagttctcctatgactccttgctgttttcttgaggagtttttggagtttgctttgtggggaatagaacttaaccatgctttgtcatatcaaggtccaaatacactcttcccattttcacacctttcctagcagtagcacacccttgctgtggattaggaacttagaatgttatttgagatttaattagtgttaaaatgttcagaaccaaggtttgatggggtcatgcaatagctgagatataattggttattttgttagtctgtttcctagtagagtttgtgtgtttttcctttgcatttttatcctgtatgggattgaacttctggctaataattaataaacatatgtttttaaaaatagtcagggttttgttggttgttgatcttcttggatgcggtcctcctgtaggattcagatttttgtaaattgaataggacgtttcttttgtccttctagtaagtcacgtattgtcattttccccaacatttggatgtgtgtaatactttgtagtagaggttggggaagttatttttggaaaagctttctacttttggggagctattctattgtcattttccctcaaaacttggtttgtttggaacaaacataatgtgcgtaagagtctgcttgcatatgtttcccagttacaactggacttggttaattcagtgaggacttaaatctaatttttgatggatcttaatgtttgtaccttgcagaaccatttataggagtgaatattggaacagatctc

SEQ ID NO: 20712 - DNA, 929 bp, Glycine max
  Intron number 2 from transcript Glyma02g36440.1 (locus Gly ma02g36440) derived from phytozome v7.0 (chr-ID Gm02; pos 41931822 to 41932750 reverse strand)
cgaagagaagcaaaagcgtccgggcctataagcaggtatgtgaatttacctcgctttaaaatggattgctctgagttctcgtgcctcctcttttaggattttcagtttgttgttgatgttttgttggagcctgtactttatagaagacatgaactgattgcatttagcatgaaaaccattatcctgacattttggcagggaagataatttttttagcagataaaagactatgatgttactgttattttgccaaaaattgctgaaatctgtcagtagctatcttgagattactcgcaacctcataaattttggcaaacgggctcttagatttttaataggaaaaaaaatctccatttttgttttcctccttcaatgctggtttcgtttaaggccattttgacttgtagaatactttatataaattgtctcgtacgatttcagattgtttaaactttaaatagttataaaccatccaattgcagctcaaacttgtgtttctagttattgagtcaaatttgaataattatgttttggcagcttgaaccttggaaaatatgcatgcagtgatacctggttctttattgctccttgacaaatgtgggagcttcattttatatgagtcttaattttgatccaagaggctgaaatgtaataggaaaaagaggggtgaaatgcttaaaaaagagaggggaaataagtttgtataatataatcaatgttcagcatctaggagatcccaatcaaatttcaatacaccttatgcatttaggccttacaatatatcccaacaattaaaatcagattgggcccatgctctttaaattttaataaatgtttttgtatgatgaaatgtttgctgttctaaaagatattgttgatcaacttgtgttgcagggagagtgtgaacttatcaaaatcgatatcaattg

SEQ ID NO: 20713 - DNA, 648 bp, Glycine max
  Intron number 1 from transcript Glyma03g24030.1 (locus Gly ma03g24030) derived from phytozome v7.0 (chr-ID Gm03; pos 30709801 to 30710448 reverse strand)
agagatctggcaagacttgtccaactggtgctacggtatgcatgtgtttttcattctttgaattggatatatatgtgagtcttgcttctaaatttttgtaattaaactaagactaaatataaaatgcatcttgaaaataataagatttcttatatggatgttatttcactttttttggtttaagtagaaaaatttctattttaagaatttgaaccatatatatgaatatagatggtcatgactatttgaaaagtcacacatatatatatatatatatatatatattaataatttaaatataatctaataatttatatttattattattattttttcttaataacggcttaactttttatcagatactctccatctttggaaaattatatatattatattttttgtacaataagatgggcaataaatttattgtacatgacattttatatttatatcatgtgataatgatgttgtggaacaataaaattattactcgtgaggttggaatgtttctaatttgaacctacttatgatgcccttattctcttgattaaacttcgaagaagaacataattttaacgtcaatttttttcttgtgtatatataattatagaacttgggatttaccaattcgaacaacattgtgat

SEQ ID NO: 20714 - DNA, 859 bp, Glycine max
  Intron number 1 from transcript Glyma04g42860.1 (locus Gly ma04g42860) derived from phytozome v7.0 (chr-ID Gm04; pos 48490440 to 48491298 reverse strand)
aacaggtaagcactccactatcataatagcacatttgtagtttttgaaatcattctaggaagctgaggtgacactaagacttgttctgcctttataacttcttaaaaaatctggggtcttgttgatatgatatctattagaatacaagttttaaattctaatttgactactgtcctgtgtgctaaagacaaaagtcctcatttaatggatgaatttaattaatcattcaattactagtaagttaagaaggtctttgctagttttgcttcttcttgtttttctttctttttccttttttctgtaattaaatgttaaaatacgagataaatgtgcacataaattgtattagttattggctctatgtgctttagttgattcttgtaacatgagtaaatttcctggaagactgaaagagttgtcttgaattaatgagttcatccaataaaccctgtcttaatttgaagaagatgcttacagagcctttctccagagtgaaaaatgacgccttttgtatgccttattgaatgtaataaatctgacttacatgcaaatgggatttaccattttcttttcttgtgaggaggcctagacacggataggtgttttgatttgcactggcagcatttagtaggcggtttagaaaaacgataaaaaaaaaaaaaaacagtgcaacccatgtatatattcagtacagtcaaggatgtgtacagtactaacttcactctcagacattagtttaaaccagcgtaaatatcatagcttttaagcctggaagttgatctctttgttatcctgttggtttattcttctagtttatgataagtctagtttttcgtgtctctgtagcatcaggcattga

SEQ ID NO: 20715 - DNA, 361 bp, Glycine max
  Intron number 3 from transcript Glyma02g41500.1 (locus Gly ma02g41500) derived from phytozome v7.0 (chr-ID Gm02; pos 46609335 to 46609695)
gaactgttaaggtaaattgtataatcataatttgacaagacgttttaaattgtggttgtggcttggttgttatttattttgatggtttcttgttgttttagtggccatcttatgttttaagatgtccacatgaaaatgcaatgttgattatgtggttgagttttgaattattttggcaatggtttgagtgtttttttctttctttcttttggtgttatacttggcactttcaaaaaagtaagatattgacttgctctttaaggaatgtgattgtgggtgtttccttggtttcttactcttctttgggttgtcatttgattttgcagttgttgttgaagttggaggacaatagattgattga

SEQ ID NO: 20716 - DNA, 398 bp, Glycine max
  Intron number 2 from transcript Glyma01g02920.1 (locus Gly ma01g02920) derived from phytozome v7.0 (chr-ID Gm01; pos 2420421 to 2420818)
tctttgttggtgtgaagtttgacaagtgatgatgcagcaaatgggtgatggaaattttactgcttttttttttgctaattctaggagcagcagcatatagggtggtagtgagtagtgttttgggatagtgtttttgcacagattatttgtggagaaactactaaaaatagggaattagagtataggtgttgatttggggtttcgtcattttggtaaagaggcattgccttgttcatattttaccattttggtaatgccctttttgatttgatgaccttttggaaattgaaaagaaaatacttagtctccttattaatctgcatttctgttctctgaatgaatttttttttgtctgcttgttagttttgtggaagcaagacgactagttgagtttcatt

SEQ ID NO: 20717 - DNA, 537 bp, Glycine max
  Intron number 2 from transcript Glyma04g03080.2 (locus Gly ma04g03080) derived from phytozome v7.0 (chr-ID Gm04; pos 2248554 to 2249090 reverse strand)
gataaaaggaaaagtaggtttgtggttatttttgggtatacaagattaattcaagtgttgttacctgatcatattttattttcttgcttagcctaggaagttttgtgttcactcacttcactgagtgttcattcatagccactctttgcatcatctaaaaatgcccattggaatagtcaagtcaaccccaacttgagggatgctgaactgtttatgctttaataccacttaaaacatctgtggttatttgaaatgactgctgacttttgtcttaaaacacatttgagttgtgattatacttttttttttgtggcggatcttctttactatgttaagatatctgctgggcttctctttacattgtaatattttcttccctgcagtctgcagggcagaaccacagagggtgttgggaaatgctcctgacacctgtggagttcattgcctttttattggatcctgttataagttgtgaagaccttcttgatgataaatttcatttgtctctaggaatttttcactttgcactagagggaa

SEQ ID NO: 20718 - DNA, 972 bp, Glycine max
  Intron number 1 from transcript Glyma01g41130.1 (locus Gly ma01g41130) derived from phytozome v7.0 (chr-ID Gm01; pos 52672671 to 52673642 reverse strand)
gaagttgtttggtctttcattttgaacccattttggtatgtgttgaggccaagttaaattacaatatatatatatatatatatatatatatatatatattttttttttttttttttttgtttccgttaatcagtgtgtatgtttgtgatgactgtgttttgtgcattattgattcttgtatgttcgaattgctgatgttgttgatttgaaaggattagtatgtattttgtctgatttgtggtgttgaattgaaatgctatgcctgttttagtgattctttattgtttgatatgagtggtttttaattttggttgtggcagtcctacaaagaaatgtgatttggttgaaggcaatatatgaaagtgtatattgatttgtgtactgtgattgagttacatattaaggaatacttgtttatatagttggtaaattttcatttactggtcataagtggagtgaaaaaaatgtttgccttgaattcagtttgctgctatgaaaagcagaatattgccattggaattatcacgtgaaagtttaaaggcaatggctcctaaatattaatgatttccattgtaaaatttatgcaatttgcatgtcaaaaagaaagtgaagcataataaaagaggcatttaatagctatgtaaaccttaattgtactataaatgttgtcttcctaccagtgcatgatctaatgtatactttgtcaatttccacactatttatttaaaccgaaaatagttgtatttagagtcatttttacatttgaattatttgtgaatgtttttaatttagttatggagagcattttacaagaggaacatgatgttggtgtactgggtgtttccgatacagtgttgcatgtaactattgttaatgtttttaggtggtttgattaatatacgtgtgtaagaaaatactttttattttatttttgtacttgatagaggtaatgttgacatgcatatgtacaga

SEQ ID NO: 20719 - DNA, 886 bp, Glycine max
  Intron number 1 from transcript Glyma02g40750.1 (locus Gly ma02g40750) derived from phytozome v7.0 (chr-ID Gm02; pos 45978397 to 45979282 reverse strand)
ggacttgccaggtaattaattagatgcttattaaatatatatatatattgtactgttttatttttctggctagtaaaattcgatcttattctaactaatacaccatccagcaccatattatatgtaaaatttattttgttgactttagtcttgaacattgacgatatggaaatcccatgatgacgcgcaaattttaacatcatcaagaggagttttaataaaagatctctttttttttcgcttatttgtaaatcactattccttaatgattttggacagcttattagagtgcaaaaaactatatcttaaaaaagtgggcacgcgcttttgttgagatttgcttccgatctttattcagtgatgatgaaacacatacttgctttctcggtcaagtatattttcctgctttatcataaaatatctaatgtgatatatgcatggtggaaaggactgtacttaagacttttaaagaggatggtcccttcaccttttagggttcctattgtgaccgtcatgattagtagtaaactagtaatgagacaatagtagattcccaagtcaaaaagcgtatgataaagaaaaggattgcattgtacgcgatacaattaatacatttatacacgactcccatgcaatatactttgcgtttcttattctcccattgccatttgctttatcaccttacgaatttaacgtgaaaactatgaaatatgaagaaaaaaaaaactcaatattaaaaataataattttttgctactttcgctagaatgtgtatgataatttacttcatgttcgtatgaaaatattaaaatcaattttgaatatttaaccatttttaaaaaaaattacagggaaatcattgttaccaggaaaggatttggagtgg

SEQ ID NO: 20720 - DNA, 561 bp, Glycine max
  Intron number 1 from transcript Glyma04g34550.1 (locus Gly ma04g34550) derived from phytozome v7.0 (chr-ID Gm04; pos 40740538 to 40741098)
aaggtaactgaaaaccaaaataaaaataaataaataaataaataaaacggggttaaattaataaaacagtttaatttaaacgagtttatttgtgtcaaccaatctcaagggacatgaaataaattgtgttagggaatactcaccttgtatattcacggtccttgacgaagatttgtcaccgcttaaaacttcgtaccattatcatggttagaaaaaaaaaaggtttagtttaatctggaatctcaagttccaatgtggggtatgcagttgtgtgaggggaagagttttgttattttgttatttgtagtatcctgctctgttcgggcataagtgtctcctgtgaaaaatgtttgtgtttttgtactaaaaaagaaaaccaatcagaaatcattctatatacttcttttaaagtagttattatagaagtctaacatagtcaatgacatttgattagatgaaagtgtcaaaagcctttaactttaacattctaattaagttatgattgaattgaaattttgttgttcagggatttctgggactgagtggagctatcttgatcca

SEQ ID NO: 20721 - DNA, 847 bp, Glycine max
  Intron number 2 from transcript Glyma01g31370.1 (locus Gly ma01g31370) derived from phytozome v7.0 (chr-ID Gm01; pos 42262826 to 42263672)
gcaaccacataactgcaatttgaaaaggtgattctctctctgagctttgtgttttttttttttaactgtgaacatggtcagattatgccgttatggttttgtacttggtgacagaatgagttggaatgatccagttcaatagttttaaggttgttactatttttgtgaagttgatgtttgaccaagattgagttttgtaaaggtccaagtagaatagcatttgttcagttgttcctgtgggaattagagttgaaaaaatttaattttttctggtgcctaaagtagcatcggatatggttgtataagtggtagtttaactattgggttatatattttttaatccctactaattataagatttcgctttaatgctaatccttataaaaaatatctccttttggttcctcatttatggaaatgtgtcaggtgtagttccctgttactgacactgttaactgaagtggaaggaaaggacatgaactacacccaacaaattttcataaatgggagaccaaggagatggtttttcagggactacaagcgcctatttatagggactaaaaatatatttaacccgccaacaaaggtttgtcagttggtaacgattgaactcctatcccacaaggaagtggggttggaatcctgttgctaattgaggacggacgatgtataagtatctctgtaagtgttctttgaaccttgaggcatgccctagccttggtgagtcttcagaacttaactcacctaaactttttgttacaaaaaaaaatatttaacctttgatttttttctgacagattaggttctttctgctaacttcactgatttcttgtataaaacaggtgga

SEQ ID NO: 20722 - DNA, 612 bp, Glycine max
  Intron number 1 from transcript Glyma03g41180.1 (locus Gly ma03g41180) derived from phytozome v7.0 (chr-ID Gm03; pos 46709890 to 46710501)
agcagtggctttcgcttcccgaaagcaaccgattggtacgcttcatttcaccttcctcaattttagaatcaacgtattgctacattgttcgtttcaagattcttattgtctactatatctattcttagcaactttcgctgtccgataataaattattaatcgtttcgataataatagtcaaatccgcaagtttttatgagaatgatggattattaattattacttatgttaattaaagatagccgttggtgttggattccatacacctacctcacgagtattatgactttttcctagatttactcaccgtgtattataagtgattaatttcaactgttatgtctcaatctctttctttaagagaaatcaccttagaccattcttcgaaggacaacattaaaatcatgcctactcgcacaagctatataaatgaagtctcggtgaatacttaaagtatatgaatgaaatatttgttattaactaatttttatttttgagtttctttacgtggttaagttttccccctttaatcattaaagaatgtaatgcgtgcatttatgattttattcttatgtcgcacttgttaatgtgtgtaggtgacatcattggtaa

SEQ ID NO: 20723 - DNA, 766 bp, Glycine max
  Intron number 1 from transcript Glyma01g39810.1 (locus Gly ma01g39810) derived from phytozome v7.0 (chr-ID Gm01; pos 51668708 to 51669473 reverse strand)
tctcctggtccagctgtatctgaggacgaggtacgccttgtgttcttttaaagatctcacattcactactaagatcatcaaaactaaacggtgtatataagtagcagataattcttattgtatgaactgatgtttggattcagttgaactaaaattcaaattttaagataattaataacagagtctatagttgagttattgcaaattttatgtttgagatgtccagtcttagtcttgaggggtcgtgcctctcactcacttgagttgggttagtatattacttttaacttttactgtttgtgcaatttgggtcagatctgcaatttacaaatgtactctcagatctgaggattgacatgagacattgatatgcttacttgactttaacttcagttgaggttttttagttgtcttcaacatcatggaattagttaaggtagatttggtcatttcgttagtttagtcccttttatcgaaggaaaaaaaaaagaaaaaagaagaagagcaaattataaatccttcttttagaatccaacaagatattagcaaaagtcatgaaatgttaataaaatcaaagggttcagttgctgtcggaatgtatcatgcattggtcgtgatgtcaattatgtctgtgtcacaaagcaagttaattacaccatagtatagtatgtaaaatgttaaaggagtgaataatgttgggatcttaaatttctacggtttctgttttacagagtggagctgaaaccatcaggtgcttgaagaaggt

SEQ ID NO: 20724 - DNA, 488 bp, Glycine max
  Intron number 3 from transcript Glyma02g12230.1 (locus Gly ma02g12230) derived from phytozome v7.0 (chr-ID Gm02; pos 10467033 to 10467520)
gctcagctgctttgagcagtgcacaacaggtcagtattttaagtattattggtgaatatattttatttggaatataaaaatgtgttgttggttaacaggaagtttgttaatgcctaatagtttgatgtgaaagtggttggatttaagtatccgttttcttggattagccttgtgattattgtgcatcatgttaattaactattcccagcactagggaaacttgtgcccttgttatgattaatgtactaataattttttattcaagggcttgaaagttgggtgaagtaattacgttatgtgtgtcagcactgtttaacttcacactatctctgtttctgttagaacttcttgttcttttaacctgtcttcttgaccttgataccccaaataatattctctttacagtgctacatgtggtaaattgattgttatattttttgaacttttgtataggtcccttcattgagtaccaagggttctgcatcatc

SEQ ID NO: 20725 - DNA, 775 bp, Glycine max
  Intron number 1 from transcript Glyma01g43940.1 (locus Gly ma01g43940) derived from phytozome v7.0 (chr-ID Gm01; pos 54788162 to 54788936)
cagtgttgttatagtcttcttgacattgtacacaggtaaaaacacttatcaaatttcttttttcaatcttaaaacctatgcacaagtcattcaatgtataatcactgtataaagatagacataaacttagttgacgttttttacattcaacatattggtagattcttaattttaattttcttggaaaaaatgtgtttttagtccctatactttcaatcaaacttggttttggtcattgtactttcaaattgttggatttagtcctccaacttttgaaaatatgtgaatttagtcccttctcatctttaaacataacatttagtggcagtttttgactgccacgaagttggaggagggactaatttcatcaatttaaaagtatggagaccaaaaccaagtttgattgaagtacagtaaccaaaaatgcattttccttttttttttaattacaaggaaagaaatccagaaagaataaataaagcagcaaagaagcagaggaggatgagatatccttctagaaaggaaaccttgaaaaaatccttcaactaaaatagcctcttttatatttccatctttttttccttttcagttattttggactgtctgttaggtgggtataaacttgtgtactcattgtcttcattctttaagagcggaaggttagatgtatagatagggatcttttttacttcattaacccaagtggccctgaacaatggctcttaattgatatgcatgtgttatattttactgaacaggctttggactccaatag

SEQ ID NO: 20726 - DNA, 745 bp, Glycine max
  Intron number 1 from transcript Glyma01g27210.1 (locus Gly ma01g27210) derived from phytozome v7.0 (chr-ID Gm01; pos 36268216 to 36268960 reverse strand)
caagtatgttgatacattggcaatcatgttatcaaagtagactctgagtagacaaactcgaaggaaactcggtcgagtttatcacctagtaaatgagtcggtaaattaaaaaaattagaccaaaacgtaagtcattttgaattattttttgtttgtttagtacctttatttagtgtgctgttcttaaataaaaaaaaattctcacttctaataacttgaaacccttgttctctaataacatcaaaccttcgatgggaatgctcttccactactataacatttgcaagttattatctagtagtgatgcatttctaaacttggttatttaagtattgtgaaatttatgatttactattttgttttattataccgttaaaatatttaatttgtatgttatttatagatattttgttattatgagtggactctcatgagtatatgagttgagtccaagagtcgagtctatagaatttttacgagtctacgtaaactctcgagtttgataatcttgttggcaataggtccgcgaatacccttacttttgtttgttttgctctctattacagaattacattatgtgacacagcttgggtatgatagttttggctgcttctgctattaactgagctacttgtcttcctaccatgttgtttcttcctttttcatgccttataaccttcttttcctttctcgttgtttttcttttcttttcaatgtttttcattgcccatgatagcacagatag

SEQ ID NO: 20727 - DNA, 482 bp, Glycine max
  Intron number 1 from transcript Glyma02g46210.1 (locus Gly ma02g46210) derived from phytozome v7.0 (chr-ID Gm02; pos 50241294 to 50241775)
gcacatcgtctcttggaagcagctttcttgggtaattattcaaaaaattaaattccttgtttgcttacaaagttacaataccagcattactatttttgttacacacagaaaaaagaaaatagttacttaccccacatgtgtactagtgtatgcatctgtttagtttcataacatctctgaaaggtgacatgaaggttgaaatcatcaaattttcaccatgaaatgtccaacaataaaacattgattgtttgaagaggttatatttagttttgaagatgtgctaactaaaagtagctttagcatatgtttgccattactcatgcttagcctagccaatgcatttcatttattcagacctgggcaccaaatgaattctaatacgtatcaatgaagatagatttctttttggcactttttctgatatataaaatggttattattgggcaggattctctctgttccttggattggttatcgacaga

SEQ ID NO: 20728 - DNA, 874 bp, Glycine max
  Intron number 2 from transcript Glyma03g37240.2 (locus Gly ma03g37240) derived from phytozome v7.0 (chr-ID Gm03; pos 43926612 to 43927485 reverse strand)
tccgtgaaagagaagttgaagatttgtttctgaaggtgctttgatgttcttttctttgtctgcattttgatttgaaatgtgagacttgctgtaagctaagggatgtggcttacacgtcacaagatgggtttcgtttgggattaatgttacatgtatttgggattgaaagtcattagcttgctatgatctatacctacatttccattcttctgttatttgaggattttgtttggtttgtatttgttaaggtggggagtgaactccatttttagtccctaagattgtaagctatgatatgactttgcaagtcattactttggaccttgactttgtgtgtgtctggttgagcatctataactcacgtattggcaagttttaacgtccaattcacataattgacgtaaaagcttatgcaatttgcttcagttggatccacgtccatcttttctgatgcacaactaaactggcttgtttgtaaaatgtcattcacttttgtctttaatgtcaatgaaaatgtagtgaaaacaactaaagtgaatgatgttttgccaagtcaggaggcactgcagtgagggtattgtgaagttaagggactaaagtgatagtggactaaagtgatcaatgcttatggttaaggtgggtcaaaattaaggtataaaaatggatgctaattgcagtaagatacaatttttcatggttcactttgggacattttttggttggatgtgctcctaacatgtatgtatgactgttaatgatttttgttgtaagtcgtatatgattaatgactaatgtttagtgcaaatgttggttcttacactctttcataattatgaagttgcttgttgtttatgcataaatttcactttgtagt

SEQ ID NO: 20729 - DNA, 696 bp, Glycine max
  Intron number 2 from transcript Glyma03g37300.1 (locus Gly ma03g37300) derived from phytozome v7.0 (chr-ID Gm03; pos 43967460 to 43968155 reverse strand)
ccgagtgaagcttttgaaggtatgaaaactgctgttaaacttttgtgttgtccattatttttgttagaacttagacttgcaagcatgctgctaattttcttcggtatagattggaaatcataattagtgattagagatgcatatgaagtagtttttaatatcgcattatagtttttgacttgtcacattttaatttaacagctttatacaaatgttgagttctatcaatgcaactattgaattatatgaaattttcttgaattttaactaacatttcaaatgtaatgaaatgtcaattttgaaattatatgaaattacaaacttagatctttttcatgagaactttctatgcaacagttggattgataaaaacttatagaaggtgtcatttttgtcaaatgtcaagtttgacacttggtgtcaattaatcctttacgcacacacatttttgctttaattttcaagaatgctgaagcaatttttgtacatgaatgattcccacagcagtgtgtgtatgtgtgtgtgtatatatatatattactgctctaattttggtgatatgtaggaagaatgcccaaacagtatttgtgcacgaatgattcccagagagaatctctttctattttgttttcaaaactgtgatatgatacatttgaaaattttaatcacgatgcagagaataagaaaaagaaggtg

SEQ ID NO: 20730 - DNA, 760 bp, Glycine max
  Intron number 1 from transcript Glyma03g01300.1 (locus Gly ma03g01300) derived from phytozome v7.0 (chr-ID Gm03; pos 1042376 to 1043135 reverse strand)
ctggcattggagaaggtttagaagaagcttaaaaggtgaagtagtagtagccttttgagtaggttggaaaaaaagttggtgcttttttactcagcattttggttttgaagacttgagtgcaactaagttgactctgtaacaaaaacaaaaaaaaaaaaatgaaagaaaagatagatgttaagatattagttggtagactatcatatgaagttgaatcttcagcatatgagtgtttgtgttttacttttattacttacacatttggaggaatccagtgaatcttcatgtctgatgttctttagcttttaatgctaagatggtagttgttagactgtcatatataaagagcatctttattggggctgttgctgtcattagttgtggttgtgagaacatgaacttggcaacaaaaaaagtacttatattccaccttgtgcttaaatgaggaagtactttttaggtttgttttgtttttattgattgttagtttttctcagctacttattccttccaaagggttcctgatgctggtaaaatctgaaaatcaagtacagaatctacacatttattctgtttcgattggttgtttgtttgtaaatattgaagaccatgttgacacataaattgtgccaagatcaaaatgattttttgttactttactcttttacctttgcttaaacaaagcttttgaagtgattcatagacaattctggctccaattacagatacataatacgcattggtaaccagtcatcaaagc

SEQ ID NO: 20731 - DNA, 566 bp, Glycine max
  Intron number 1 from transcript Glyma02g01510.1 (locus Gly ma02g01510) derived from phytozome v7.0 (chr-ID Gm02; pos 1082310 to 1082875)
cgctccaacaacctttctttccccgctctctccaggtattttcttttttttattaatttgtttatagcaccccatcaactgcggtgtttattttagctgaatttgaattagaatttgccttaaagtttacattttgatgaattatccatgagtttgtggcttttcgacttgttggtgttggatttttttattttattttagagaattcaagtcgccagattcgtggaagatgaccctaagttttttatgctaatggataggggtgaaagtgagatttttgcgtcacttttaggttatgcttcgaattgaaaaaaaaaatagattcataaaaatgttatgataatttcgaagttgttaattcttaagcctggcccaaatgattaatctagattctagggtatgctattatccaccttttattagtacttaaatttctccttttttttaaaaaaaaaatggcaattgaacatggaagagactagtatattctctgttatgctggatatatttatgtctataaaggggatgtagccttgctttgatttgcaggaacctaaggaaatcgg

SEQ ID NO: 20732 - DNA, 529 bp, Glycine max
  Intron number 1 from transcript Glyma02g03370.1 (locus Gly ma02g03370) derived from phytozome v7.0 (chr-ID Gm02; pos 2638601 to 2639129)
gtcgcgtcaccattactctagggcgtagcggtcatgtaagttgcaatttcgtctaattcgaaattttaattcttctttttacgcttatattgcagttattgctttctatacaaggaacatctatgtgtgttttttgctgctttgattctgttcactgtttttttggatttgacttgtttctacttgcttcgtcaaatagcaaccgggaagttatcagtgaatatgatgctttacctttttttgaagttttatgtttgttttctgttagaataaacacgatacaaaatgatttcatttgttgtttacatctagttctacattcggcatcactttgtgctattagcctattactttttttgttgttgttaaattaatctattaggagttaaggaatgcggtttaattttcgtttttcaccacttcttaccttttgagaagtatagttttgctcttatatgccatgaatgggatatttggattgatgcccatgatcttctgttttacacttgagtttaggttgtgaagaggg

SEQ ID NO: 20733 - DNA, 745 bp, Glycine max
  Intron number 1 from transcript Glyma04g36900.1 (locus Gly ma04g36900) derived from phytozome v7.0 (chr-ID Gm04; pos 43383958 to 43384702)
ctaacaaggataggttggaagtggagtcttataaggttttgattttacatcacaccaatgctgaactgaactttttggttgctatttggattggattgagaaaacattttcttgtttcttttttttgaattttgttttaattattaggacaaaatgttgggtttggctcctttaaagtgaggatggagtggagttcagaactcacgagataaagttcaattataaccattacttagaaatcatggttgagattctaattagctttagagctatatatatatatatatatatatatacaccaacatggtgtggtatggttgactggtagccatgtctcttaattatgtagcaggtatcaatctataggtctgtgtatggaagtacatctcttaagagaagtcaacctcgttaataaatttcagtatctcaagatattagtatctgactctcagttagagaataccctgggttcatgcaaaagaattatacatatttgattttagcataattctccgctattgtaaatctctaagttgcacttccttattttagaggagctaaatctgaacagtttgccttattgttatgagaaacattttttgtaattaaaaaaaatagcaagtgttttctcaaaataataaattctcaagtttttgctttatttcttcttttgaatgtggtttatgttgatgtgaatgtgattgtgacagcaagaccaagattactaccctggtagaaggaaaag

SEQ ID NO: 20734 - DNA, 662 bp, Glycine max
  Intron number 1 from transcript Glyma04g03180.1 (locus Gly ma04g03180) derived from phytozome v7.0 (chr-ID Gm04; pos 2320970 to 2321631)
ccagcacaaggaattggaatccagagtccgatccggtttgtctctcactttaatagcgtccacaattcctccatgctttcagttttgacttattctcgaaactcgcagttttagggttttgtgattgtggttccgcttggtttcagacaaccctatcatagtcctttgattgggttttttgttttttggggacaaaagtttctgcggtccggttgagtttagagccggacctaggttaaatttgattttgatgattttacatcttcttttctacgaattagggttaggttatcaactggatctattgttaaaatcaactgagattcttttgatgaaacaagtgaattcctagttgagcaatgaaatgtagtcacagttcttagtcagagaggacacgatcattatatttgagcatggttgttgatggataagccacaatttgtttttagcatgtcctatgccatttcagaaaacgggaattcctttttgcttataattttttttatgattagattcattaaatttcttttttactgtagcacaattttcttccggattttatttatggacttcaattgctttagatgagactggtgactgactttggattaaaaacataaattgcagtcagggagaatttgcgagcttcaaagaaagagttc

SEQ ID NO: 20735 - DNA, 350 bp, Glycine max
  Intron number 2 from transcript Glyma04g03180.1 (locus Gly ma04g03180) derived from phytozome v7.0 (chr-ID Gm04; pos 2321711 to 2322060)
aacgccgtaattattctgtccttttattttgatatttgaatctcattgttcaacttcactcttctttaattgtgttgccaacctaacgttttataaatactgagtcgcatgaagcttttttcttttttgttcctttatccgtcgagctaattctgttacttgtgaatataaaacatgcatgtcttactgattcttgattattttttcataattaaattttccaagctaactaccaaataaattatcccttctgtttcctgattgatatgaacataagagtaatcaatggttatagaatttgtttgttattgttttctcagtgattgttaaagcaagcagtggtcccaggt

SEQ ID NO: 20736 - DNA, 204 bp, Glycine max
  Intron number 1 from transcript Glyma04g35230.2 (locus Gly ma04g35230) derived from phytozome v7.0 (chr-ID Gm04; pos 41571454 to 41571657)
ttctttgtttcttttcgttcttccacagccggtaggtactgttttcactctcattgtttgaattcttctctgtttgttttaatggcactgccacaccgtatcattaccctctatcaaacctaatttcgccccttctctttatgaatgaattcattgaatatacgaacttagggtttttaaataactgcagattcggctttgtcc

SEQ ID NO: 20737 - DNA, 505 bp, Glycine max
  Intron number 2 from transcript Glyma02g47340.1 (locus Gly ma02g47340) derived from phytozome v7.0 (chr-ID Gm02; pos 50950632 to 50951136)
tttgacaaatataagcagtcacctgagttcaagcggtaaactgcaaacacttgctatggcttatcacctttaaatgcatttcttctacaccttttattttccattaacttatgaaatgcatcaagggacttattttttttctgggagaaaaaagatacatattccttaacacatgtaaataagtcctcttgaacttgactgactaattgctaatgttaaaatcaaacaatgaaacttagataattaaaaatgatggtgaagaataattgactgaatagatcaattttttaaattggccttctgtaactttgccaatggacaagcttgttttatctttcaagttccaattacaatctacaatttgtagtatttattacatgaaaaacaagggattaattaactggaagtgagtcaacacttgacactcattctgaaagagcttattagttcttttgaatgttatgatgattattagttttgcccttgttgcagtgttaacagaggc

SEQ ID NO: 20738 - DNA, 709 bp, Glycine max
  Intron number 1 from transcript Glyma02g10180.1 (locus Gly ma02g10180) derived from phytozome v7.0 (chr-ID Gm02; pos 8063894 to 8064602 reverse strand)
aaattgcattgaaacatcttgcatttgcaggaaacgtaagtttcctcttgttcttaccttgtgaaattcgatattattttcttatcaaatttaatcagaatgcagtgacagtataatttatcaaataatcacaagttttcatatatgataagtttcttctcgtatcataactactttagaaatgataactgtaacaattttttattggttaccgggtgtaaaactctttctcatggccatgggaaatgtaattgacagccacataaacatataggagtactttctaaccggcatatttagattattgtgttgtgcaccatctgtttgatgaatttcctaagttggtttctagaattatacaattctaccttcaaaaacagtgcctacaacttgtttgttataatgtctgaaccacaacatgcttgtgttgattcctagcccacttgttcttggccatcctcgctctcttctacctttcattatcctctatttcctttttgggggtttattcagttagtttggaatagtgtgtaattaatttggtttttgtgtatcttgagggctgaggcaattttctgactgtttgattttgtgcgaatatttgaaaattacttaaaggttagtgttccatttgccaatttatcagcacattttgtgtctctgaatatttgaaggtattgcttggcccaagctttgatttaaatcattt

SEQ ID NO: 20739 - DNA, 580 bp, Glycine max
  Intron number 1 from transcript Glyma04g08530.1 (locus Gly ma04g08530) derived from phytozome v7.0 (chr-ID Gm04; pos 6687386 to 6687965)
gaactcatcaaatacggttttcccgaagacatctggtaaccctaattttcccatctccaattttatttttcttcttcgtttccgcaaactctctgctcccgacacagattattcacatgacctatgtctggaactcgatttgatttatcagttgtttgtgtagcgaagatttttatgctgtttcgcttcgatgttttgcatcacctagaaagttgaaggtgaacatttgttaatttggtgattaatcttatcatgtaataatagtcaggtgttttcacaattgtgattcaactaattcttattggaacactatcttttttattttgcgtgtcacaaaagtttggttgttttcatttaagaagcaatcaaatcagtttttgggatatggtattatttgttggctagttgttctattatggaagatagaagtcccttcacacattttttcgaaagtgcattgcctggaattgtggctgcattatatttcggtttgatttgatgcttttgcttagatagttgtattgttatttttgctttctatgaggttctttaatgataaaatctatccattgtaggttcc

SEQ ID NO: 20740 - DNA, 897 bp, Glycine max
  Intron number 2 from transcript Glyma02g12690.1 (locus Gly ma02g12690) derived from phytozome v7.0 (chr-ID Gm02; pos 10977011 to 10977907 reverse strand)
gagtgtggagatagtggagactctattgagcaaaggtaggccaatgcactttttttttattactgtctattattgttatttatgatatcagtcagcatcttcttttttatttccgttcaaatttgattgaagtgtaaactgggtggataggtaattggtgtctgattcctgagactgatatgtttgattgatttgaacttaatttcaagacttagtattaagaattatgttatacaatggttttgaaaaacggtctgcaacagcgattgttgggaccacaatgtcaaggttgtcgggggtctctgcaaacacatcacgattgcaattgcagctgcatcagctgcatttgtttgcagtcatccgcttgatattgcaacaaaaccttaactgtgaccatgactacgatttaaaaccttaggaacttgtattatttatgtgtttataaattataattagttatttatattaatttttttcatggagtatgtaatgctgatgcctgatttcaaattcttattaaacttcaatagagttgaggtatatcttcccattttttagctgcaatcagattatggattagttttgggaagcttttaacttggtgtagcttgtgattgaaaaaggtgataaccgatagttgagtgctttcaagtgtcaattgtggttttctatcaattttcattttatacacatgttgattgaatatgtaggctgctattgtgtgttgtctgtattttgtatattgtggaattgctcttgaagattcacaagtctagtaatgaaatgcagctccaataatgacatatacctttcatgactatgtttcgtttacaatgtagaaagattcatcatcaattatctcaaactgttcttgttcttcatgtttggtaggagctg

SEQ ID NO: 20741 - DNA, 643 bp, Glycine max
  Intron number 1 from transcript Glyma03g31610.1 (locus Gly ma03g31610) derived from phytozome v7.0 (chr-ID Gm03; pos 39484693 to 39485335)
tcttcacacgtgtgagcccctcctctttctttctcccgtgtgaaatttctcaaatttttctcctttcgcttctttccttcactatttgggggagcatctggactttgcgtaaccggagacagatatgggtatttcgtaatttgacgtgtctgataaaagttttgttttttttttttttaaaataataattctattttctttttggttcttctctctctgactatacccgtcgaggagtgaggacgtgaatgctggtcagaaacattgttgttttgattggccgcgtattcagcggttctgtattgttgtgcacttgtggaaaaggtgtttgaacttttgactacacccaccactgttcattcatttagtaaaacacagcttcaatcctcgtcttgctgcatgcacattgcacaacacaaattggcgtgcatattattattactactgtgctggctcttgcatttgtggaataataattgttctcttgttgtttgttatgtgtcctaaagttaattgctggtctaatttgttatctttgcatgcactttaattttttagtacaaggcgtgttgtgtgccaactaaactaatagatatataattttttttttctggattatattcagtttgcaggaagtgcattt

SEQ ID NO: 20742 - DNA, 426 bp, Glycine max
  Intron number 3 from transcript Glyma02g43680.1 (locus Gly ma02g43680) derived from phytozome v7.0 (chr-ID Gm02; pos 48448349 to 48448774)
ccctgcaggtgagtgattttgtgtttatgtgctaattaaaagtgtgattgattgtgcttttttttattggctttgactagtgccatgattaataattgttgcagcaacttttgtgtaacaatcacaatttcaaaactaataaagggtatgcgaaattaaggtttattaatggtctttgctaatcaatgtcctaacatattgattaagaaattaataaatagaaaatttttaaattacgattatactagtagagatcacaattgaatggactactgtcacactttctaatgtttttttttattctttaatgctgtcttgtctttaggacatttattataattttttgaagaaatattattggaatgaaaacatttattgtgtgtttttatagttgtttgagttcggggacaagtataggggaaatta

SEQ ID NO: 20743 - DNA, 945 bp, Glycine max
  Intron number 1 from transcript Glyma04g32080.1 (locus Gly ma04g32080) derived from phytozome v7.0 (chr-ID Gm04; pos 36461666 to 36462610 reverse strand)
actgcttcgtgagcaccacactctgtctttttattggcaaatgttagtgtttgtatttttattttgagaaaggatcgaactcgctaccaaaagggatcaaacccgcaacctttttcctctttccttctctcttaaccatccaacccatattctgtcttttcatacaatgacctgcttattgtgttgaatttcctctgtttttggctttttactttttttcttgaatgtatttaactgtctctttagcttttattttcgaaagttggttttagtttttaaaaataaacaatgaaaattgacgctcatgctcaattctcacactactcgagatgattttgacccatactcgagttaggagcacgactgaagaagagaattaaaagatttctccaaactctttctattttttttttttgtaagtattctttttggaagacaaacgtgtttgaagcatgattgactcactataagtggacaggacacctatcctaagagatatttgacccttggcttgggacgctgtgggggattagtctcttttgctagacctaatcctgttagtttctatattctagtttttaattgtactagaaataattttcaaaacaatatagattttggaggtggaattctatgctgattgagtaaccgttccagggaggtgaacgcacaatgaaagtacgttgaaggaaggattttctttgttacttttttttagttgttaatcatgttacagggcaggcacattatcttgtgaaatctgaggccacatttcttttactgtattgcagttactgttagatttctttgttacatatatgaaatttatggtcatggagcagggtttatatcccaggtgttagatgcgatggatgtgatgtcctttaattgtttttgttttattcattttccaggttgcaaaagatccatccggaaaagaaatta

SEQ ID NO: 20744 - DNA, 951 bp, Glycine max
  Intron number 2 from transcript Glyma03g40250.2 (locus Gly ma03g40250) derived from phytozome v7.0 (chr-ID Gm03; pos 46057267 to 46058217)
agccacgcttaattcgccttaaaatttcctgtgctgtaagtagccaatgcaatatatgatttttcatattttttgtgattgatttttgcttgcatggttatcaaatcactggatgttagatttcttgagcttatagctaaaaggatttttctcgagtggattgttcttcatgaagtcactctgtttgaggcaatctgagaaatgattgagaaaaattgtgacgtgaaaagtgaaatggtttgcatagtttatcacatgaggtcacacatccttattttagtaaattagggtgctcgttggcctcaattaacccttggttctgcacacaataatatagtgacctgcataaattccatgctttgtgagataaagaaatggttttaactgaagaaacaccgattataacttataagaactaacataaactactttttgtttgccgttatgtggatattgctgcaaaggcttttaaccaaactattataatgtgtaaattagatcttgttcgggattttttaattttgtgttttataagacaaattatatgtttgtctaattatgtccacgcattgaattaatccatattttaacaaatcgactctcactaatcacaagctgaaaaatgcgatgctatttgtgaaagtatcttttgctcccgtctgcaccaatgtaaatagatccagtaatgcttcgtttgtttaagatttaggagcagtgtaaacaaccatttgatgaaagtaaatttttttggctatgactagaagttctggaaggcaatttttcctgtatgtggtgatcataatttaagaaaaagtgccataaataataaattaccatcacctggacttgccttctctttctttttgtgggtatatttgctttttccatgcttatgtaaacaaacacctttgagcaggccgctaaaccagagacagtagagaaggtgtgcaa

SEQ ID NO: 20745 - DNA, 220 bp, Glycine max
  Intron number 2 from transcript Glyma04g09240.1 (locus Gly ma04g09240) derived from phytozome v7.0 (chr-ID Gm04; pos 7401344 to 7401563)
ggagatagactagcagaggaggtgtgttatagctttgacattcaactgcttgatcttcttaataatttaattttggccttcgtttcatactaatctttaggctcttaagatgttcatttgacttcaactctgtagcatcaaatccagaaagataaaggatatttgttttcttctttttttgtcaggttatatcagttataaaacgtcacccaagtgttca

SEQ ID NO: 20746 - DNA, 637 bp, Glycine max
  Intron number 1 from transcript Glyma01g20720.1 (locus Gly ma01g20720) derived from phytozome v7.0 (chr-ID Gm01; pos 25344128 to 25344764)
agaaggtatttttatactaatagcttaatagagtcaatttaaataattttttcagtaagccaagtggatataattaaaaattaaaatacatgaatttttacactattatttaatcataaattatcatgtatgataacaccaccgtttacttttgtaatgattattttaaaaataatatttatgatgatttttaattggatgatagtgataggacataaaaattaaactcatggttgtataagttgattttgacttataaaagaaatttgattcattttgttttcctttcctttaaatgcttatttagaagtttattggtaaagttcttttcagttatagttgtctaagattttaaattacacttgcagttggtgttgcattgtgattactgaaattttttgttgtaattgtgattgccatgtgctattgggtatgatggtgcgttgtgattactgaaattacaattccagccgcaatactggggcctacaaaaacataaacatagtattgcggctgtaattgggattgcagacccagactgcaattttattgaaattgaatatgagagtttcaagttttacaaattttgttcttgttattgttgatgcattttcaggtgagaaaaaagggtgtgacc

SEQ ID NO: 20747 - DNA, 825 bp, Glycine max
  Intron number 3 from transcript Glyma03g28380.1 (locus Gly ma03g28380) derived from phytozome v7.0 (chr-ID Gm03; pos 36271245 to 36272069)
tcccagagaccaaggctattgagaaggagtacagggtacgtacgtaggtgcatatttctatcataatatcatgagatatggatgatttatgatttacaatgttcattgtttacataattgctttgtttacatatttttttacttttacactaactgttagtaatattataaaaaaaaactctcaataactcatttgatgtcaaaactcatgtacattacatcgacacccttaataattatctagaaaatcatattacaccatgcagataaggggttgctgtaattattaactcaaaatattaggaaattttaggcagtagctgtgtggtctattctaaaaaataaaatagagtaaatgattattttgttcatgaatgtttaaattgatgataattttgttcttaaaagaagaaaattataatttaaactctaaatgtataaaaagtgagataattatattttgtagtacaacttaatgataaaaagatctataaattttataaattaatgttaaattggtcattaaacaatataacttaatgacaaaataatctacaaaaatttaacgacgggatagaattctcttgctttttatacatttttgaattagatcaaagtttttattttttgtgttctaaactatcacttatttacacattcaaaaactaaaatatcatttgcacacacaaaaatatgttaaaaaggtgtatataattactagggtttctctttgatcattttagctaatatattatagcaatttgtgttctgtatagttaacatttgcttgttttttttaatggcatgtgtagaagcgtcgtggag

SEQ ID NO: 20748 - DNA, 800 bp, Glycine max
  Intron number 3 from transcript Glyma02g15630.1 (locus Gly ma02g15630) derived from phytozome v7.0 (chr-ID Gm02; pos 14117053 to 14117852 reverse strand)
ttctcaacgttagctcaaggcttggctctctcaatgtaattctacctctatttcttttattcattactttattttactagctaggagggtctattccaatacaaggtataaatacaatagtacaacttggtttttctataatctttcttttaaattccatttgtgtacgtccactttctttctacttggtatttggttagtttatctccaaatatttatcattatttaacaaattaagaaagcattacttattatttttccaacaatatttattggtattttgattaaatattttgtaagaaatgtatattagtattatcttgaaagacagaatataaaactgagggaatctttctcttttctctctctctttctttttattcttttcttataaagcttccttttgttcacactcatatttcacactgtagaaagaaatgtgagacagtcactatcttagtttcttataaacttgagtgaaaattcaaactctagctagacgactcttatatgtgtgatagaatttattttttttaaaaaatgataaataataatgaagtattggagtgatttggtgttcacatataactactgctgcttttttcttatttcttattcacctaggagtaattgatctttctattttcagtaaaaaaaaatgttatttgtcacatgtattataagtgctcaaaaatataaaaaaatatgttaataaaatattaaagaaaaaagtgttagagataatgtctctaacattatatttgtataagcagaaggtaagaaacgcggagataagagcg

SEQ ID NO: 20749 - DNA, 648 bp, Glycine max
  Intron number 1 from transcript Glyma01g39320.1 (locus Gly ma01g39320) derived from phytozome v7.0 (chr-ID Gm01; pos 51288404 to 51289051)
cgacccttcttcgcctaattctcaaggtatggataatgatgttcttcttcggatgcaaactttctaaatttacttttcatattccatttaagatgatcttatgtgtatcaaagggatgggcaaaacttatagtaccgttggtattattatctgatcagaattggagttttacttggataatttgtggaatcctttaatgatacgaattagcaaagtaaaatttcaattctaattgaagaacagcaccaacagaagctaaaaaacttatctaagttttgttaaggctagtttatagcccaatgtatgtgacaagtttcagggaatattaaagtgtatctaagtgtactgtattcagaacaccaatattcaaaacccaacaagataagaagtcattcataaatgaaagatgcgagtcaagggcatagattagttgatcatacattgctcggttcaatttggcagtatgatcaatgtcttgggctatttgtgggagacagctcgatcaaagcgaggatgagattttctgttttttgtgctgtcgcctcgatgagtactgggcttgatatgcttgttgaatattatcaataatcatacaactagggattaaccatttacacatttaaatgtttcagttattttgcttcgcag

SEQ ID NO: 20750 - DNA, 586 bp, Glycine max
  Intron number 3 from transcript Glyma02g06500.1 (locus Gly ma02g06500) derived from phytozome v7.0 (chr-ID Gm02; pos 5173639 to 5174224)
tcctcttgtttgcagacgcataacctaggttaggttggataattaataccttaattaggaaatcatgtgatttattttcttgtcgcctgtgatgtggttaaaagtagacaacaacatgaaagttttgttttttttgtttgtttatgtgactttggaggctagtagtttttttgtccggtattgttttttggtgggacttgagagtgatctgagattccaggggctaattaagtaatggcaatatccaacttaaaaggctatctgaattatgcaattgatgacaagtgaggttcaaagattcaaagctaaaaagagggaaaagatttgtttgttttattgggggtggggggaaaggaaagaggaaaaactattattttgttgttttcttttgagcttttaacttaaagagaaagtcaccaactttccgactccgagtctgtgttttcaagtggctgcttttgatcttctttctttctcctatttaattaacaatagtagttcattataataatgttgttgccttttcttgatttttgtttgtggtgttccagatttgccagaaaacaatcccccacaagtcattgag

SEQ ID NO: 20751 - DNA, 901 bp, Glycine max
  Intron number 1 from transcript Glyma03g00700.1 (locus Gly ma03g00700) derived from phytozome v7.0 (chr-ID Gm03; pos 408400 to 409300 reverse strand)
gctctatcgctcaacggatctaaggcttcaggtacgaatcctaaccctagccctcttctctaagctttctcaatttcatctctcgcgagcttttatctcagatatctgaatatctaattcgatttttgctattgtttaattgattctgccaattaattgtgtcgatttgtggattggattttgtgcgaaatttgatttcctttaaaaaatttgcctttaaattctatacgctgttgtttgtgacaatgccttaccttctctattctatgtacgctctgtggttccaatggattttgttgtgtgaatgtcttcactgataccctttaggtggtgccaacagaaatttctgattaatttccttatgggttgttggcctgtactttttacataatcccccatcttgtgggcatattaatgttttagtctaaaattgttgccacatgtaatgtagagttttttctgttgacaattgtcttttgatgtacacaatctgctttgactccttgtggttactgttttcttcaatcaattttggatttttatatttgttcatgattcatatccttgtttctccggttgttaggatgtttagcatttagcatggagttaatttgtcaaagggacttccattgttatgctcttgagttagtaggatcttaggaatttgttgctttaccatattggctgtcatggtttcatattccatgcttttagtgcctgtgcagttgagtgtgaaatcaaccctgatcgttttttttttttttttttgcaattttcttgtgtcataccctttgtttatttggataggattgtctgtcattcatgtagtctttttctttctcttttgaattttgacttaaattatttattctttttgttttgtgtagtgtagtctgtaatc

SEQ ID NO: 20752 - DNA, 1030 bp, Glycine max
  Intron number 2 from transcript Glyma02g10820.1 (locus Gly ma02g10820) derived from phytozome v7.0 (chr-ID Gm02; pos 8745697 to 8746726 reverse strand)
gcaagcttgctgttttggggagttttcttcacaaggtatgatgtaaaatcactttgggaagctaaattcaattagaatttctaaatactcttttcaagttttctctactagtcctatttactaaatgacaaaaaatattgattttttttatgtttttaatataggcataattgtacttttacttttaattatttaatttttggcgaatttcactttcaacaaattaatttggtatattttatctctaacttttaagaaatttgtgggttttatcctatgttattttactcttaacataattgtactttttatcttcaacttttaattttttgacaaattttacacctaatttttatatttattaataaataaatgattaggtaaaatttgtaaatttcttaaaagtttggtataaatgtgccaaattaaaaagttgaaaataaaattcgtcaaattaaaaaggtagaataaaaatataattaagcctttaatatgatttaaatatatttgggtccctgataaattaatgagttttgttttgggttcctaataattttttttttgtcttgagttcctaataaaataaaattctttttttttcctttttattttggttagtccttccaatatatatatattagaataactaaaaccaaagaataaggatcaattttttttagttttatcagagatttgagacaataaaaaaaatatttgagacccaaaataaagttcattaatttattagacttaaaacatatttaagtctatatcaacgggacggaagaaaggagtgaatcttaatgcttaaatttattattctttttttatttatatgatgtttaatcttttcattcatctgagatatgagattttacttcatacttgtattccaacacctttcaatttcattaacaaaacattcaccactaccatgcccaccattacaagtttatatgaatattgttctgagtatatatgttttatgttcttaggccgacctcttgaagcaagaaactcttgaacagct

SEQ ID NO: 20753 - DNA, 501 bp, Glycine max
  Intron number 2 from transcript Glyma02g45220.1 (locus Gly ma02g45220) derived from phytozome v7.0 (chr-ID Gm02; pos 49555277 to 49555777)
tgggatataaggtaattttgtttatgtatctttggtgtagtaatggtactgtgatcctttatttgaatttattttgtatagaaatatttatttgcacattgagcattgttatcacactcacactagtttttttgcattcgtgtgttacactctcacaacacaccatgtttttattgatactgaggaggagatctataagatgtcattagtaacgaagaagcatgatttttctcctgtcattgcttcaatccaaaaatatcttttctattttcccatatcactttctttcttacatagaatgatgactttttgcccttcaacatccaatatcctatgttgattatgccagtcccttccaaagcactggtttccttgcttcttatagtagcacattgctagttttcctagtggtttacgtgtcatgaacatataattctgtggcttacgttttaaaccaaaaatccagatacggttagaaagcagaggtggaaggcaatcatc

SEQ ID NO: 20754 - DNA, 733 bp, Glycine max
  Intron number 3 from transcript Glyma02g45220.1 (locus Gly ma02g45220) derived from phytozome v7.0 (chr-ID Gm02; pos 49555819 to 49556551)
tttccaaaggttctcattcgtcaaagattgggcgtgtgaaggatgagatttctggcatcactcacataattatggtacttcttgtaaattattttttatcttcagctagagcataaactatggtacttaatatttgttaaatactttatgtttttgcttatactataccttatttttttgaattatttggatggtaaaaaaaattggttattaggtatgactagtaaattctcagataaattggttaattgaaaattcaaattgactaggaaaatcttttagaatctgagacattattttttgaaactgttgtaaaattaggagctgtttggtttcagaaaatatttttgtttttacttttaattacaaaagtagcacttgttttactttgtttcctattttcaaaagtttgtataggaaactgtgaaaacagaacataataattggttttcagatgggtctctcctgcaatatgggtatttgtaatactttgaggggaagtgtactttgaaactttcatattattattctcttaagagactttggtgtgatgattgagaagtgaatacaaatgtcttcatatattccctcttcatgaatcttggaatatgaggcatatcctgcatatactttccttcgaaagtatgccttggcattgtgaagcatatcctgtgcatcctttccttggacagtatgcattgcaaactaaggtgacattcattttttgttcagg

SEQ ID NO: 20755 - DNA, 736 bp, Glycine max
  Intron number 2 from transcript Glyma03g39720.1 (locus Gly ma03g39720) derived from phytozome v7.0 (chr-ID Gm03; pos 45725885 to 45726620 reverse strand)
ctgctggccagaagacttgcttgcacattcatcgagtaagatcgcacatgaaatttctctgtcttttaaaccattttttttattaagaaacaagattcttagttagttatggttcgtatatacttcccttttattttccactcaagggggcgtttggtaggggagaaatattttcatgcctgggaatcatgaatcctgataaccatgtttcctgggaatgaagaaaatttgtttggttgactattgagagtttttaaataagttttctataaatcaaagagttacttgatatttttatccgtaactgtaattatttatcacattaaataatttaataagagtaacatgatgtttttaataaagtaaaacaaaaattaagcttgggaaagtatgattcccaccccccctccacgagaatgttattgtgggaatgtgagttaaaaacgattcctaggaatcatagtttttcgggaatatgtttcttaacaatgtgtaccaaccgtgggaaattaagtttcccaagttagaattcctaggatagtgaaaatttctcccctacaaagcgccccggagttcaattgctagcaattttgttaccataatgcaatgcaatgcaacagttttaattctacctctttgtaataagaaaagttgttactgtttctttcgtatggtactattgttacacttaaaattgtttgtccatattattctttgtaggctttaccctatttgt

SEQ ID NO: 20756 - DNA, 358 bp, Glycine max
  Intron number 2 from transcript Glyma01g02100.1 (locus Gly ma01g02100) derived from phytozome v7.0 (chr-ID Gm01; pos 1622198 to 1622555 reverse strand)
ctgctgataggtaatggttctgaatcgaatgattaatgaaaatattgttaattgtttgtagagaatgcggttattttgtatatgtcatttgatttgaaatgattctatggattcaatagaatggtaaaacctgttcgttttgggcttggagaaatcattacgtttgcttttatttctttatttcattttaaggagagctgtaaacactcatttcatgtattatattctgcaaatatggttttttgttcagtggtcaagagacttgtagtcagtttgataagaataggagttttttccgtgtaaaggataccttttcatgtgtttctaattgacaaatattgtgatctttgcagtgttc

SEQ ID NO: 20757 - DNA, 657 bp, Glycine max
  Intron number 2 from transcript Glyma03g37400.1 (locus Gly ma03g37400) derived from phytozome v7.0 (chr-ID Gm03; pos 44024628 to 44025284 reverse strand)
ttatcagatttttgtcacataataatccgcgttcgttttgttattcttattcttttgtgttactgcatgtgtcttgcgattgctgggaacctaccccaccgttgagaagtttaaaatcatatcaaatgcgttatcagataagtcacgcaccaaaaaaatcttgctagaaatttaaacaaataaacataattccaatgaatatttgcatacatggacgacacgttaaacttgatgaatgttcatcctaaattctaaaacaaatatttgattatatgtatatcggttcaattggaagctgttgactacgttaatggtagccacggcatcatcatcgtgtaggcaacgaaaattccttcaagttgacttcctatatgcgatgcattcatcaccacatcaactctaatcattttaatgagacaacatcgtcaccctgccctatataagaagcccaactatgtatgcatcgaccacaccttccatccaatcttcaagctacaaacaactctcttaattgttcgttctttcatccgaaataccatttgctatggcattcaatagcttgtactttcttatgctctgtgtttcccttgtgctatccttcctgacatccatttccatagctgataataaccatgcagtcgttccaccagaaaccat

SEQ ID NO: 20758 - DNA, 1022 bp, Glycine max
  Intron number 1 from transcript Glyma03g08850.1 (locus Gly ma03g08850) derived from phytozome v7.0 (chr-ID Gm03; pos 10067601 to 10068622 reverse strand)
cagtgccaccaaaggaccaggtttgcttctttttttttctatgcttagtttcacatttttgtttttctttgttggaactatcataattcttttgtttgttcttggtcttcttggggtgtttcttgtttgcatgttaggaacatgattgctttcaagtgggggtgattcttgttgggttctcaaaatatgcttctttttcttttcttgttttttttcttctttcctttttctgaaatttcgtgtttcctagtagcttgcccagtttcttctcaccttttggtttctttttatacgctaaatattctcccttttgtatgagtatgcgtagatccaaaacttgttacgaaacatttcgtattactgctatgctagacttcttggttctgattccattttcactttctttttttgtttcccttttatgggaatggttatttcttgaaatgtttggcgacttcaacaatttactttgttttttatagcttggtacgattctttccagcatatttcgggtttgaagttttctctgttgctttggtgttactggtggagcctctttactgtcttgagaatttatttcaatgattttgtataattcaagaggatatgagccaaatgaaagacaaaacttagatgcaatttcttaatacttttagtactggttttcaattggagttggagtttcacctcaataattcgtgttataaattttgcattaagaattagcatagattacctaattaaaactccaattctgattggagaacaacactaaaagagtcaaattctgattgcagaacaacactaaaagtatttaaagatctaaatccatgttttgttcccaaactaattggcttttctgttatgtggggaaattcgttaagaaatggttgtctagttgttgtatttacattaaataaattgagaacgtacaagattttggcatgtttgatgagacagtctcttggcccgaataaaatgttgcaggtggacttggaaactgtggagcctcaggctcaaca

SEQ ID NO: 20759 - DNA, 819 bp, Glycine max
  Intron number 1 from transcript Glyma02g15580.1 (locus Gly ma02g15580) derived from phytozome v7.0 (chr-ID Gm02; pos 14072739 to 14073557)
caagatccaaagaacgattcaaacacaaggtatgttgtattgttatgtatcctctaccttttcctctgcttcacacttgaacacacaccctacacccatgttgagaatttaattatcttatatacttagctttctctcatcatatacattactatattcttttttgcttactaataaatgtttctataaatatgtgatcatctataagctcatgttgaggctatattgctttttattagttagttgtggagaaaaatgaaaatgctcatcacattattcctctaaggcctaaaactaaaactaactctcttgtcccgaattagtcaaaaaaatggggtgcactatgtcatctttttagtaattttttattggttcaaccttgtggagaccaagtttaacctctgcagattatagtctttcaatgatgttatgaatttgaccaaccccaaaaaaaaaaacatcattcatgccaaggtaggaaagtcaaattctctggctgatctgctttttagcttcttttttcaatagtgagcctaaatttggaaaattaccagttagttaattggcataggcaaagtttagattaactttgttacaaagcttctaaacttgaccctctccccaaattttcttaaggttgagaaagagcaaataaattcaattttatattccacttgcacaattgcttcttctgcatgccattttagaaaaagaataaaaaaaaatgaaagtagtgaagggtatgaatcaagcagctgcagctgcatcatctcaagaattcatgcatgacatccacttcatttcaagttgcaggaagcc

SEQ ID NO: 20760 - DNA, 764 bp, Glycine max
  Intron number 2 from transcript Glyma01g23010.2 (locus Gly ma01g23010) derived from phytozome v7.0 (chr-ID Gm01; pos 29421967 to 29422730)
ttgccccagaaccagaatcgccctattctgaagcggttcgtgagttattattattattatgatgatgatgatgatgatgatgatgatgatatgcaccataagtataaaactttgttgaatagatatctaacaacatttaatcattttattatgtcatcttgttctttagtataatcaacgaggggatgaattcttgttgaatgtttgtgtaaaagtgttttacacttgagagtgcatatgaattaaactcaaaaaaggaaaagaaaaaatgagttattggtatggtttttagtttcttgatttttctgactgaggttatattttgactaattgtgtttctaatttttgttttcattaataattacaaaaatgttatcttgttttaactttgttttctaacctcaaatattttcactactaaggcttggctgtttttgttgtaagtgtctcaattcatttccccacttagcagggtatgactcgtattctagttattgactgtctatcacttcattatgttgtttatctaaaataagaagagtagcttttagtttcctccattatgatattctgaaggcaacatgttttttattaagttgttatggacttacggtcttaatcatatctttctcttgttggtagagataatgatgcatgatctccctctcaaatatttatcttgtctatagttttttgatattgatatataattatgcttggcatttgcagggtgctggtattgacttaaatcttccaagaagaag

SEQ ID NO: 20761 - DNA, 825 bp, Glycine max
  Intron number 1 from transcript Glyma04g26830.1 (locus Gly ma04g26830) derived from phytozome v7.0 (chr-ID Gm04; pos 30785498 to 30786322)
tggagacaccctgcgcctgtagcggcagtcttaaggtatcaaaattttgtgtctttgatgattttaatttgttaaaaaatttatgaggtttggttttgtcaggtatttgttagttatgatgatgatttctgcgttttggatttgtaaattatgtcttgtttgaaatgatcggtcaatgtggaaatttgtttctttaaggggtaggtggggggattttttattttgtgtgtgtgtggtatttaatttttttatttatgttcatattgtttgtgttgatggtagtttactaaaccggcaaatgcttttgcttggatagaaggttttgagttttgtgactttgttgtgtgtgtatgcactgttctgatttctagatgctgccatgatcaaaatgtgtttaacaaattttttgtatatgttttttgcatacttagtgtatgtttggattaaagtttgcaaacttgagtttgaatgagtttcattttgcaaactgactttcaaggcaaaattgaagctttttcagtttgactttttgaggaggggtcctaaccgaaaaccaagcatgcgcttaatataattatattactgggtttacgaattagtttaattaagaaatgacagctaaaagttctgatgagaatcttcttcttgttacaaaattgaactggtaaatgcattaataatatgcgttggttagctttagacaaaggggtgaaaaagaagggtggaagaatgttgttgtttgtgtcatgttgtttttcatttctttcatctttattttggtattcttaattcttggactgttgttggcgtttggttttatgcagt

SEQ ID NO: 20762 - DNA, 1060 bp, Glycine max
  Intron number 1 from transcript Glyma02g12570.1 (locus Gly ma02g12570) derived from phytozome v7.0 (chr-ID Gm02; pos 10842286 to 10843345 reverse strand)
aggaggagttctctaacatctctgaagacatctctgtgagtatatgctttttgggtttgtcttgcattaatgtggcttggttcttagcactgttaccttttggagtttgagagatctgaaatagaagctttgcgtattgatatttctacattttagggtgatagattcatttccatgatgtaaagagcaggtcaatgcttgattctggactaaaaattgtagctttggttgtgtgtgtaaaatggggtgtgcttttccttttgaattcatcttgagaaattttctggggtttgggtttgtgctttggtggaaggagagggaacgggaaatgtgtgaaagggtattggttgaacatggggaatacaggagaatgaatggttgctagttgcgtctttcttaaagtgttatagcttcttttttttcctgattctcttctagttccttccagatattgaatgaaatggtttgcttttgcttaatcagaggaacagaaaattttagatattgatcatatagaacattctggagccgtttggaccatgtggtgtaccatactggcttagttgttttttgtattttgtttgatctggaagagtagtgagtgccttcattcatttgaaatagcacaaatttttaaaaattgacacttaattcttaaattggtaattgatgtagcattgtcattaattcagttgtacatgtattttttgtgtgacttgtaaggccataagggtaatccatgaattttacatcaatcaagaacttgcattaatgaaatagataaacttgaactatattgtagagatttatgtattttgaatgataagatgggaattagtttcagatcactaagattttacaaattgtttgtgttgacgcataaagctggataaaattttatgcataagtataaaaaaaaaaactattccagcaggcaaatcctgtttggtgtttagacttttagatttactgggagtttgatgccactgccttgtttttgctgaagaagaaatgttgatcttttgcagagtttctcaaataccgttgaagaaaaggcgaa

SEQ ID NO: 20763 - DNA, 334 bp, Glycine max
  Intron number 2 from transcript Glyma01g06350.1 (locus Gly ma01g06350) derived from phytozome v7.0 (chr-ID Gm01; pos 6520029 to 6520362)
cagtcaagtggaatcaagtaagaccaacacagcttgtaattaactagtttttttatcattcaaattactatgaaaagaaagtcccattttaaagaatgaccctcaatagaatacaaataaatgagcatctaccaaagaaaaatacattaacaaatgtcctcccaaaacagaataagaaaaaaattgtttattctatctatcactttgatcatgtcatatgatcacaattcacgtctaaaatctacataacaatttgtagatataaaatttttaatttctatctttctgatgtcattaattttggtttgattgtaggcatcattttttattacct

SEQ ID NO: 20764 - DNA, 1026 bp, Glycine max
  Intron number 4 from transcript Glyma02g36750.1 (locus Gly ma02g36750) derived from phytozome v7.0 (chr-ID Gm02; pos 42183510 to 42184535)
tctgatcaacagagagaggtcatatcatataattattactactactttcttttgctcctgctattttattttgcttctcttctctccatatattacaatttcatgcttgttttgtttgctttgactaaaagatagctttacaaattgttttccttttgttttgaatttaatttctatgcaatgtgagtataaaaagtatcagtggactttgaaggtagtttgtgattcaatgacaagtatatatatactatttattcttttattttaaagtgttaaagattgtatagaaaatgaaagcaaaacaacatgatatttttgtaattatttgtactaatgtgacatttctcaaatctaagaggcaggcctttcactgtcactttcctagttatataccaaacacaattgcttgtgttcacttattattcttccccacgtcataatcaggggaaacacttgacctgctactgctcacctttattcctttgaaaccaagttttggaattggatgtttcaaccgattagcagtgccaataacaagactcgatgttaataagagtatggtccacgtaagctggaaaattaagcaaaagacaatatgtaacctcaagagatgagataaacctttctttgaaagcttgatcaccattacaatgttctccacttctagctctaattgcacttttcatccttttgaaatgtaaggaggagagtgtttccaagcttctaagttttatgcttgtatatattaccaggataaatacatctttataatttcttttatgaaaatataaatgcacagaattgtatccatgtatgctttgtaactgaaaatatgtgaatgatgctgatgagaagtgagaacggtaattttattggaggatatcgtttagttaatattgttatttcacatttcagttgccaaagataatgaaggatgatgtgatctgcttataacagcatctgatgttttctgtttcctttgtacatacaggaagttctgacacaggtccttgaggaagctggcta

SEQ ID NO: 20765 - DNA, 916 bp, Glycine max
  Intron number 1 from transcript Glyma03g26990.1 (locus Gly ma03g26990) derived from phytozome v7.0 (chr-ID Gm03; pos 34502360 to 34503275 reverse strand)
ttttccaggctgggggatacaagtctgttttcattacttgagaaatttttgccctttgtcccattatttttagtagcaatgaaatattccttcccaaataacaagtgattgattatgaatatctgttttattctgctttaaaagaccaaaaatatcttgcctagtttcttgcgtataattagaaagtagattttttttaaaaaaaaaaataagcaattagaaagtagattaacatgaagaaaaagtaaaaaaagttaatagaaaaattataaaaatgagttaattaaggtctatatatttctaatatttcattaggtttaatacaatacttttattttcatttctcatgactcattaattaggtttagttttacttttgatttatgaaattttctattttaaaaaggatggcggtttagtaaaacacatgcttggtgcttggtgcttggtggttccaacaattttctcatggatagactggtagcaggaattttagttgggtatcaaatcaaaaattctaaatacctcttgataaaataaagaaaaagaaaaagaccttgctttaaaagacactctaatactacataaaaaaaagccatgcactttaataagaaaaattacgaaaagagtatgctttcagaagaaagaatattttttctaaatattctttctaattagtgatttgaatctgtgccagagaaaatgcttttcatgaaacaaatatactttctagttaattggtgctacacaaggagtcgatttgcaatacacattatatggataaatcaagtatagttcaaactactacatttatagtattaattaacattaacatgatatagatgataagcgcagtgctgttgggttttcttttgctctaggaggctgatactctatccaagtggtaatatcaaaa

SEQ ID NO: 20766 - DNA, 660 bp, Glycine max
  Intron number 4 from transcript Glyma02g01830.1 (locus Gly ma02g01830) derived from phytozome v7.0 (chr-ID Gm02; pos 1313418 to 1314077 reverse strand)
tttactgagaaaaccaaagccatagtgctgaacaggttagaaattgcacaaattcataactccttccactttagaatttagatagacatcatcctcatcttgggaagcctcagactagtccccttgatatccttcaatcaatagaatggcggttgagtggatatttttataaaataaaaaatgtgaataagaaatgctggtgctatcagtttatggtttaagcttgtaataatttgaaattttgaatgtaattaatgattcaagttatctttttttgtgtattttgatgattgtcaagaactcccaaggattagcctctgatatgcccaaattttgtgaggcagtggaattcttgaagaagtatggtgtgttttgtttgtgtttcatttttctttggttcagattttctttcacaggccactatcaaaaagggttaagcattgaggagatgcttttattttctttcatcattttgttttgtaggctttcagtaaccgtgttatataaaaacaatcccttacaacttacaagttacaacaagttttttgttatgcatcacaatgttttaaaaaaatgtttagtctcatgatatgaactacaaaatgctgacatgaagtttaaacagtcctcacaatcctactggaaaggttttcacaaaag

SEQ ID NO: 20767 - DNA, 365 bp, Glycine max
  Intron number 3 from transcript Glyma04g03800.1 (locus Gly ma04g03800) derived from phytozome v7.0 (chr-ID Gm04; pos 2771882 to 2772246 reverse strand)
aaagtaaatcaattcaagattctaaacgtacttgcatgctatgattaacgaggttttaaattgtggtcgcagtcgtactttcttcctgaacctttacatattatagaaaattgtagacaagtgtgaccggtgcagtctcagttgtggtggctatagggttgtggagatttcaaaaaccatggtgtcctggtggaaattgctgttgcggaccagtttttaaaaccttgatgatgattcgtttgatcattagtttctccattgtttcattacgaaagtttgatatcgttaattagttttggatgtttacctaattttgagttgttttgtcggtcgcaggggcaactccgaagtcagtgttagagttg

SEQ ID NO: 20768 - DNA, 363 bp, Glycine max
  Intron number 1 from transcript Glyma03g07380.2 (locus Gly ma03g07380) derived from phytozome v7.0 (chr-ID Gm03; pos 7917649 to 7918011 reverse strand)
cgctagggcgtcacctggctcgaagactagtccaggtgagatttttttatcaacaaatattagttgttagtttcaaattaaaatttttgacttcttccttttattatcaaatcaatcttataattcatcattttataagacatataaagtgaattgattgattaaagaaaaaaaagaaaaatatcacatattattcgattttctctgttaacaaaaactcatctcttttattgattaatgttaatcgttaatttttttcaataaaagaaattcaaatctccaacttttttctttgattattacactaatcttataattcttggtgcaggtgggtgtgaaggacgttttctccgtgccaggtga

SEQ ID NO: 20769 - DNA, 656 bp, Glycine max
  Intron number 1 from transcript Glyma01g38060.1 (locus Gly ma01g38060) derived from phytozome v7.0 (chr-ID Gm01; pos 50254052 to 50254707)
attccgtccatcgtccagtcagagattgttccattgtaagaacattcacctttttgtctatgtatcctataaaatagtattacatagttaagagctgagtgtgaaaaaaaaaagtttggattgaataaccgaatataaactgaattagtattttttttaactaattcaagaaaaaaataatgtaatgttttataaaactaatttgtgtttaacctaatggtctgaatggtgtgataatttcttcataggaaaaattatttcattccttcaagatattttaagataattattatagaaatttttaaaaactaatgtaatatgatataattgaaagatacttttgttctttaaatatttgaatagaacttagaagtttgattctcaagtaaactaaaaaacatgttttcaatttcttaaataaatcttattgtcttaggggaattaattattatctcccatatatataccttggattaaataaataataataagaagaagaataataaaacagtttgtaactgttttaattgcttaaaaaattaaatgctggatgaacacatacttaatgcacagttgctcttaatttggttttcaagtattgattgattgattgtgttgtaggaagcatcaacggcaaagtatatagtgcaacaata

SEQ ID NO: 20770 - DNA, 865 bp, Glycine max
  Intron number 1 from transcript Glyma03g38430.2 (locus Gly ma03g38430) derived from phytozome v7.0 (chr-ID Gm03; pos 44787232 to 44788096 reverse strand)
cactctcattcagggagctgcttccaaaggagccggtctctctctctctctctctctcagtgaaattatttctttagcatttttaatttgcttcattcttttttatagctatggtctctgtattgtaatgatttcaatgctgccttcaccttaagccactttgttatcatttctgacccttttttgtttttgtttttgtttttttttctctttttctggtattgcttttggccttctttgtaattagtttactgtctttgaatgtgtttatggactaacatagtacttgtagcagtaggatggacaacataatctgtatgcttttttaggttagttgaggtcttcctagttgatgtcatagcacattttgtgttgtaaagacggtctcaaatgtgtgcttttaccaagggggtgtaacttagttgattgagtagagttgtaagtgttgtaagcgcatggataaaaaaaaatgtgggtatttagataaacatttgcaaaactaattttgaactaagttgattttgattctgattataattgattttgaagtgaagatatttatatttgggtatttttattctaaaagcaaattagtagtagaacttaatactataatttttttttctacacaaaagttgcctagagtggctatgggctatggctaaaaatcaattatggaccagaatctattcttcaacatgggattaaacatgtgaacttttatctaaaattatgttagttggtatttcaatgtgattttagatgactcaacgtgaaatcaaacatgcaccaatctctcactccacttcaattgcatactcaagatttatatttttgttttgtcctgtattggcagtctgtttgg

SEQ ID NO: 20771 - DNA, 695 bp, Glycine max
  Intron number 5 from transcript Glyma01g42150.1 (locus Gly ma01g42150) derived from phytozome v7.0 (chr-ID Gm01; pos 53473625 to 53474319 reverse strand)
gttttacgcggtaagtaatttcttgatgaattcctgttgcctcctttttgttgctttgcaaagaatcttatgttgcatattctaattgtattgtgcatgttatcatgcaatgaagagaatccatcaacacttttcctttcttttttcttttcccccattgcagttctacttgatctttacaggttctccttcccttcattttgattgataagcctgcattagtgagagtaaataagtgagtcatgcacaaagagtgatgttcagtatatcaaatagaaacttaaaacaagaaaccattatttgaaagttaattatagaccgatatagggaaaacacaactcaaaaaatgtgccatgaatatatatagttgacaaactgatgctgtgctactagccgagtttttgtgtgcgtagtatgtgtggaggtagagtaacagtatgaacaatttcttacattaaacgacactacaatatttgctgaatatcttcctagacatgccgaagtcttcccgatctctgaaatgttttattttattcccctcctggatttctatttcattagtggaattttattacttatttcacgtgatgcttatcagagactctccgtatctcttgcagtataaaaatagcttccaaggggagccttatatgtaaatacgcttgtttcctcaattataaaatttcatgtgcaga

SEQ ID NO: 20772 - DNA, 503 bp, Glycine max
  Intron number 1 from transcript Glyma04g14270.1 (locus Gly ma04g14270) derived from phytozome v7.0 (chr-ID Gm04; pos 14149931 to 14150433)
gtggtataaaaggagttccaacgccatgtaatatattattatgcttattgtgttcaataaagtagaaattttatgcatttaaaatttgcaaaacgttttcttattacacttagaaacatctaaatgtaatgaaaactgcaacaattacacttgtatcctaaagaagttggtttatgaggtctgatctatttgtaaaagttttaaggaatattcatttagcagtcttgcattgtatcttgaagttagtgaatttttatacttgcattactacttttgctaacatgacaaaactttagaacataattttaggccatgtgccttattctgttttctttttaatatttaaacattaccagcatagtaacttatgtggcttaatgttgagattttctatataacaagtaatttgattatacataagtgaaaactggtaggaggtggttatgaattagcagaagattattcattaggataatacaacatgtttgaatttccagtgggaa

SEQ ID NO: 20773 - DNA, 494 bp, Glycine max
  Intron number 2 from transcript Glyma04g39710.1 (locus Gly ma04g39710) derived from phytozome v7.0 (chr-ID Gm04; pos 45893777 to 45894270)
ttgtcacaagtgctttcttatttgttttttgataggttagtatgttaattgccctaccttttcaaagtgaaaataaagtatttagggtaactaaagcatgcaacatttgaatatccaatagactagcacaatagagaaagaatttctattgatgattatagcagattgatatcatttgactttaaggagtgctacaaatgtattgtattgtatcaatagcataaagccggttctgtgttgggtataaaagattccttgtgtatgtgtttgcatatcacagtagaaatgattttattttttatcagcaaaatgttagttgttagtttttattagaaggagaatggaacccataactttccccccctcctttccttctttcttaatcacccaactaaccttatatctccacgaagagatattctatttcatgcatgcattaaagtttctgtttaacatttttcgtcttttcttttttgcatttatgtggagcagtg

SEQ ID NO: 20774 - DNA, 459 bp, Glycine max
  Intron number 3 from transcript Glyma04g39710.1 (locus Gly ma04g39710) derived from phytozome v7.0 (chr-ID Gm04; pos 45894331 to 45894789)
gagagcctttttttcgtaataaggaggtcagttaaaaaaacacaatatttccagtttaagtgttcctcactcagtgtatggaaattttttgttaaggtttttgaattgttaggttttcctatttcttctatcctatgcaatcatctcaatttcctctatgcaaatttaatttgagctgaatgaaagaaactgtattgtattatgcaagtatattggtggcaagtgttaggagaaaattggtacctctgaaggtggtggacatgtgagtcggttgaatgatctctggcgagtggcacaacctgcaaacacttacacacaccccacacttgaaatcaaaatcactcacttgaattaatgattgaaaatttgtaatttacattcccaactgtttattacatctactgttcgttttccatgcttattttgatgttgcagactgaggtattgcggaagttgtca

SEQ ID NO: 20775 - DNA, 580 bp, Glycine max
  Intron number 1 from transcript Glyma05g06540.1 (locus Gly ma05g06540) derived from phytozome v7.0 (chr-ID Gm05; pos 6588237 to 6588816)
ggcgagttttacaaagtaacccaagattgacgaaggttagcatttgtaacatgatccaaaacctagcatgtatatatttttttattgctgttgctttaacataagaacttatgctaagatgctgaaccatgtttattcatattaatctcttccttatatcaaatactataccaagaatatatgtttaagaactatgacttttgtaagtgtggtgcttgtatattttaggtttgtatttatttgttgtaaataaatggtgccaatatacaatatcttatcatgccaaggccatgcaaggctcagctggattgttaattttcctttagcttgttataagaaacataaagatgaatgtgctactgtgcaaatgtgctcttcagcttctggtctgtaattgaaaaatgaattggtgtagaccagcctaccatttcctttgcagtgtttgtaaaagcatgttttagtctatgtacatgatgctttgatagcttaatttatgttaaaatgatatatcttgtaattgacagatttgcatgtacctttttcagctaagtgtgccagattgtattagactcacaattga

SEQ ID NO: 20776 - DNA, 929 bp, Glycine max
  Intron number 2 from transcript Glyma02g43770.2 (locus Gly ma02g43770) derived from phytozome v7.0 (chr-ID Gm02; pos 48493893 to 48494821 reverse strand)
atccgcagaacgcaccgtttctggaggtagtttgccatgacttttgcttccaaaagctcttgtttgtaggcttttatatccatatcttatggtataagttaatgtttatcttctgagggtgcatgtgcattttggtaaatagtttaattaagtgtttattgaataaggatatgtttataaattttttctatatgcagattgaaggagaaggaaaaattagaatttaaactttgcttatatgtaagtttttaaagaagttggtgatatggattttggccgcaacatcaaggttttttaagtgtctgcggccacaattgcagccgcatttgttgtgatttccacaatatcaggagattttaatgaaaccgtgactgcagtttattaccttgtacgtgtacataagtttatttattgaagttctctcgtttaacttcttgaaaaattgattttgagttgtcctgttgtgcatgagctaatcttaacttattagagaagcttaatttattttaccttttttattttctcctatgaaagtctattgaaaagtttatccagatagggtttaagtgcttatcaaataagcacttatgtatatgttataagccttattgaatgaaagaggaaatagggctaacttgttttcttataagttgtaagttattattaaaagctatattgaataacctattgaaataagctttcaagtttttttaaaaaaagttcatgaacatgtcaagctatttttataagctctttcaaatatttatgcaagtgctcaggtcataaaaataactttaaacaagctctttcaagtactctaaagttactgctttcaccacttgcaacttgtgaaagctgttaatgtctttttctgtagaattacatgcttattagttgtttaccttaatgtagagcattaagaagtctga

SEQ ID NO: 20777 - DNA, 863 bp, Glycine max
  Intron number 3 from transcript Glyma04g34200.1 (locus Gly ma04g34200) derived from phytozome v7.0 (chr-ID Gm04; pos 40243516 to 40244378 reverse strand)
tgtaatcaacttgaaagaaattgtgacttctacaggtatattttccaatgatctaaatgttttgttaccaatataatgtaggcttcaatttatgaatttctaaaatttgttttttttactggccttgagaaagatggataagggaggccaggcaagttattcattttcatgataatagtcaattacttcattttcaattagatagcactattttgactatatgaacatatccacaatctccctttggatcttgttatttttcatatttcctattatatctttcattttgtgttttaactttcaaataccttgtattcctctttttcttaccttaccctgtctctttcaatttaatattgttaattacattctttaatactatttttatagttatctaacttatattgaaaaatagccttttgagcttatgacacaaatggtatcgtttggttttggtattgagtggcttgtgttttgtgatcaaaatggtgaaaataaaaataaaaaaaaaactacaatggcatagtgctggtttgggacaactaaagacgtaatatacttatgcatgttgctacctccaatcctttttaactagaatattttatgaatttaatatgcactagacttttatatatttaccaaataatcatctatttgctactaactttcaaattattcatacagtgccatatccaattctgtagatgtttttaccattatttttatttttttgcaatttgtccagattgagagtaacattgttcaatgtccaaacccgaagtatccaaagaagatgatatctacaattgatgttgtgtaagtgagaggtgattcttgttgaggagattcgaggggtaaggttt

SEQ ID NO: 20778 - DNA, 933 bp, Glycine max
  Intron number 1 from transcript Glyma02g47590.1 (locus Gly ma02g47590) derived from phytozome v7.0 (chr-ID Gm02; pos 51120077 to 51121009)
ttagccttctttccagttttcttcccctctctctggtaaccttcttctcctttttaatccaaattatgattcttattttttccttgatattttttctgtgattgcgtgaatttcgatccacctgtgtgaacgtttgaaacatcctttgtagcaactttatgtctcaattttaaggtcaactttctgtgctgggtcgttcaagttgcatctttatcatttgatctgttgtttgagttgatgagttaacttgtgtgacctcatagtttctgtgggagattgcatatctctcaagcttctttatttgataagaagctgttgcataatagcatcaagagtgaaatcaccggtattaaactttctaatttttcttctcttccgttatcactgatggattttcctgtgattattgtgtagattatgataatatgctttttcgaatgtattttgttttttggcatcagcttgttgaaaaattagggcctgattgcttactaaatagtttgataattattctctctagtctctagtacttgatttgtcttctgtaatgtttctgtgtagtgggggcagaggatgaaaggctgtaagcctacaacttttagcagattatgaattttctcaagttcctcactctttgtaacatattagtattagcatttaacttttttgtagcataacaaagaatatgtttttttttaatcagcaataagactttcattgatagcacaagttgtgcaaaaattacaaggagagtagcaaatacgccaatcacagaacctacataatttatgacccaaagcaccctgaaaacaaactgtgcttggtcgaaactcagcaaatatataatgcatataatcacctccgctagttactgacaaagtaaatattttttgggtaggtcaccaggctctaacataaaacagaagcctttgt

SEQ ID NO: 20779 - DNA, 887 bp, Glycine max
  Intron number 1 from transcript Glyma01g34770.1 (locus Gly ma01g34770) derived from phytozome v7.0 (chr-ID Gm01; pos 47223054 to 47223940)
gtagccggtagctggatagtccattgcactagtcctaggcacgacactcatcatctctttctccgcgttccagctaagtctggttttcttcccagcgttactctttaattatcatgcaccctaccatgtagtaattaagttgtaaactaaacatcaataagtaataatctgtttccattgatttcaagttctgattaccaaactcaagtgcagtgtttgttatctttgttagattcctttcactgcatacttagtatatatttgtttattcatttaataggataataatcaaaccgcttaattatgtttgagattaataatatatatttgatttttatttgaagttttttataaagtttttttattattctaagtgatatattaaaaattttgttttgaattcttatgtggtgagaagaagattcaaaataaaacttttaatataacagaaatataataataatatttattatttttatcattttatttatatttatatttgacataaataaagttatttaacgttacagatagcacattttgttgagttttagttttgttgagtttgttgagtgttgatcttttatatttatatttgacacaaataaagatgaatataatccaaaggacagctaatcttgccaaacttatttatgatacctgacgttaactcttttgactcttaaaaaaactaatttcaacaaatcaaatctaaaaggaaaaggtcaacaatactcggaaaccagttatttaagttttcaaatatttccagcagaatgtcacatcttgccactattatatatataaagtgatcacgaaccaggacactatgcattcaagtttaatttcaatccatagaagatcaaacagaggcggcagaagttaac

SEQ ID NO: 20780 - DNA, 744 bp, Glycine max
  Intron number 2 from transcript Glyma02g40330.1 (locus Gly ma02g40330) derived from phytozome v7.0 (chr-ID Gm02; pos 45566708 to 45567451 reverse strand)
cagcgcaggtgagcttctcgatccctttctctgttttttctttcttcgtcttttgttggggggtatggaaaaaaattggagtttttttttttcctttacatttgttgtgcctttttcttttgtctatgggtgactttatgtaaagaaatttgattaattatctgttttccttggtattttttagtatgtaatttgcgaggtactcactattagattttctattctagattgagggctgattcaaaaattgaaaataaaaataaaggtgtaacgtgcttaggtgggtaataagatgctaagattgttcttaccatttattgctttggtcgtattatcattttatgcaaagagcttggggtataattagtaatgcatccttgatagatttgttggaaataaactcctttaaagtgatttgtacattatgagacaacaatgctgagattgtgataaatatatggcacttgtataataaattatgaaattcttaactccattgattattttaattaatggttatcatttaatgtgaacctctcacgttagaggaggcaaatcgtatttgttgtccttccaactgttttcattaattatatttttattcctgaattaagttaatttgtctgttctaaattgtaacttcttggttggttgtttggtgttagcttcagggtcccctttctctgtatttttcaataacttttgaatattatgttgtttactttaggtcctgtggctgaagac

SEQ ID NO: 20781 - DNA, 824 bp, Glycine max
  Intron number 1 from transcript Glyma01g23140.1 (locus Gly ma01g23140) derived from phytozome v7.0 (chr-ID Gm01; pos 29567333 to 29568156)
aggaggggattgaagatttccaaaggaaaaagcaggtactagatcctgtcttctactttatcctcatagtggcttgtgagtgtagtttcattttattaaattaaaagtgaggttgttgaaccttttagtcttccaccctgctgcacaattgtgtgaattataaatgaatctgattctcttcttaaatttaatttgatttatattttttagcaacttattgtatctgtaaaatctattgggggatagataggacccccatggcttgatgaatatcaataatttttgaaagaaaattgttgttttcttggaaggcggagggaggttataaatgattctatttttccttttatggaatggcagtcagtttatggaagattccaactttcttgttcagatccttgctatgtcttgtttgaaaaggatgtagtgctattattaaactctttgttcataaatccagtacttgttaacattatctcccagattccaaattaaatttaatactggagttgaaaagtcttaatttgataaaatgactgtgaggtaagaaaccagaaagttcaaaatagtatctataatatttttttctgctacaattttccctacattttaagtcctgttgtctactaatataattgtgattttcattttttttcctgtttaattaaatatctatacgaaattaaagtaatagaccattagttatttatattaagaaaaactaaagggatacgataatcatttagatttgttgtggtttataacctagctagtggaatcctgctgcaggatattgaggtgaataatagaagagttaaagtgca

SEQ ID NO: 20782 - DNA, 631 bp, Glycine max
  Intron number 2 from transcript Glyma02g01950.1 (locus Gly ma02g01950) derived from phytozome v7.0 (chr-ID Gm02; pos 1425270 to 1425900 reverse strand)
ggaggccaagagaaaggggcgtcactctggttgttcgtatttatatcctcaagtcctcaacattaattttaatgaattcaaattcatgagtttggacattacacattgctgaatattccctggtaatttggtagctaatgctcatttatcacgcatgcaaaattcacaacactctactgagttgcattataatttaaaagatcagtgtcgtaattcttctaaatagttcagcggatcttatttctagattaggtgatttagttgtcgtttataatctaaaaaaaaaaaatgttaccgcagatctttacctggttcccagttgttgggaaggaaatggtgaaaatgagattttgttgtcttcactattttctttgtaaattgttaaaaaaacaggaagtaaggtgaaataaagtggcatttttgggtgattgttagtaaaaacacatcaaatgaaaacaaaaattaaatcaagcatcttgtatgaacattgctatttgctggttgggctgcacttgtaacgaatttctattgttttggccttttgggtagaaggtattgtggttttgattattaattgtttgcctaaatacaattaggtaagcgtaagggtacaagggaggcaaggcttccc

SEQ ID NO: 20783 - DNA, 1019 bp, Glycine max
  Intron number 1 from transcript Glyma04g21090.1 (locus Gly ma04g21090) derived from phytozome v7.0 (chr-ID Gm04; pos 24098972 to 24099990)
tttttggtctctggagttacaccacagccacggaggtttgtgtctgtaaaacttgaatcctcgtctttccaatttttgtgttttgttcttttgaatcaattcttagtcctttttgttttcctttctatttcagaattaattttattgtttagtgctttttcttttttttttttgtttcattactagtcatatggttctcaataacatcatctttattgagatttactgtatttttattttgtctcttttttgggggatgttctggagttcctctgggggtgttttcggtgctgtgttttgaacaaaattgacctagttctgacattcacgtcaaggcataaatacgttgatacttgcattaatgtgatttcctttttctaatccctaactctttagactgtcgtctttgaacaaattttaagcatcaaattgagcaccagttatttatctcatgttggtttctttattaaacaaaagttctccaatgttgtttctttgctttgctttatgttttgcaatcccattgaaaagtcaacttacccaatagcttaggtacctgcgtttcttgtgttgcttgagtttcatatcactggttttggaaatgaaatcctatttccttccttccttttcaattattttaaatggaacagaactcttctaagctcccatatttgcaaaatattctggccttttaaaattgttcataattttgacattctagaaaactggataatgtaaaccagtcatggatttggttcaacatgtttgtttccttttacacttattcttgagctcgtgaagacttgaagtactgcttctccttctaatttagatacttaattatggaattcctaaatgttttcataatcgtacctttgatgtctggttcttcatttactctgaacttgttatcattacaggtctagtccacttaactgagtttttagatattgatttcaatttttcaatatttgtttattgcagctctaggactgctcattaggtagttttttatttag

SEQ ID NO: 20784 - DNA, 405 bp, Glycine max
  Intron number 2 from transcript Glyma01g23850.1 (locus Gly ma01g23850) derived from phytozome v7.0 (chr-ID Gm01; pos 30924689 to 30925093)
caagttcagactttagtacatgccttatgttttgtgacattttgttcgtatacaaggaggagaagaaacataattgcctgtatccttctgtattcttggttgtaaactgtaaagatgagggaatctctccactaaagcaatccttttactaaaaaagaagttaaaaaaagggggaaatatcttgatccatgaaaaataagtgtcaatgcagaagtagttttcctttgttttgtctataattagcatttttgttgatgaattagatagagtacatctcataactgatgtaaatttttggcaattcaaatttggttaataaaattgatttttagtgagtctctctaatttaattttcattttattgctatagtaaatattgatacggagaagaaaaagaatagtttg

SEQ ID NO: 20785 - DNA, 950 bp, Glycine max
  Intron number 1 from transcript Glyma02g39910.1 (locus Gly ma02g39910) derived from phytozome v7.0 (chr-ID Gm02; pos 45123567 to 45124516 reverse strand)
agttggaagagatatatcaacaggtatatagtgagaatcactttaacttacttggaaatcaaagtctaggatttattgatttgcactggatctccttttttatttgagtaagaaatgtagtctatatggtaaactataatgggtggatgtcttttgctatcacaaatactacataaacgtttttttagttctttaatgatgaaaggatttaaaaattatggtagagacctttctacaggtttatatagctattttgcttcatggtatggctggcagtggataaataattacaaactgattttatgcagatagctattttgaagtttttgatataatcatataattttttgctcaaatgtgtcaaactatcttggtggcatggaaggagaaacgaatttaccagaacagaggaagaaattacctgacttttcattaaactggaattattatatttgcataaggttgttcattatactttcaaataattttgtgaataatatcctatctagaaaacatgtgattgcgataaaagaccatgattctgaccctgtctcaccaaagtgagttagaaggaatattgggactgctagttataaaaaaaactgtaagattgtgaaattgtgatcctgcaaccttgtgtgagattatcctgctagttatgaatcacttctagtttgtatgcctacccattgtcttggctaaatagtacctgattttatagctgcatgtatataatttaatttttatccgttattctcaccctttttaatcttggctaaatctaatcttcaatccaagtgcccttttctagttagagtttaaagattcagtgtttgacatatttgagggtttcaaattttccttttggaccattcattttctacttgaagtttcatctccattttgatcttataggtgatatcatcaacattgttagcattggccacact

SEQ ID NO: 20786 - DNA, 696 bp, Glycine max
  Intron number 1 from transcript Glyma01g05340.1 (locus Gly ma01g05340) derived from phytozome v7.0 (chr-ID Gm01; pos 5038291 to 5038986)
cattttttggttggttttgcttcctatccaaccctgtaagtttctaagcattgtttgtttctctctgcttgctttttattattttatttgttctcttcttcaagttttattctttgtgaatgaggtcaacagtgcttttttttgccgggttttcttctgctgtgtggagatcttgattgaattttggtttttctacttgaatcatggggcgtaagaaatggttggttgtgttcaaaatttgaaatttttgttgcttgcattgggatgctggattcatttctgcattggcgtgttcaattgaatttcgtgttgtttctggcgttttgggtctttgggggggggggatctatttatgacacgggaggcatttttcgtttttccctataatcaaaggtttcgtctttgttataccatgagaaaaatgaaaataaaaaaagtgagtttggggatttatctgggtgattggtttgaatggattgcgatctgaagaaaaaaattgtgatgggtgttgattctatgggccttgcttgctgtgatgggtgtttaaatttgtgcaaagaagaaaaagggggcaaaaagtggggaacttgtgagttgaattgaattgaatttcatcaattctgtttgaacaggctcttgattttgctgtggtggattgaaggttgtggcgttcctggatcgttcttctctgtggcg

SEQ ID NO: 20787 - DNA, 665 bp, Glycine max
  Intron number 3 from transcript Glyma01g41390.1 (locus Gly ma01g41390) derived from phytozome v7.0 (chr-ID Gm01; pos 52901414 to 52902078 reverse strand)
cgttgtacagccctgggactcctgtatcatcagaggtgttgtgctgcttgttattatttatttatttatttctttataaggctacttctttcatttagatatgtattttcttcttttataagggattaagatcatagaaactattagtagtaaatcaaatgaagcttttcatatcttcaaaatctaaagagcatttaatactgtattctttaaataactaagatgaattaaagaagagtaataaatgttacttcttattcctttacgagttaacctctgctatttggagaaatttatccaatgggactatatgcatgtgaatggattactgaatgcacatctaatgaacataaatttagaattatgctgtttcatagtacaatacatgggtagaagaaaacggaaaaaaaaaaaaggtaaactggttgattaggtctatgaaaactgcaaatttcaattgatcaaaggtcacagaatggatgtttttcttccctgcgttactaagtactaggaaaaagtgattaagagcttatatttgagcatatgtatgttatttgcttttgagcccatagctcttcccagtctaaggtattagagtttgtcatattgaccaaattttatattgtacagtcaccctccaagcccaacgggaataccctccagac

SEQ ID NO: 20788 - DNA, 667 bp, Glycine max
  Intron number 1 from transcript Glyma03g36810.1 (locus Gly ma03g36810) derived from phytozome v7.0 (chr-ID Gm03; pos 43657011 to 43657677 reverse strand)
gaggttcctcctctgcccaaggtatatatatgaattatgaatgcagaatttgagtttgtgcctagtgaagtttctaggtcctatgacggaggactcgataggtccaacaaccgttatgatagactctaataccatcttggaatctgagtttgaaggactaaatatctgcagctaattcaataagggatgattcgataggcctaataataactagttgaatagactatgatatcatcttagaatttgggttagacttaactcaatcttaaaatatgtgatggagtgaaacttgtctcccatttacatactagtaaatgtgagatctctaagagcttttattttgttagcttgtttggatgctgagaatatagaaaatgcaatggaaatttagtatttgggtaaaacagtaatttttaaaggcggtaggatttcttttctttttcaggttttgttttttcaaccgggggggattggttggtgaacagtgaaaatgttaatttatgtttttatttatttatttaggtgtggttgttttatacgagagtgaattatttggatttgaaggaagacattgaaaatccgtgtctattgcctacaattttgacttgtttagggtattgttattgattcagaatcggaaggctgcttgtgggcaacacaaagaaga

SEQ ID NO: 20789 - DNA, 713 bp, Glycine max
  Intron number 3 from transcript Glyma04g12460.1 (locus Gly ma04g12460) derived from phytozome v7.0 (chr-ID Gm04; pos 11535490 to 11536202 reverse strand)
cactaggtgtttcgctgatcgtgctgatgaaatgcttacacaaaacagatcctccacacaaaatgtttcaaaacggacccttatttaaaattagtttctaaatgaaatccagtgtggtcaatttgccgaaaatagactactgtcacacacccagctggtgacttatcattccaatgtctgttaaaacattttcaaaatcctttacgcgtaacacaaaggttgggatttcttaaactttctgcactataaacttatctattttctttctgttctcaaaactgtctaaaacttgatagaacatctcgtccatgcataattacaccttctttacacttatttactatgaaagaaaacaaaagatgtaagaggaaaactatattatatatcatattattattattattattagatataaaacaaagtggactgtgtaccatccagattcgtcgtgtttctatgtatgctctaccaaaactccgtcgcctcatgcttccttgggtccaatctaggagtgaggttgcaataagtcttctctttgatggaaatatcttctgtggtgccaaggacttctgttgctaaacgtttagatgactcaacagaatagccttctttgctgcaagaataatccttgttaaaaaagttttcaaaaaactacagagctatgaactcaagttcaaccattgtacttgtgcacagaggtgataccacagacc

SEQ ID NO: 20790 - DNA, 797 bp, Glycine max
  Intron number 3 from transcript Glyma05g06220.1 (locus Gly ma05g06220) derived from phytozome v7.0 (chr-ID Gm05; pos 5958136 to 5958932)
cagtcagattcacctaaggttgcactagcttttcaaaaattaaaaaaggtcaattagaatttagaaatattaatgtttgattaacatgtataatataatatctttaaattcaacgcacatgcacacacacacacatataagttctatgaattgcttgagtgagtctccagaacccttgatagttgatacttctatacataaacaaataagtacattttactcttgaaaaaatactaataaagaattaaaatagttcatgactttataatagacaataaactttaaaaaaaggcttccaatgtggctccactcccttgagattccaaaaatcccaagaaaatagcaagtcacttaaatatcagcctagacctgtgagaaagatttctctaaacttctcagtgggagaagtgaatacatttcatgctgaaaacccctccttgatctctcaataatatacatgaggacttgaggaaactttcctgtcaccaagtagttatagtgtgctattataagcttatttccttcatgattgctgttgattcaaaaaagaagatgcatctcctaagtagcatggacatgatggtcttactaataatagaaaaatggaaaagtgtgtgtaccttgtatatttattaccttcattctctgcttgataggcaagtcatataaattggttctgagttggtaatatttacactgtattttcctttgttgcatgatataaattgaaccatactgcacttgttggaggtcagttttaattttcctttttgttttatctttaatgggtgtcgcag

SEQ ID NO: 20791 - DNA, 685 bp, Glycine max
  Intron number 2 from transcript Glyma01g27500.1 (locus Gly ma01g27500) derived from phytozome v7.0 (chr-ID Gm01; pos 36823062 to 36823746)
ttttgtaaaataattaggcgtaaactaggattctagtattaatttgttaggtagttttaatttgttgtaatcgtattttaatttgtatttttagaaattctgtttgacttgtctttttattttaaatttgtaactatattttaatttgttcaatgttttatatttgtgaaacttaaccgttataaaaactagtagatataaaactagcggttattaaactaaccattatgaaactagctgttatgaaattagccgttataaaactagccattgcaaaactagccattgcataatttgatatttaattattcaattttgattccttgttgtacacctcttcaaacaatattcttctttcacttgtttatgcaatcaatcattcatacactggattgaactaatgacttcaacagagtttggaaacaaattatttatgaaaaacttaacgatgatagtgatgaacaaatcatgagctaattatgtgcgatgcaacaacaaggaggcaacaacagtcaacatagaaggcctagaagattcattaattgcaatcgtgaagatggacatctatgattgatgaatgactacttctcagaaaattcagtatacacaaagacataatttcgacataggttccaaatgcagatacaattgtttattcgaattgtcaacactcttagtaatcacg

SEQ ID NO: 20792 - DNA, 652 bp, Glycine max
  Intron number 2 from transcript Glyma02g37590.1 (locus Gly ma02g37590) derived from phytozome v7.0 (chr-ID Gm02; pos 42953704 to 42954355)
cggaggcactggctccggataatcctccactcaaggtaatccaaaccgagcaagaggtctagacaaaattcagtagcaatagtttaggagtcttattcttttcttagaattggagttttaacatggtaatttgtttagtaaaggttgacatctaaaagtctactgattggaaactgcaattctgattgcataacagtatgtggcttggtttaagagaatgttttatgttttcgcttttaattacaaaaatacaccctattttcactctgttcctataagaatataagaaagagtaaaagaataaatagtgtatgcagttacagttacagtataaagggtttttataatgtcatctatcaccaattgtcatgtatgataagtttgttaacttttacaattacaataactacattaaaagtcatagcaatgatgattttcgattggttgacaatgcatataaattaaactcatgttttcgcttatcctgtacaaacttaaaatagaaaatatttcatcaaaccaaacaacccctttagttatgttctttgaggagatctaataaggcaatatcttacacattgttatggggtaaaacatatgtttttgacttttggcagataagatttattgacaacacggatcctgctggaat

SEQ ID NO: 20793 - DNA, 897 bp, Glycine max
  Intron number 1 from transcript Glyma01g00870.1 (locus Gly ma01g00870) derived from phytozome v7.0 (chr-ID Gm01; pos 527590 to 528486 reverse strand)
ttccgcatttcactgattacattcccaatctcccagtacgtcaaaacttttcatcaatctctctcttactctgctgcaaggttttaaatatcaatcccgattgtgttatgattttgtggcgtttgttgatatgacggtaaatcgcgcacaaatgggatcctaattactgtcacgatccaattaatggctgcggacgctttcttaaaaccttggtctgctgaaaagctgtttcttcgttatctgatcatcgatcatgtgttccttttgttctgccgtcccactttttcctcgaaccactcgaatcttttgtcgttttataaaaaaacaagccaccttttatcctttctttttttattttttatctgccgacaccgaaaaatgatgatacccaaactttctatttttatcacttcaactattttttttaaaaattttatcttcttcttagtgaaaaattgccatgcagctttgaagcgtgtatttggaagagccttcacacaaaattgattttcaataaaattgattttataatattgattttgaagtgatgtgatttatgattaaaattttatgattttgattagaattaattttaaaataaaatttagtataattttttttattcaagtaaaagttattaaagttgtttcagttcatatgctcagaattaattttgaattttttttagtgtgaaatcaaatatgtaaaaaattatttaaaattaattttgaagttgaaataaattctgtaacacgaaactaaacatgcagtaggaaaaacatagatggataatgtattgccattttcctttgagtgcaagattaattaatgtctgattttatgtattggtgtgttgctgcagacataccctaatcctttgcaagacaaccctgctta

SEQ ID NO: 20794 - DNA, 1062 bp, Glycine max
  Intron number 1 from transcript Glyma03g31170.1 (locus Gly ma03g31170) derived from phytozome v7.0 (chr-ID Gm03; pos 39086066 to 39087127)
catcaactttccatcaaagctgcttggatatacaagtacgtaaacttcttgcatgattatatatatatatatatatatacacacacacacacacatagcctatcattttatggaccctttaatttcatttcatatgatctactttaatagaaatttcttattttgtcaatataacttttatctaatacaaattaaactattaatataacttctgtgatcaagttttcacaggaagattagattttttttaatcagtttactatatatcttatagagtaaaaactttaatgaattactttggttaatggtaaaaaaaaattccttacataaaaaattataccaacagagataacccaatactaaaccattagcagtatgcattttttgtaatgattaaaaaattgtttttggttgatcactttgagaaagatccaatattatgtcctctcttaataataaggaattcatgttttgtaaaataatgaaagacatgctttctatcactaaaaaaaacatatataataggtaacacttgtaaactctattgttgataaattttcttctcttataaaatataccaatagatataattttgatagcatcttcaaagagagttatttatgagagattcttaaacttaagagtcaaattttataaaactttatcatagaaataattaacgtcataattttatataaagttgattgtataagtaattattcttaacaatttttgaaaattgtaagacaactatagaatccattttaaattctaaaggattccacatttccgcgctaatacatgacattttatcttagttatgcatgtatatggtgcatttcatgaaaagcaccaagaaaatcttatttttattcctatacacgaactatcatttcctggtgcatcattctaatgcaacttaatatttttattggtttatgtgtcctataatttgtatgaaaattttatgtaagatatgagtactttctagtcctatttaataaaaaaaatccttttttccttgcagacacttccatcaggtgactggaactgtatctattg

SEQ ID NO: 20795 - DNA, 527 bp, Glycine max
  Intron number 3 from transcript Glyma01g43990.1 (locus Gly ma01g43990) derived from phytozome v7.0 (chr-ID Gm01; pos 54825548 to 54826074 reverse strand)
acactgcgtttatccaaaatgtgagtttctttcttttaacattctgttttaaaattttgacgatacccagcatttgttttctatttttttggttataattgaattgtaatatgtttacttccgtagtgttcctcatacacgagtgctggtttagaatatcatgtcaaattttagggttgtttactttcagttactacgtactgaaagtaaagtagaatgtgattgctaattaacttgagtaactatgagacaatccttctagttcatccattaatgtgtaatttgattgattctcttaaccttattgataagtcagtttgcaagagagatggtttgttatcttatgcatccattattgcaatttttgtttctgttcaacttgattacatgttcacctatctcagttctttgtttccgaattccttctcttctattattcctcttggaacacttgaagagggacaccactcactggtattttatccttgttcttccagggtgccttgggatcacctgctgtggcgccc

SEQ ID NO: 20796 - DNA, 739 bp, Glycine max
  Intron number 2 from transcript Glyma01g43990.1 (locus Gly ma01g43990) derived from phytozome v7.0 (chr-ID Gm01; pos 54826603 to 54827341 reverse strand)
ctgaagatagaccttgacaagcaaatactatctcggtattatactcccctgtgtatttggaataatctagattcttctaactgttttgatttttgaaactatcttagactcttggtcatagtggcattggtgcatggtatctccttgaatgatgcaatgggcttgtatttagtagtatttctgaacctagttacacttgtgtgataaaaatttgaggcacatgcaattgatatatgcataaacaataagtataagtatataggacaatttcacagagggatatgtgctaaaatgtgcaatttcacataagtataagtatataaacaatatgaaaacagctatgaacatgcaagaagagtagttacggtccccatctttggttaattcatgtggtttggtaggccgaacttactcttggtagagatcttctggtgttgtagcgttcatttaaattcttctaacttctttagtaattggaagaaaaaaatccaattgttatcaaagtatggacaagaattcaccaaaaataatcaaataaatacatcattaaaaactgttatttctaggagaataatgtttatttgcttcttaattattgtaatttgatttaacttgttttagctttgaagagggacattgagctgtaaaaagtcatctggtgtgtatggtatttaaatataattcatatttaatatttttcaaagataagagctaaggtaaagtgatccccaaattacaa

SEQ ID NO: 20797 - DNA, 477 bp, Glycine max
  Intron number 3 from transcript Glyma04g04900.1 (locus Gly ma04g04900) derived from phytozome v7.0 (chr-ID Gm04; pos 3652868 to 3653344)
aaaggtgggagaataaaagaggagtaggtacttatgttaagagttttcttctaatgaaaagatctatttttctgaacttctaatgtcatttgtgtttacctgacaacaatattttgattctagttttccaaactggccaaaacgcaaatggtgtattttgcttgtggtgttattttctaatttcagttgaaatttcatcttagtaacttacattaaatgtcaacattaaataatagcatagattagtgagatgaaacttcaattttaattgcaaaacagcaccacaatcacttgagctacagcttgaacattttctcttgatatatgatgatggcatatatcacttacttttatgtctcttttataagaaacaacatcaaaggtgcgtagttaactagtctaaattacatttcattacttaacgtaaatgactttatttcaggcatttgattgggttcttcctttttctctttctca

SEQ ID NO: 20798 - DNA, 525 bp, Glycine max
  Intron number 1 from transcript Glyma02g47140.1 (locus Gly ma02g47140) derived from phytozome v7.0 (chr-ID Gm02; pos 50830543 to 50831067)
cacttgccgcttttctcttggcactttccacccaggtcaacattaattactattcattattcatcacactgcttcttcagtataaacatcttttgttggaaataagttaacggtatatatggtacatgggtggaaacagagagagtgtatatgagaaactcaaatgatgttatgagagatgaagaaaaatgagttgaaaataaaatatacaattataaaaacttttttttcttctgttttttttttttactttttgagtgacttttgatagggaagaaatttttaatttccttagaaatattaaattgagaaatttaatttctcatgtttgatacctaatttaaaaaacaatatttttgaaaaaggtttatgatatattctaagatttatgattttcaaaaattatgatttctaaacatgaaaaaacttctcccatcacagatgcctcctaatcctattaatcatcaaaagaacttgcattttcaaatatggttagtttactaaaccgtgtcgttgaatttttag

SEQ ID NO: 20799 - DNA, 868 bp, Glycine max
  Intron number 1 from transcript Glyma04g02250.1 (locus Gly ma04g02250) derived from phytozome v7.0 (chr-ID Gm04; pos 1560353 to 1561220 reverse strand)
ataagacttcgcacagcaagtttttcattaacacggtattttttcagtaatcgttttaaagtgaaaatgtaattcattggttgcatggttaggttcaatcgagtttctgtaggtttttttaagtattttacctagttgtgtggatataatgggagtaactccgttgagaaccctttctttctttaacgtgagaaatgataactataaacataaacgattagattgtctttgaatggtcaagattttaatagaaatgttctatgacttttttaagtggtcacatatccaccaactaataatgtaaaattattgtttttatttttcacaataaccatgtgtttctcacatacgcaaatacagttttttcttgtttttgagcttactaagtttaaggagtaacttgttaatgtgatttttgttccttcgttagaatgacttgtccatgaaacatacttgtgacttgttagtatgattgctaccttcaaggagtggcttgatgatgttccttccgctattaatatccggttttggtattcaaattggaccttattgtgttcctgctcttcaattttgattcaagtaaaccatgacagattccaatttaaaatcacatgttatataggcacatgattttgtgctcatatttctgagataaaagcttctattctaaggtttaactaatcagcattctgtttttgctgcctttattttacttttagtgagttttgtgcttacaagttgcttgaacatcgacactgacttgggcagatttactttgtttgccattctgcccagttgaatatggtgtttcttgagtttttctttttacatccttacaagttagcaattttaattgcagagtggagta

SEQ ID NO: 20800 - DNA, 783 bp, Glycine max
  Intron number 1 from transcript Glyma02g46450.2 (locus Gly ma02g46450) derived from phytozome v7.0 (chr-ID Gm02; pos 50399042 to 50399824)
atctgaagaagccacataaccctaagcttcaaacggtacgcatttttctccctcgcgatcttcttcttcttcgtttgatctccgcattcccccaagatctgcttctttctcatagctctgtgaatgcaagcgagctctgtctcaagttgttgtttcactctgcatttctttcaagtttcgttcttctctttagcctgaccgtgagcatttccttttttttttttttttgtggatcatctcattttcttgctacttgttcctgatcattgggttattttagcttccatttcgtagagtcatttcattctgctgtgatcgtttgcttaattagctttaccctgcattggattatgattgtatcatatcatcatatgtaatgaacataatctaacttgtttggagattttctttgcagatgcaattaaaaaacttcttactttttaacaataattattaataataataatataattattattattaattattaatattaagaagaaaaaaattggcttatcttttcaaagatccttatttgaattcgttagtttaacttattaggatgggtaattttgggttaccggaattcaacatttacccacaatggattgcaggtttgcatttattatgctttaattgcatttgcattgtcttataacagatgtcttctactttcttgatcttcatagaagagatgtttctctattcgtttggtggaaggagaaaaatttttcatgtcatttttgttttttggggtgcagggtaagtgtcgctgggacttca

SEQ ID NO: 20801 - DNA, 745 bp, Glycine max
  Intron number 5 from transcript Glyma02g11250.1 (locus Gly ma02g11250) derived from phytozome v7.0 (chr-ID Gm02; pos 9431346 to 9432090)
caggttttgacaaatcagagatcaagctttaccaagtatgtaacatccttctgtttttatgaatttcttttaaccatgatattgatgccactccttttgaaagaatttaagagaaaaaaattaggtgtccatttgttttagattttagcaaaattgattttgaattgttaaatgtgattgagatgtatgtccaaattaattttggctacagattttacattgtaatgtgtgtgacagtatgggaaattgattattgttgtaaaccaaataggctttaaatcgaataaagcaaagtcccaagtcatcattatgcacccagtttgtcttttaaaactttgaccttgtagatgagaagagtgtcttcactatcttgttattcataaaagtcttggtcaacttcctggtatataaattatgaaacttgcacaatagatgatggaattacttcttggactttgcacatttcattaaatatcatataacgtttttttttcttttcatgttttggttgaattcgatggtttgaatcctattggttgtatcagatatttatgtttgacacttgtcatacggtgttatattgtacttctctttctataacaaattctgcccttactacacagtgcaagtttctgcattttatatttgcataacttaatcgagcgctgattgctttttctgtctgtctgtcttcaaaaaaccaaatgcagtataggggaggatctgagctgttggtagaagcagg

SEQ ID NO: 20802 - DNA, 725 bp, Glycine max
  Intron number 2 from transcript Glyma01g44450.3 (locus Gly ma01g44450) derived from phytozome v7.0 (chr-ID Gm01; pos 55121425 to 55122149 reverse strand)
aggaaccacacttcttcaattagtgcagaataccggtatgccatttgcacctcactttattttttgcttgctttaaaataaattaataccaccctagccactataccagatttgtctttttatttgtacattaaaagattaaaattttaagacttcgtatttggctgttgtggtaacatggctgggagtattttgtgaatcattaaatatagaatttcaggaatctctattttatatgtggtatgtgcaattgtgcacaacttggtgtttctttttaatctcgtatagccttagcttatgctaaataaattatagaagaatcttccagaccagttggtatggtaaattttgtcaatgaaagatgaaaagtgaagaatggtgatgcttaatttttcttttgacttgtatgttctgatttcatagttttgcataaattttagaacaaatggtgaatgggcgtgtgtaactgctttctctgtaatgtaatgaataagaagcaaaaatggtggccaccgattcatttcatgatttttaggttattttggtgctaattgtctttcaaattctgtgtccttggagaaatggttggaaattgcacgtcactagatcttattggttgcttgttttagaatattatgcaaagatttatcattctttccatttactgtctccattgtatagtgataatagaggaggtggaggtggggattttgttgctggctttc

SEQ ID NO: 20803 - DNA, 882 bp, Glycine max
  Intron number 1 from transcript Glyma01g41100.1 (locus Gly ma01g41100) derived from phytozome v7.0 (chr-ID Gm01; pos 52636474 to 52637355 reverse strand)
ataaattcgataacacctatcaggtttgtccctaaccctaaccctcagatccaatccaaaactgcatcgaaaactataaagttagctcttaaaggctaaaatcacttcttaaaccttcactcttcgctgtttgacttgattaagtgatattggcttcgttggattcagatttatccctgcttttggaatttgatttgccgttccttgctgtatagtctatccactaaactgttatgctgagtgattattgcaataataatgattatgattattttattcaaaagaataaggttgaactcaactctatgatctggatttgattgtgaatcctaccgttgattcagcttatgcactttgacttttcgtattttcctctttgctttttagagtttagactactttttgatgaacacaagctaaaacttgtaccaaggaattattcaaccaaaattgactatacgcaacctatttactaactcactaccgagaactagggctgctatattattgtgtataacaatatgaattagcggtctatttctgctttatatctattattagtcatttaatttgatcaattatgactatgttactgacttgttgggctcaattttgtcttgagaattatgtttttgattttcatactctgtatgcatagttttgttttcatggtgtgcttaactgcttacaatccagtttagttcaggttgaggtttctttccaagcataataaatatgcatgcagcttctttgactgtggcctgtgtgtatttttatttccttagcttgttcttactaacatatatttgttgaattcaaatagattttgatttttttcctcatgcaggctacaattggtattgattttctatcaaaaactat

SEQ ID NO: 20804 - DNA, 1034 bp, Glycine max
  Intron number 1 from transcript Glyma03g05210.1 (locus Gly ma03g05210) derived from phytozome v7.0 (chr-ID Gm03; pos 5490618 to 5491651)
aggagctcacaacattggatctctcttatttgcctgtgagtttttttttctctctctttctttttctgttgttcattattcgttgattgaacctggttatggattattggtggatagttggtgatgttttctgtgtttggtttaattgattggattagcttatttttagtaagtaattataaggtttcattattacttttttttatctcaatatctgcattttttcgtcgtgagtcaaacatgccttctcgattattctcacccatgtgaaccctgcggggctttacatggctaaccctttgggtcatatcttcatgatgttagtccttgtaatgttttgatccctatacatacactctttacttcatttagtccctgccgtccgagtttagatacatatttagttatatttaatatttccaaattaagaaaggagattaattttcatattgtaaagatgggtctgattaggaatcttaaaaaataaatgactttttaagtaattattttaaaaaatcaatgtattgttgttatgaatgatgtcagtgtattctgattggattattaataaatgtgtttcattttattataattagttgattagttgatatttgagaatctgttttgctcttcatagtaatcttatttagctcgagtaggctggcttctcgttgaggatatctgtggtctcttatttcttttttttaaaaaggctttggttgttgctggggaggggaatcagatgttaggtttgttaatgctgaaagggccatgaagtgttgaattggctcagtgagtggaaattagaaaatataagtgcttgaaaggaaaatattagattggtggttcagtaattttttgtttctcgaacaagtggtattgatgtgtgaaattatttgagttttttattaaacagtactgtttagtggtctgcttgattgtgctatttcttgaatgatttgtgtatttgaaatgatctggtcgatataactagtgttgttgatgttttcttgtgttgtgcagatcacggagaa

SEQ ID NO: 20805 - DNA, 428 bp, Glycine max
  Intron number 3 from transcript Glyma02g12790.1 (locus Gly ma02g12790) derived from phytozome v7.0 (chr-ID Gm02; pos 11049318 to 11049745 reverse strand)
actgctgttaccagcttgttggatcttacacggctgtaagtgtgttttttcattaatttatgtttcattaaattttgatccttgtaacgggttgagaaatatgtttgttgcttaatgcatatggttttcttggagtttaatgtgtgaaagccgaatagggaggattgagatgcactttttttaattaattgattggcatttgttggcttgttacaaaactatgataatgaatggaagattgagatacacttgataagatgatgcattgtttgcctgcagttttatctgcatttggttttgttttaaattacaatatgtgtggcattgaagtgcttccatttcggttcttcctttgaagttcttatgaattgatttaccgtgtgcttatgacagtgatcttcacaataacaagttgacagggcctattc

SEQ ID NO: 20806 - DNA, 886 bp, Glycine max
  Intron number 1 from transcript Glyma04g12580.1 (locus Gly ma04g12580) derived from phytozome v7.0 (chr-ID Gm04; pos 11723471 to 11724356 reverse strand)
agagaagaaagtattgaaatttgaattaagagaaaaaataagtggaaagaaaaattttaatttttatgtttgcaaattcaactttctttcattttcttttctatttcttttcaatcaaacaataaaaaatatatatcattattcgtattttctttctttcttattttttttccctccatccaatcggaccataactgatccatgaccaaaagactatcgtaaatagactatcggtaaatattttatttctctcgtcatccatgtatggtgtatcttttgccttttataaaataatttttaatgatttaattaaaacgttttgattttatttactttcaatatctcaagcagcaaaatggaatagtaaacggctcgcacattcaaatcaacataatattaattttggattgattacaacatggtcagccttttttttttttattattattacaatagcgttagcatttatctagttcaatatttaaccttttcatataaacataaattgcatataggctaatggacaactttgcgtcatttttataaacaaaatatcaataagtctgttttaagacaattaaccaacatggatttgttttaactattgattgatcaaaattacatatttgaccaatatgttctccttaaatttgctagttaacataacaattttaatgggtcaatagttaaaacggacctacactggtaaattgttttaaaacataccgatattcatatgttatttataaaaatgagaatggtcactgagctatgatgtatataaatgtgtgaattatgaaacataatcaactaaagttacagaagtaattgtaaacatggagtttggttattgtgcagtgtttctgatactgcttcttccaatctc

SEQ ID NO: 20807 - DNA, 721 bp, Glycine max
  Intron number 2 from transcript Glyma03g35690.1 (locus Gly ma03g35690) derived from phytozome v7.0 (chr-ID Gm03; pos 42807160 to 42807880)
taaaggaaaagaatcctcaacactggaggaccttggtaccaacttgttctccactttaatattacctccggtcctaaacaaattgtagtgtatttttttttataagaaacaaattgtaaaatacactacaacttgtttcttataaataggaccaaaggtagtatcattatgttgttttggatttaatggttgttgttttgtcaaagttacgattgttacaatcgaagtacaatggtgcttctcgctgtgaatttatcgaagagtagttatgattatgatatatggatactctttggtgtgctcatgtagttgtgtgaattgcttaatcaaactattgtgaattaatgacttgcgccaagagaaagcaattaggatgttgctgaatattaagtcaaaagtgctttagataacaaacaacaacttatgattaacgtgaactattagtcaaagattttttttcactaactagagtaccgctgccgccgcttgcttattcagcattgagtagaattctctgttcctgctttatttgcaactccaaattcttagtgatttataatcttctgctttttttagtttccttaccattatttttctggttatgttttgctaacacttctttgaataatgagtttgtgaaggtgattttgacttttgaccaagcatatgatcatacgtattttttactggaaaatttacagctgtagctgcaagaggggga

SEQ ID NO: 20808 - DNA, 1000 bp, Glycine max
  Intron number 2 from transcript Glyma04g39440.1 (locus Gly ma04g39440) derived from phytozome v7.0 (chr-ID Gm04; pos 45640279 to 45641278)
ttcaaccggcattcaattcacccactttcctcgttcttttcttccctctctccttttttcaccgtcccatttaaagcttttgaccgttccgttattccaattgctagcttctcacacttttttttccttctactggctaactaagatttgttggagtcgaagcttagacaatggacggagtaaagtgtgatttattttcttctttttgaatgtgaaagatttttttttttatgtttttcaatgaataatcagagggagcatatcagtgaggtacttatgtgtgtttggtttctatttttaaaatctggtttaaatttttaaaatgtaactactcaaagttgttcagacagctggttgagggtggataaggcacataatagagtgtgcaattaaaagagaggttgaagaaaacaaaaaaagaagatgagaaaacatcttcccgttatttctctctcttttttttatagtatttgttttggaaacaattttcaaaacctgatagattttggatgaggaattgattgttgagtaaggtggaattgttttagaaaactgtttttaatacgaaaaaaaggcaagggaattatcaagcaggcccttatttttttgttttagggtttagttcccatcaaagattaaggataagttttgatttaaaaggtaatgaataagagtagttttctaaatgtgtttgggtaggagtaagaccaaatgtcttctgttgcgtatctgttacataagtgcagtgtctttgttttttgttgcatggcttgattcttattagtctagtaaaaattcattaatgcataatcttgaaatggatgtgcagccagctagtaaatcattgtaaatgtttgacagttccttgaacactatttatgctccatatagctttacgctttcttatggttcattcatctactttttagcttttcgaatcataatgttttaacaatttgctataggtgcaataaattgtttcaacattctggttgatatc

SEQ ID NO: 20809 - DNA, 923 bp, Glycine max
  Intron number 2 from transcript Glyma03g06510.1 (locus Gly ma03g06510) derived from phytozome v7.0 (chr-ID Gm03; pos 6770312 to 6771234)
tcaggtttaattttatatctatattatctttgctatataagctacaaggaattacattttgcaaagcattaagctattcagtaagtaacatggctgaattctatgtcagtagcaaaattgactttgatatcaattaatttggttgctttagagtggtgatagttatcagttatcacgggctcaagggtctcagaggaaactgatgaaaataaatttattttaattttgagttatacaacaacaacaacgcctttaattttgagttatgatgagaagaaaacatagtctaagagttatggttgtctttactatatttttgttgctttaatttaatttagtttttgtgatctgttcatttgttttatatgtgccttttgttaaacccatatgatgctttcacttagatcaaggtcagggaaaagggatttatctttaacattgtcttttagtttctgttcactaaattatgtactcaatgaactttattgttgcagtctggcaaaatatgcagcccatgcatgttcggtgactgttgagaatacttaacaaatcttacacaattttaaaaattctttttcttgatgctcttcatcaatttctcttcgatttttttttttataattttttatctgtttttgttgaagatcttacatcttccaatgataaaaccaaaatagtgggtaaaagtggcaagtctcacttcacaaattaccttttgagatgaagtccaaattggtattttaatcctcacctcatcaactagctcatgactatgtattaagcttaaatcctaagaattttttttataataattcccaatgtttcttctattactcacaattttctttgtattcgtataagaactgtaaaaagcttgatgatcatctttatatttgattcatacttatacacaaattggcaga

SEQ ID NO: 20810 - DNA, 651 bp, Glycine max
  Intron number 1 from transcript Glyma03g23880.1 (locus Gly ma03g23880) derived from phytozome v7.0 (chr-ID Gm03; pos 30536063 to 30536713 reverse strand)
cagaagttgtcttcgaccaagggtttgactatatattctgagcttcgttctcctatacaattgatttattttaaacattgatattgatttttttttttttcaataaaatcattgactattattattataatatttatttatttattaattgtaaatgaagatataaagttagtttggtggttaagagggggataaggggagaaaattcgcggagcaggttttgaagtttgatcagtgttaacaaaaactaacaaattaataattagtatttttcaatcaatttttttataaatttttaatttctgctacgataagctattattggttaatatgcacttctacttgcatattgatgccttagttatgacaaaataaaacggcaattgcacatatagactagcttgtattaactatgaacatagaacaactttggcatagtattaatgaacatacataactaaatacagccaaaggattgatgatatatgcaagatgaaagcatggaacagaatatatatatatatatatatatatatatatatatatatatatatatatatatatatataattaagtttctaaggaattctcaatatcttgtgactaaacttttaatatggataatgcaggtcattagttttgtatcttgca

SEQ ID NO: 20811 - DNA, 1033 bp, Glycine max
  Intron number 2 from transcript Glyma03g27410.1 (locus Gly ma03g27410) derived from phytozome v7.0 (chr-ID Gm03; pos 35114749 to 35115781 reverse strand)
ctgtattgattgtgggtttagttctcactgttttggtaaatacccttggcagtttattcttggagtgtttacattaactagtcttcaacttatgcattctttctatcattttcccttgtgtttcatcttttttcagttacaaagttgttggccaatttttcaatatgaatagttatatacacatgaagttatctaatgcatatgtaagatatgattaaagtaataggcggtaagaaattgtagtattgaatgttataaaaagaaaaatatttttcaaaatttacggattcagttattttctgaattgtaatgttatttaagtagtgtgtgtctgctttatataaagaaaaaatgaatgtatttcaaactgtttagttttgacaaaatacctagcttttcccccaaactgaaaatgctcttttcaatgacgaaagaccaactttcctaaaaatttaagccatttggtaaaagcccaagagtgtttcatatctaacgtgcctcctcatgcaagagccctttggaaatgcaacgtggattatatacatgctcacttgacgtgatactgaaattaaaatttgattatggagaataagggcaacaatgaacaatctcttgatcactcagtcataaaggctttaataccattttgagattataaggaaagaaggaaaaaaaagaaaacaaagaagagagaaaagaacactctgactaatattaatgtgtcagcaagttaagtagaaaacatttaaacaatatcccaatactcctatttattttttcaaggtcaagttttgatatagttccactagtacaagcccatagcaataatacccatatcatgataagtctctgtaaatatagtgacattatttcattttcatactcatgattggttgattgttaatcccttctcattttattctttcatcttagcatatgacgaattcttctttcttattttgaaaataaagttgatatgtttgacaactcatgtgcaggatttagtgttcctccttttgacttctgggagaga

SEQ ID NO: 20812 - DNA, 764 bp, Glycine max
  Intron number 1 from transcript Glyma03g27410.1 (locus Gly ma03g27410) derived from phytozome v7.0 (chr-ID Gm03; pos 35115901 to 35116664 reverse strand)
aaagaaggctctatcaagtttggaggggaggcaacgtgagattttgtctcaacttctattttgtattggttttcatttctcaatattggatttttgataatgatcatttgattgaatgtttggtcacaattcaatctttgtttgaattcgctgtatttttttttttatctgcaaatgttaatttgttagttttatttgaaatgtcagttggcggatttaaaccttcaaccttgcctcccctttccttcaatgtacttctttgtcttagtttcaattatgttttgttgaaaaaactgttttttattttgggaccgcccttttgttggcttgttaaggatgttttttcaacatgatgaatgttgctttatgattgaggacttcatgtgtactgattattgcttgctagaggggttaatggtaaattggcttttctggtaaattacgaacaaaaattaatgcttgcgaatgtgaatgtaaatccttgatattgtgaagctgttgtggtattagtgccacttcaattggaacacttttctgatggtcaattttttcatttcaatagataaattttcacatggcagtggattttctaagtctgtaaatggcaactgtctgaaagttgttaccttgttgtattgggttgtaaataaacattagaatttaggagtgattagatcttgaagcaataacaagcatgttgctaattcttctttgtttgacttctttcagaagtttttctgtggtgggaggctggtttttggtcc

SEQ ID NO: 20813 - DNA, 673 bp, Glycine max
  Intron number 3 from transcript Glyma04g42480.1 (locus Gly ma04g42480) derived from phytozome v7.0 (chr-ID Gm04; pos 48239647 to 48240319)
tcgttagctctctcctatttcttgtgctcctaactgtgagttctgaatccatctcttgacttctttctcagctttgaagttgtatatgccgataatagtcaatgatagaatagaaggaaggaaaaatatttgttatgtcatcagaaaatgaagaatgcctatcactttttctttttcattacagccgttttgatactagtgtttggttatttggacttatattacagtctataaacatatttttatagaaggcatgaaattgtgcaatgcatgattcttcgtgattctaatgacaagtgccatttctgtaaaatgaagccagaagatttttggaagactgagaaaaaccctattttttatcactttgtagtctgtagttattggttaatgttcatatatattgattccctggtcactcatttatatgatccttctaccttgagaaaaacaaagaatcttttgtttaaactagtgctagatggactgaggtgacttattttaacgagatatatgtgaattcttatacttaatctatgtagtcttcttttgattatcttttactcatataatacttccaagaattccatcaaagctaaatctttcaaggtaatttaaggtatttacatctgtgattgcagttcattggaaattttcaggaaacaattggtgcaag

SEQ ID NO: 20814 - DNA, 896 bp, Glycine max
  Intron number 1 from transcript Glyma02g38860.1 (locus Gly ma02g38860) derived from phytozome v7.0 (chr-ID Gm02; pos 44213927 to 44214822 reverse strand)
ccttcgttttcaggtttcttcttttggtcatctaggaattttgtgtttatgttcaaaattgctagatcgtgtgttggggttggggtggtgttctgtggacatgtaaagttctgaattttatttttcctcttccttttttttgttaaaaatattttttgattttgataaaaaaaaatatcatcttgaagatttggtatgtgctagatctcgttgatgatgatgaataaaccactcaaatgcttgttatttaattatgtttcctcaactttcaatcgagaaattttggcagcaaatcgcatgctaccttggattttaacttgtctgttcacatattgatttgatttttttttctaaatcatgattatggggttgatgaatctatcccaattttttctgagtagcttgtctttcccttgagaaaagagacaattatatgtgtgtgtgtgtgtgtgtgtttcacatggatttttttttggtatgaaaaacttgtgaaatcaaatattatattagctatatagtcaagatttaagcctagtatgtttgttctttcaatctactattattgattgttcaccatcttattcatcaatcattctctttaattctagttgagtttttgatgttctaatctttcctttaatttctttacaggtcagatattaaagaagaaaccaacagagtttccattctcggtatctcttctctgatcaggttgacaacttgacatagcaatcctgctttcttggttccccatttccatgtttgtggattcttcctgattcaaaggcaatccattgtgtcttcttagctcagttttgagcttcaaaagttacaacttgcaacacaaatttttatctgtaactttggtaatcctaaaggactcagcattgatcaaa

SEQ ID NO: 20815 - DNA, 492 bp, Glycine max
  Intron number 4 from transcript Glyma02g17100.1 (locus Gly ma02g17100) derived from phytozome v7.0 (chr-ID Gm02; pos 15424999 to 15425490 reverse strand)
acatctcttaaagaaggatttcctctacatctgatgtatggcactgctgccaattttatttcttttttacatcttttctgatgcaaactgattcaaagtaaatggaatatggttaaagccagaatattgaccaaatcatgggtgacaactttagaataatgaagactgaataaatttgaacaagaaatttaaattattaatctgaataaattaaataagaacttgatttaaaattgattttattgcgtattgaaactaaagtacatatcttcttatgaaagttgtctaacctgttttgttcatctggcaaactgaaacagtcttttttctagattggcacaccatacaactctggattaatttgaacttgtgccttcacattttatcattattctgaaatcatttttttaccattatcttacctagcttaagtaattgtggtttgttccttgtatagctcaagcactgttgctggcatactgagcacccttg

SEQ ID NO: 20816 - DNA, 720 bp, Glycine max
  Intron number 1 from transcript Glyma02g47000.1 (locus Gly ma02g47000) derived from phytozome v7.0 (chr-ID Gm02; pos 50762958 to 50763677 reverse strand)
gaagaaacaggtaacgatatatatatatatatatatatatatatatatatatatatatatatatatatatatatatatgtatatataattttaaattaaattaatgtattcgcacttcattaagattaaggttcacaaaataaaatattaattcacttggtgtaactacgtattcttctcttcttacagtatacaatttcacttactttgtttttataaatttttcttaagattcattgatcctttcttccaaccccttcccctttggataagtcatatcttcccgtgaaagccttagcctccagcaccgattacagaatcaccaccactctatcagcaaattttataattaaggagagataaagggggagaccagtgaaggagggaaccaccacgtgtgaaaccatgaactattattgtatcattttttagatgctccatatacttgcaatcagaacaagatgttttatataattatattcaatttcagcattttattttttctttgaatttgaaaaacagatcatgtaatatctgcgcactataatcagcttactaagaaagactggttcagccggaaaattgtgaaaaacttttatctagatagtatcaaaatttatgatgaatttgaataagtatattatccaaattatttgtaaagaaaccataacattaatcctaatctcctatatattaattataatatatgttgcaggagaa

SEQ ID NO: 20817 - DNA, 756 bp, Glycine max
  Intron number 1 from transcript Glyma04g33570.1 (locus Gly ma04g33570) derived from phytozome v7.0 (chr-ID Gm04; pos 39209812 to 39210567 reverse strand)
ttaacaaggtattcccaataagtcaataaccccttttcttttttcttcctttttatttttatttttttaatagtaactagcaaggtgttttttttttcgtttgagtgctaaacatgtaattaatcgattttctgatttccccctttcataaattatcttttttttaatagtttctagtagctcgtctggattgattgatatttaattttctatgattatgatttcataaaccccttatggccttatctcatatgggaactattgatatatgattttctatgattgtgattcctaaaccccctatctcttgtgggttgattatgatttcatataagtatataaatgtgccttcttgttgggagaagaacatttgttgaccatcttaggtgcaatttatctgcatgttatatcaaatatcaatttatgtagtttccttgcaaaggtgttcataactacattggaattagttgtttcaatttgcgggtttttgaaccacttttcagcgccaccaaagtgttttatgatataacacacgttcactgaatatttgcatgtcccagtttcaagtattgaaccgtatgaaaaaaaactcgttgctaaatgccaccaaatgtttaaattgggatttgatacattctattttagtatgctgttcttatatcttgataatctttgattctgtcttgatgttgcaatagctgcaactagaatttacttcttactgcgaatcaatattaacttgttttgtgtggcagt

SEQ ID NO: 20818 - DNA, 874 bp, Glycine max
  Intron number 3 from transcript Glyma01g36280.1 (locus Gly ma01g36280) derived from phytozome v7.0 (chr-ID Gm01; pos 48756195 to 48757068)
tcgagacgagctggagttggtgggagaaagatgtgtgttatttattgttgttgtttctttctttttctaccttgtgaacttgttactagttggtgcatttgttttgcctgcatgctccattttttgctggtcttttagtgtgaagctatgttcattaaaagaaacgaaagatatgtcatgattagagggcctaaaatatatattttttaattgttttaagattttcctaccttgtaacagtccttagttatgcgataaaattctctttatgtagtaagccagatgactgagtgaccatgcctgttgtgcgctcaaatttcttttatggaggtgattataggttgttaaatttcttagttacaatacctttagttcgtaaatgcagctgtccttggggtcagtgttaggaaaattgtattaaaaggagtttgtcattccttgcttctgaaaattagttaataaaggtaactaaagtgattagaccattgcagtctgttgcaatgtttcaaactcaacatccaagaagcgtaatgagtggctttttattagcctatattgcataaaatgtaagaaaagaagggatcctcttttcttttcttttttttaattcctggtgcagcggtaaagttgtgccttggtgacttgttggtcatgggttcgaatccggaaacagtctctttgcatatacaagggtaaggccgcgtacaacatccctcccccataccttcgcatagcgaagagcctccgggcaatggggtacgaaattttagttcttccatgaatttgagtttccttgctgcctttgataatgttattatgtatgtatattgaacaagcagcaacatcaaaatttcttaatttggttgacctgaat

SEQ ID NO: 20819 - DNA, 870 bp, Glycine max
  Intron number 1 from transcript Glyma02g01320.1 (locus Gly ma02g01320) derived from phytozome v7.0 (chr-ID Gm02; pos 954298 to 955167 reverse strand)
gtaggtgtagctagacactgacccgaaagaaggttttctctatactatcttgggtagattcacttcccaaattgcatatggttggtagacagtaattttttcatgcaattattgccatgatctttgaagtagtacaaaagaaatttataaaagaaaaatgtagcacgggtaacaactcagtggggatgatggcgataatcatttatgtttctttttgctaatgtccattttttcacgataacaaataattttcaaagttgttaaacttaaatttccggcaaatgctgtcgacgtgagaaaaagaaaatcttactctatgccattaatcacaagccaagtgtttgtgggaagttttttggtggtagttcagcaagatcatgcaagaagctcgcccatagtttataatatttttctatttaggccgttcaacgctctaagacatgcctgaaaaggcttagatggcaaactcaccaacaaaacttggatggaacagtttagtgttcaaagcatttcttaaggcattaactaacaatggataaactgctcttgaattttccatttttatacaccaaacacgaatcaactaacaattttatataaatatctggtttggacgacccaaatccattattacattttacttgtatcgtcataatttggcaagaaaatgaaaaaaccgtgttgaagacctgacttaaatgtgatatttaagattgtttaatttcataagcaatccagattttttatttctccaaaagaaagaaggtttcccttcaaattttgatattaaaaacatgtaagggtgaagggcagaactttatatatatatatgatatttctcatctattcctagcaaagccttccaatcaa

SEQ ID NO: 20820 - DNA, 660 bp, Glycine max
  Intron number 2 from transcript Glyma03g39420.2 (locus Gly ma03g39420) derived from phytozome v7.0 (chr-ID Gm03; pos 45504710 to 45505369 reverse strand)
acatctacctcaaattacttgtcaaggtccctttctttttgctattaccttcccttatttattgtaaatgtgaactttagatctgttgtgtgatttagtttttcacgacgatgatgataaatgtgatcccagctcattatgagacccttcgccatttgaaaggtctgggaatataattttttccacatttgtctgagcctcaacacacctttctctcgcacttcacatgctattgaaattttgtcatttggataaagaatgctttatagtttatagtttgtgctgctgccatagttctacttttactgtgttgttttgttagtgtctttcttatgccattgtaatggacttaaggttcccagtgatgtcgtctttttttaccatgctaatgctgataacttatgattattactttcattaaactgagggaacttgttcttctttttttgatgccgtgtgttgaattttaagcactttaagtttgctcaaggttttactaggttcagaaatgattgtttccttgctatgtataaatttgtttttgtattcaggtcacatgaatgttttcttattaattattatgaagcatgtattgtatgattctgattaaatgttacatgttcagctttatcggttccttgttcgaaggactggcagcaa

SEQ ID NO: 20821 - DNA, 406 bp, Glycine max
  Intron number 1 from transcript Glyma04g07460.1 (locus Gly ma04g07460) derived from phytozome v7.0 (chr-ID Gm04; pos 5812629 to 5813034)
tctcagaccaactgggaagctgacaagatgtaaccttcgttttttgcttctcttcttgcatcatttttgcgacatgggctttgtgcttcatgctcaattctttgattttggcttgtgggtttttttcttcttcttatgaaccgagtttttgtattgtatttaatgtcttttaaagttccaattttaatttctgggtatttagggtttgcggttttccgctacttttctggggttattggaagttgctgtttttggctgctgaacttggatttttgtgtggtgggtcacaggattttgttgggtgttttgtgactggtgaatgtgaagttgatatagggaaatctttccctctcactgttcacttggctgatgtaacgagtttttgcactttgaggtttcaggttag

SEQ ID NO: 20822 - DNA, 663 bp, Glycine max
  Intron number 2 from transcript Glyma03g37020.1 (locus Gly ma03g37020) derived from phytozome v7.0 (chr-ID Gm03; pos 43816488 to 43817150 reverse strand)
acctcggaagagtttgaagcagggggttataagtatatgcatgctcttttgccttcaatgatcccaatacttttgctcatttattgaacattcaaagtcaaataaaaatatattacttatattaattttattaaaaaaataatattttcctctaaatttcttctctttctattctttaaaaaaaaaatactttttgagaaaaagaaagttaatatttacaaggttcaaagatttttttgttgcacaggatcgaaatcaatggattatcatatattgggagagaaacataatcaaattcttttatcaatgcataagtgtaaaagtgttaaaataagaataatgtttgcatgcttcaactcaaattatttaaaattttttctttaaaattatttttctttgtactaatgtatgttatattacattgttaattcatgttttgtcatattctgaagttgtattgttattgttattcttttatttagtctgaggcttttgattttcttctcatttatttattttattttattttctaacaattattgatcttggctttgggacttcgtttatgcttttccatgttctgaatatattatgaatctgatgctcaatggatgacatgttcctgcaggagtctgtctatttacccaactgggaacacaaaag

SEQ ID NO: 20823 - DNA, 790 bp, Glycine max
  Intron number 2 from transcript Glyma02g35450.2 (locus Gly ma02g35450) derived from phytozome v7.0 (chr-ID Gm02; pos 40332869 to 40333658 reverse strand)
aggtaatctttttaatttgttctgtatttgatttgattaataagtgcataaataaatgaaaaaatagattttttggtactgtttttttttttattattagagtcagaatttcgtctcaataatttgtgcaataaagatttctattaaatgtcaatacaaattttcgaagtgaaactttaattaatcaattctgattatacaatagtgccaaaaacacttataaaattgcatataatttttttcctgagcaaatctattctatttttaagtaataagtgcaaaattttctgaaaaaaataaataataagtgcatgaataaatattaagtgtatttgcttactcgttgcatccattagaaattatatgtagatttttcttatccatgatattatggtggaatattcaattggattcaaaattttacttaagagcatcgaacccaacaccaattaaacgatggacttgttggtaaactacatgtagtttatgtatttaaattattgggtataatcttggtagttgatttatatcacacactaatattgatatgagtgcaaaagattcatctgattattgaggctttagtagtattaaatccataaacaaatccaatgatgatcaagagtttaataatgggataataattattgaaggaaaggtcatgtattatataattttataatatagtcctactttgtagtagcattattttgtttcttgatttctaatttacatgattttgtttgggattgaaggtggagcaaaggtacaggcagtaccacagccagat

SEQ ID NO: 20824 - DNA, 1031 bp, Glycine max
  Intron number 1 from transcript Glyma03g26940.1 (locus Gly ma03g26940) derived from phytozome v7.0 (chr-ID Gm03; pos 34450943 to 34451973)
atacaaagagctgcaagaaccaatcaagatcccaggtacgagcaaatttttagagtactcttttgaaacttctgacagttttttttttttttttttttttataaaaaaaaattacatttgagtcataactactattcattaggaataagatttttttggaatgaagacatatctattgaggattgaaaatattttcctaagttttgggacaatgatgcaatacaggtctgaaaaaatgatcgggtcgatgacattatttgcttcaaattttaatttctttattacttagatattataaatcatgtatataaataagactaaacctacctacttttcaaaaagattgaaataataattttcttaaagaaaaaacattatgtgagttaaattttctctaattctttaatatataaccatgaacttatcaagattagtccaacttgtggggttcaatccttttataacttaggttccttgttgcaagacgtttacgtttatggatctaagattttctttactctgaatattatatcaaagttggcggttaccaaacattattattattattattattagtattattattattattattattattattattattatacactccttatttttactcacgttcttatgctttgataaatatcaagttgcaattgatttatatcaattaagattctttcttggttagaacaaaaatcttaatccattgctcatcaaagaagaaccttggcttagatcaattgcaacttactcatataatcggtccaataatttctctacatcacattagacaaattcataggtaagcctgccttgacccgctaaatttttaagataaattatttataaactttaactttcattataaaaatatacagtcgcataaataatattttattaatgtaaccatttatgttaatattttttaataagtttgtaatttttattctcttgtatctttttttctggatcttttccggctaggttgtataccaattcacggtagggatctaccaacc

SEQ ID NO: 20825 - DNA, 237 bp, Glycine max
  Intron number 3 from transcript Glyma04g22180.1 (locus Gly ma04g22180) derived from phytozome v7.0 (chr-ID Gm04; pos 25465061 to 25465297 reverse strand)
ttgttcattttgctcttcggtgttcctcccttctggtcaagtaaacctcctcttcttgtaaccaatttcatattccatgtttagtttattactatttttactgttttatttaggattttgattttgtaattgagattattatcatacatcacaatcttagcttatcataacacattaacacccaatgaaaaacaaacctcctttttgttttgctgtatagcttcattggtcaaactg

SEQ ID NO: 20826 - DNA, 546 bp, Glycine max
  Intron number 1 from transcript Glyma04g09570.1 (locus Gly ma04g09570) derived from phytozome v7.0 (chr-ID Gm04; pos 7837711 to 7838256 reverse strand)
ctccccctcttcacaaacctggctttcctgtcttggtaacttgctcacacagtcacaccaaaaacaccatttgcttctaattctaatttatcatcgtattgttgttattgcttaggaaaaatatgttcttcacttatcaaaatattaattctagtctttataaaagttctatacgttattaggttctatatatgtgtactaaaaattaaggaattttagtctcttattagaaacaaaaaacacttgtttttattaaactatgaaaattaaaaatctatataaaaaatttagagtttaatccttatatattgttttacattgttatttaattaaatttttttattaatatgaattttaagataatttaattaactataggtgttaaactgttttatatcatgaatacatgtcctttttattccaaatttttatagtaattaaaattaacatttcaaaatattttagaagagtaaaacatgtttgactcatgttattattattattctgcaaggaaacaattaatgagttttgttttgtggtgttcag

SEQ ID NO: 20827 - DNA, 611 bp, Glycine max
  Intron number 1 from transcript Glyma02g12470.1 (locus Gly ma02g12470) derived from phytozome v7.0 (chr-ID Gm02; pos 10753821 to 10754431)
caccacctctttcttcataccataccccccctcaggtgaattcggctctttcatttcttcttcttttgttatcaattatcatcattgatccttttgccaatgacccttttctcaaatatacatgtttttaattttttttcaagccttttttatcctgcgtgcatgcatgttctctctctctctctctctctctctatatatatatatatatatatatatatatatatatattatgttccttcttcttccctatttatcaacgtgttctttctctatttcatatatgtatgcttttgttttcacgtgactcgctcatgctgcctgtgatgtgctattttatgtgtgttagttaccccttcaacattattcagcacgtacgtgtttctaggattgtgtaattcatgtgaacatgtacgatgaatccaggccaatgttgttacatcttgttttgttttgttttatttttgtcaactcttgcaagccaaattaatcattgtacttttttttacgattaatattatccttatatgaaaggatattatatatacttttttttacaaattaatcattattcaggtgcttttcttcaaattgaggtggtgcgtggcaga

SEQ ID NO: 20828 - DNA, 559 bp, Glycine max
  Intron number 3 from transcript Glyma02g12470.1 (locus Gly ma02g12470) derived from phytozome v7.0 (chr-ID Gm02; pos 10755093 to 10755651)
caagtatgcatttgttttctcttctcccctctctctcttccttccttgctgcaaaatacaaaactattgggagatttttgttaattaatgattgtcttaaagtgagagttaaatactttttttgtcctttacaatttaatgtgtaatttttttttgttttagtcatttgaaaaatatgtttgttttgtttttcttctttaagcgctttagatagagctttgaacactgaaaaaaaaaaacgttatttaaggcattacaaatgaaaaaaaggcgctacatcaaaatcatgactagaaacacttaaagtttcaaaccatgtttggccaacgcatcagtaacttgatttccctcatgcaagatatgaatccatttaaccgtgattcatgcagctgattgcacttagtgggataaggctttgttgttgttgtcatggttgtcttctttgatgatgtttcttattgcatttagcttgatggatttcatggagttgacattgctacctttggtaaaacatgctgaacacttgtatatattatgcaggaaaataccaagaagaagc

SEQ ID NO: 20829 - DNA, 916 bp, Glycine max
  Intron number 3 from transcript Glyma04g39350.2 (locus Gly ma04g39350) derived from phytozome v7.0 (chr-ID Gm04; pos 45566830 to 45567745 reverse strand)
acattattcacagagacttgaaaccagaggtaggaatattatatatgttttccggacatagaattgagttcagtaaacttttgaaaatggaaagcttcactagtttatgtcaccgctttaatgcaaattgcctcatacagtggcatttattgaagactgaagagcattgtttcaaagtaattaatttcatctctgggtaaatactaaatactgagtcctattagttcctgtctagtctctcactagaataaaagaagacaaggaaactcaagttaagttaaaaatttagctcgtgtgcttttgcttagagttttgaatttgtaagttaaggtaactttagatttaaattttgtatttttctgttgagcaggccctttatttttgttattctgcaagtagcagcaatgcaaacttaggagtagttcagaactaaagactaccttgcctcttaaatctttgaaaaatgctaattgctaggaatgcgtttctatgaaacaacttacagatagttagaagtaaaataagttgttgtgtttgttagttacccatttactttttagattctactatttttcctatacgaccatggttggttgtgaggcatttgtaacaaatttcatacaagagattttgctaaaaagcactgttgtaaatattctactttaaactggcgtcaaaactcaaaatgatttcaggtaagtccattaagggcaaacaagaaaaagggaaaattgcagcccatttcccataacggcttgcccaagttgcatgagaaacctttctcttctcttattgaaaatctattagtagtaactatcattttgagaattgagacaagtagcaaaatcttgtttgctttggtgctattgttgttgaatcagaacattttgctatcaagccacggggttgaagcagt

SEQ ID NO: 20830 - DNA, 606 bp, Glycine max
  Intron number 4 from transcript Glyma02g09040.1 (locus Gly ma02g09040) derived from phytozome v7.0 (chr-ID Gm02; pos 7000216 to 7000821 reverse strand)
gtccttgtggcttatcttgcaggtaaggtaccttattgccctttccctcattatattagtatccagtaaattacagtaattactcttaagattttgtgaaattagacaattttttcctgcttttatctactttgactttaattttctttaattttttaaaaatatacactgacattttcttatacattacactacttttcctgatcgttaaataaacattatacgaaactcctctataagagaggttaccataaatgtttaaaaaattgtgaaagtttaagtgattttatgaaacttcaagggtaactaattaatgtaatttacttattacaataaaatagtagatttatgatatgatttattttcaagttactatattattcttacatgtactctttaaaacatttattttccttttttgatcacatctctcttctcttgttatgtctcttactaattataaaaatagttgcacaataaaagatgtagaaatataatttctcttcttttttaatacgataagcattttgcttcatctaaattttttcactaatatatatacttttttcagggatttgttgtgaagcagtacccagcaaaatttcg

SEQ ID NO: 20831 - DNA, 483 bp, Glycine max
  Intron number 1 from transcript Glyma04g36430.1 (locus Gly ma04g36430) derived from phytozome v7.0 (chr-ID Gm04; pos 42944022 to 42944504 reverse strand)
caggtaataatttaatggataaatgttcattttggttgttgaaagttttacgcggtgacaaattagctcctgaattcgaggactaaatttgaacttttcatattttaagaatcaatttgtcgtcaccccgcactttgagcaatcaaaatggatatttaccctaatttaattcaatcatgcaacctagttcttgttgcaattattaagtttctgtcttttttaatcgaagccaaaccgaacattcattcaattaagcaaaaatcacttaatattgcatcaatttgttattaatttagcctttatcttctcttagtgcactcttaccaagaggagaaagaaaagagaaatggaagaaggaaaaaacttattagtttagcctttatcttctccttaatcatgtcctctgtattttttttatgtttaaaaattattgaacacaaaatttcagagattttgctcagtaagtggcttaagtaagaacaa

SEQ ID NO: 20832 - DNA, 878 bp, Glycine max
  Intron number 2 from transcript Glyma01g43390.1 (locus Gly ma01g43390) derived from phytozome v7.0 (chr-ID Gm01; pos 54418223 to 54419100)
catccgctttcgtgaactcgccgctcacgtcttcggtacgtacgtacgcacctcatttctttgcaaataattttagctagcaataaaaattcacattaattgtatacaagttttctacttttttcttttcttttctttttagaacaattaaatcccgactttttcctgcagatatgtgtgtcactttaaatttgtatgttttgttatcaacatcatcatatttccctttcaatacgtacgcatggccatggtgttataactatatacaaccctcaaccaatgtttccacagaaaattttacacaaccaccaccctattttggggtggatttatgatgtagtaaagaaagagaaaataaaaggatgatatatattataaatttataggtgatgtgatgagaaaataaaaaaatttaaaaaaattgaaggtgaatgaaaagaaaaataggtatgaaacataagattaatgatatactgtgataaaaaaaaataagtattgatgaaatacttctatataatagatattcaaatatcaccttcaatagatatatgtatataattattatagttttgccgccttttagccaaacatggtattggtgtcggtgcgtcaatgtgtatgactttatacactgaatatatgtacgttttgagccaaatttcgcttttcccagctacttattgaagacattgatagttatccaaaatattattttgccacctatatccaactctgcataatatatttggggagaacaattaagatcatttgattttgcattcgctgctactggttaaaaggtttagaaatggtaaacttatgtgtgcttaaattaatttaaatttgtattttgcgattttgtttgtggcagggtcggg

SEQ ID NO: 20833 - DNA, 699 bp, Glycine max
  Intron number 1 from transcript Glyma04g39670.1 (locus Gly ma04g39670) derived from phytozome v7.0 (chr-ID Gm04; pos 45863387 to 45864085 reverse strand)
tgtctcggcaagattctacttcaggtgtgttaatgcttcatgttggattgtcctgaatcatcttgaaatatcagctaatgttatttcaagtaaatgttcacatgtttgttttcatgttgaggaattacttcaattgattttgagttgagctaacttttagcttttacgttggattaaatgttttatatcgaattctactagtaacttacttttagaatagaaacatctaaatataaatcacattacttgaaaattaaatttaaccaaaatcaattctacaagcatttatccaaacacatacttagttgtagtgcatgtttggttcaatgtctcaacattggactcatgtcaagctgaaagttactattagtagcttttgcatttttctttggtttgtcctgaaaagttgggaatacgtacgatgaaatgccaatccaaatacattgatacttcacaatatggtgctatttgtataggatactgcgtgttcagccatcacgtgggtgtcatttgcactttgacatacactttattgctttgctttgtttagaaaggaataattcaatttcctgggtgataaaatgtctcactgagtacactgttttgtggtgtagatgatgcgtgtttgagtgttgcaagtgttgatgataagaatgggaacttatgtttgtttgcaggagcctgatttgttgctgttag

SEQ ID NO: 20834 - DNA, 938 bp, Glycine max
  Intron number 1 from transcript Glyma04g43610.1 (locus Gly ma04g43610) derived from phytozome v7.0 (chr-ID Gm04; pos 49162317 to 49163254)
acgctgtctctgaatctttttcagccaacaagcaggtctctctgtgtgtgtctgtgcctcttttgtttattatattataatatatttgccatgatttgtgggtttggattgaaaaaagtttttattttttgaatcatttcatctgtgccaaaaagtgggctatcatgattaagatctttatctatatgggtagggccgtagggtggaagtgaaaagtagtgtttttgaattgagtcagtcaacataacaagccatggctgaaaagtgcacatacaaaaggaaatcaaggactgcttttttatttttatttttgtggggaaaaaaagggggttgttcttttttatgcctcaaaaggtgcatctagaaaagtacagggggccaattcactgtgctttgaaaagcagatgtgatttgtttgtgattagtcgcatgtatcttgtactagttataacataccccacttccttgagtccactatatgcttattatgcattttgacctcagttattcttaagcgtcatgggaagattcttttcttccaccttgttaggagagtctacaacatttgtctaaagggaaaatttggcctgcttcatgtttggagccagattgttttgagacttttgttgaaatcacgatctgagctgctgctgctgctggtcttaattatgttagtacttatacatttgaattttgctagtgatttattgtaaatgaactcctcattttaagggatctttggaatgttgtttgaatttatgcatataattaaaattaatatatacttgttgtatgcaaatgttagctaggacataaaatggaaaggaaatgtgttatcagttcttatgccccctgtgtttttgtttgaaatgttttcctgacttgccagtatgtcctgtgcaggttccagtaaatctggagaacattaaaataaagaa

SEQ ID NO: 20835 - DNA, 441 bp, Glycine max
  Intron number 2 from transcript Glyma02g10540.2 (locus Gly ma02g10540) derived from phytozome v7.0 (chr-ID Gm02; pos 8427366 to 8427806)
agtccaagaaccctctgcttctttaacttctcaaggcttgttcttctttcattttcaacttgtacctgtcattatcttataacaagttacatgtgatgttggggtgtcatgtggggcacagaaaatcctaatacgaatttcatgttattcgaggtgaaatcttaatagtttttcaattttgattagcaatccctatacctttgtaaacaaatttattagagaagtatctgacaaacaattttaaattctcctacaacatcctcttattggtcctcctatttgctttgtatggtagtaagtaagtattgaatttattttttttttgtttcctagacattaatgttgaattgctatcatgaactgggactatcaattttgtttttaatcctttgtcataccttggcagatagacaaagaaggcgccaagtgattgccgttgga

SEQ ID NO: 20836 - DNA, 827 bp, Glycine max
  Intron number 1 from transcript Glyma01g06560.1 (locus Gly ma01g06560) derived from phytozome v7.0 (chr-ID Gm01; pos 6821188 to 6822014 reverse strand)
gggttgttggcaagtttgtagacttttatggtaaatatattccagaaaataaattgttattttgttgagtgggacaaaaaaataaagttttaaacaagcccaggtttttttcctactctctcttagtttgtgtttttttttgttttctttaattattattattattgttgttgttgttgttgttgttgttgttgttgttgttgttgttgttgttatgtatgctttagctgaaggccattttttatgttgtgatgccaggagtaaaacattttccttttaggaagcattaactgtcatgcggttacatttttggtgaaatgggttgtaagttatgtgtttggtgagatgcctaaatgaagttttggtttttaatcttgaaagtccacgtgtgtcttgattttgggatacctccctatttatgatttctgaattatctattgtaggaacgagtttatttgattctagagtatgcacccaaaggtgatctttactaggaattgcaaaaatgcaaatatttcatctaaaggcgtgtaagtgtgtaactattgtaagtatatatcataaaacaactttccttcttttcctctctccatatgttgttgtttgtggcttacaaaattccatagtgattgacaaattaatgtttcttttgtgattgaggcagtatgttgcatcattggcccgagcctttatatattgccatggaaagcatgtaatacatagggatttcttattaacaaaaaaagtttatactgagatctacttattaccaaaaaagaagtttatgatttcttatttttgaattaatttcttcatgaagggtccca

SEQ ID NO: 20837 - DNA, 756 bp, Glycine max
  Intron number 4 from transcript Glyma01g43110.1 (locus Gly ma01g43110) derived from phytozome v7.0 (chr-ID Gm01; pos 54194031 to 54194786 reverse strand)
gtggagctcctgctgactacaggccttcttttggggtaagttttttgcaatatatcaatcaacattattattgtctttctatttgtttgttttattgtttgcttttattttgtatgttaactatcttttcttgtatgcttatgtgcgtcgttactttgtggtctagttttgattacaaagctgactttgaccgtgttgttcgtgtttctaataacattggtatatccccttctaaaaaattacgataatttctatatatcttgtgtgggagatcaaatgtgcttgttctagcattcgaacgatggtgtatggctttttatttgtgttaataaaatcaagcttggtgctgcaccatttgttttcaatttaccaactgtagttttgtaattttctgtatctgttatgtttcgttgttagttacgtttttatatgtccctctttatattattaggagaagggggtgggggggggggggaggggtgggggaggggtgttgtcactgtcttttttgtccaaatcatggtgactgtggttgcaagtttatttggatgagttaaacccaaattcttcttgtttacataatgctattactcttttctcttatttctgtggagcagcattgtcctgattttgataatgaattttttgaagttagttcttgtgatggcctactttgacatgtcaagttttcctgaaatgtatgtgttaactctgtttgcagggtggtcctggcggaaggcctggcttcggtcgtgg

SEQ ID NO: 20838 - DNA, 641 bp, Glycine max
  Intron number 3 from transcript Glyma03g34330.1 (locus Gly ma03g34330) derived from phytozome v7.0 (chr-ID Gm03; pos 41805174 to 41805814 reverse strand)
ttcctactatagaaaagcacaaggaatcattctcggtatgctgactttatttgtgtacacaagaatgtaggattatttgattcatccacaacagaaactttctctagaatttctttagggagaaatttgtgtttgcaactagttttgaactctgttttaacattatactcccatcgatgctcttcatatttgttattcaagtgtgatgcctgataaagctggattaaaattaagcaattgcaaggaattataacatttattacgaaccttggttttcaaggtatgcctttgatgttttaggttaaatatttgtagtaaaataaattctgcaatttttatcaattattagataggttttacattagcaactagggaaacaaggcctttctcaaggacatcccctgttgctttatctttttggtagtaacacagttcttgccattgtctttcatgtcccttttatggtgtgaagaatttcgtaaacttattttcttggggcttaaggtggggccttctgaaagcataattttgtaatatagctaacttggttaaagcgtgtattttaattattgctagttaacatattttaaattttaatgatttctacttatagagtgcttcattttcttcacttctagttt

SEQ ID NO: 20839 - DNA, 542 bp, Glycine max
  Intron number 1 from transcript Glyma03g34330.1 (locus Gly ma03g34330) derived from phytozome v7.0 (chr-ID Gm03; pos 41806060 to 41806601 reverse strand)
ttcaagttctgttgaagatctttcccccaccattggtaattgtaatccattcattaaattcaactcttccccccctttatttatttatcttagttttgttatttctatgttgaacctttgcatgcttggaatttaggtgtcacacttgtttcttatacattgtttgcaaccaaaaggtgtctctttctcaagcttgtcgatctattgtttaaagtgacactgatgaagttttgagtgttaaatttgtgatttttcaaatgatttttagtttaaaagttgctttgcatttcaggttcatccaagttcttctatgttttactttgctttcatgattgaatctcttggtcttcgttcattgactctgccttgtacttgtgtaggatttaactggtctattgttatggttcttttatgccactggaattaactagcaattcaatttatgttcttcatgtattggccgactttagttttgatatgatctaatggtttttctatgttatgtaggtgttgattttaagatcaaaactctcacagtaggt

SEQ ID NO: 20840 - DNA, 87 bp, Glycine max
  Intron number 1 from transcript Glyma03g31970.1 (locus Gly ma03g31970) derived from phytozome v7.0 (chr-ID Gm03; pos 39800375 to 39800461)
gatgtgctctcttctgtacccattatctctcttttcctttttggtttattaatgtgccttggatttgatttttgataagtacaggag

SEQ ID NO: 20841 - DNA, 452 bp, Glycine max
  Intron number 1 from transcript Glyma01g09220.1 (locus Gly ma01g09220) derived from phytozome v7.0 (chr-ID Gm01; pos 10988210 to 10988661 reverse strand)
gtgtttcaggtaaatccaatcttcaacatttgcttaaaaattcttgctttgatgctaaatccttttctaatttcccattttgaccgtgtttgaatcttgaaacgaggtttgatatctgggtttttatcgcattattatctggtgaattgtgtgttaaggatggggggtttgggtttttaaagacagtacttatcttggtcagaggagatataaggtgtgttgaatggctaagggaaaaaggaagaggaaaaaggttgtcagttcgatttcttttgctaacaaactaacatttgcagataaaaataaaaacttagtttgatgttatttgtaattaacttttgtttctgttttaatcttgaaatgaatatagccgatgcatattttctgattgatgaaatttccgaatgtgggattttttttgttgtgttaatttcataggtggagtgacctcc

SEQ ID NO: 20842 - DNA, 590 bp, Glycine max
  Intron number 2 from transcript Glyma03g28740.1 (locus Gly ma03g28740) derived from phytozome v7.0 (chr-ID Gm03; pos 36686399 to 36686988 reverse strand)
ttcccaatgtgagtttatatatatatatatatatatatatatatatatatatatatatatattggtacaatgtgagaatttctagcatacattacaatttcatttcttcttagatgcaaactttgtcagttttgttagaaattgggagatatcaaacatgataaacattatcaaataaagtatttttttatgtcaaattatcaaaagtatgtagattttctttttaaaatggaagtacattacgaattaattactgtatcatataattaaaaagtttgtcttccaaattgtcgatgtctgaagtttattgaatgttctaggggagaacaaacttctttatgacatccaatctcggaccatggtctcttatttataaatccaatttttgataattgtaatttagtctctcatcaaattaaaaacaccaatttgtcttctacacattaatttgatttccatcacaattatacccttaaactttaaaacaccaattacatgtgctgctgttgccccacatgttgaattctgttccaacgagtttgtcaattccttgttttgttaacttcatgtttgttttcctcagttgcagc

SEQ ID NO: 20843 - DNA, 635 bp, Glycine max
  Intron number 2 from transcript Glyma01g01770.1 (locus Gly ma01g01770) derived from phytozome v7.0 (chr-ID Gm01; pos 1333606 to 1334240)
cgaattatactgctggtatttgcgtggccttttatgtaagtaaacaaattatcttttcttcaagcaaattgagaagaaaattttgtttcacatcaaattttttttaattctttctgtaattgatgattttctggaaaacaaagatggttaaatttaaaaaacaacaggaattctggacttccaatgctgctgcttcttcttcttcttcgtcatggaattctttccttcctagtatctttattttttttattatataattttgtatatatgatcagtaaaacacgctaaatattagtcaaacttccctttaattttgctgaaaaaacttccggacttgtagcgaagtcaaattgcagattcaaggtcagtgaacttcatttaatttacgttagaattttcaaagaataaaaattaaagaactgttcaaacggttaactacaagtgattattggctgatattagtagcattcttcattaacaaggttttgcgtagctttgaaacgttctggtcaaaattgtgatcctagacaatcttttattaaaattttgttttatgaaggatatgtttcatggttattttgagggtgacatagttgattttttttttactttcttgttacagacatcaaacggtg

SEQ ID NO: 20844 - DNA, 757 bp, Glycine max
  Intron number 1 from transcript Glyma02g35260.1 (locus Gly ma02g35260) derived from phytozome v7.0 (chr-ID Gm02; pos 39989848 to 39990604)
tactagaagtagaggtatttatgaaattttagactattttctaatctggctaatattaagtgtctggctcctggttactttgactgtttgaatctttacttgtgctgctttttctgttggataaggatttgtttaaaagtacattaatgttgttatatacttatatttctcagtttgatctactaattgtattatgcagttattgagttttgggttttttttacagatgtaaaaacgtatctcatgtgtgatgaaaaataaattttgtatgacaaacttctaattctaagttcttttcttttgataaaagaatagttaagtaaatattagtgttttggagatcgtttgacatgaattgatccaatataatagattaagtttgatgattaatattagtgaaaagaatatgattgaaattttgggtacgcgtggttcctgttttcttatcatacatgctaatgtataatattatttttcctttcattgatttgctaaagatgtttggtggatgctttatcctcctgatgtcttactaaattgcccaagcttctgtttgtattagtttattttggaaaaataattgctttttttgctaatttcccgagtgagtttgataaaatgattatttaaaaaaaagtgattgggaaacagtctataattatttttctatcaaaagtatttatactgttattggtgtttcagtacttctctctctttctcaggctgttgttactagtcatctagttgtaaggggcag

SEQ ID NO: 20845 - DNA, 792 bp, Glycine max
  Intron number 2 from transcript Glyma01g04600.1 (locus Gly ma01g04600) derived from phytozome v7.0 (chr-ID Gm01; pos 4213667 to 4214458)
gctctgttttgcccacagtgatatcgccccagctcgtgagtgcccccttttcttctctgcttttaaatcataaattttgtatttttattttaatttttgtagctaccaaattaatgagttatggttcagtttattgtactagagatcatgaatagtttaattgtggggggtataagattggtttagtgacgaaggaaaggtgagagagattacacattcgaattcttccgctaacaaaaactaacaactaacatttgccaccgataaaaaaatgaatagttaattgtttatatccccaatttatgtgtataattgattgttgtacacttgcttcaaactgtagcttcagatttccttcttcccccctccacccaccccaattagttactctaataaaatttggctatgggattgtggaagggcaaaatttagatgcaattagttaattacgtgtttttggctaagaaaatgtatccaagttttggccttctagtaatttaagcttgtctagtactttacaggtttcaattttaaagattaggtgtacttttggattagtaatttgtgataaaaaaaaaatgaacacaattacttcctaaaatttaagctaaactaagcatgcattgaaccttatgtcctggttttcttttgatttctagacattaggcaaggtagtatttgaatgtgcctccagcttcttttctgaaagttcatgtactggaattaatctttgactgctttctcttatttctttccattcgaatcgggaaattcaggtttcttttgccgttg

SEQ ID NO: 20846 - DNA, 702 bp, Glycine max
  Intron number 1 from transcript Glyma03g22610.1 (locus Gly ma03g22610) derived from phytozome v7.0 (chr-ID Gm03; pos 28994025 to 28994726)
agaccaaatctgatagactcttcttctcaaatagagtatgttctatattcttctcctgttaaactgataggtgacacttacgtaggaattaatccctatacgataaaaaaatttaagcttttgtccatttacgcgctttattatttcaaatcaatcctaatattactaagggtgtgtttgatttatattttcaaaaactgttttaagttttcaaaatgcaactaaacaaggttgctcaaacaattggtggagggtgctgtaaggcacaaatcaaagcgtggaattgatggagagattaaacaaaacgaaaacagaagaagagaaaacacttcctagcagtttctatttttggtttttaaaacacttgttttggtatttgattgctaagtagtgtagaattgttttagaaaagagtttttgaaacaaaaaagtgagaacagaatcaaataggccctaagtttcttaagttctattctccaaaaaactaaagttttagtcctcatatgcccttataggggctaaaacttaagctttttttcatacaggactgattctgaaatgaaatgagtgtcatctacagagaccaaatgattagtttaaccttcttttcctgttttactggcaattttatgttacatgaaagtgcataactgtgtgatcatgacagtgctgtcttccaagtcacacaccaagagcactagt

SEQ ID NO: 20847 - DNA, 505 bp, Glycine max
  Intron number 1 from transcript Glyma04g34620.1 (locus Gly ma04g34620) derived from phytozome v7.0 (chr-ID Gm04; pos 40809735 to 40810239 reverse strand)
aagataccggtgaatttcggaactgaagatcttttagaagcttggttaaatttgaaaattcttaaattaggaaatgttttatgatgtggatggtatactagtaactttgatgtgttcaattaggtttttattgatttttttccttatttggattgatgaatttaattagaatagctaacgttctttacaagctcatccaatcatccaatcatagtaagttatttgatttttattataattataattggagtcatctcaatgatgatttctgatggactgatggtgaacatttgaaatgtgtgacattccaatttttgttgaattttggtggatttttttttaaaaaaagtgtttcttttttcttctcatctttggattgatgactgtgtgagataagaaatatgtgatattccaacttgtgtgatgaggttacttgtgtttggttgtggcttgtgattgattgcattgagttgagttattgcttgcattatatgcagttgatagt

SEQ ID NO: 20848 - DNA, 663 bp, Glycine max; identical to SEQ ID NO: 16413
  Intron number 2 from transcript Glyma04g29890.3 (locus Gly ma04g29890) derived from phytozome v7.0 (chr-ID Gm04; pos 33786356 to 33787018 reverse strand)

SEQ ID NO: 20849 - DNA, 853 bp, Glycine max
  Intron number 1 from transcript Glyma02g06390.1 (locus Gly ma02g06390) derived from phytozome v7.0 (chr-ID Gm02; pos 5075222 to 5076074)
tcacaaatactcatattttcacaaatcattcaaaggtttgttgaaggtttgtaatctttatgattttcattttctgtatttttttctttttctagttttcttgtttattatttaattttatttggtctgtttgttcaaatttagggaaattaataaccctaaccctaaatgatcctttttgtccaatttcccctcaatttgttcaaatttagggaaattaataaccctaaccctaaatgatcctttttgtccaatttcccctcaattttcccaattttatcctattttataattttttcctcttttgtcgggttactcaaaaatcaattcaatttgacccaaataaaagaaagtctagtttgaattgaagaaaatctactaaatctgaccgagtctgtttacccaatttgatttcaatttttgcttaaagtagacccaaattgatttatgtaattcatccctacatattatgttgtgtggaacaaaaatatggaaataagataaagataagtcagaggatatttcatacatataatatagtgcaaaaaaaaatgttaggttgccaatgacacacctaattgatacgaattgcaactgcaaacattgggctaaaaaggatgtgaaatggtatttgtcaatgagattcatatcaaatagtgataatttcttgaatgaagcataagtatttctttagaatctttaaatttctggcttcattaattcctagcacatgcagtcaaatgcatggtgatttccttttaagggttttgtgatttgcgtttttccgattcatgagaaagttgaaatgatgatgtgaaacatttaatgtatttgcaggaagcatcaataagaa

SEQ ID NO: 20850 - DNA, 966 bp, Glycine max
  Intron number 1 from transcript Glyma02g42930.1 (locus Gly ma02g42930) derived from phytozome v7.0 (chr-ID Gm02; pos 47838544 to 47839509 reverse strand)
tttctcagcaggttttgtgtttcactgattttgcctttagtgtttgttagttcactatggtgcattttgggtaataagcttaaccatgtgcttattcagtaagttcattataagattaactatggtgcatttggtaatcagcttaaagttcttattcagtaagttcattatgagattaactatggtgcattagaagcttaaccaagtgcatttgggtaatgagcttaattaaatgcttattcagtaagttcactataaggttttggcttccatgtttggtaattgactatggtgcatttgcgtaatcagcttaattacatgcttattcactatgagattaactatggcggcattataagcttaactaagtgcagttgggtaatgagcttgactaaatgcttatttgataagttcattataagcttccatttttgttagtatggtgcttttgggtaatcagcttaactatgtgcttattcaataagatcattaaaagcttaactaagtgcatttgggtacttaaccaagtaataattatcgaaagaagtttaagagtttataagaagctttaagttgcttttgagcttatcctaatacctgctaaagcacttaattataagatatgtctaaataattctgtaaaagcacttccaaacactctatggatgcatgttattatagcttattatgggggaaataatagcactttttagtagcttcttgaaagagattttgaaaaaaatattgttagttggttgaattgaaaggcattcctcttcaagtgttgctttggttattgaattttgtttaaaatgtgccccttttttggaattgtgttaccatgtccatttttgtcatgtggaactgaataagaacaatattgttttccctttttgattgctgagcttgattttgtttatccgcattgacctgcaggctgaatcccttgtcaagtttcagcaagac

SEQ ID NO: 20851 - DNA, 1013 bp, Glycine max
  Intron number 2 from transcript Glyma03g31310.1 (locus Gly ma03g31310) derived from phytozome v7.0 (chr-ID Gm03; pos 39213478 to 39214490 reverse strand)
gctggagttttgcaggcatcactcggtctcttcaggtgattcattagtatatttacctctgtttaattaataagatagtcggtataattgtcgtgataattaacatggagaatctcctgaatatatagcctagttgtaattaataacaataattatttacacaaagtactacatgaattaatttaattactgggaatttattaaaaggtgtttgatcgagtttatgatgaaaaaaaagtttataattctaataaggtttttaagtctaatttatggcacaagtcttcaaatataataagaatttatcaaataaatacgtacttaaatgatttagctaaatgtatcttaaagtgcaaacaaaaagaaaatgaaccgcggcatgttcttgtcacttaatggtcagcatgttttatctttaaaacttgattaatttataagtggcaaataaacttgtactattatttaaaaggaaaatattttctgcagtgttctgtagttcgtaatgggctggagttttttgtcctttggccataatttgtctcgtgaaacatttgtattttgcaattatgagattcaaccccaacccctttccgtaacgcagtgcgattggcctgttggctacttccaccttcattcatttgtattggatggagcatttttatatcaatatagtagtgtataaggtgttaatttttatttttgtactcattttacacgtttttttattactacatttagtattttcttttctcttcccatcctttttttctttaatcaaagtatatatatctagaatatgagagaaacgtatctatctatatatatatatatatatatatatatatataattaattaattttaaatggaggcaatgactgattttcactattggatttttcgcttaaaataaggttatatttatgaatgattttaaaaaaatattatatgtgtttgatgaggaagcatgtgatggaggagtgcaggttagggtttatcgtggattttgtgtcac

SEQ ID NO: 20852 - DNA, 485 bp, Glycine max
  Intron number 2 from transcript Glyma04g03260.1 (locus Gly ma04g03260) derived from phytozome v7.0 (chr-ID Gm04; pos 2404440 to 2404924)
ggtttgtggaggtgagttactataatgttttaaaggaagagagatttagggtgtgcatcatcatttctatttccaaaaactcttttatttttctaaatgcaactaaacatggttgttcaaacagctggtgaaggatggtacaagacaaaaagtggagtgtgaaattgggggagaaaagttaaacaagaagaaaatgggaaacatcccccacttgtttctattttctagtttttaaaacacgtacttgttttggaaataattttcgaaactgagtagattttgatgaaaaattgactgctgagtagtttggaattgtgttggaaaacagtttttaaaaccaaaaagttaaaagtgagaagggaatcaaacatactattattatattcttggaaagtgttttatgctaacaagtttttatcaagaattgaattctaatttatatttgaataggtcttggcagctactcaaacacctggagaggccgg

SEQ ID NO: 20853 - DNA, 886 bp, Glycine max
  Intron number 1 from transcript Glyma02g13630.1 (locus Gly ma02g13630) derived from phytozome v7.0 (chr-ID Gm02; pos 11943564 to 11944449)
actgtgttaactccccctgagcgttggggaccctggttggttctccttttttctttttggtttttattaattctccgtaccatatgaaaaaatagagagtaatgcaccaccatgttaatgcctgaaattaccaagataggttagtttagtctgtgaaattataatgatgtcattttacactgattaaaatgtcatctaatcacacattgtgatattgtgtagtaagttggttgactcttacactaattagcttagcttaatactcatatctatcatgatttctgaaatgcctgacctctcatgattttgtagatttcaataacttttaactaatatcaggggtgttaataagagtgagttacagagtgtggttaacactcctcaaaagcttttacactgacagtgcatagaaattaaagtctatattttttttatataattttagagactaaaaatggtacttctgttcataattttacagaccaaattaatgaattatccgaaaataaaaaattaagcagattagtgatgacgtgttagacaattgtttctacttgattctaatcttgactattgcatattgatgcttgctttcattgtcaagtttatttcacctgattatgcacgcacatatattgcttgaggtgcaaagaattgggtgtcacgtgctgatatttttgtgtattatggcaattgctgaatagataatgtagaactaatataaatgcaactatactatagaactgttgtgagtgagaaagtgagaaactaactatagcaatgtaccatttctctacacttaggttcattttgagtataatcaattacatttttcaccttctcttgatcaggctgtattaccagtatattccagagggaaaggaat

SEQ ID NO: 20854 - DNA, 690 bp, Glycine max
  Intron number 4 from transcript Glyma01g35630.2 (locus Gly ma01g35630) derived from phytozome v7.0 (chr-ID Gm01; pos 48143032 to 48143721)
cctttcgttgccaggattctgcttttgatctcttggtaagttaacaatcttttgcatatctgttgttagttgttagcacatcacattcaacaatcccagattaaggaaacagaacagtttgcttgcttacttattggcttctacattgtcatcatttacccaatggaattgacatatttgctctaaaaacaagtttgatttttgtaaccacatcatagaaagtggacagaccaccatccaatctagttgttaaacccgaattttctttcttcaggtttgtattgattttggcaattaaatcaagtctatcattttcagaaactgtgtgccatgtggtttgccattattggccacaggttggcaagtttgaatcatttttaggacggagactgcatagctagaaaagtaggggaggggtggaaatgaggaattaacatagtcatagacagctggtctgttcttcaaatatcataacagagattaccccaatatggggtgacatgattaacagattaccttgtcccttaagaatatggttaatggcacattgtcaggatcacccaaagaaaaatgttgggattattatagttttgcctttggattttggaacattactaaatgtaggtctaacattggtattggtcatgtttggcaggctaagctttggaattgcagttattttattaatcg

SEQ ID NO: 20855 - DNA, 950 bp, Glycine max
  Intron number 2 from transcript Glyma03g01090.1 (locus Gly ma03g01090) derived from phytozome v7.0 (chr-ID Gm03; pos 816036 to 816985)
tgtcagaaattgacttggcagttattaaacctgaggtatgctacctttttgtataagtgaatatatactttttatcttaaaaccttcttggccgtggcccaatatttcatttgagttgtactgcttccttttttgcttttggtagtaactgtttacttattcctttgactgatatttattaactatgtattctcttgtatgcggtttgttaattcgtttcctgtaatacttaatagaaattacattttattcaataatttcgataggtttagtgccatttttttctctacacggttgaatcccaacatcctctcaaatattgcatatgaaaatgaaactgtgtttatttgatgtgaattgtgattatgtgaatacaaactgttttcgagtgctcggttttaaacgagttgttttagcattttaatgactctctggtctagttttctcctcaatctctttgatgatggagattgtagggagggattgtggattcagaattgacagcatgcgcatgcatgacctatcaattaaataacagggagtttcaggggggaatgtctctttctagatattcttttaaaacatttgatattctttgaaagcctttgacatgcatgtggctcatacaactctgtgcattatcttctccttgaatcagtgaattaacttagtgtagatgggtagtctatcttctccttgaatcaatgaattaacttagtgtagatgggtagtctctttaatggcttttgtgttccaatttttctatgattgtatgtttagttgtgtacttgtcttgtctggaatatcataattgctattctttaatttaacgcaatgaaatccaccaaaaaaaaattaatgcaatgaaacttccctacaagagaatcaagaccttccattggttactttcttacattgaaactgaaactcttctttgtttgtattttcag

SEQ ID NO: 20856 - DNA, 774 bp, Glycine max
  Intron number 2 from transcript Glyma01g34410.1 (locus Gly ma01g34410) derived from phytozome v7.0 (chr-ID Gm01; pos 46769779 to 46770552 reverse strand)
taagccatcaaaaaaagttggtttggattatctaggtaatgcatttgtttttgtctctttgatgattttagtgttgattgctcttgttggtaattaatatggcttatcaaatgacttttctctgtttctgattgtgaatttacttgtttgtcttggtctttgaatttgcttcctgtctaacttgtgaattagtttccacaaattcatgacaaattccttattatttttaatagcttacaagccatccttttgtaccaagaaaatttgcaaagaaaggtacaatgaattacttgggaaatttgttaatttcatgcacggattaggaaatttgtgttagcaagggagtctgcctctcttgactttcatttgttacatttttacttttttggggggatgatgaaatatgcaatatcattgagattgaatgcttctgttgaaatgacatggtatttcttgaaaggtaagcttattttttagcttaaccttattatcatttaggttggtcatgcctagtcttctggagcagagtcttttgtcttggatttatattggcattgcttaatctctgaatggcatggcccctatcctaaatcctaattggattagaaaatgtcaccaatattgtgttttttctttaaaattcctactacttctaagataatttaaatatccagggggaaatatatcggtgcttttatagatattattgcttactttctacgtgtcaactcagttaagtaatatctattgttggtacttctgtaggtgacttga

SEQ ID NO: 20857 - DNA, 592 bp, Glycine max
  Intron number 1 from transcript Glyma02g43510.1 (locus Gly ma02g43510) derived from phytozome v7.0 (chr-ID Gm02; pos 48265929 to 48266520 reverse strand)
ctgattctggtgacaacattgaaggtggtgcagatttttctggtgattggttttccttttttttttttgtttttttggtcatgattcatggtttaaattgttctgatcatcgttcaatgatgatggctttgtgttgttttgctagggaattttagattgtctttactcaacgatttttgtttcattaatgatatcattcatggttttctctttatggtacgatgattttgatttggagaattctgatgattcacacaatgtattgtgagagacctatgaagatttttttttggaaacatggcatagtttctcatttcgtgttatccttcctcaactaaggtgttacgtgtttgatcatacatgggtttacataaattgatgcacatttttttaatgatgcaactaaggatcgcctgcatgttttgatcttaaaatcttttaggcaacaatagtgtgctttttgaggtgaaaattttaagtttctgatctaggtagttgtgttgcataaatttgttcaaacgagactttggacagacttttcctgattggtttctgatctgtgttgtagaagcaattcgacatttgaaaatca

SEQ ID NO: 20858 - DNA, 724 bp, Glycine max
  Intron number 1 from transcript Glyma02g16840.1 (locus Gly ma02g16840) derived from phytozome v7.0 (chr-ID Gm02; pos 15178338 to 15179061 reverse strand)
tggtgagcgaattggatatgctgcggtttttttttttaaattttataattttccttaatttgaattttttgatttacttggcttggttctgattgtaatatgttgttgggtattgggtttgtctgagggaaatttatagagtggctgatgggaatttacttagatgtgtgtttgcaatgttgttggaaaaatggggatggaaggattaaatgaatggtttttatatttaagggaagggggttgggtcttgagggatcatgctgttcaagaagtatgttttcagagatttttatgtcttgcaaattgtcttgctagctaaactgaatcttagttattaattcttcagattacttgtgggtgggggttggtttagaatcctcccctcaaacaacatgaagtgatcatggctatcaaatcagggcatgatgtgataagagctaatcttgaccacacaaccataatggatggtaaaaaactcaaacctaatctcgatcatctgtgtaagattagttggtcaaaattagctcatctcactctctcaatacgctctgggattatgtgtatgtgcattgaaatttaaaccccccccccccccccccaaagaaaaaaaaaatgtattttttgaatatagagtgatgcttatgtatgattttggtaaagaggctaattgttaaaattgggtgtttcaggggttacaagcggttttttaagagaacagcactag

SEQ ID NO: 20859 - DNA, 590 bp, Glycine max
  Intron number 1 from transcript Glyma04g08170.1 (locus Gly ma04g08170) derived from phytozome v7.0 (chr-ID Gm04; pos 6406667 to 6407256 reverse strand)
aagcttaagcaacagggatccaagctcatttgctggtaagctgaaaaccacctcactcaatagatacacctagtttttatttgtttttactcgtgatatcataaatgaaattaattaaaacaaatatacatattcattgttgaatttgaacatattctatatctactgctttgcaaaaaccaaaccctttaccccgtctagttctcactatatgaatcatagataaactttcttgtgatatcgtcgcggtttgttcaaccttcagtttactattgactttaggcttatttggaaaatccaataacattttgatatcagtgtaaatgttggagtcttaatcaaggaaatttaactatcacaatgactacttttacaccaacaaattagaagaactcattaattaattcctccttcagcctttgaatgcaaaattgaatcaaacagtaaatgaataatcaatccatgatcagaaacttgtcaagattatctatgatacatattacgttttttttctcttattcctcctagtggtcatcatagatacatgtttttttatctaatttttctagtgcaacaggcaatcaaggtct

SEQ ID NO: 20860 - DNA, 540 bp, Glycine max
  Intron number 2 from transcript Glyma02g48010.1 (locus Gly ma02g48010) derived from phytozome v7.0 (chr-ID Gm02; pos 51396081 to 51396620)
aaagtcaactgacggggctttcgttccagagattggtaattcctcaaaaatatatggaattttcaaaattctcttctaaaggtcccttttaaacttcttgattaaaatgtgcataatttgaaatgttctgtcattttgaaaagcaacgtgtatttgatatcgagttgagcactaaaccataaattaaatgaaactagcaacaataatatagaagaaagaaaatagaggtttcctggagatataatctaaggaaaaccttttcatttcattgcagtggactctccaaattaaagaaagaaatgataatactgaatgaagtttataatgatgttaacttttaattttgattctcaatttgatcttagggttttagttaatggtttgttttctttttctgagttaggattcctatagaatgcataaattttttaatcaatatgctattctcattatcctgtattgtcttgttaactgtatgcttaaatccctcctcctcctttgtgtcttttcactctgttctttcctttccagccattgaag

SEQ ID NO: 20861 - DNA, 923 bp, Glycine max
  Intron number 2 from transcript Glyma03g02670.4 (locus Gly ma03g02670) derived from phytozome v7.0 (chr-ID Gm03; pos 2477551 to 2478473)
gaagaagcttgcacaaggtggagtcacagagacaggtcatgatctttgcattctgaagaatatccacaccatgatgttgatatgctttccataagagaataataatatataaggagttttgtttctaagttttgtttttttattttttagttcttttggtttttattactatttctcccgcatttgtttcagctttctgtcttttaaagttgtaggaaaatgctgggaatgaagcagatttatgctaaagggtgttctttgtttttatatttttgaaaagcctttgatgtttttgtatggcttctgctttattctgaactcgagcctgagaaatatttgaagcaaatgaatggttttttttattttaccaatttttataattgctttttagccaagtggggattgttttttttttaaaccgtactattttacttattttcgtaattttgctcttagtggctaaattttattttttttctttttcatctcttgttcagaggtaaatttcttgttcctgtgatgagaaaaagacccaaaaacttatctttgatagaaaaataactgcatttcatgttatgataatctacactgaaccagaagtgttgaaatcctttttcatttttttttctattccatagctaaagtccctaatggattttttgctgataaagtgatacagattctggtaaaactaaagtttgcatcttttgtttaccttcttacttgtcagtgagatccttagatgggttttcactgtgattttgttacatgcagtagaaggttcgaaggcattgatgcttttgctaaaagctatattttttgtaatgaattatgctctagtaatccatttgttttctaattgttcattattctattctggggttgtaggtgttggtttggtaatataggccttggagtgaaaa

SEQ ID NO: 20862 - DNA, 521 bp, Glycine max
  Intron number 1 from transcript Glyma03g03230.3 (locus Gly ma03g03230) derived from phytozome v7.0 (chr-ID Gm03; pos 3014133 to 3014653 reverse strand)
aaatcacactttcatcttcttcactaacgatagtaaccgtaagcgccctctgctatcttttcttctcaaaatttgtgatccattgtttcgattttttgcatcatcttcatgtaaatttcataggaattataccctgtttttcttgctaatagatatggtacacctttttttttttaattagtttgttcaatttgaataataaaattttcaagtgggttggttctatactagtaactttttgagcttagattcttatttcaaaccttacattcatgagctgactgggttaatgatattatagtagtgttatgtttattttatttttgataggcaaatgttagtttattagaatgttagattttgttggtagatggatcgaaccggcgacatttttcctcttcccttcttccttaaccacccaatcaacctcatatctccttgttatgtttgttgtatgactgacctgatttcaattttttattgcagaagattggttgagtagtagtgaactgaagaaaaat

SEQ ID NO: 20863 - DNA, 1001 bp, Glycine max
  Intron number 1 from transcript Glyma02g38590.1 (locus Gly ma02g38590) derived from phytozome v7.0 (chr-ID Gm02; pos 43993379 to 43994379 reverse strand)
tcgccaccacttccttgggccgtcaagccctcaaggtccctttttttctgccttttctcattgtaatttgtataaaggaatgaattaaatgatatattatgtttgataagatgatgtaaaatagaactgccatagaatgtgttttattttgtcccgtttaagtgtgtgtttggtttggcgtagggcaactgattccgagtctagaattgattttgaatacattttcacttggtttcatgttggagaagaattcagaattgattccaggttcagagttgattatggattgaagcaaatttaagtagcttctgtgttagattaaaaattttgtactgaattttactcctaacataattttataataaaacatccaaacataaaccacatcatttcaaaatcaattttaacaaaaatcagttccatttaaaatcaattttgccaacgtccatccaaacacacactaagaccttctatgtgttcgggtgaaagtttgcaaaattgattttggagtgaagcaatttatgtttgggtgttttaatcataaaagttaaatagataacttggtaaatgcaaaaggcatctaaagttgcttcagttcaaaatcaactttgaactcatgatcaattctccaatgtgggaccaaacatgtgaacatttacctaaaatcacgttagatgatatttcaacgtgattttggatgatacaacgtgaaaccaaacacttaaagttggaaagaattggattttgataaagttgattatgcatttgaaaagtgattaaattaacctcagtaccattttacattgacttgtgtgcagtgttagaaaataatttccggtgtaaaacaaataggctatctaaataatgaaattatatctttattgtattttactccattttgtttcattcaattacattccactcattgttactcttttatttatgtaaacatggtcttattacatattatgttttgggatgttcatgtgacaggatcagct

SEQ ID NO: 20864 - DNA, 940 bp, Glycine max
  Intron number 1 from transcript Glyma02g42090.2 (locus Gly ma02g42090) derived from phytozome v7.0 (chr-ID Gm02; pos 47169620 to 47170559)
tccccgtcgtcaccggcgtcgtcattgccagcggggtattcttcccaatcttgcttatttgcaattttctttcttgtggcgctttgttttaattttcaagaaattacgataattttgtattatcttttctttttctttttcttattggctaattgagggagaaaataataataaaaatgattatttctttataattacaattctagcaccaccgacacttacatacaagccttcaaaggcttcttaagacatgttccacttgttattaatgatgaaaatatcttgttgaagtcatccttatccaattacagtattttataataactattttaaaagtcttgtctattgactgtttaaaagcttggatactatttactctgttatttatgagtttgagtttttgattggtgtcacttgcttgtacaatcataaaatgttgtgacttttagtttaatattttgttttcaattcagtggcatgtagggttatgcttatgcagctcctattggaaatgtttttacttttaagtaaagtggtgtattgctcggatggtacacaagaactctctcctatgtgatattcaccaataacgtattccggttacagatagaggaacttctttagtttatgttgtgtagcattcttggttttcagcgtacttgtttggtgtccccagttcgatgatcgatttgtttataaaaaaactaggaatttttgtcatgaatgtagatgttttagttgctgctgaatcaaattcaactgtgcagccagagagacagcttaagcagagctagatctttttctccttttttatgtattattattcgagtgatattgatcagtaaaacacaaaaataatatatggcttctgatgtatttgttcttcttttgtttattgcttatagggtgagccgagcttccatttatttgggttcatagt

SEQ ID NO: 20865 - DNA, 778 bp, Glycine max
  Intron number 2 from transcript Glyma01g31940.1 (locus Gly ma01g31940) derived from phytozome v7.0 (chr-ID Gm01; pos 43220918 to 43221695 reverse strand)
ggttgataagttgtcttgtgtgagggtgagtccaagtttatccaaacttggtcattttgtttatccaaattttgtctcccatatagccatgctccccttttgcaattagttatcatattaactaattacttgggatttggaaactaaacaacgtaaattttgtaaaaaagaatgcaagaatgcataaatatatatccttggactaataatctctcacttgtgtgctgtaaagaataaatcattgagccattttgaaccgatatataaaagttccacaaatagcgaaaaataaatatcaaatttgcactgtcttcagagaagttatgggtctaattttaacagactacttttgtgcaaggtcaattttttctctttactttaatcatcacaaattcggatgtaggagaagaagtccttaagaaaataacaaattgaggactatgtaagtgtaaaaatgcttaaacttaatgtcttaaggttttggttcctaagctagtatatggaattccttacataagctattggttacaaatctccccaccactgttttggactccccttatccaagtagcttttcatgtactttctaagaattatatattaccaaaattcaaggataaaaagtatatagcaatttctgagacaagtagctttaactatttctagatttgccccataattcctttttatgaaggtcatggtgcctttagtgaaataactctacctgcttgttttattggcaggttttgaaattgtggttggtgacacaaaatctctc

SEQ ID NO: 20866 - DNA, 974 bp, Glycine max
  Intron number 4 from transcript Glyma02g17370.1 (locus Gly ma02g17370) derived from phytozome v7.0 (chr-ID Gm02; pos 15656090 to 15657063 reverse strand)
tccgactccattgttacaaagaatatccttttgttttggtttgcccttcaagttcttaaaatatgttaatggtaatttgtgtgtgtttttttttatcccctccaaaaataatatttgattaaaagtgttagtatggttggatgataggagatctaagggggtatttggtttgagaaaatgctttttgtttctattttccaaagtttgaataagaaacagtgaaaacaatttttaattgttttattttctattctcataatttcctgatcatatttttgaatacaagaaacagagggaaaataagatagattttgtaactaaaagtgagaagaaaacctttcttaaaacaaaatgccctaagctcacttgcattctgttaacctgtattttacttaacggttgtgctaggaatcaatttggacatttagttaaggaatgaaatggaaccttgaagtttggttgtatgatgttgaaactataatctatttttggtttcagttcacattgtttcattttattatttctgttttgttaccaatatatgaatctatttctgtttgtaactcactggctatgctccaatgcccataaaaatgggttcatgtcatcaatactcaaggcaataacatgatggcatgcatacagtgtagtgtccatcttatgtgccttcacctaataacttaagctgttgggaggataattccctggcatacacaacagcatgggtgataaattacaactgtgcgcaactgcatcttgaccacttctcgtgaacacaatgcaaccacctatgtagtcgtgtacaatttgtgactcatgacatagttcaatttatatctggtctgtgtatatgtggtgtcatgttattggctgaggcagggtgggcattgcttcctgtttattgcatgggaattgtagacttgcaaaaatacttaaactctgaaaaaatgtttttcttgacgtcactgcacttg

SEQ ID NO: 20867 - DNA, 740 bp, Glycine max
  Intron number 5 from transcript Glyma05g07990.1 (locus Gly ma05g07990) derived from phytozome v7.0 (chr-ID Gm05; pos 7923435 to 7924174 reverse strand)
actattagagggttggtcttctggttaatatgctgaatatagaagaaaaatatccgttatcaagcaaaaaacggaactaactcaacattttaagaaaaaccctttataagttaaaaacacgctgtgtgccttagctatacctgatcctatctgtttaaggcaatgtgaagaaaaagatgctgaaagacataaaatataaaataaaatgaacaaaaggcagttattcaattcaaagtcataataaccttttgttagcgattttgaaaacataaattcaagaaaaaatataatttttccaaatttgcacagcaggtttctagttgattttttttccttttattttgaaggttttaaaaatagagatatgcgtaggaaacctaaaatcctagggatcttagtgtgcgaagggagtgtctatgtcaaaaacaaatttatacaggctaggtatcaatattaatattataaattcaaattaagggtgatctatatgatatttcagagttgtttctatagattttccaaatagcaggtagggtcagtctgccattgtaatttacagatattttttctttgctaaggttttgacaattacatattttgattctcagttaagatatgattactcttttctcagtctaacggggtataaagttataaactccaaatttactttttatctatatctttgtagatgttggttcacaggaatcagtggcaaatagttctactgctatcggctt

SEQ ID NO: 20868 - DNA, 310 bp, Glycine max
  Intron number 3 from transcript Glyma03g40880.2 (locus Gly ma03g40880) derived from phytozome v7.0 (chr-ID Gm03; pos 46492175 to 46492484 reverse strand)
ctaacgaatttttgctcggaaaagtaaccattcctttgcatcctccccttaaattttaatcaagaaattatactaaaaaagttataacaagagttttatattttcatccaatcagaaatcttcgtttgtattacttttaagataattatttgaaaagttaaaaaaaattagactattagtgtataactttttttctcacatgtaaatgtgtttgttttctaatggatctctggaattacataaggactgtgtttttatttgattctatggagcaggctttgaagcagttacctagagaaaagatccaggt

SEQ ID NO: 20869 - DNA, 999 bp, Glycine max
  Intron number 1 from transcript Glyma04g05390.1 (locus Gly ma04g05390) derived from phytozome v7.0 (chr-ID Gm04; pos 4093990 to 4094988)
tagcctcatatcaacaattcaagacgcaaaaaaaggttatttttctcacttcatattttcttatctcttatggattccaataaattttcgggtccctttggtaggtgaaattattaggtaccagactatcatgtttatgattctaactattttttatgtaacatatatttaaatttttttatttaggaaataatgaataattctattatgtatgacatgaagattactcaatattatgataattttgaattacttgataatttcttctattttacaagctcatctgttttcactcatttcgtgagaaaatcacttttataaattattaatatgtttatttaagcttttaatgaagaaaaataataatgttatccttacttattttttttttacaaaaaaaatctaccataaaataaaaagaagagacgagtataagaaaaaatgagttatatatgggatggagagaaagataaagagaaaaaaaaatattgtgagacttttaaataaaagataacattactgtttaaaaatataaattgttagttattttaaaattccattcagagtaatgtttaaaatcctgaaattatagttaaaatttaaaataaaagtttccttttataattacaaacaaacaaaaaatataacttgcatgttaaaatcgttaaaaaaaaccactttaagtttttttaaagttaaacaatgatcgggcctaagagagtcagactttacataaataattaagttgatctctaaatagacactttcactataggaatagaaattaaagattaattttaacttttccctaaaatgcaaaagctacaaaagtttctagtaacttggaaaattttggaagttgcttttgatgagctttccacttgtttgtttttgagtcattaagttgtattattcattcagccaaaaaaaaaagtggtgttattttttttctgtctgtggtcaggtgtcccgtggacagaggaggagcatcagatattt

SEQ ID NO: 20870 - DNA, 228 bp, Glycine max
  Intron number 3 from transcript Glyma03g31270.1 (locus Gly ma03g31270) derived from phytozome v7.0 (chr-ID Gm03; pos 39169955 to 39170182 reverse strand)
caccatcaggaaaagcaaatcaggttcagtatcttctttaccttcatatttcttaggaccacataattccaaatccctctactatataaaagatcaaaagaaatttagaccaattttggaaatctatttgttcttctttttgtttcttttttttccttttctattcttttgttttctactaatctcagatgtttaatctctattttgatacatagagagatcaagcag

SEQ ID NO: 20871 - DNA, 990 bp, Glycine max
  Intron number 1 from transcript Glyma04g14710.1 (locus Gly ma04g14710) derived from phytozome v7.0 (chr-ID Gm04; pos 14913352 to 14914341 reverse strand)
ctcactctcagcccactcttcacgtaagtgaaacagtaagtgtcaccaacacatatgtgctctgcatcttgaattgctaatgctatttttcttagagggtggataaggataatttgtatgccactgtgaattgggattcatttccctgtgtattgtctcaaaccaaggaaaaagttaaaattaaaatttaattttattgagttttgattttgttcttacatggttgggtcagataaactaaactaatttgtgctggtctattggtttgtctccctgtgaccttccaagtctaatttgcacctggttatcagaataataggccaatgagattgagtgagttagtggtgccgatcaatctggtggtaacagtgatatcaatctgaatgcctttttttagtacaaatctagttcaatgtctatgccataagaatgtacctcaataaattaaagttttaaggttattgtggaatatgttcactatttctcatgcaattcttgcttgcttattgctataagttgcgtgctatcattcttcattgagtacaatgacagttttgaatttataatacctatgtttggtggattttaatttttattagattagattcataaccagcaactattttactttataatatttatgttcatgatcagaaaaacttttctactttataatatttatattccctatctgagatcaaagttaattgctggatctgtgtatctgtttatagggtgcttggtattagcagtgtttctccttccaccttccctttttataatgctccaattcattttgtgttctgtttcataggtttagtcttgcatattaatttgtcatgcattttcaggaaacaagatcaggctaggagacaaatagcttgaaatcttttattgctagctactgttcttgtgctttaattcaattggtcttactttcccttaggatctgtaattacaagaagcttagatttgacacaagcaggcaca

SEQ ID NO: 20872 - DNA, 906 bp, Glycine max
  Intron number 2 from transcript Glyma02g02950.1 (locus Gly ma02g02950) derived from phytozome v7.0 (chr-ID Gm02; pos 2261504 to 2262409 reverse strand)
gctctgttttgcccactgtaatatcgccccagctcgtgagtgcccctttcttcaatgcttttaaatcatcaaatttttttagtttaaattttgtagctactaaattaatgaattatggttcaggttagtgcattagagatcatgaatagttagctgtgtatatccctaatttatgtgtataattgattgttgaattttgcttctagctgtagcttcaggtttcctacttcccccacccctcaaatcccaattagttaatgagtttaatgattacgcactgacattgtaaagtagttttatactgttatgatttttaggatagttatcattaaagtcagcaaacttaccatatattgtgagttgagattggaagatggtgtaaaacggtttaccctgtgagtgcatagcctattttctcttagttaattaggtgattttgctattattttctaatcagaattagaattttacattgataacttatgtatttaatagaaacttttattacacaaaaaattactgatgtcaaactttaattctaattgaagaacaatacgaaaaacacttatgaaaatgtctccaagtatttgtccttctagtaatttaaacttgtcttgtactttacaagtttcaatttgcaagattaggcttattttttaattagtttattttgggtcagaaagtggtttgtaataaaaaaaaatgaacacaattactccctaaaatttaagctagatgcattgaaccttatttcctggttttcttttgatttctagacattaggctagtatttgaatgtgcctatggcttcttttctgaaagctcatgtactggaattaatctttgactgctttctcttatttctttccatttgaatgtgccaaattcaggtttcttttgccgttg

SEQ ID NO: 20873 - DNA, 374 bp, Glycine max
  Intron number 2 from transcript Glyma01g39100.1 (locus Gly ma01g39100) derived from phytozome v7.0 (chr-ID Gm01; pos 51080991 to 51081364)
tttgtgttgccaggataaaggagcattggaggtaagggtttcggattctagaagcctattgactattgacttagaagcatacttcaagacattgaaattttgtatgaaattgaaaacctaataatcatatgtagatgtattcatatttacatggttcttgaaaagacattttaatttaatttaatttttcttttcttgtcaattttgcttcaatttgtttcaaccaaggaattatgtttgtcctatagttatttctaagaaaaaattgtgtcctaaagagcaatatagtgattctttctagagaagataaggcatgttagttttgatttagagttgttgtattcacctcttagaaatatatctcaggttaaaac

SEQ ID NO: 20874 - DNA, 700 bp, Glycine max
  Intron number 2 from transcript Glyma01g34820.1 (locus Gly ma01g34820) derived from phytozome v7.0 (chr-ID Gm01; pos 47295468 to 47296167)
gagagggaagatttggatcaggattcgggggtgaggtgaggtctttcatttgatacgtttttctttttcttctgttttgagtctattttgaatatttgtaatttttctaatctgcagtacattttgaagttttatttgaaagtgtttggttttgctggatttttttttaattactaatttgttgtttgtttgactataacatactctagatggtgtatgatggttcaagggagtcttaagcttccacatggaattttatattaatgaaatctgtcccatccttgataatatagacaggaacgagttctttgtttttatgtctcttacctttagtgagagaagaaaacttagatacaatcctttaggtgttgttttgtttttctccaatcagaattggaatttcaccttgataatccgcataatcctttaatgtaaactttttattacatgaattactgagatgaaatttggattctgattgaagaacagcacaaacaatacttaagaaactgtatctgttttatccgaagtgaaaaccatgattttgttaatatttttcattccgtaaacttgtgatatgccagataatgccttgccttgtttgacttcaaacttaggtacagatattcggtaaacctgtgttatgccactgataatggcttgctttgtttgactgcaaacttattgcagatatctgagg

SEQ ID NO: 20875 - DNA, 634 bp, Glycine max
  Intron number 1 from transcript Glyma01g40900.1 (locus Gly ma01g40900) derived from phytozome v7.0 (chr-ID Gm01; pos 52559514 to 52560147 reverse strand)
tgttcagttttggagaagtgagttggttttgtttttgctttggtttttctctttgccttttttggattataatatgtgcatggcatgccatgtttgccactttgaggtgtttgtttgcttcttttctgggttggttcacggttttgtgttgctgtctgacccggtttcttgtcaagttttcctgtggtagttgaagatcttaattatctcacccatgtctttgtctgtgttagtgttctgtgaaggtttcatgtcataagaaaatgagatctttacagtttatggtatgaagtacaagttttgattttctttcttcggaggaaacatgctggaaaatgagtaggaatcttttgttgtttttttgtttatttatttcagagttgtttcatgaatgatcagaacttgggattttcaaactgaaccttgttttggtttaagtttaacttctgagtttaggtgtcatgctagtgttccacatttggaagctttttaccttgtgaacaagcttaagtttctgtggatttctgcttctctttttttttctttgtttttctgtgttctgtggaaaattcaaacttgtgatctcatggatcttgcagaagggatccagtgttgatcagcaatattgatctgt

SEQ ID NO: 20876 - DNA, 332 bp, Glycine max
  Intron number 1 from transcript Glyma02g05020.1 (locus Gly ma02g05020) derived from phytozome v7.0 (chr-ID Gm02; pos 4080838 to 4081169)
tgaatcattctcaagtgtggaagaattcagaagttagccccaatgaaagataattctgcctgtttgactcatgccaattctcctcacaactcccatcatggttttaaaatcgcaattgtggtcgcaaatatattgcggttttttatctccaatcataatgcaacatcatctgcctgcagttttgataattgcaatgcaactgcgactgtgaccacaattgtattttaaaaccatgactcccacagaaaagaaaattcaatttattattcttgactattatttcttttttcttggcagaagttaggctcctctcagctgtaaggcacaggaat

SEQ ID NO: 20877 - DNA, 248 bp, Glycine max
  Intron number 3 from transcript Glyma02g05020.1 (locus Gly ma02g05020) derived from phytozome v7.0 (chr-ID Gm02; pos 4081484 to 4081731)
ggtaagtttattgtttatccttcttaaaccagactatagtcaaagctattatgtgtaagctcaaggattttcttttccccgctagatattaaaaaaacatagagcacttttgattaaaaaggatttaaaccatgaatagagaactcatgattagctcctatctttgatttttgacactactaatgtatggctatgaatgttgattttttgtaggaaacgaaacgagcttaacttggaagcaaagacta

SEQ ID NO: 20878 - DNA, 1020 bp, Glycine max
  Intron number 2 from transcript Glyma02g14500.1 (locus Gly ma02g14500) derived from phytozome v7.0 (chr-ID Gm02; pos 13127637 to 13128656 reverse strand)
ttgacaagctcgaaaaaattcgagtcctttcacaggttctcatttttcttttcttttttcttttcacttaaaataattgtttttgggtttttaatcaataccccacttttttttttggtgttttctttaatgggttttgcttctttaccttttcctagaatgattggagtatgctgttaatgattttaacttgattttgtgaattttcggtgatggggttctaatttcttttttcttgttatctttgttcttgtcgttgtgatttcatcactgttttatcaattagtctttggttttgttcggttgtggagaaaatgggcgaaggttgaaacatgacatgcgtaatgcgcatgcatgtggggttcttgttttatgcaaagactcaaataatgactgagctaaacctcttatgctggaaatttaattgcttttttagttagtttttgggttcctcatgttacgaatattccatgttcagtttggaaattcaattgctttgtatcagttacagtttttgcctttagtgaatcatcattttggttcctgaaagtgtaatgcattgtcacataaattcatccttgaaattaaagaaatttctaataagtctctagaattcattaagtccttaaacataactacttattgccattttggtccctaaacatttatttatattatcattaattcacaattttcttatatttttggactaatgtgatagacagattgtattttcaggaacttatttaaaatttccttagttttagcttttagctagggactatatgtaagaactaatgtaacagactcaaatggtggtttactcttttttttcctaacaagcaacagtgctaactagaaatgtagcgtgtcatccaatcatgaattgccatataattgaaaaattgacctttattcatgtgtgatttcgttggtaattggttaacagtgtaacaatctttatcgctgggagttgaaaattccttaagagtttgttttggtatttagagtgcttgtaat

SEQ ID NO: 20879 - DNA, 898 bp, Glycine max
  Intron number 1 from transcript Glyma03g19810.2 (locus Gly ma03g19810) derived from phytozome v7.0 (chr-ID Gm03; pos 25082052 to 25082949)
ttttccttagccatcattgattgttgcctttcttggtaagttaatagcttcagctgttctttcatgataacatttttcttttgtttgctttttcactcattgtccttgattttcgtgacccttcaaaacataattgagattagaccattagtaccatgatcatggttttgagattttgtctcaaaactcaccagcatggaaccagattttggattaaagaacagtaccataactctgttatttagaaatgtacacctgtttatatggtgattctacacattttttccttgataagatgaggctaagaaataggcattgctgtaaagtgctatatttttttggccaataataaacattttagttggatcgtgaaagtttgttaaatgagcaaattgtatgctttcaaaagtttatgcacttttggaagtggtttgctctgtcatatgaactctgttcaaaggttttattaatgggtttgtgtgtgccctttcatacaagtccatattgcttcaaagttgtataatttaaacttaaagcaactttttaaagccatcacaagtttctttaagttccgtgccccaaaggggcactgttttactgctttttttccttttttttttccctttcttttcaattcaatccattccactggttgtggattgtccaccagaaacttcacaaagccttatcccaaatggtttgaatttcccccttattgacactttttgccacttttggtgctaatctgagtcaataaaaacatctatttattttgttccaaaaggccatgaggatatgtggctagaaaatcaaaatgagttgtcctatatattttgattggttcaagttttggtggaactcacattttggtttctgttctatgttttaaggctttaaa

SEQ ID NO: 20880 - DNA, 928 bp, Glycine max
  Intron number 1 from transcript Glyma04g08960.1 (locus Gly ma04g08960) derived from phytozome v7.0 (chr-ID Gm04; pos 7096656 to 7097583)
gtgatcaagaacttaaagtttgttcatttcataatatttatcagtctttcatataatggaagctttacctgtcaatagttattccatgcctgtaattctgatgtagttgactatttgtacaattgtttggttgaacgtttgcaaaagtgatttgaatgaaattgattttgcaaaattgattctagttaaatttaatgctgaagtgaagtgatttatgttgagtgtttttgttttaaaactcggtttcaaatttttatccaatgtaaaagctgcctaaatttgtttaaactcagaatccattatgggctcaaaataaattctttagcacgagaccaacatgtgaacatttactcaaaatcgtgatatttggtatttcaacttgattttggataactcaatgtgaaactaaagatgcactatgtgaacaagtcattctagtttgacggaaggtatacaggatagaagtggtgcttttactgtcaatctgtaatttctcaattagaaagaaagttttcctaatgaatgatgattaagtttatgcaatacacatctcaacagtcttctctgcattgttttaatcaaatgaactgctaaggaaacaaaatgctatttgatgcttagaaagttagaataggaatcactgaacaaaacccaggaatgagtttataacttctgttattttttttcttttctaaaagtaatctgaagcagtcaatatacaaaaactttctgtaatcttgcttgtaattattcaataattagtttaattgaactgctctcctgtttccaaaattttactggcagtgtaaatagataatatgcattcattttaattgtgaggaacatcttccattatatgtattgaaatttctgatttctatatttaagtgttttgtgtcaggttctggttgttcggcaagacctaaag

SEQ ID NO: 20881 - DNA, 838 bp, Glycine max
  Intron number 1 from transcript Glyma02g00760.1 (locus Gly ma02g00760) derived from phytozome v7.0 (chr-ID Gm02; pos 564629 to 565466)
tcccactccgtatgttcacttaccttctcttcttcttctgttccattcacttcatgctttctttcttaattactaccactcacttagaccatgtttggaaatccacctcattaataagtttgcggtaaaagtaatttttaacatcattatttttatgtttattttacttttgttcattaaatttgcattaaaactgtgtctgtaacattttcaactgaaaatcaaagatgttttgtattttgtttagctactttttctataaggacttgttaaaaaaaattgagtttcttttatatacaaaaatattgttgatcaaatttagagacgaaaattgttctttctcactaattttggaattatgtgaattttaaaaattgttagtgatagaattttttgttattaattttagttggccaaatttagtgacaaagatatatttttcttcactaattttagaatcacaaaaatttaatgacaaatattttaaagattacctgtaaattattttttaactgttttatttttctctaaaaaaactatttttatttattttttcttataattagattcatgaacttataaactctgttttataaactctattagtttctgatttaacaggttgaaagaaaaaatagaaagctttcctctcatctatataagtccattttagcttaaaaattatttcaaagcataagcttaatttgcatcacaatcaagaagcctctatttttttgtttttgtgttatggtatggtcagaaactgaagcgaaatgggtggttttacttttgagtttggtcagcaggaggtatcaccacgcacctcaggaagactctc

SEQ ID NO: 20882 - DNA, 287 bp, Glycine max
  Intron number 1 from transcript Glyma02g44090.1 (locus Gly ma02g44090) derived from phytozome v7.0 (chr-ID Gm02; pos 48764367 to 48764653 reverse strand)
ttatcatcgaatcccaagtttcttcgtcaaagttcgtatcttttgctagcttattcttccccactgttacttaatccaaaaagcttggaacttgacgattatttcggcataattaatagaaattaaatgcgggggtttctgctatattaacgtgattgttaatttaatagattcgtgtaaaaaatcaaactcactgcattatgtttttggctgctgatgtgaatcttcgttgttgtttttttcttttttcagacctcaagttctgttggatcttgcatatagttacc

SEQ ID NO: 20883 - DNA, 628 bp, Glycine max
  Intron number 1 from transcript Glyma03g27580.2 (locus Gly ma03g27580) derived from phytozome v7.0 (chr-ID Gm03; pos 35309704 to 35310331 reverse strand)
ttcttgcggccgaccttgagcaacaaaagatccatgtattaattcacacctttattctcccttattagctattttaatttaattgtgaagtgatttagaattaggtttaaaattaattctattctgattcaaggtttaaaagtaatttggttgtcttttaaaaaaaataatttggcctcaagattttttttttttttttttaaattcaatggctgactctgggttgttcattagagttttgactaggattgcaaaagttgagatttgggagttgagtggaaatacctgaattcaattcgtttaatgttgaacattttctatgcaattagttgggaggtttctgggggtttatatgttacagcaatttgtgtgaaaaacaagtgtatgattttcaaatcaaagatgggagaacagctcaacctttagaaaagaatgaacccttagttatgatctgaaatttaaacttgtcataaacttagttgattgatggttacacctaatgattactatgtattagttaaaatgtagccacagaagaacttttttaactccacagtccacacatatttaatggcctactatttgctttgttgtctaatatcctgcacttttgaatatcttttgtagg

SEQ ID NO: 20884 - DNA, 1024 bp, Glycine max
  Intron number 1 from transcript Glyma03g40360.1 (locus Gly ma03g40360) derived from phytozome v7.0 (chr-ID Gm03; pos 46157874 to 46158897 reverse strand)
gcactcaaagtgcttcgagttcgtcactgatcacggtttgttccttcaactgttccatcttctccttctccagctcgatttccttttgttcgattattttctgcttccgattctacgaaacaatttatcgcatcgtataatcaatctgttttagctcatacttcgttgtaaagtgctctgccttatgatcgtgccactcaatttgtgcaaagggttatgttttcgttttctgacctcttatttttctctttcccttcgtttgcgttatttgtgtcgatgatttggaatattcgatagcttctgcgggtaaggtctgccatggcttttaggtgtgcgtttggctattgatttcgtagctctgcgttttgatttgaatcgcattgagtcttcggtgcgtttgatatgcgattatgctttgactggtggttcggacagtatggaaataatgagtttgaacttcgcctggattcggaggttaacattgaattattataagaaacgatgtagcgtgtttgaaatccaactgagaattgcgaaatcaagtctaggacgcgggagctataactattagcttcttggtaaatgtgaaaaacacttctagagttgtagattttagtatcagtgtttggcatattgagaagagtaaggttcatctcatataatggcagaagatatttgataataattagctactgttacagagaattcttaatttagatttctaggagctcccgggttataccgttatgcggttatgcctaatgcttttctgtatgtggtttctgtgggagtagaagtgtttggatgtgtccgtctttaactgtgcccctgagagagtttttctgcactgcaaactttcttttgttaaataaatggtcataatccacaaactatttattttattttatttttaatgccgttgctaatgctccttagtagagttcctgatattgaattgttttctcaatttactcctggggttattaattacactatgtgatttatgtacttcacagtttcggca

SEQ ID NO: 20885 - DNA, 944 bp, Glycine max
  Intron number 2 from transcript Glyma0066s00240.1 (locus G lyma0066s00240) derived from phytozome v7.0 (chr-ID scaffo ld_66; pos 163587 to 164530)
caccttcaccctataacactcttcaggttcatttttcctctgtgcacctctttattgtttattcagttaacaaagactatataaatctactagagtattagcatgttagaatgaccttattgtttgagtcaacgagattgtcattataatttaaaattaatttgaacctatgtccaacaataatttaaaaaaccttttgaatgttatgtgctaaagttcaaggagttctgaaacctttactcatttcaggcattgaggcactggtcttggtcttttcatcgtccaaaccttggtgagtaagatccttaatacgtaaagtttcactcaagccaagaacaattaccatttgtaatgcaagttaatgatcagtgccagcataaacatgtacttacatcatgtaaataggtgaagattacatcaattgcttgttgtgcacttggtattctaatcgttttggttttgatcacaaacacaaattcgctctctgaattcctctgatctatagtcgatgctgctcacaaggctggtgaggttgtgtccccactccaccctctttctcttttattttgttttgtacgtaaaatatttattttcattgcagattattcagaaaggtttccatcggaccaagaacgtgcatcgcaaaggactggtatccattcattctttctctcctcttttctacttcatttctttctaatgaatttcttcaccttcattggtatgcacatacatgcacaagttaatttggtcactgaaactgatctagcatgtgaagatctcatatttactcatctcaagcaagtttaccccactcataaggttgattcacctctcccttaacttcacacaattaattttgagttggttgtccattgtaagatcattttaagttggttttctttttagttcattgggaaggaaaccacaactgttggtggcaa

SEQ ID NO: 20886 - DNA, 805 bp, Glycine max
  Intron number 3 from transcript Glyma03g01580.1 (locus Gly ma03g01580) derived from phytozome v7.0 (chr-ID Gm03; pos 1371693 to 1372497)
gatattgtgttccctgattggtccttttgggggtaagtgctaaatcaacttttcttcctcctttatttaaaaaaatattatattttttcttcttcttctttcaatttaaatatgttgttagtcttggtaaatgaggcaaattctgagtttttttttgttactttcaatctttataaagtgtaaaaatgatctgtcattgttcagtagtaacttaacatgcatttaaatatgtcacatattttagtttagagttgttgatataatcacgttattactaaatgtataactgtgctaaaaatgtacttactttaagaaaatcatttttatatatgcaatcgattgatttcaacacttgaagtaagaagttgttaattatttttatcttgtgcataacaaaaatgtttgttgagtaaaacatatgaaatgcatatagatgaatgagacttttgatttaattaaaagtgtaaacaaaaaacaaaagtttatcagttcacttttttatttaagttttgtgtataaagataatgattacaggagcaatatactcttatgaacacacatacatatatattcatttttcagtaaaaatgttttttttttcttttcacattatttttactcaacttttgacctttgtttgtttggtccctcaatttaagcatactttcaagtcccatcatcttagaggttcaaattgattgtacgcataactcagatagttagcctagctaatatcctttcccatcttgtaatctggattttctttatttataatttataatagggctgagataaatataaaggc

SEQ ID NO: 20887 - DNA, 423 bp, Glycine max
  Intron number 3 from transcript Glyma04g41930.1 (locus Gly ma04g41930) derived from phytozome v7.0 (chr-ID Gm04; pos 47731108 to 47731530)
cctgcttttaccttcatacttgccatcgtcttcaggtttttattactgctctcatttgtaacttctgttttctcttgaaggcactgaaacatatcaaagagcatgtgacttaagaaacttaagatctcagcaatgaacccttgctaattattccagtgataagtgcaaccaatttccaaagatattaatttggaataccttatagacttaggctctgtttggtttagggagggagaagagaaattttgtgagacccatgtgggacttacaccttttacattcaaatttaatttaaaaaaattatcttttatttttattctctctatttccatccactaaaccaaagacaaccttatagtagtagtcttgcataattttctaactaattctcaagcttacttttttggtaattatccttacagg

SEQ ID NO: 20888 - DNA, 280 bp, Glycine max
  Intron number 3 from transcript Glyma04g32640.1 (locus Gly ma04g32640) derived from phytozome v7.0 (chr-ID Gm04; pos 37599570 to 37599849 reverse strand)
aggtaggcttcctccgttattaaatattttaacacagattctttgttggttattattataaagtttattttcttttaagatttcctatttattagaaaatggatatgtttatgtacataagtggtaaattttaacttctctttaatatgcaattagatcacgtacatatctctttcacgtgtcttggtctttcaaatgtgtaattcaaactttttaattgtaggttggttactccatccattttgaagattgtacataagagaagactattttgaaatac

SEQ ID NO: 20889 - DNA, 820 bp, Glycine max
  Intron number 1 from transcript Glyma01g04150.1 (locus Gly ma01g04150) derived from phytozome v7.0 (chr-ID Gm01; pos 3602952 to 3603771 reverse strand)
tcctccaccttcatcatcttcttctttttctacaggtatgtgcatgcgtaattaatttcatcttgttaaaactatagaattcctagtgtttttccccttaaattttagagtaaattgcacttacaatccatataatttcttgagattgtaagtgatactctttgtttttttatagtttacactaaggagaaaacttagatatagttctttttaagtgtttttgtgtttttttctaatcaaaattagagttttaccacggtattacgtagataatcaaggtaaaattctaattctgatttatccttacattaacactcttacattagtgtaaggtgtaatatgtttcaatataataagtgtcactataatgtattataaataattaaaagggttactataggggttaaaacgtgagatctcaagaaatttagatggagtgttaattaaattttcttacaattgtaattagcaaagttggggttagggacttgttggttaactagactttattttttcttctttggttttggcagaaaagaacaaaacttaccaaaacccatgtgactactctaatggtgattgggtacgtgacacaagaggccctttatacaatgtaactagttgtggtacaatcaaagagagtgagaaatgcgtatccaatggaaggcctgactcaggctatctatattggagatggcaacccagtgagtgcaatcttccaaggtttgaacctctcacttttctccaacttgttcagaacaaacacatagcatttgttggtgactctttggctaggaaccaattagagtcccttctttgc

SEQ ID NO: 20890 - DNA, 877 bp, Glycine max
  Intron number 1 from transcript Glyma02g06960.1 (locus Gly ma02g06960) derived from phytozome v7.0 (chr-ID Gm02; pos 5587570 to 5588446)
gaagaaccattggtgatttagtaggtaattttgtcttctttctcacacatccaaggtgtttgggtgagcctatttttattttttttgttagcaaacaattaacattttgattttttaaacaaagtttttttccttttttctgaatgaacatcaaacattcctcaagtgagaaccaacaattaatcttttgaggttttctaataaatatgttttcatatacacagattaaaagttagattattgatcacatgtttatgagataatgttatctatcaattatctcacattatctttttccaaacatcaatgttacatgcatagtgtatttatatgaaatttaataaaactagagtaaacatatagagtttaatttttatatattgtcagtttaattttttttacattatattaatcaatttaaaatgatttgttcatatgattttttgaagtaattactataaaaataaacaaatttattttacataataatttgttattagacggggcagtataaaacttttttttgcattgtaaatatatacactatttattttagcatatacctctttgatttcttatgatattataaagatttttaggaaagtcagtctattgttaaaaaagagagagattgaaaataattttattaaatatcaggaatacgaatgtaatttcttaactttgttttatcaattttatgccactttctttataaattaataataaaattcacgatatctatttcccccacaataaagtgggaggaatgctgtccataaatgaaatcagtgtgaaaaaacacttttttctttacttaatatgatgttttagtttttgtattttaatttttcaggagaggaattgggacaaccaaact

SEQ ID NO: 20891 - DNA, 555 bp, Glycine max
  Intron number 3 from transcript Glyma02g08540.2 (locus Gly ma02g08540) derived from phytozome v7.0 (chr-ID Gm02; pos 6660490 to 6661044)
ggaggagccggaaaactttctccggatccagataggtactgctcgagaaacagattaatgtgagacgatgaaataagttttgttagagacttggttgctttaagtggaatcaatgtttagatttacttgttcaattgcctttggcgtgtttatctttgctttgcaagagtgttatggtcttattttgcattttgatgagtttctttcttgtcttggttgattagatatggttaatgtggtttttaattgatatttttaatcatttgcattggtcaaagttttgttgcaacttttgatattgcggaaaattacaaacaaatgtagatggtgcgattacaattgtggtcccaatgccagtcatggacatcccgaaaaccttaatgttagggctgcaattgcagttgcacactgtttataaagccttagtgttagggttattgatgtgatctcttctgaaattgtaattcattgatttattatgggttgtgaataagttgggagtggaatctgtgttcgatggttatgacatccaacttctcatattttaggtttctt

SEQ ID NO: 20892 - DNA, 841 bp, Glycine max
  Intron number 1 from transcript Glyma05g05820.1 (locus Gly ma05g05820) derived from phytozome v7.0 (chr-ID Gm05; pos 5350701 to 5351541)
gccatcatcagaatccgctgcacttcccccaccaggtacctctctctctcctttcattcccatcaaaattcctctttaattaatcgaaattataaaatttccaacctcggattcttgttttatgttcttgtttggtttgatctgcggtggaaattttgaattgaagcaactgcaactgcaactgcaactgctgctgtctctgttgatttgatttcctttggtgttcgccggttaatttaccctaaatagttaaattttacagtctctgaaagttataatgatccgaggaattttttttatagtgaaattagcctccaaattttaatttgaccaactgaaataaatgtgtatttatttagggacgattgaatttagtttccgttttcaggatgatgagagaaatactattgtactacaactattcgctagatattttttttccaatgcactcttttcaactccttaacgcgttattattgttactcccttgacaaagttatgggtccctctttaacacgttatggctcctcttcctatttaatttgtcacaagctcgtagtacttttgtgagtttgagtaaatttcatgtaacagtgaagagtatgtaactgacattgaaattatgtttctaaggattgctttgactttttggtgtttagtatttactagttcatttatagtttttatttttgggctatagttgtttactcaaaaggtgacgcattgactgtaccaaaaagttaaaccttttttatttctgcatgtctttaagcattacgtgtgactgtttccttggttttctgaagtgtgaagttggtggaacaagaactttggcagcgag

SEQ ID NO: 20893 - DNA, 618 bp, Glycine max
  Intron number 1 from transcript Glyma02g00660.1 (locus Gly ma02g00660) derived from phytozome v7.0 (chr-ID Gm02; pos 455843 to 456460 reverse strand)
ccttaaaggacttagatacatatcccaaatattcggtaagtgcaatctccattctcagagaaattaaaatgaaaagtgcatttttcttgaccccgcgcaagtgaattttataaacatttatattttttttcctttaatggtgagaaacatacacatgcatttttaagaacggggaaggtagataatgatagaagggaataattttattaggttgctatattttaatttaacttttctagttttgttgcatcttttgcttcatgatgaaaatttctgtgtaagggatcaccaattcaaacttttaaagacattcttttcttgacatttagtgataaatgtattaagaatttttcattttattgctgatacccccagattatttcgatgcttgatggcactaattcaaaaatgtgaaattaactacaattaattttgttctactaatctctaattaaaacaaacaaacaaaaaacattggaaagccgggctttgttcttatttttgttggtttaaatatgcttacaatttcaaattttcaaatagtgtaaattgtgagtttgtgaaaatggtaattattttgcagaagagaaagaagaagaatttcaaattgggttgcca

SEQ ID NO: 20894 - DNA, 448 bp, Glycine max
  Intron number 2 from transcript Glyma01g03090.1 (locus Gly ma01g03090) derived from phytozome v7.0 (chr-ID Gm01; pos 2601534 to 2601981)
ctgtaatctctatcttataatctttttgaatactcttcaaaatcataatcactatctcaaaatcacttttttattatgattttttcaaagtagttatgtgtaattttataatttattttgactgatcatctcattatcgttaccctcaaacgtgttatctcaaagtttttattactgtgagtgcttttgtttttttgtttgtcaattattcttgtcaatgttaggtgtgttctatgatacacaagaaattattatatgttctcaactcctattccccaactaccacgtggttaaattttataattcatgagaaaataaaaataatactaatactttgttgtacttaataatttcccgtgttgcatataacatgtgttgttaattcatgggagttttgaattttgcttttgcagcttggagaattggtattacaaaattctgattgtaa

SEQ ID NO: 20895 - DNA, 778 bp, Glycine max
  Intron number 1 from transcript Glyma02g41140.1 (locus Gly ma02g41140) derived from phytozome v7.0 (chr-ID Gm02; pos 46306200 to 46306977)
agtccaaggcccacggtaaggcccatcatcatgatcatcgcatgcttcctcttctcttactacctctcatgggtttcaggttttaaactccaaacaataataagcttgtagattggaaaggatgtaaaaaaatggaaattgtaattttctttgtgaaattgtaagaattaaagctttaataaaggtttaattgcttcatgattttaatttggttgcggtgagaaaaaaatcttcacacattatagtcaattacgaaagaatacaactaatgtaataaaaaaaaaacatgtaattgtagagtgtcaaaataatttaatcttgcgcactgtaatttaaaactatgaattacttctatattttaattctcacataatcactttaactaattttagttttcttacataatactttaattcattttagtcctttcaattttatatgatgggaactaaaataaattaaataatgtatacataaagactaaaattataaatttttggtgtaaggattaaaatataaaaattgtgcaaatatagaaaataaatgagtaattaaacttttaaaagttgttttcttttggataagtaaattgagagctttgtttatttacttatagtagtcgaccttcatgtataaacaagactatggttcgttgcttttgctttgagtttggctgtttgggtcacttgaaaacatatatttttgttacaaaaagaaagaaaataacttgttttaattttctgtaatggtggctcgtgtgttgcagacaaatcgaatc

SEQ ID NO: 20896 - DNA, 854 bp, Glycine max
  Intron number 1 from transcript Glyma03g26820.1 (locus Gly ma03g26820) derived from phytozome v7.0 (chr-ID Gm03; pos 34350108 to 34350961 reverse strand)
gttgcagaagctgaggtatgtattatatttttgtttgattggtcctttttatttaacttttgggtattggatgatctattgtgatggtgtctcatattgatttggaattgtattttgtattggtcttggacttgatcattgtaatcaatcaggaatatggtttggtttattttattttgtgacaaattgtatggtactttgaaattttttaagggtttggtacggttattcagaaattctctgtttcccttgtcttgtacaaactcctttaattattagccgcccaaaaaacaactgtaccgaatgctttgttggatttggtcagtggcaatgcctgcaatgatctgtgtattctgcaggccgtagcttattgcaacttttattcaataataacaataactaagcagccttatccaacttggtggaatcagatatagatgattttgctttagagtgaaaagtgtggcattataattcttactagaaaactgggtaaaatttaacaattttatcatttatagcaaaaatgcatacttcttatcaccagaatgggtcattgaattgtcaacaatgattataagtttaactctcgtcttagtgtagtgtgattcttcttttaattggaaacaaagttttattctgctacttgaattcgttccatataaagctggagaagctcctcatttccatttggacttgaccatggtgaaatggcgtcaaacctggcagttcattgttttgtttctctatgttgttaatagtaaactctttctttgtaattttcatttgttgtattggtattgaagactgctctttcccaaacacaaactcaatttgcaggactatttctcaaa

SEQ ID NO: 20897 - DNA, 696 bp, Glycine max
  Intron number 3 from transcript Glyma02g29190.1 (locus Gly ma02g29190) derived from phytozome v7.0 (chr-ID Gm02; pos 30682350 to 30683045)
ccatcaagaggttgagaatcgcaaggaataaaaaggtttgttgcatgcttgtttacttgtttcctttgcttgtgtttgttgttgtttacataaattgatgatgatttgtggtaatccttggttactctagtttatctactcatgtatagttgatggtacttatgaattcagtggttttttttttgtcgaatgtttcattctggtgtgtatgtgcatatgggtgtataatgtgtatcaggggaaagaatgcactcacgagtggatagtgtgattaacttctttttatcttttatccaaggatggttgtgtggtcaaaatttatttttcttgtctcatgctttgtttaggtgtgtcttcttaatttaaggaaatttttaaatgcaaatgcaaaaccttcaagcatataatagttgtgagttccttgtcttcagcactcacttcatggaagataaagcgcatctgaatcaatattttaataattttttgtattttgctcttagcatttggaagaaagtatgtgttttgagccatcaagttatttgtttctttaaatactttgattcagcagtatttatttgttattgaattaccattgcagtgatgattgatatttgttttagttgattgatactgaccatatgtgtttcttgatgtttaacagtctggaaaatcaagacattttggtttcatagaatt

SEQ ID NO: 20898 - DNA, 830 bp, Glycine max
  Intron number 1 from transcript Glyma03g27460.1 (locus Gly ma03g27460) derived from phytozome v7.0 (chr-ID Gm03; pos 35174967 to 35175796)
tgttactccacctcaatctaaattcaaacatacccgtgagtctcttttagctctcaaacttgcaaatcagagaccctttatatttaaatgattgactttttagtcttttttaaacttgattgtgttatggataagaactgtttcataatctggtcttattattatcaatttattattatgtaacatggtgtgggtgggtgcaactacctgcaataatctactgttcattttttttcgaatttttggacattattcgaattcaaaatatatgtcataaatcatactaatagttgcattcaaatgcgtttcaaaaccttcaatttgagctcagtgcttgcttcctactgtattttactaaattctcatgttattcttttgtcaaattcctaaagagcttttcgattcgtcaaattggtcaaactcctaaagagcttttcgattttgcatttttcgattagagttgacttgaacaattccatctgattattgacatatcacttctttctttattatgctctatttatccccttgtaactgtgagtttagataggtcatagccttgatattgatacaccaaaaagaaaaaagaagaaggcgagaaaagggttggttttttgttgtcatattgtaggatcaagcggtggtgaaacaataactattagcttgtttgtttcatttgtttcctcttttgtccacctctgatcacatgacgtgttggttgttgtgtttttaactttggttgtttcttttttctcctatataataatataatcaaagtgttcctgttcattacctctaccttgtgttgtttcagattgcagataggttga

SEQ ID NO: 20899 - DNA, 471 bp, Glycine max
  Intron number 1 from transcript Glyma04g35770.1 (locus Gly ma04g35770) derived from phytozome v7.0 (chr-ID Gm04; pos 42248148 to 42248618)
gaggaagcattttctactattacactcagtaagctttcttcacttgtcctgaaattatccgtctcaaaatttggctgctattgtaaggtacatcatgaataggagcattgttttctgttgtttcctgttggtgggaacataaacaaaaaatttgaagtgtactgtgtttctatcattgctattattctttctctgctcttcgagttaagcctttattatctttgcggccaatcacttgagttcagttagttaggagtctaaataaacattcctttaaagaaagtaattaccttaactgatctatgatgccaatataagaaactaccatttgtagatagaagtctgtttcaactcttaactctattgattaggcatattccgagattctttttggcatttgatttgagttaattatttttaatggtttctgaaacaggtggacttttacttcaatcaccatctattttgggg

SEQ ID NO: 20900 - DNA, 408 bp, Glycine max
  Intron number 1 from transcript Glyma01g36860.1 (locus Gly ma01g36860) derived from phytozome v7.0 (chr-ID Gm01; pos 49277793 to 49278200 reverse strand)
tttccctttatccgcattgctctcttctctttcacgtaagtaacactccttcaccagccactcataacaataaataattaaaataaaaagcaccgtcgctgcattttttgttgtagcttttgatgccattgttttcctttgcttgttttggtaatagtgtttactaatgcattctaacacgcttccgaactcagttactttttcctttttttatttccttaaaataaataaatagagaacttaaaccggattggggtgtgttttaattgtagaattcatgcttggatgttgtgattttagatttcttcagtgtcaagatttttttgtttgattattttcttgactgatttaattgcatttgctgtttttgcagcgttttttgtctctgaatatccaagatcttcaagg

SEQ ID NO: 20901 - DNA, 433 bp, Glycine max
  Intron number 1 from transcript Glyma02g16410.1 (locus Gly ma02g16410) derived from phytozome v7.0 (chr-ID Gm02; pos 14815942 to 14816374 reverse strand)
gtcgctgctctctctctgttacttccctatcctcggtactctatctcttctcagctttatgctttctttttcctttcgttttttcaccccattttcccaaaattcacgaccgtctaattccctattgttacagtagcacgctcaagtttagttctctgtttttgtacagtttcagaaaaaatttcatgggtttgtccgcgtctttgacggcaacctcagctcttaataattcatcacttttttttcttctttttaaatatcaaatttgtatgctcatattggactgttgttgtttctgttgagcgatatttgagcatggcatctttcactgtttatttgcagagtagcattattggggcttgaacccctttgttttattcgtagtcattgagctgtggcattgtttgtgtatttatagtgtgtggttcgtact

SEQ ID NO: 20902 - DNA, 799 bp, Glycine max
  Intron number 3 from transcript Glyma04g08940.1 (locus Gly ma04g08940) derived from phytozome v7.0 (chr-ID Gm04; pos 7084795 to 7085593 reverse strand)
tgtaaaatatgtttggttagtcttaatatgttttctgagaattaaagattcatgtaaaatatgtaactaaaatttttcttccactccagaaagttggattcttgccccctccttgtgaatgattttgtgggaaagtgagctaaaacagattcctgggaaaggaaatactttccgtctaccaaaagccccccaaatatccaatggaaacaaaattaagtgcagttctttgggtgcttttagtgttatactctcatcaaaattagagtttctcttcaataatctgtataataaatgtttgcattaaatgtcagtcaacataaattactgagataaatttccaagtctaattgggtaacaataccaaaattacatatggaaatgtatctaagttttgttcatatctgaactttgtgcttgataaatttaatatacaaaacattaattcctgtttggtttcatgttcacaagcaaaaacttgctcaataatagtattagcttttaccatcaaatgcaaattagacttggtttttgaacgaaattgatgcggatccaaacatgcaattattgttaaccaaatgtcctaattattgttaaccttgttactaaacttttataagagtcattagtatatgcatgcatttagatttgtcaaacagatatgaaacaccatgagtattggttactaatgtaaacttaggctgattcatctgatttgaatttgaaggtcattcccccatctaattcttcagtctgtgtgttgacagaagacggagctgtttggtgttggggttacaatttc

SEQ ID NO: 20903 - DNA, 616 bp, Glycine max
  Intron number 1 from transcript Glyma01g42590.1 (locus Gly ma01g42590) derived from phytozome v7.0 (chr-ID Gm01; pos 53821544 to 53822159 reverse strand)
cttgttttagtggttacagcataattaacctctattgacttttgttgcaacaaaattgaggttgaattaagataaagaattggtatgttagataggttttttgaatactttgttacttaaaagttacaactctcgtttagatacttttttgatattggtcttttgcaaagaaattgtcgaacgtatttttatgaattatgaattggtatataataaaattgaaaaataaatggcgctagctatctttacaaatatcagagaaataatagtgtagaatgcattgattgaatcaattatcatcatgtttgttaatcattcaattctaaattttgagaggtcaccgcattatggatggacttgaaaacatggtcatgactgttgtttttgaagtttgaaggcatacaaaattatcgtacttccttgtgcacaattattgtggcacaaaaatatcatttattgcatattccaaacaatggtgtagttatggaagaaaacactgatgaactactgttacatacttttggcatgattcacaactgttacaagcttaaacaaaatatttacaatttttcttgtgataggacagccctcggcaaccgcaggatttggggagaaa

SEQ ID NO: 20904 - DNA, 392 bp, Glycine max
  Intron number 1 from transcript Glyma04g05550.1 (locus Gly ma04g05550) derived from phytozome v7.0 (chr-ID Gm04; pos 4213456 to 4213847)
aactggttcatcattttcttttgcatcattctacaatcctattctgttcttcaatctttttcaccataaaaaggatttttatatggtctcagagcacctcctctgtgttgctttcttcacttttgatgtattctgttctgcataacgtaaaggaacacttgttttctatgatgatacttgatgatgaatttgtttagtttgttaaagaacacttttcgtttttcggggtgcgtttatttttttggttggtttaacaattttgtatgaatgcattttgtgccctgcatacacagagtgaagaattcttcatcatcattattttgttttttgtttttttatatctagtattatatggtgtgaattgcaggttaagaggaacatagacttggtgt

SEQ ID NO: 20905 - DNA, 745 bp, Glycine max
  Intron number 4 from transcript Glyma03g00270.1 (locus Gly ma03g00270) derived from phytozome v7.0 (chr-ID Gm03; pos 74234 to 74978)
tgtattacttccaattctcttccaaagtaaaatgtctagtcactcttctctttttccaagtattgacagatcaagagggtctatatttgattactaggtttattcaatttcatcagtgtgtaacaatcatttctttaatgaaaggcaacaactacaaatggtcctcttaagacctttgaaggaaaggaaagcaaaataaaccacatggtggctagaagtacggctctgcaagattcacatgcttaagaagaatacaacattacaataagctctactggatcagtttatgaaaaatgcttggaatacactcttttaaacacactctcttttattggttgaaatttattgaaaatcacaatattttgtagttcccccatcttatttaatgaacctcatgattttgtagtttttaataaattttaatagtagggtgtgtattagagagtgtgttggtaacaatcctcttaatttgtttctccaaatcatatgctaagtgctaacaaactgttaggctctgtatgttaccttgtaattagcagccttgattgattgcaataaaagctatgaatatgagattaactgtgtagctttacacaatgtccttcaaactctttggcttttatacctatgaatagattattaaaatttccgttgttttctttatcttgtattatgcattcttaacttacttgtttccatttcattccgtaagatactgaattgagattgatgtttgcctcagtta

SEQ ID NO: 20906 - DNA, 337 bp, Glycine max
  Intron number 1 from transcript Glyma03g23700.1 (locus Gly ma03g23700) derived from phytozome v7.0 (chr-ID Gm03; pos 30287512 to 30287848)
caaatcttgtccacgaccatcggtttgactactctaagctctattttcccatagtttgttttttttatattgatattgatataaaaattcaaattaatcattattactttagcattttttaatttctactttttaattttttactacctcaatctacgtcaataatgcacttaggtacaagttagtatattcttcaaatgcaggttcttattatcaattcctgcaattctgttagtgttactaatcatatactaatttattctcaacaccaattgactgaatttttcatgtggatgatgcaggttcttattatcaattcctgcaattctgttagtgt

SEQ ID NO: 20907 - DNA, 607 bp, Glycine max
  Intron number 1 from transcript Glyma03g07590.1 (locus Gly ma03g07590) derived from phytozome v7.0 (chr-ID Gm03; pos 8213825 to 8214431 reverse strand)
agtgcaagtggaaaaaccttgttactcgctataaggtatatgtttgttcatctctatacgtgcatcaaactcctaaaaataaaatgatgaagtccctgttttcttcaaattggtgagagtcttataaatagttccaatcttgaaaatatgtgatcttgagtttgatcataaattcatgcatacaaagaaatttttattaatcaccaccttagcactttgattggggataaattaagagaaattcaatgatatcctcaaaaaaacttaagaattttgatattattactgaaaagctctctccttttctctcgtttgtttaaactcgttcaactactagttccaaaaaataactaacaaaatgtttagattcctctcaataccataaaattatcataaattaacttttttttcctattatgataataaaggtgggaattagtttaaaaaataacaatggttttatagactttaataagatagttaagagtttaagggtgtttgagaaaagttctaactagttgtagttactatattgtaagctttataggtttctttttacataaactaaatggtacttttgttttgagatgtgaagggatttgaaaca

SEQ ID NO: 20908 - DNA, 776 bp, Glycine max
  Intron number 1 from transcript Glyma02g15980.1 (locus Gly ma02g15980) derived from phytozome v7.0 (chr-ID Gm02; pos 14425897 to 14426672 reverse strand)
agaagccactgctatttccctttgcctgcatacgtgtaagcgcttttttccttcttcttaatcttttctatatgacccttctaattaatattcgttcccttttgcttttttccaccatatcgtgtgaattttctcaaattttgattgttttctgcgttttcctttcatgggggtgtttttgcgtttgccatttagtttcttttactctcgatggggcgtatttggtatttgtttaattattacagatagggatgtttcgtttttggtaattaaatacttttgaaaattctattttcattcatatgtgtagctacctcacaggccatctgtaatgtgattgttacagtacactcggaagttctatggtttggatcaatagcagaaactctagcagttatgagcagtgtgactaattttttcctgtctattttcttgtgtctgcacttctctagtgttgttttagcttatgaacttcacacatctgtttcttgcattttagtgcctaaaaagatataataggaaatcctattcaagtctataaaccattaaaaagccgtctttcttaatttattttgcttcttttcttatgtcacttggagttaggagtatatattgtatgaaattatgcctaatggtttttctcaattcccatggatattttcaaactaattgtttagagtttgatgatgtaaattttttatttcttgcgaatgcttcataggtgactagacatattaatcctatggaattttatatagtttgcaggaagtgcattt

SEQ ID NO: 20909 - DNA, 520 bp, Glycine max
  Intron number 4 from transcript Glyma02g38540.1 (locus Gly ma02g38540) derived from phytozome v7.0 (chr-ID Gm02; pos 43943483 to 43944002)
aggacaagagagagaaggtactaggatctgtctttatctacttttcttgccacttatgtatttgacttttgactaaattactttgctttcacttctgtctgatctattttcacataatcatagttaacctgaacactgactaggttctgtcagcatatagatcttattatcacaaatgattttatttgtgttaacatttcattagggtgttctaatttgtccaaaatgactttaaaccctaaaggtccatgtgaatgaaatgcccaccagaaatttgctctttggaaagtagtgtagatattgttggtgctactgtctgtttgtttcctaatgtttggtatttttaccattttcctcaaagggttcttgaaaaaaaattctatattttaaccttcatttattttctgccaaattttcagtttctgcttattgcagctatgaggtcaggtgaaattctgattgtctatttttatgtctcttcacaggggtcgattttctgatcgtaggaggtctcctcctc

SEQ ID NO: 20910 - DNA, 977 bp, Glycine max
  Intron number 2 from transcript Glyma02g14930.1 (locus Gly ma02g14930) derived from phytozome v7.0 (chr-ID Gm02; pos 13518338 to 13519314)
ggaattggtgagaaggtgaagaggaagaggaaggagtaagaaaatatttccttgtgtttgtagggacaataacaaatgggatggaaacaaataataactcaattctcaataaacaattacaatcaaatttatattcagcgtgattaatataaatagaattcaaaaagcaagaacataaaacaagtctacagaaaaaggatatatatttctattttttaggattatacaaaagtaatgctacatctaatccataaattgttaaagctttcataaaaatcagactaagcaataaaataccttaatatttttttcctctatctttggttgtcgtgcaatcctttctgcaacttgtccttcacctttgatcaactccaaatccaatagaagcaaaccctacgaccaacccaacaataataacagaaacagcataaataattggattgatgataattttctcataacctaaatataaagttgtagaaaaaaaaattggcgatgaacaactcattgccacgtggacttcttacaggtcccacggacgggtccgcccaaaaaatgaaaatttagattaaattaaattaaattaaaagatctcacgaggaacaggagctatacataaagtggtgaagacgattaattgaaaaaaaaaaaaaaacaaaaacaaaccctctcagcatttgtgtttttccgttgcaattacaacctccctcttcacactttccctcgtccgtcgtttccttggcttcttcttcctctgaacgcattttccgctgccgcaacttcgaagtcgccagctcagcatcctcgaaatcaggtacgaacccgatctcatcgtgaagctgatattgctgaatgaaaattcttcttgtgcttcttcaatgtcgtgaatgatctatgttgtgttgttctcgctgcaactgattctgtttaggttttgtttctgaaaagtctgctgctgcaggtggttgcaatctggc

SEQ ID NO: 20911 - DNA, 543 bp, Glycine max
  Intron number 1 from transcript Glyma03g23680.1 (locus Gly ma03g23680) derived from phytozome v7.0 (chr-ID Gm03; pos 30238988 to 30239530)
caaatcttgtccacgaccatcggtttgactactctaagctctattttcccatagtttgtttttttatattgatatggatataaaaattcaaattaatcattattactttagcattttttaatttctaatttttaattttttactacctcaatctacgtcaagaatgcacttaggtacaagttagtatattcttcaaatgcagtcaaatgactgataacttgaaagatggaaaggaatcagattatatttttgaaaaaaactatacatacatctcaattttggagtatacatgtataaatggaaaagaaaaaaatcagaaaaaaataactaaatgaagatagagaaattaataaatttaataaatgatgtgatgatgtgaaataaatataaaaatagggggaaaggataaaaatagatagaaaaataaatctaaatgtatgaatataataatcatatactaatttattctcaacaccacttgactgaatttttcatgtggatgatgcaggttcttattatcaattcctgcaattctgttagtgt

SEQ ID NO: 20912 - DNA, 317 bp, Glycine max
  Intron number 3 from transcript Glyma02g05280.1 (locus Gly ma02g05280) derived from phytozome v7.0 (chr-ID Gm02; pos 4278253 to 4278569)
ttctcgacctgtgtgctgctcctggtacatatttctttctttacccactcatgcttgtattctctatcttcttattgttgaaaaacaaatgagtgagattaagattgctttatttcaggaataaaatgtataaaatggttatgtttcaatgatgatttttcattttttttttttaattttttgcaggatgttgttttgtttttagttgaaagaacagctttgaatgtaatttatcagtttcctcgagaaacaattgaatgttgattattatggtatttgtaaacttctttttttttttttcaggtgccaaactttgt

SEQ ID NO: 20913 - DNA, 775 bp, Glycine max
  Intron number 1 from transcript Glyma04g40210.2 (locus Gly ma04g40210) derived from phytozome v7.0 (chr-ID Gm04; pos 46329297 to 46330071)
gctgatatttatatattgtgtcttcacacaccttggtatggttaataacttgtcaattggatattgttgttagtcccttttccacaacgtaaaactgggaagtttggatttacctaccagcatttctggaataagactgtaactttgtggtctttcctccattttgtatgaaatgacaatagtctaagtgccttgataatgcactgctggaaggggtttggaaaactcatcaacccgctactatttgtttgcaacaaattgtgctgcagtgctgcttactgaattttgtcgtgctgctgctaagtatgctcgtccttggttgcaaatttaccttagttgggaatccttaaaatgaaagaagtgattttgtttataaatgaattattgtataaaagttgtagggaatgatactcatttaagaatccaactcgtagagatcattttgaggtttatgatttgacatcttcgcacttctgataggttctaaatcatttcattttaattcaaaaactatattcctccaagtacaagagtattgtttcatagcattgtctatgtatggaaaccaatagatgcattgagtttagttataagccaccaatgaggcattaccctgcttcattgtctttattattaaatacatgttgttgcttgatgattccttatgtggttggacctaaatttcatcttttctcaagacacatttcgctctttcttgttaacacaaaccatttttctgcctgcttcagccacaccaaaggtcacataagctatt

SEQ ID NO: 20914 - DNA, 967 bp, Glycine max
  Intron number 1 from transcript Glyma05g04220.1 (locus Gly ma05g04220) derived from phytozome v7.0 (chr-ID Gm05; pos 3324743 to 3325709 reverse strand)
ggaaaggtatgtagtattcgtttgtgttaatgttttattaacgaaagttggaatttttatatctttatgcgttatatgcccatgtactgatgtacgcagtggaaggccttaaaaatttaatgctcgttaacaaaagtgggggggttatatatttacccgttatttatgtccgtgtatgcagcatacgttgtgttctttaataatgaaaatgatatgcaaggttgatgttagggaacgggtatgtttggagtattgattaggggatgaggtagggaaaggattaatgtattatcgaggttagactttagtctatgtatctcattgcacgtgtgatgattacttcacagcagtgttctcgttgaagcctacttgccggataaggaatttgattaagtctggtcatggcgtgcctgtgtatttaatttaaacggggttttattcattctctatgtatttggtgtattacactggggaattgtgtaaaaaactgtggttgaattttattttcaatactgttttttgttttcgaaatgcaactaaacaaggttgctcgcacagttggtggaggctggtgcaaggcatgaagtagagtgtgggattgaaggagaggctgaacaaatgaaaaagaagacgggaaagcttccctcagccgtttatgttttttggtttttaaaacacttgttctagaaacaatttttcaaaaataaaaaataaggatgaaaatttgatatctgagtagtgagtagtgtagaattgtttaagaaaacagttttaaagcagaaaagtgagagatgaatcaaacaggcccttgtgaattattttttcgtttttttggtggggggattttgctttcatgttcaatcttttctttttggtgaatatttcatgcactgtctgattgatgaggtttttcttttgttatcttgtaccagtttgaggactgcataaaagattgtgaaaaggctgt

SEQ ID NO: 20915 - DNA, 575 bp, Glycine max
  Intron number 1 from transcript Glyma04g42010.1 (locus Gly ma04g42010) derived from phytozome v7.0 (chr-ID Gm04; pos 47794744 to 47795318)
aacaaggttcgttcattttggaatttcgaatgtgaaaaaattatgtttattctttactgtagactgtgttgtcgcaaagtaaatgattttgtaatgtaacaatacatgacagacaaacgtgaataaaaaccataagaaagagaattttcacatggaagccgtgataaaggaaatgcatgcactaacggttgcatgatgaaggatgccgtggatgtaaagtgtcaaaatttgttgtgaaaaataaacgtaaggttgtttagtttaaagaatttgctatttggtcaaacactggtctatcagttaccaaatgttcattctaggaaagaaaaaagtaattttcttccatttgttgagttaatgcacgtgttaattcttaagttgagttcatacatgttttgaagtttgaattccaattgtctcttctgttatagattttaaatgttttttttaatcgacaaatgttagtttgttggagtgtcagttttgttaatagagaggatcaagatctttaatgaaagtgacataatgtaggcaagtatttgatcagacaggttggaggacctatcgcaggccgg

SEQ ID NO: 20916 - DNA, 386 bp, Glycine max
  Intron number 1 from transcript Glyma02g07700.1 (locus Gly ma02g07700) derived from phytozome v7.0 (chr-ID Gm02; pos 6082681 to 6083066)
ggagctaccaggtttgtctacgtttaaataagatctatattcttttttatattttaaaacttataaagataagaattgctttaatatctagaaaaaaattatggattttgatataattaattttagaaagattggacactctagaaaagtttttcaataatagcattaaaatctttaaattttctatcatgtcatagaatttctcttaagatataccatgtcaagtcaggttgacgtgtgttattcatgtgcactagaagagttttaattttcttaattttcttctttttgtatggagtgtgatgtggaagattgatgtttttttgtttggtgtacgtggatcttcaacagctaaggccgagtttggggagaaagagtggtacttc

SEQ ID NO: 20917 - DNA, 614 bp, Glycine max
  Intron number 2 from transcript Glyma02g07700.1 (locus Gly ma02g07700) derived from phytozome v7.0 (chr-ID Gm02; pos 6083328 to 6083941)
agggtgagtccccccacactacacacttataaatgtattttatttaacaacattttcaattttgcatgacaactaaagaaattcaagaatatgcaaaacttcatcatggatcttattgtcaactttattggaactttagtatatttttatgttttgattagttgtatttataaacagtgttaaaaatttctcattctatcatattactctgaaatatcggatttatggaaagtgaacaattcattttagagaataaaataagtaatatattcttacttgctaatgaaaagattaattaacacatgtattataaattatacatgtgtcagaatattaacttttttatttatcaatcactgaaattatttactcactttgaaagaggacaatcctatttcaagacttctgatattgttttgaaaaatgatttttatagctaaaacgtatcacaacttttgttacttttattctctactcttttttattttgaaggaatattttctatatgtgtataagaaaagaataaataaatagatgaatacatatatgaattaatgattcaatatttaaatagcaaattatatattattttgtttgtttgtttgtttagttgg

SEQ ID NO: 20918 - DNA, 363 bp, Glycine max
  Intron number 1 from transcript Glyma03g07300.1 (locus Gly ma03g07300) derived from phytozome v7.0 (chr-ID Gm03; pos 7723536 to 7723898 reverse strand)
cgttgggacgtcacctggctcgaagactagtccaggtgagatttttttatcaacaaatattagttattagtttcaaattagaattttcgacttcttccttttattaccaaatcaatcttataaatcatcattttatgagacatataaagtgaattgattgattaaagaaaaaaaagaaaaatatcacatattatttgattttctctcttaacaaacactcatctcttttattgattattgttaatcgttaatttttttcaataaaagaaattcaaatctccaacttttttctttgattattacactaatcttataattcttggtgcaggtgggtgtgaaggacgttttctccgtgccaggtga

SEQ ID NO: 20919 - DNA, 948 bp, Glycine max
  Intron number 1 from transcript Glyma01g31610.1 (locus Gly ma01g31610) derived from phytozome v7.0 (chr-ID Gm01; pos 42632904 to 42633851 reverse strand)
cctccgttgccaacatcatcggcaaacccgcggccgtacgttgttcttcttttatatgctattttatatttatgccgattattcggaaattgtgtctgaaatggtgaaattaaaattaggtttagaaatggtcgatgttggtcgcttataattggagtgtttcttttgtctattaagtatgtttgtggtgcttaaagaatttgttggtagctatggataaggtgggaatggttttctatgttatttgcctacagtaccatatttaagaatttatgaagaaaaaaaaaacgggtaaaatgtcgaccaatcgaaaatcatggtatatgtatgatttttaaagtagctaaatttatcatatgacaatttgtgataattgggagatggtgtgaggagcatttacactgtatgtgcatatattattaaataaaagaataaataatatatacatttacaataaaggtaatattatatacactctggtccaatcacaaattgtcatttataatgagtttttttttttaacttttatatcatttctgatttgttggcagtgtaaatttttatactgatagtacatgtttgttagactctagataaaaacattagcattttattatttttataatgagttatacccatttttaaaacatgatttccctctctggtaatttaaaatgttaattttattaattttacatacattatattttggctatgcagattcctattatttcttgaaaaaaataaataattgcattcttgtgtcgtgttatcttataatgctatccatgcgaatttgctcaatagtcaaatattttactgatggtttgtcttgctaatgataatttacgtttcttgctttgccataaaattttcatgtttttgacttgttcagactgttctaaagccttattaagttagtattcttccctttgttgcttttgcagt

SEQ ID NO: 20920 - DNA, 516 bp, Glycine max
  Intron number 2 from transcript Glyma02g41480.1 (locus Gly ma02g41480) derived from phytozome v7.0 (chr-ID Gm02; pos 46587316 to 46587831)
ggcattcattttgtgtattatagttcatcaagcaggtttgttcatgtttcctaactatccaggctttttttctcttttgtttagttcttcttattcctgcaaaatcctatcttcccctattcatatatgtggtggcctattctattaaattaaaaggcaaatataggagtggttggtgttcctgtgtatgataaagcaatgcttttgctatagtgttgttgctctttcccacgtgtattagtgtcttttcaatcttgtatactgtggcaatgtgtattttgtgggaaataaagttggattcatatattggaaataatatatctcttgcatatggtctctctattattatgtatgctgaccacagaaatgttaagcataggagataggacttcactgtttctttcagttgctagaatcagtaatgtttctttcctgtagcataatttttcaaattgcttggtgcattgattcttcttcttctccctctcttttttttcttttttgattcatgcaggg

SEQ ID NO: 20921 - DNA, 990 bp, Glycine max
  Intron number 3 from transcript Glyma02g41480.1 (locus Gly ma02g41480) derived from phytozome v7.0 (chr-ID Gm02; pos 46587874 to 46588863)
ctggcccttcggaggtatgggaataaaaaattcgtgtctcaaatgattcaattaaatttacattaattttggttcactgagctttgactgaatctttttctagtttagagatcatagcagacactatatcttaatgttataatttatgttcaattctcacttattatttgactatggaatcacggttgagatggggtgtaagtaacctttatgctttgcttttaaataatttttgttgaaatctttgataatattgatattttgctttgtttttttgataaattctcaaatgaattgattcatgcaattttgtttcagtactggcctaatggcaagatttaaaaaaataattagttttgaatatcaatcaatgaccaattttatgaagatggtaactcagaaagaaggctaagtgactaaaacctctcctgttaagtgatgtgactttccttggcaaatgatggtgaagttaaaattattacagtagttattgccttttaggtgtgcaattttttttcttacttgtaccacagtcctgtctttcaataattttgtggtgtaaatgcactttaaccatcttaattataactaaaatgacatctaaaatggattgattagaacatttttctcctgatgaaaaaaagaatatattaaaagtgaagagaaagttagaaatgtgagaacctagaggataaaatccttaataactaaaaaaattaagaccgagaagaaaagtgggaaaaaaaatttaagaacaagaaacacacaacacaccatgccaatttctctgtaaatcttacgaagacactcctctaaaaaacgattagcagaatttcacagagaatctaggaaaaccacttgatctgttaatcaatgctcatctgtttgaccttgtttgtggttaatttgtataccaaaaacatataagaaaaaatgtgacacagtgattatgcggtttggtctcatggccatgcaggtaatagttcgtaa

SEQ ID NO: 20922 - DNA, 794 bp, Glycine max
  Intron number 2 from transcript Glyma02g00630.1 (locus Gly ma02g00630) derived from phytozome v7.0 (chr-ID Gm02; pos 409772 to 410565)
tggtatgcaattttttatttagcttttgaggttattatattttcattcactttcagtggtcttttttttccctttctatttgaagtgtctgttagctgtaagtgaaaagggattgttttgtatgacatgaattcaatttttaatgcttttagtgttaaaatgaaatttgcagtatgtttttgtttggtctcctatcaagaaggtctattagaaggaatggaggggttgtaagggattagaccagagaacagctgttactgttgaccgcagtactaacagacttgactgttggacatttgagagcataatcagtgaataggagggaaataaataacggagaagtggagaagggtttgttttggaattgtgttagaagattgggtaggagatggaagactcttcaatttcctggattaatacaactagagttcttgcctctcatacttgaatctgaattgtcttgattcagagccaagttgcgagagcaattcactttaaagattcctaatttattccagattgtaatctttgtctgattcaatttctatcagtcttagtttcaagtagactagttgcctgtacttaatccacattttgatcctggctgtctttcatatgaaaaggagcactagacttgtacaaatctttgttgggctcttgcttcacacgtgctttgtgtcaaatatatgtttttctttttaatattattgttagacattacatattttgatgatttctgtttgtgtaaaatatgaatagtttgcaaactctatttggtctttatctgacgtggc

SEQ ID NO: 20923 - DNA, 639 bp, Glycine max
  Intron number 3 from transcript Glyma04g01700.4 (locus Gly ma04g01700) derived from phytozome v7.0 (chr-ID Gm04; pos 1136198 to 1136836 reverse strand)
ctaaactcctagctggaaatcgtatcattgctcaggttccattctttttccttgtctgctttctaagacaacgcaactattcatattatgctagcagagcttttcagaccactctaagtttctttccctattttatctcgcaagtttaaatacacttcttcccaagcacttataaaacaaaacaactaaaatttaacataaacttatatattttttaatctttaataaatatttaatttttcacttttcttcttaataaatttttattttacattgaatccttgataaaacaataattttgtttttatctttaatattttttttagtctctaataaattaattagcaaattttatatttatttatctaataaaatttattcatttgatatcaggtagaattaaaataaaatttattaatttattaggaaataaaaataaaattcattatttcacttaaaatatcagatgatataacttctattaaaagctaattgcctaagggttgatttcagtagaaacacaatttcacttcagtttcttattttattgttctagaagtgtttataaaaagtttattccaacaacagaacataaatttcgtagatactattagaaggtacttgagtggtgctgaatct

SEQ ID NO: 20924 - DNA, 1023 bp, Glycine max
  Intron number 1 from transcript Glyma03g31490.2 (locus Gly ma03g31490) derived from phytozome v7.0 (chr-ID Gm03; pos 39377914 to 39378936)
cttacactgccagggaggagagtctcaagaaagaggtaataagcactttggtgtctggttcatgcatttcgtgaataaattgattaattgttttaatgttatgttttggaattgttttgagactcgattattactgtgtcaaccaatcagaaattgttaattgtgctgacttttacattacaattacagtgactatttaaaagtcatccctaacatgatttctagaaattaaactctaattcgtttaggttctgatcagttcgaaggaggggaggacatagattttaattgaggagaaggggaagggaagtgggggattttgattagacacattccctttggttaagagaagggaggggagaagaggaattttaacggaaggaagttatggaggttaaataactcttttcttgtttggtttagagggaagacgtttactatctttttagtccctaaacttttttggatatttgtttttttttttttttaagtgtatgcttggataccaaaattaattctaatatctagttgaaggctaaagcaaccaatattttgcttcaactttttcaattttccaccattattttcagggtcaaaattgattttaggaggtatccaaacacactatatatagtatatgcattgacagtgtaaatgggattttacattctcatccaatcacaaattacaaatcaatatgtgtggtaagttagtttatttttacaatgactaccttaaaagtcataacaatgatgattttttaatagttgacattgttagtgcattgaaattaaactctaatgcatttgttgaatatgaatatttacttactttacttgtcgatgactataattatttggttcaatgtaatgtgatggtttcgcatttggggcattttcattgctttagatttagatgaataaattgttacaaactgttttgaggtgtaggtgttcatggttgtgactaggtttggttgattttttttttttttcaggaggaagcaggaaagctcaaatttgt

SEQ ID NO: 20925 - DNA, 719 bp, Glycine max
  Intron number 2 from transcript Glyma03g00900.1 (locus Gly ma03g00900) derived from phytozome v7.0 (chr-ID Gm03; pos 617769 to 618487 reverse strand)
gaaccttgccgaagtgtcaaggacaggtaggttatacttttattcatcagaagaagattaatgctaacaatacctgcatattcattttgctgaaatttgaaacttgtcaggacttgttaaattatcaatacggagtgggatttacattatttacataattttgtgagtatcattagtaaaaagtgtgttagaaagaatgtgatagatagaatgaaaatttatgatcctagacattgccaaaggaggttaatgaattattattattaggaaaatactgagaggtacacaacactataacagtttttgtaaatacaccggggtgaaattttatctcttaaaacattgtttctctcctcactcatagattcatccatctcttgattgattaaaaagttgttagcgacactcatatgtaaggttatttttaccaactaacaatgctattgtattgctatttgttttgacatgctttagttttgttaaggattggttttgtgatatgttagataatcgcgttcccaatcctgagtttgactcatcttgtcagaagctttttcacattccatgatttgcactatgcaaattgttttctctttcatgtttgacatgcttttttttttttttttgttaaggatggagtttgatgttcagataatcagctttaacatatatcatgtgttgacatctgttattgttcaaatgtcagaattggctatagt

SEQ ID NO: 20926 - DNA, 880 bp, Glycine max
  Intron number 3 from transcript Glyma05g07420.1 (locus Gly ma05g07420) derived from phytozome v7.0 (chr-ID Gm05; pos 7498511 to 7499390 reverse strand)
ggctaaagcaggcaaaagaagctaacagggttcaggtacttcaatttgcctacttctgtgtttatggagaaattattacgtgatttgggaataaccatcatggttttatttgtgagaatcgatcacaatgtcatctacataacatataactaagtattattaattttcttttctcgtaaattgaaaataaagaatgtgtctagatgttgactaggaccatatagactcatggtcatcccccactatttaataaattctcctgcatcttgtttaggcttaagcgtatgacagagatgcacttactttagtacttttggaatttgttcttcgtcagaattagacttttatctcaataaactttgttggcctttaacatagatcaaggctttaaattgcagtcacacttttcttttgtcagagaccccaaaacccaatcatggtcaaataccattcttttaaaacatttgatgtaaacttttattatgcagattatgttagcttctaatgcagacttcttcgcaaactattgatgtcaaaaacaaaaccataattacttaagtgactacatctaaacttgtttagtgttactttaaggacaaagcttatatgcaatatttagtattgttttttaatcagaattaaggtttcactttgataatttgtgcaataaaaggttaaaaagtttgtattaaagattaatacagataataaaagtaaaaccttaattttaattgaaaacggtaccaaaaacacctaagaaaatgcataagttttatccttgcattaattgcctgaatttcctttttttcattcctcttataatgtttgtagcgtttgttcttcacaaatatgtagattgattatacgcaacctatccaaa

SEQ ID NO: 20927 - DNA, 698 bp, Glycine max
  Intron number 3 from transcript Glyma02g06980.3 (locus Gly ma02g06980) derived from phytozome v7.0 (chr-ID Gm02; pos 5605824 to 5606521)
tctgcgaaaaatcgtcactgaggtgagtgtcaaaaccggcttttatgtcaacccgcttttgtgttactccctcggtaccagattatacgatgttttagagattttttttggttaaattaattttttccctctaatttattatttaggtttgatttgttcctctaattttttttttttcaatttcttcctttctttcgtctaaattaaattgggaaatgtgtcttttttcacggtttaaaattacttagtgacagttttaagctgccacaaactacaatttcttaatatcattgacctaattttgatggtaggatcaaattgaatcatttttaaaaaattaacaatcaaattgaatctaaaaaataaactagagcactaaaagattaatttaaccaattttttttaacaaaaccaatgctgcattaaatactttttttttttttttgaagactatccttaatcaatacttagtgggaataatatataggaagagtaaatgagtcattagtaagtaaaggggatatttttttgacagtacgataaaggtatattaggaagttacataatgttttctttgaaattcaacaaattaattgcattccttaatacccgtgtcaaaaccttaaatgtcatataatctagaacggagggagtactttgttgcagatattagtttcgtgttgtttttggtggcgcag

SEQ ID NO: 20928 - DNA, 393 bp, Glycine max
  Intron number 2 from transcript Glyma0448s00210.1 (locus G lyma0448s00210) derived from phytozome v7.0 (chr-ID scaffo ld_448; pos 9386 to 9778 reverse strand)
aacacagattatccagtaagaccgtttttctctgttatctttttgattatggtagaaaatcaccagttacaattttagttttgtttgaaaattgaattgatgaagatgaatatggttctataatgttggctagtgttttggtttggaatttggaatcatgtggtgttatgaactaataagtactgtggtgaaattctgatgtgtgttttgtttgttatttaaatttattatgttctgtttccaagtgaacaaagtttgatactttaatgtaagctctgattgctggcatacacttaattcagcctagcccatgtgaatcaatggagtgttactaaagcattacaattttgacatgatgtagctattgagaaagaactggaaactgcgatattc

SEQ ID NO: 20929 - DNA, 714 bp, Glycine max
  Intron number 2 from transcript Glyma03g40300.1 (locus Gly ma03g40300) derived from phytozome v7.0 (chr-ID Gm03; pos 46086879 to 46087592)
tggtatgtctttcttttcgactccggttttaatttgtgcaggcacttgtttggatacaataaagacactgcgttgcaaggcttaaatagttgatattataattgttattaaaccatgtctcttcttacgcagaattggttttcagaaggagtaaattccaatcataaattgtcatcatatatatatatatatatatatatgataagtttgttgacttttactataattaccttaaaaaatcactccaaccatgatttctgattggttgagagtgtaaaatattttacactgaatagaatagttaagaggtatcttctagtaccttgtaaagaccgctaactagctcgtagagtagaatagttatggttattgtaatcttacagtttggttcatttttatcataaacagactttagtcttttaaagcataatgatccattatcacctcttttgtcatttaaaattatttttagaattatagctttatgatgaaaatttctgcatgtgctgtttcagttaggttctttaaaaggaaaattttagaatctcacaaatcagccgctgccagtctatagtaattactattaggatttactgcatttttaaaaaatatttttgctattttcaaaacatgctgctgtttgtcactgtccgagtagtgatccttaattgttgtatactaacacttttgaattgttttttacgttgaagatac

SEQ ID NO: 20930 - DNA, 775 bp, Glycine max
  Intron number 1 from transcript Glyma01g38590.1 (locus Gly ma01g38590) derived from phytozome v7.0 (chr-ID Gm01; pos 50646327 to 50647101 reverse strand)
aaattagtaccacaaacatcaaagctgttatattggtaagcatacgcagcaaaattacatgctctaacaaacgatttttctttaattgcagtgctctccccttctcgcacgttacaaaattatagagaaaattgtttgcatcaccttttttagcactcctttatgcatacaacatactagacttgatcaagaagttacaaacatcaaataagatattcattgataaaatcaagtttttagaaaattcatgttgaggcatacgtgggttcccaaattattagtgtttgaagcaaatacccatctcaagcaatcttatttatttgcaaactcaatatttaaattaagtttcacaagatattttaattaattttttatttttttattaactaacaaatttgtttggttatttgataaagaaagtttaattatttttaatgtttttttattacatgttacttaaaataacattttttagaatgttatcttataactcttaacttttatatttttttatttttatctttgatatatttatcaaatttttatattacttttttaaataaattatatttttttattattttatattattttagttatttcaacatttaattttatcaaatccttataatttattaagttaattattcaacttttaactatcattttgttagttttgttgaagataacctaaatcttatttctttaccattaaacctatttgaaaattatttgactaggacgtatttactgctggaacggatacttcagcatc

SEQ ID NO: 20931 - DNA, 495 bp, Glycine max
  Intron number 1 from transcript Glyma03g34770.1 (locus Gly ma03g34770) derived from phytozome v7.0 (chr-ID Gm03; pos 42093342 to 42093836 reverse strand)
ccactccaaggtatgttgttgtctctctctctctctctccacacacacatatatcatgttttgtttcatgtcttactaggtagttctttcttgtccttggttttggttggttagattcgaaacatggtgaatgacaacaaaagagacaaaaaaaattgaattttgaaaagtgggttttgggcccttgaaggtaggctcatgtcttctctcaagtgagtttgaattagtctatattgacctcatggctttggcttattcatgaccaagtcgacaattgggggttaggtttttttttttttcactttctattttcatttttcataataattatgcaattattactgtcttaatccatgatttgctatatctggtgtgttcataaccttgtgggttttgacttttattagtgggttttgttgcatacagcatactgagtgtgtattaggactgttgattaggtgaatccattggattggggaattaagtgtactgtca

SEQ ID NO: 20932 - DNA, 907 bp, Glycine max
  Intron number 3 from transcript Glyma03g00740.1 (locus Gly ma03g00740) derived from phytozome v7.0 (chr-ID Gm03; pos 446169 to 447075)
ggcacagtggttaggtatgtggtggatgactgttttggtttacctctcatatacaatatgagtaattgagtagtaggttgtttcactgatgttagcatatagcaatgcctaactgtttttacattgtgagtgtgttcgttaactacagctaagctaatgatgttatatttttttttcctattaggaagttgtcttctctctgttctagcatatgctgactgacatgtttgttcctaactttctcagagaaagccctgcatttaatgttaagcacgattcttgtgatagtagttcacgcattccatgctataaatgctataagtgtttgtggacatgttttctatcactggtaattatggggtgaataaaatccaatgttttgggcactcttcaagcaaagaaagtcaaagatctttcttttccttgaggcctttcatttagactcgcaactaagaactaatctttgggctgtgaactttgcataattgatcatttctggtggaacttgtaagtattagttgactgaactgatggaggaaggtgattgataataggctagtaattgagtttgggggctcaatcacatggtgattggtgcacagcgtatgaggtttgaatagaagggggaagcattgcttggaatatgtagtttttgaaaatacatgaacttactaacagtgggactgtttatattatatttcaaagagccttgtttatgacgcttggaaaaaatgtgaacctataatataaatagttaacatctgggtttcatgtatgttttttctatatcttttcgtcattgctgtgtgtacaaataaggagcaagacctgcaacatgtcatgattttaatggtgattttgtgacctttagccttatttagttttattcatattgtctttgcagcaa

SEQ ID NO: 20933 - DNA, 429 bp, Glycine max
  Intron number 1 from transcript Glyma02g35450.1 (locus Gly ma02g35450) derived from phytozome v7.0 (chr-ID Gm02; pos 40334850 to 40335278 reverse strand)
tgaaccacgtgcacactctaatttccatcacacaggtactactcactacctagctaccatatcattaattttcttcgtataaataataatcatatctctatctctatctctccttaacccttctctctcttaccaaatctcttctgtttataaaaaagccttaaagtatttcactttacccctttcatttcctcctcctcctctttcattttcaagtttttgattatgacaaaaaaagtatgcacatagccgaaaccaatttcatctataccttatttaatttggaacgaataaattaacatataaagtgtgttaagctttttacatttttttttgaaaggcgtgtgaagctttatacataattcatgatttcttccctccttcactttctcaggatcttttgtgtgaagaagactagaaaaccagctt

SEQ ID NO: 20934 - DNA, 902 bp, Glycine max
  Intron number 3 from transcript Glyma02g40770.1 (locus Gly ma02g40770) derived from phytozome v7.0 (chr-ID Gm02; pos 45991384 to 45992285 reverse strand)
tgtgcgtggagccagagaggccgtggaatttaactgtaacgactttcagattctgtctccatttcctttttagtcaattcttgatttttcttgggatggaagaatgctttactgttgaaatttcatcttttttgcgctctttatattgtctgctaggaattggctctttagatattagttgcatgaagcagtttaacactagagtttaatgattgtgtacggtccagggtaaatttttttacactgttaaccaataaaaatttactattgatatgacttttaaggtaattattgtaaaagtcgtcaaatcaaacttactataggtggtggttagattgtgattggatgacaatgtaaaactgttttatagtgttagtatctgttttctcttaacataaagcctttgtaatttattccaaaatttgaatagagtttaattcatatgtaccattagtgtagttatttttcactctagcatccagtaggaattcagcctgctacctcgtcatatttataaataggatgccgtgacaataggggaattcctatttgatgtctgtaaaatgttttagtgttttacagactctggatagaaattaaattctttgaatatcatatgaatgtagctctatgttctatgaaggctaccttttggatttcttcccactcccacttcatctctacctgcttggtggtgtttaataacaagaaactaagaaagttcctgaactaggggaagcaaatagaattaaaaataagagtgcttgtagaaattaggactgatttactacaaactttttagtggccctgacaaaaataatctttgcacgtgcaacaatattcaatctctgtagcctaattttgtaggtacactttagaggatatcctagtattgtattgct

SEQ ID NO: 20935 - DNA, 898 bp, Glycine max
  Intron number 1 from transcript Glyma03g34200.1 (locus Gly ma03g34200) derived from phytozome v7.0 (chr-ID Gm03; pos 41682095 to 41682992)
ggtccaggacaaaaagagaggggaataaggtaagagttattatgggatccaaatttgctccccgaaaattgatctattaaattagaaatgagaagagtggaagggagttatgagataacatctcaaatctcattcagagagagagagagagagaatattgaaagtgtattagaagagaaagaagaaagattagagagttagcttgtcagttatgatgaatgctggctgaccaaataaatagagaagctgtaaactgaagagcgggagaaaaattgttccaattgtcacaaaacaagtgtttcaaaatagggaaagctgatactgaggaaagtcaacaaaacttattaaccaaattttattcttattttcctttgactgtttttaccatcttccattgtctgtgacaaagcgtggcattgaatattctgtatctgattcattttcctaggatgatcttaatatttagaatttcaaattatacatgatcgattgatcagcttcttatatgcatatgccgatagcctgatacttagattattttttgacttcccatttccagtgcctttttagaatgtgcatagtgatgtcaatgcacacagtttatataacgtgcaatgcaaattctgcattttatctgattccaagatacaatggatatgcttgactttacctttttatataatatagctttgtagttatatcttaaaaacctaaatattcaacttgacatgtcagaaacaagtttctactgattatgacatttgataaactttttgtaatgggacacttatcttcctataccctttttgtataataccagaatttgtctctctaaactgaaagtggcataaactattttgtaggttcgtggcccaacttgtgctaggaggcttgtcaa

SEQ ID NO: 20936 - DNA, 506 bp, Glycine max
  Intron number 2 from transcript Glyma01g43850.1 (locus Gly ma01g43850) derived from phytozome v7.0 (chr-ID Gm01; pos 54731324 to 54731829 reverse strand)
gaaatctcttgtaagttaattgctttgcttgatcttttcattttttttccctcaatttatgtatatccttctttaaaagccaaattattaatttcgatgcttgattgtcccttcactgtgttttggctcatggcctttccttatcgctgttggaggaatatgagaaggacaaaaataaacatatatgacattagctttgtcacttcaaatggccctcttagagataaaagaaaagagcttttagagattttgattgtatatggttcattgcaattagatttagattatttatttttcttggaactggtctctagctgccagaacagagatcgagtttatgaaaagttgatgaagggctcagtttttgtataattttgtatcattattggtattttactgaaagatcttaactcctgtgatatactagtatttttcctcttaacaatctaattcttttctgaatttatgtaggcaaaccaagatccacaatattggggcaacgcttg

SEQ ID NO: 20937 - DNA, 413 bp, Glycine max
  Intron number 1 from transcript Glyma01g43850.1 (locus Gly ma01g43850) derived from phytozome v7.0 (chr-ID Gm01; pos 54731844 to 54732256 reverse strand)
aaggctacctgtttgtcccttttctttccttcgctcttaaatttcccccaactaatccattcaatattttgcgaatctttttggtttttcacttcgaattcttattatttagttcaatcttcctgttattctacctttcttataatttgcccctgcttttttatttctctttctccggaaaatgcaatttaggagttgaaatgaaactcagatttgatttagtagctctttgctctttgttcataaaatgttgcgattgatttttgctgtgcattattcggagaaatgttcgtggagattattgagggtttcttcattccatgaataaagtatatttatatattgatactcgagagggttgtgcatttgtgctgtgctgatatcttttacattattgtttgaattttcaggag

SEQ ID NO: 20938 - DNA, 580 bp, Glycine max
  Intron number 1 from transcript Glyma03g38960.1 (locus Gly ma03g38960) derived from phytozome v7.0 (chr-ID Gm03; pos 45208037 to 45208616 reverse strand)
cccctcgctgctccctttccctcacaccccaatcggtaatccatttctactcaattttcactctttaagcttgtttcttccttatcttaattgatgattgctgtggaattttacattgtaattaaaaccccttgggaattctggtattttgttgttgatttcctggcttagcttccaactaagattagtattttggttgcacaataccagaggaatgaaaacaatgcttattaaaacgaaattatttgttggctttctactgctgttgctctaattgtaagcatgatggaagagggatataagacgaactagctagaaaaatagtgtgtttggaatgctatttccaattcagctacaaagagtaagtttacggttgactcaaaggggttaccagacacgcactaactctaataattttgtgtgcttgtaacttgtatgttccatagaatcttagtccaccatgcatcaaccttttcttttttactatcttggcatggtccttctacaacttggctttgattctatctctgctaatatataatcaggctaaagcttttgcagttccaaggaggaaagcatt

SEQ ID NO: 20939 - DNA, 795 bp, Glycine max
  Intron number 4 from transcript Glyma04g35820.1 (locus Gly ma04g35820) derived from phytozome v7.0 (chr-ID Gm04; pos 42296505 to 42297299 reverse strand)
aagctttgggagtggtcattgacttaggtccacaggttagttcaaaatatcaattgcaaacttgagtcttgatgaccacattgggatctatttgttcacagccacaattgtgtcggcaatgtactaggggtttggttttggagtcacaatggctacattgcgaccatttgtccacaaccacaattattttaggttgttgttctgggagtaatctatgcttgttgatatttgatgcaaacctttgctatgcatttcattgaggtgatacgatacgatacaataaccccgattggagaacaatactaaagtacctggggaaatgcatccgtgttttgtcctgttttttaatatcaaagatcgtgaaaaagcctcaagtgttaccaccactccagttcaaaaccttgcaaattacatttaacaatgctattctctctgttaattttgaaattgagattttccaatactgcagtgtatttctggttaactgcagaaaataatagtggtgagcttgttggttattttgccttaatatataaaggaggatggttaatctctaatgttttaggttttgtatgtgtatgtgtgtgtctccaccaatagcatttgttgaacagaaattattattgatagatgtgtttggtaatttttttttgcgtgtttttgcaaattagggggtgaagaggtgtgtggatgaagcaccgatagcatttgttgaacagaaattattattgatagatgtgtttggtaatttttttttgcgtgtttttgcaaattagggggtgaagaggtgtgtgg

SEQ ID NO: 20940 - DNA, 684 bp, Glycine max
  Intron number 1 from transcript Glyma03g33290.1 (locus Gly ma03g33290) derived from phytozome v7.0 (chr-ID Gm03; pos 40916517 to 40917200 reverse strand)
gatcctcctagcataccttttcgtctgtactccactcttcattcttaatttcttaacctatttatgttccataataacgtcttatatatccattttcttcgttttggatgtacatgtccagagattaatttcatatgacaaagttcaatttttgaatttatgttgtcttacctctaacggttaatcttatttgagatactaaatattttatgatatattttttttgttttgcttacccatgatattggtatgaattaagtagtttctatcagaatatatttctagagatcttcctgttaagcaaaagatatcgaattacatttaaatttgtgttcttagattgtttcattcatggtgttattttgtgtgtaatctatcctttgatcctcgttgttgtgtaaaaaggatttttcccaacaattaattattatcctgatttgatcgattaatgttttgtctttctgtgatatgtacatgtacatatatctggatggcatccgtaacatatatagagttaataaaagatgaattaattttagaagccttttcctaagcaatgtatatatttgtctataaagacattgaataagataagtgagtatcttgttaaatttctatcgataaaaaatgcatataattgtccttgcaggtatcaatagcgggttacactgcgggtcagcgtgc

SEQ ID NO: 20941 - DNA, 734 bp, Glycine max
  Intron number 1 from transcript Glyma03g02740.1 (locus Gly ma03g02740) derived from phytozome v7.0 (chr-ID Gm03; pos 2559916 to 2560649 reverse strand)
ggagtacaagcctttccgccatatcagccgcgatcgtaagatccgtttcgtattcagcttcgcatttttcttttcctgttccgtttttttcttccggtctccgattgtttcacagagaaatgttggtttagaattagaaacttggctttgaagcttcgttttctctctgtttgaatagagctcgatcggcatcgaaacatctctgaatctgcatttcatttggtttattttggaaattagattttagggtctgtcttttgaaactaaatggatatagtgcgtgtttgatttcacgttaaatgatctagaatcaccgtgaaaagccaattaacgtgactttgaatacataaatattcacatttttggttgcatgcaattgtgtcagtaaaacaatttatactaaactatccaaacacaaattataattacttcaaaatcaattttatttaaaattaattttataaatcaatttcatttaaaattaattttgtatcatgttttagttttctcttttaactttgatgagtacaatcatctaggaaatgaattaatagttttctcttatagaaaattgtgtgaaaagaaatatgaatttcgtaactctgatattttcttttatatttatatcaaatagaaaactaaatttgattaagcattgtgcatgtaattgcttcatttcacgacttgtttctaatcagtttcatggttggacgctaatagggttattaattgaa

SEQ ID NO: 20942 - DNA, 582 bp, Glycine max
  Intron number 1 from transcript Glyma03g38860.1 (locus Gly ma03g38860) derived from phytozome v7.0 (chr-ID Gm03; pos 45145214 to 45145795 reverse strand)
gctctttgatcatttgggtgcgtgatcatcatctttttctcaattttattttgatggggtcttgggtttacggttctactacaattcagcaatgaacaaagtgctttgcttcctccgtaactgttatctatctgaaaagttaaaaactctggtctcatatgcgattattcttctttgcatcacacttgaaactgatttttgtgttgttggtggttactcatatcttagattagtgaattatgagattatgtaaagacccgtttcttctgattctggtttcccttttttgccgttttttggttttttgttgaaatggttgcacttttttctttcactgcctcgtgcttcgaaaaattccgaagtgaacttcttttctggtactttatgcaattcatcaatgataatattaatatctgaactctatgttgaatcaaagtttgcttgatgtgtttctaaataatttctttggatatgatccaccatgtaggaaaatatttcaatttttctgtcccataatatgctcaaaagttcttatctattgatgcaggtatttggaaaatagttttgagttgaggatctaat

SEQ ID NO: 20943 - DNA, 873 bp, Glycine max
  Intron number 4 from transcript Glyma03g05130.1 (locus Gly ma03g05130) derived from phytozome v7.0 (chr-ID Gm03; pos 5411212 to 5412084 reverse strand)
gtactcaacgacaaggtccaagaggtaagcaataagatttgatgattagccaagaacgcactaacacttcaaaatagtagttgtttatgtatccaagaaaagaacttcattacactttaattataattattttaaatttcctgttatttttatatcatacatattagcactcagcaataactagataaattataacattttattatatttaaaatgatttatgttcatttttaaaacttgattcctcaatttggtttaagactagaatttaatgttaaattttataataatttacatgttttattataattaagtcgtattttatattttattaatttatcatattctcatattgtgttaaattggataatattgtcctgggtagaaaaaaaacttaaatatgttttttataccaataatatatacatttttagtttattatctaaattcttttattttattacatgatatttttaaaattttgttttgacacttattagtctttacgtaataatgtgataaactaatagaatactgcatgatatgttaagcgataatgtgacagactaacaaagtatcacaacttcatttaacgaatttaggctatgatatgtattaaaagaaaaagtttaaaaatgttagatagaagaaaaaaaagttaataaactaaaataggagtatattatacgtatgaaaagcatatttaagaaggaaaaaaaaatattgttcctgtggtatatatttgtctttgcaaaaatagtaatataagagactctagttatttgactttcgaataaagattctttatgatttgtacttttgtggggtctgattgaagaggcaagattggacttctttaatctacgtagatat

SEQ ID NO: 20944 - DNA, 744 bp, Glycine max
  Intron number 1 from transcript Glyma02g16830.1 (locus Gly ma02g16830) derived from phytozome v7.0 (chr-ID Gm02; pos 15171706 to 15172449 reverse strand)
acgatgtatgtatgcacctttatctgggtatttcatttttttattgtgaatttcttactatttcttattcaattttacttgcatggccctgattgatgattagattttgaaggaaaaaaactgttgttgcttcattcaaacttgagttcttgttttgtcggtctattaggcagtgcttctagtaaaaaccttggcagtggcagcatatgtttagggagaatatatcttcacttctttaatgcccaatgcaattctgattttcatgtttgttttttgtagggtaaaacactactactttggtccctgaaaatataaaatgttgtcattaatccttgaaactaaagaaatttaaagggtaaatagtcaaattcgtccttgaagtgtaagtgtaagtgtgatgtggtgacaaattagtccctgaaagatggaaaacataaatttattctctgaatgtgcaaaaaatgtgacaaattagttttgtcctaaaacttgtgagaccattttatcattaagttgtaatgttcaaaatcaatttgaaaataagttgtattctttgaggactaatttgacattaagttgtaaacttttgagaccaatttgtcattaaattgtctgcaagactaatttgttgcacattcagagattaaatttgaatttttattttagggccaatttttcatgtaaaaccaaaattgttggaaggttttatttggggagtttttattaaccttctctaggatagga

SEQ ID NO: 20945 - DNA, 569 bp, Glycine max
  Intron number 1 from transcript Glyma04g35600.1 (locus Gly ma04g35600) derived from phytozome v7.0 (chr-ID Gm04; pos 41990015 to 41990583 reverse strand)
cctcattcttattaaggtttgtgttccttcccttcttcttttttattattcgaatctgctttttttttttatgcctccgaatccgacgaggaagaaaaaaccaaatgattttttttttaaagacaaaataaaaaacagaaccccgtaattttctgtctttatgctattattatatgtttttttttatgcctccgttctatcaggttcgtggtgttttgtttttttgactctttttttttttcttctttgctgaaaattgtttctatttttgtgacacggttgtttctgtttctgaccgagttgtgggagatccatggctgaagaaattttgactcttgctaattgtggttttagatttatgtgttttggatgatgttggcttcttaatcattgtgtattcgttgtttttgaataacaaaacggttagagctagacacgtgttttatgatttttttctttttcttgtgtgtgtttgtttggataagttcctttttattggatctgtttgtgggtggtgttgattttgtggaccatgtgtttgatgttggctgttgcaggggtttttgttc

SEQ ID NO: 20946 - DNA, 996 bp, Glycine max
  Intron number 1 from transcript Glyma01g39880.1 (locus Gly ma01g39880) derived from phytozome v7.0 (chr-ID Gm01; pos 51722532 to 51723527)
aggtttgtgcaaatcatgttctgatttatgaatcatgatcattgtcgttgatgaataaatatagcctcaatcataagtgtaggggtggttttattcctgactaaatttttttagacagcttaactaaaacgaatcattgtattcctggctaaattagagcttgaattaaaacgaatcaaccaggtttggcttattgaagaatgccataatattatgtttaggggacgtttcctttactgttgtgtttagtgggctgaataattggttttgtttgaatattctgagtacgaccaatgtatatcgaagttgattgttaaatggctgcgaaattgagaaataacgtgctcattgtaaccttttgatagtctgtattgtttgcgtgtttagttagctcttaatcacaggaaaattgatgcaatgagttcgaagaagctccacggatattaatgtgaattatgtgaacagctgtctattttcccttgaaggatgttctgcattcaatagttcagtcaaatgaaaaaccggatggggagtcgcttaacggatttctagttgatccttgatagtttgtaatgcccaaagtttgaataaatagcatcatcctgataacttggcttctgccagtctggttttcattttattacattgatttttggtactgcttgcatcggttacttgataggaacatggatcaagttagtggtggggcaaacagactacatatttccaattttgaatatgttttacatggtctaatacatatttgttagtgtttctgctaattaattggctataatatgttcatcgtattggcaagatgaccacatacttcatgactttaactacgggaaatcttgcggagcaagagcatacatggagtctgtgtgggtaactggagtaaggtttttctttggttacattgcagggaatattgacataacagaataatctatgatgcattgcagattctttcagattctcaaaagagagcccatt

SEQ ID NO: 20947 - DNA, 452 bp, Glycine max
  Intron number 2 from transcript Glyma04g10650.1 (locus Gly ma04g10650) derived from phytozome v7.0 (chr-ID Gm04; pos 8865063 to 8865514)
aagcacttgaagctctcaataatctcgaatcgtatgtaagcctaaaacaccacactcacactcttttaccgcttttattatttgtctatgaatttgtatggtattgtcacattagttcctgaattgaaggaaattaaaaaacaaagtcccgaaaagtataaatcgacaatcacattagtccaaaattcaaaaaaatgtgcgactaaagggatagtattaacatatatttgaagactaaaatgatatttagttgttaatttagggacttatttaacattttcttagtttcacggattaatgtgacaacgcctaccacttttcggtttaaagtaactgtttcctcttatttataaagtacatgttttgatgacaatatatgatgtgcttctgttttttttttctttctttgaatggtgcttaggagtttgagggtcgtgtaatcaaagtcaatt

SEQ ID NO: 20948 - DNA, 605 bp, Glycine max
  Intron number 6 from transcript Glyma03g35830.1 (locus Gly ma03g35830) derived from phytozome v7.0 (chr-ID Gm03; pos 42933901 to 42934505 reverse strand)
ttttctttacaagaacaaatcgatcacaaggtaatgtaatgcttatattttgatcttaacagatcatttgctggttttaggataaaacagtctgatgagtggtttattttgatgtccatttataggttggttatacttggtgtgctatacaatgggatgccctcccctgcccctttgattcctactataaaaaattaagtaaattaaggaatcagaattcattctttttggatctcccgtgaaaaattatagatttatctaatgcattgctgaaaggtgtgaaaagtgtggctgagttgagtatttaaattttcatttcatattatattgtgcacaactgttgaatagatagaagaattgtcatgatgggattgtttctagtatgccatgtgcaggcttttgtgttggcatattcctctgtttctctctctttttcatgtttacatttttcattcatttcataaacttccatgcttttatgattgacattcatcattcttgatttggatcattttatttaacagtgcattaatgtgtgatagtaatctaagtcttcacttttcttgtgtgtttgtagattgacttcatcagagaggaattggaaa

SEQ ID NO: 20949 - DNA, 939 bp, Glycine max; identical to SEQ ID NO: 20232
  Intron number 1 from transcript Glyma02g40530.3 (locus Gly ma02g40530) derived from phytozome v7.0 (chr-ID Gm02; pos 45800002 to 45800940 reverse strand)

SEQ ID NO: 20950 - DNA, 497 bp, Glycine max; identical to SEQ ID NO: 16668
  Intron number 1 from transcript Glyma02g04040.2 (locus Gly ma02g04040) derived from phytozome v7.0 (chr-ID Gm02; pos 3242809 to 3243305 reverse strand)

SEQ ID NO: 20951 - DNA, 501 bp, Glycine max
  Intron number 1 from transcript Glyma05g02910.1 (locus Gly ma05g02910) derived from phytozome v7.0 (chr-ID Gm05; pos 2234235 to 2234735)
agaatccgtttctgatttgcattttgtactcactggttcgtattcttcactttttctcttttgcgttttctattttcattttttcatttgatttggcgatgtgatttattagcatgctgttatattttgtgttgaaagtaaaacggggagttgtgtttggtgctcatagagttaagtgacgcgtgtcgaaggcggaaatgcttgaggttttagatgtgtgtgtgtgtgtgtgtgtttaaatgttttctgtgttattatttcctgcagtttgtaataatcaacgtggagttaatggatatttcgtatttggttatatgcattgatttcgtttgtatttgagagtgttattgtttttaattcgttgccagattcaagtagctttttaacttgagcacgcttaatgtagcattgtgttttgagttgcgctgttattgatgaagtaaatgggattaactggtgaacgtgtgtataggtttggcttgtttttttctctttgtataa

SEQ ID NO: 20952 - DNA, 713 bp, Glycine max
  Intron number 1 from transcript Glyma02g41250.1 (locus Gly ma02g41250) derived from phytozome v7.0 (chr-ID Gm02; pos 46417265 to 46417977 reverse strand)
tttccgatttaactaggtaagagaattaaatatagatggcagtccatctgttacaatttttctgctgtttcctaattctgaacctttaccccttaattaatgtcttttagttgccaattttattgtatgtcaaactttcttatccttttgacaatgacttgtaattttgtcaccataaaatctgaggattcaaacttacatattagagatcgtttcatatgtacagggtacataccaaagatgagaaaaatgatcacactcttgttgttcatggcttggctgatgcttgtagattcgtttgtaatgatgcaaagtttctctcacggtactaccagtaaccttgttttggtcttattcaaacaatatatttttgtttgaaacgtgcttccactactgttcttcagtccacttttatgaactgtgaagaatcctttagttggagaactgtttgattatcactatccattcaattactcaattaagccatgttttaaatggtataaatattttagtaatattgagtcattccatgaggaattgtaacattgaatgcctagctgacttaaatattggttctcatgtcattgtcagttcatttcatgtaattgtatattttacaccattaaatatctctcattcaagaaattacagcaaaataaaattttgtcttgatgcaaagaataactgttaaatcttgtttcctcagtggcata

SEQ ID NO: 20953 - DNA, 510 bp, Glycine max
  Intron number 2 from transcript Glyma04g42670.1 (locus Gly ma04g42670) derived from phytozome v7.0 (chr-ID Gm04; pos 48362816 to 48363325 reverse strand)
ggcgaatttcgtgtatccgcttttcattcacgaaggttggtctctttgcacgtgttgctttcttagaacttagcgcttattacttatgtgcattttgagttaaacactgtttcttttctcactgtctttttgcactaaaattgctaaacagaagtaaccaagctttacaatatcagagaaagtgagaacttttaaaggtcaaggactgagaattttaattatttattttacaaaaagttttttttttttttaatttcattttcactgtcatttttaattataaatactaagaagagctgagttttagtgatcaaatactaaagtgagaatttaaagaagtcttggactgaggcgatgactagtacaatattagatattagaattggggtatactaattttcatttgttggcactactaggttgtataatatgctcttgattatttgattttggatcatgagaacatttgagtttgaacttgcaggtgaagaggatactccaattggggct

SEQ ID NO: 20954 - DNA, 726 bp, Glycine max
  Intron number 1 from transcript Glyma05g02220.1 (locus Gly ma05g02220) derived from phytozome v7.0 (chr-ID Gm05; pos 1637067 to 1637792)
caggtttaccacatgcatatatcaaaataaaatctttttgctctacttttcaaactcttcttaaccatattgatatgcttatgtgcaaatttaattttagtggggaataattaatattttggatatatatcctatcagtgtaacactcaccatttctttctatatttttctctttttatcatatcattttatttattatatctacgctttcccttttatctctgttatatttttctccttttgtcttatattttttatatattctatatatacttttatctcttctatctctgttctcttgatgtctactagtatagaataatgaattcccttcagttctcacacttaacaacacagcagtgaattacaacggtttgacgagagttttagcttatcaaagtttgtaattagaattataaagtaagctgctagctaagctatatatatagtgtcacaattatttgtttcttattcttttaaattagaatgttttctttttctacacgaaaggggggaaagtggaaaaaatacaagggggagagagaaggagtagaagaattagcagaagaataaaaagaaaagggaaatagtccaaaatgagataaacatgaggacactatggcagtacgtaataacgtaacacaattttttcatattcattaatcatttgtttgtttatacaaaatgtcagggcacaattcacgaggagtgtggggtggataattc

SEQ ID NO: 20955 - DNA, 861 bp, Glycine max; identical to SEQ ID NO: 17048
  Intron number 1 from transcript Glyma04g14640.1 (locus Gly ma04g14640) derived from phytozome v7.0 (chr-ID Gm04; pos 14769606 to 14770466)

SEQ ID NO: 20956 - DNA, 914 bp, Glycine max
  Intron number 3 from transcript Glyma04g04930.1 (locus Gly ma04g04930) derived from phytozome v7.0 (chr-ID Gm04; pos 3697411 to 3698324 reverse strand)
ttgctctgctttctctggccttgtctttgaaataggtaatgaatgccaaactagaatttctactgataatcatcacgtggaccagaaattttatgctaacttactcggacatactttgatgtacgtacacttagttattgatttttttaaggaaaaaaaaatgtaactttgtagtgacttaacgtgataaactgggtattccgtactcttttttttttttttaaaatcggcaaacaaataaattatcattgataggttacaaggtggggttatgatatatttatagcacactaatcattcatttgataggagagaaagtaggaggaaagaaaataaaaaaaaaaaaacattttctgtttgattgaaaatggaaggaaaatagaagaataacttgatttcttgaaacagatcgaattttttttattttctttccaattcaaattttaaaattttctttccttacttattttccttccatctaaccaaaggaccataagtataaatattagatggtcttgctaatgcgtcccattaggatattattaaagaattaaaaaaatattatataaattataaaaaaatataaaatagatcacagacataactttttgttttctaataaaaatatttttattttaaattttttaatcaatatccttatgacattgattagtatttatcatatcagataaaacaaaaggacttaaaacaaccaaacatgggccaacacaattaaaccccttacccctatgaaaagtgaaaaccatccctcccgacataaaatatccccacaagacagagtcaaaagaacctaacagcacactgagcacaggcacgggatatttcgtcctaataataatatgatactaaaccattagtttgcttatacattgtagttattttggaggagttgc

SEQ ID NO: 20957 - DNA, 648 bp, Glycine max
  Intron number 3 from transcript Glyma02g29140.1 (locus Gly ma02g29140) derived from phytozome v7.0 (chr-ID Gm02; pos 30555385 to 30556032 reverse strand)
gtaggtagttggttgcctcattgaacgataagaaggtcttcctttgcaagcagaagattgaaccttcttattgtgatatcctctaccccaacatacatataaataaataaaatatataaaaaatacaaataaacaaatttacgtggataaaaagttcagattcactttattattatcaaattaaaagcatatttggctcagaataagatcgtcaaagtttacaaaggaaattttgttaaatcggtgaggtaaaataaaataaaataacatcatgcaattaaaataaaaatccgtttccagtgtcacatcctatcaaagcatcacttctaacgtcctttacaaagttttttaaagtcatccacgtagtcattctcccacaaacacaaggtccgagatcatcattggatccaaacataaataacacacagggagtgagttatcacatttctaaaaaacaaataaacaaagacataatcaaaataaattatgaaagtatttataacatagttcaacttaatgcaatccacatcacttcaccactttatcatttaaaattcatttttcaatcaccaatcacaatacacgtgaatcacacactctggtcaagacgtaataacactcatcaatttcataatagacaattaacaa

SEQ ID NO: 20958 - DNA, 883 bp, Glycine max
  Intron number 2 from transcript Glyma01g01840.2 (locus Gly ma01g01840) derived from phytozome v7.0 (chr-ID Gm01; pos 1401023 to 1401905 reverse strand)
aaggtaagcccattcctagacgtagataggtgcatggatgtcttagttgttgtaaatgaattgaaactagttaattatatttccatcttgtgtttttgttcttaaatgcataggttctctcattttcgtaaatataatatttgtacttaatgtttatgctctaagagtcattttattgtaacaaattttgttttttaataaaaaaaatgccaaatttatggttttataaatatctttaattgagtcaaaagctggattcattttgtttgcatcaaaaggttagtttttacattctgaaactaaaatccatgtcaaatgctccctgcttcattagtgtcttttgatattccttggatatggatgccttagattctttatgtgatcttcgatctattttgtgcatttgtggaactgtttgttgataacttacatgcatattttgctacatttgagttggcatcagctgaatttttttctcaatgtttgtctagtatattgtttccagttcgccattgtaatttgattagatgaattaagacttgaattctaattctgatttggcaatcatataacttgccatcactgaaaagcttggtatcaactgctttaatgtattttgttttttaaataattaacatgttgcattaattattgcatctttctttcttggaatttgttcagttggttggtaaaactgtaacagtaatcaaatgcttaatgtccttccacctttttgcgtttctatggctctactttgttgtatagatatgtggctttatttcattactatctagatttttttgagtttatatgacagagcataattgtttttgctacatgcaattcagggaaagagagaaacaattctgaacctgaaaaaatt

SEQ ID NO: 20959 - DNA, 864 bp, Glycine max
  Intron number 1 from transcript Glyma05g04010.1 (locus Gly ma05g04010) derived from phytozome v7.0 (chr-ID Gm05; pos 3131946 to 3132809)
tccttattgccttaattgtactcgtcatttaccaggtcattccacaagccctaacttatgcttgttgcttccttgtgtttctttttttcgttttaatttcttgttaaagtcaacttagaagcaattttaagcgccccattttccgaagattggttctttagttcaagcattcaactgggtatatgtctacttgatccacatgcaactttgattgctgtggataacaaaaaaatgaagtcagttgatatttgaaaaaagtttaggaagaaaaagattacttaccaacttcaagagaagacacatgtgacgaaaattaggggtctgtgcctttgtgggttctcatctggtttctaaaagttttggacaatcttcagagtgaaggggatgtcttttgagtatttcttcagaatatgttttcaatgggcagaatgcgtgtgtcacactatttatgattcatactcaataaatatatgaacatttagttttaataaaacatggaagttctaatattggatgagtataatcataattaggttacattacatatgatgttttattataattttgaaaagaggtctatctactgaaaatgacctaattttgttatgcttttttctgttcaagtcttcatgttgatctattgaatattcttggagttaggattttcatttgtctctatgtccatgttctattatttttctgtttctgcttcagagccttctgaagattgttaagtgttattaccaccaaaatgcgatttgtcattgatattttatccaggagtctttatgaacttggttgttttttggtgcactgtcatctttttttatctggcttgattttgtttatcatttgttgcagtta

SEQ ID NO: 20960 - DNA, 1008 bp, Glycine max
  Intron number 1 from transcript Glyma01g01360.1 (locus Gly ma01g01360) derived from phytozome v7.0 (chr-ID Gm01; pos 985893 to 986900 reverse strand)
gactctgctgctttccttagaatctatactctcgggtacctttctctccttttacacccttcacatcaactttcacttttttttcttcaaaacatgaaacattgaaacaccactctctatatatggttgactcccttgttgtgtttgttttcaactagctcctgcagttttctgctcaactcataataaaattaccatatttttatcttatgtatcaaaagattttatttttaggcatattctgtagggttgcttttaatataatgaattctgggaattgtgacttttgtatgattgatgtgatggattattatgcggcgaccatgtttgcaaaattgttccttttgtattattttagcatacaagattttaactttagtcacatttgctatttttttcacaattaatttaatcatttgaaaaaaaagggagagaattatcttgcggctgtgtttctgggaattgtgattttgtttgtcgtataatcggtgtgttgcattgttgcagggccgccatggttggaaaattgttctaattctcaaaattttaagcattctgtggttgtatttgtatttctattctattctatgtgtttgattatcaaagagattctcgagttatgccgtgtggttttcaactttctttttggttttgccagcttttgttaaagccattccgtggaagcttcaccttatggggtgtaatccatgttgctacgttttccacttctccttttactctctctctatttctgttttctgttaacttttttgtgttacatgtgagggatgcaccttttatgtctatcatatattcatattttataccatcgtgtgatttgaactttacgtggcatgacttttagatcatgaaaattaagagaaagaagcgtctcttttttcaacttaatgttaatgttgaaattattttgttgtgttattagcattctgactaatttttatcttattttcagcttaaatatttttgttccaatcacacttgtggcac

SEQ ID NO: 20961 - DNA, 844 bp, Glycine max
  Intron number 1 from transcript Glyma02g15360.1 (locus Gly ma02g15360) derived from phytozome v7.0 (chr-ID Gm02; pos 13898145 to 13898988 reverse strand)
gataaccggtggcctcagaatcctcctgagttcaagtaattcaataccctgaatttgattagtctgtatttctgttattattatatttgattttaatttctgtgcgtgttagtataatgtttttttttttacacccttaactaataaaaaaatgacttataaggatactattattaaagtcaataattttatcatgtcaatccataacaaatagatataactaactattattaaaattaacaaatttatccatcaacttgtgatggaatgatattgttagtgtatacattagattctcattaaatctttagtgttggtgagttattgtaatctaattaaaaagtggttacagatagaataaaagtttggaagaaaccatgtaaaaagggagtttattttaaagagtcttgttaatcattgttgttagggattaattaaagaattaaaaagaaaaaatatttagtgtaaaaataataggaaaacacaaaaaatattttgggtaacaatttttcgtcttctaataaaaatatttatattttaagttatttaattagtatcctaaaaacactaattagtattttctattttaaatagaattattcataatttaatttttgacaaagtatggtgtgttggatagagctaggttattaattgttgtttaatctccttccttctatgttgtatttgttttttgttttttttacaatgataataataaaatttaaacttcagacttcatgcaaagtatataaatcccatcagtaagccgatcctagtaaattatgttgtatatatggactttcaataattatgcaaaatactgatctgataccagagaagc

SEQ ID NO: 20962 - DNA, 947 bp, Glycine max
  Intron number 2 from transcript Glyma04g39690.1 (locus Gly ma04g39690) derived from phytozome v7.0 (chr-ID Gm04; pos 45880328 to 45881274 reverse strand)
acaaggctactgctcatcatctgggcttgctgaaggtaagcacataaagttaatttgtttgattattaaatgacatatgaaaaaggaaaagagatcaagtatgttaataatgtgtgtgctgttctgaatttttttggtagttgtggttaactatcgaagacaatgggatgtcttgtttttgtttcaaatcaggagaaaatgtttatttcaaagtactgaaatattgacatgatcttatatgagttggttgaagtggatactggatagttgttacagggattgcatttggaagtgtatctggttcatgatgatattatttgctctacattttatattagaaattgtaggcataagcctcatagcacattctgcacatacaattgacctagtttgtttccatgtattaaggattctcattgatttttatattgacttatttctattcccttttctatattcattatggaagttatatttgtaggcgtaatactttcttctggtgctatctgcctactttgtctccacttttcatccatcatagtaatctctactgctgattattgtgatttatttataattttgggtgcatgttgcttatatatttatgcccctaaaggaatgctaacatataagtaaataactctaaatgtatggaatcttatcctgctcatctttgtttctattggcctcatggatcttccatatcaatttcttctgatatgtgatattgaagcaagatggttgtttctgtattctgcttctatgtggaatcaaccttccataagtatcattaggattttattccttgttgtccccttctttgagcttttcaagttcctcttctgttttcctgtattctgttgctgtttttgttgaggggttgattcattattggtaaatatctggtgccaggctaaattagcaaagttgcggagggaactccttac

SEQ ID NO: 20963 - DNA, 324 bp, Glycine max
  Intron number 2 from transcript Glyma04g21450.1 (locus Gly ma04g21450) derived from phytozome v7.0 (chr-ID Gm04; pos 24599717 to 24600040 reverse strand)
cagatatatcagtttctgacttgagccattacaatgtaagcctctaatttaatctattgcatggatggtccaattttttttgtttaagaaaataattttatattttgtcaccttcttgagagtgcttagaaaaatattgcttcttccatattaatcaaattaggggggtggagaaaaatatgaacacccccaaattgataaatcttcttttgaatgatgaaattcaagggatttgtctagaattgttttttacttactttgttcagttgttgtgtttgtttatgtgaaggttataataacacctgaagtcacttctcgtaaaac

SEQ ID NO: 20964 - DNA, 831 bp, Glycine max
  Intron number 1 from transcript Glyma01g05060.1 (locus Gly ma01g05060) derived from phytozome v7.0 (chr-ID Gm01; pos 4706573 to 4707403)
catcataatttcaagcagtaagttcaatcggtctccatttatttatcttttcatgatgatttcatgttttcaaatcaaaatctattgttcttgcattacaatttagaagcatttcatgaaacaatttagaagtgtattattatttttgtggttgacacaatcattttatgtttcctatgataaacaatttctcaaccaaattattgtaatttagattcatccgtttatgatacacaattattttgatttcgccataccaatcaaacatcatattagggggaaatgccaattatggcctatcgtcctatatgatataggagatgagtaattatgaatactagttcctctagacgatgaatagatcgaagagttacatagttgaatcttgcaggggtatcataccaagtcactttccaatatgaacagagtatgacctccaaccaaagaaaatgtaatacatagaattgccacatgaaaccatgctatcaagccatctaggattttcagtcacgggtcatttcattttgatattcgagagaaacaaaatccagggggagattaagatctgagagatgaatgaaccaaaatgacaatagaatctgttcaatcttaacagttcaaaagcgttgtgttgggtgtggtctcaaaagctgtaaaaaaaatgtaagaacatcccattattcctgctaacttttgactccagaaagcgatagctttattttttatgtaaaccatgtagagggtctagatatttctacgtctacaattctgtaatttcaagaaaattattgaaacatcaatcaataccaatacgtgtctttagttccagat

SEQ ID NO: 20965 - DNA, 502 bp, Glycine max
  Intron number 4 from transcript Glyma03g03350.1 (locus Gly ma03g03350) derived from phytozome v7.0 (chr-ID Gm03; pos 3108611 to 3109112 reverse strand)
agggaaacttgtcgggtaagttccttgccactttttgcctatgtagattcttagaggaagatatttttacccctcttccatctgctacactaaaacaaaacatgacaacctccctgtagcgtcccagtgccgctttgatgctatttaccactattgacaacctacttctcagtttgttattcagttcaaaactcatttgtatccttattctcatgctgcttaatttgtatgagaatggttggtgatatatgaattatttatactttgttgattaatggtgagaggtgacatccgataaacctctgctttgatatatgaaatataactaataagctggaggtggtgagaaaagaaagaaaaactgtttaatgttagtaaacttttagtagtgaaaggtcttttaaatagtttatttttatttttattttttgtcaatgtagaatttagcctctcattatgtatgaattgagttatactttatagattgcaagggaagtgttgg

SEQ ID NO: 20966 - DNA, 547 bp, Glycine max
  Intron number 1 from transcript Glyma03g26630.3 (locus Gly ma03g26630) derived from phytozome v7.0 (chr-ID Gm03; pos 34101000 to 34101546 reverse strand)
ccagaattccattattctcgaaatcttccattaaggtaaaaaaaatttcccttttgtttggtcttctattctgaacaaaaaacgtttaagatattagggctttggctaacaaattgtttgattggtcagaagaatttatttttaatttttcattctcatttgccttccttctattctactatttgttcgcatagttgtaaaattacaagaataagtgtctcaattggtagtgcccatgaactatttgtggaaatgcctgagctgcattaagctatgaaatgggtttcatgtctgcaaattgaggaatgtgcaagtcttgtcagctcgctcatgtcagtttatttgccttgtttttgttgtcccaccttgtaattgaaatggattattggattgatcgatgcttattgaatttccttgattttcttttctggggtaattacttggttcctagtgtattatttgataagattgatttggcaattgatcccatcctttttctgttttgtttcaagtcagcacctttgacttgatacaggttagcaaatat

SEQ ID NO: 20967 - DNA, 747 bp, Glycine max
  Intron number 2 from transcript Glyma03g31290.1 (locus Gly ma03g31290) derived from phytozome v7.0 (chr-ID Gm03; pos 39195095 to 39195841)
gcttcaagagaatctgacaggtaattctggttttggaagcaattctgtttaagatgctaacatagttcttattcatcacctggcatctctatggttggagattagattgcacccattacttgttttctcatgtataggagaaagaagtgattctgttaatcagggaacaaaatctagttgagcactatccttcttcatcttctatatttaaaatctagttttattatttgtttgttatcatagtctcattatctcatagataattactgatattgatataggaccttatacatttgggcttttgaaatatgtgttgctaaacccttacgttattggactggccactaaaagttctgccttatcatttttaattgtcaatatatatttcacctcttgggaaagtctggcacaaacatatattatggtttaaaccaggttctggtttggcttccaaatttacttacagtcatgatgcactccaatatttaatgaaattacagtattttattttgatatatctttctgaatcttctttgttggtatatatcttcattaaaattatatttcttttataactcaagagtatcagttctgtcttatattgtgtgcatgataataagccatatctacttcctgtatcatctatttccttagttactacttgaaaactgaaattttgccgttaacatccatctaataccctgaaacacattaatttatctcaatgttaccacctcatgaacagat

SEQ ID NO: 20968 - DNA, 918 bp, Glycine max
  Intron number 1 from transcript Glyma04g19450.1 (locus Gly ma04g19450) derived from phytozome v7.0 (chr-ID Gm04; pos 21196923 to 21197840 reverse strand)
catcatcaaattgaaggtaccattcattttctttttaaagttacatttattttgttacgttgatattatcaccattatcgtcaattttattattaactaatatctttcagaaaatgtgattaattcaatcacatttttttcttatgttagacttgaacaaatttaaggttacattttagtattactattacaactaagaattactggttttaatttctgcacatacattaaatatatgtaggactaaaacatgtagaagctaaaataaaaaaggactcaaacataaaagattatgtatatgtgtatacgtatagtaattaaacattatttgttgacagtagtaattaaacatttatttaacagtgttttgattttcttttttcttattatataataagtaaaggctttggaatctgatgcgaatataccctgcataaaaccgctatgctatttcaaacaaaaatttatttggaatctgatgcgaatatacccggcataaccggctatgttattgaagacgcgtctgttactgacggcgacgctaactttataatttactaatgaaccatcaatcgcggttatctctgtttgcgttgcgtcacagactagaatattaaatgcgctagctagctacctaacttacctaatgtagtcaacattaacaaaaaaaggtagtaacatttttttcaattctaggtaaaagattaatttagttatttattacacctcttttccattttttttcacctcaaaacaatttatgttttataatttcaaaagagtctgattaacttccaaatatgatcttatttaagtatctatcattaggataacttacaattttggtgcgcgagtaacagtttgttgtggttgaaatgtgcaggagctacaggatagggttgccaaagtaaaaaattc

SEQ ID NO: 20969 - DNA, 609 bp, Glycine max
  Intron number 2 from transcript Glyma05g07100.1 (locus Gly ma05g07100) derived from phytozome v7.0 (chr-ID Gm05; pos 7170198 to 7170806 reverse strand)
tacgctggagagggtcttgggaaacgagactgttggtaattgtgaaatgatttttgttctttggtcttgaattgtcttcttgtgcctctttccattacaacagaatgcaaattattgcatatattttgccttgtttttttttttttttactaatttgcaaacatgtgagggtgagccttgatgtgctagtaaggttgttgtcttgtgactacttggtgggagcctaaagcatttgctcatcccttttaatttgctaatgagtgatggaaattgaaatagcttgaaagtgcaaatacatttaatattttttcttttgattaaatagcttgaaagtgcaacaaaacatgcatatttattagtcatggaagtgaatattggcaaacacctaatctagaattcatttataggacaatggcaagggtggtttgtgtcctttttctcacttgtttgtagctattgatttatgtgacactgtgctgttctggtgtaattaaagctaggtattatggattggaggtgtattgaagcgtttttgaaattttaatttacactttgttcgttatccttattgcagctgagttattgactactaataaattgtccgaattg

SEQ ID NO: 20970 - DNA, 343 bp, Glycine max
  Intron number 2 from transcript Glyma04g33740.1 (locus Gly ma04g33740) derived from phytozome v7.0 (chr-ID Gm04; pos 39490014 to 39490356)
gttagaactgcattggatactggttgtggggtacgtcaaattataagtaatcatccttgttttgattgcatttattttgttggcctctacataatgtttgcatgaagaaactattgtccataatgagacattcctggctaattgtaagttttcctaggggaacctcccacttttgaatgcttcaccatgcaacattttcttattcattgaaatacaatttgtttctttttcaaaagttgagtttgagcccatatttgtgcccatttgttgtatattatagcttatttgctgattattgatggtgctaggttgctagttttggtgcatacctgtttaagaaaaa

SEQ ID NO: 20971 - DNA, 522 bp, Glycine max
  Intron number 1 from transcript Glyma02g11420.1 (locus Gly ma02g11420) derived from phytozome v7.0 (chr-ID Gm02; pos 9608430 to 9608951)
ccgattcttcaataatatcacgcgtttcttgtacggtatccatcttcgggattctattcatcattcttttgcttccttaatcagcacgcggattcatgtttctgcagcatccaatttgattacaaccccaattattctccaattactgccactaaatatttggtatctctcttatttattttcttcattttcggttgcagtgaaagatgtttatattatagatttagataacgcgtgctgtgggattttgggttttgagttccctgctttttccaacacttttgctccgatttggttctgattagaacaattttgctctctgacttgtatggatgggcaatttggaataaatattgctgctttctgttcaaatatgtgcttttttttctgatggaatttctttgctctgaatcttgctttgccggacctaggtttgtggaacttcattttttttgctggttgtgtgtttttgagtgctttgttgtagggataagtggtagaaattgcataaagtgtgtttct

SEQ ID NO: 20972 - DNA, 586 bp, Glycine max
  Intron number 2 from transcript Glyma01g07180.1 (locus Gly ma01g07180) derived from phytozome v7.0 (chr-ID Gm01; pos 7778754 to 7779339)
tattatttaaaggtggaactcaaagtacattgtttgtaaaatctaaaatgccttttttttaatgtttctgtatttttattgttatagttgtgaatttgtgggaatatataatttgatttttgatagaatataatttaaaccctttaattggaggttaatcattaattagtgaccatgttggtgacttggctagttcttggttttgaagcaaatcatatccaagtctcttctactaatttagtttttcctttatggcagatggaaaatacctgttgggcttgcttggtcttatgtttgtcggttagtttgttattaagaagcctatgaacaactattaagtttatgaaacttaagtagctgcatgtccaagaattctgatatttctcattaagatcctgtttcaatacaatttagaagagctcttctaactcacctgtttaggttccctgtactgcttccaaacttaaaactgttctaagttgggaaaatactaactataatttagatatttaaatatttaattcctttctcttcctctgacaaatgttcttacattgttcaaggaagcatttttttttggtgaaat

SEQ ID NO: 20973 - DNA, 524 bp, Glycine max
  Intron number 1 from transcript Glyma03g15880.1 (locus Gly ma03g15880) derived from phytozome v7.0 (chr-ID Gm03; pos 20217533 to 20218056)
cttcttccacactgtttcgattttccacttccaaggttacactccaaaatgcttgccgctattgctattattggatattctcttagttattactagttactgctccttttcctctgtttctttgttatttgctttgtgtttctatcttttgaagtttccaagcatacccaaattgttttcccttcttctatgtggtttttcttaacctcaaatttgtaaagttttcgtttttaatcttgaatacaattggtttgctaaattttgttcttggggggtgtaaagatctcagatatgggaactctcttggatttcaactcacttatttttaggggagagaatttatttctgtttttgttcttgatattctttttgataatttgagctgtcccccccccccccccccccccgatgttatggtgtgaagttcaaatatgctttgattctttctcaagtgcaggcttatcattggttttttcttgtgattttcaggataagcatccttatctgttattttttctcgcctg

SEQ ID NO: 20974 - DNA, 733 bp, Glycine max
  Intron number 3 from transcript Glyma03g30080.1 (locus Gly ma03g30080) derived from phytozome v7.0 (chr-ID Gm03; pos 38048799 to 38049531)
agtattccaaggaggtactctcggttctactttattactatctccgattacattgcatgtgtacttgtaaatattattagtaaactgtaaaaatataatcaaaaaatatatttaagagaagattaagagtaaatatattatgcactgtataagttttttcacacgttcatctcatcacaaattggcatgtatgatgaattgtcgacttttatactgactaacttaaaagttatcaacgtttatgattggttgacagtgtaaacatagaaattaaactcgaaggttagtttaattgatagaaaattattttagtggtaataaaaatataaaaataatggcatttgaaacattcagttttgaaaaatcttaaaatttaatttaattgtgttgacaatgatttgtaaatatctttttatacgcaatgtaaattatagaaatcaagtatttgctaaggaaattaagaaaagcaaaatgtttttttggttgaattactaattaaagaggaaaaatattgtcttgctttaatatgaaagctttgggactatgtgagaattagagtatgtatgtaggtcatcaactctcaggagtgaggacttgaatttttttatacaagggtgaattttatgctttctttgtatgaagtgacaataatgtgccagggtgctgtatttcactatttttctgccgataatgtacagagatcagtggttccacttgtcaagccacataactt

SEQ ID NO: 20975 - DNA, 857 bp, Glycine max
  Intron number 3 from transcript Glyma02g05990.1 (locus Gly ma02g05990) derived from phytozome v7.0 (chr-ID Gm02; pos 4815158 to 4816014 reverse strand)
gcagcagctgcccgtgattatcagaaggtaatttaacaattcttcacttcaaaatgcaaattatcttcacgattcgcgaaaaggaagacaaaacccccctcgctgatatgtgtgtgaatttgaaacaatttaagtacatgtttggatacgcatttgtagaattgattttgaaccaacgtgattttacagaattgattttaagtaaacgtgagtatgctgtagcgtgtttttcacttaacacttaccacctgtgtgagatcctaggtcctcttcctccaacgtgttgttatgtttagtttaggcctacagcatcataatttatatatttaaaatggtggatggatgtttatgatattggaacgttctttttactacttgaacctggcgggctatgcatttgcatgtgttttcatttggagtgaataaaattgtactactagtgctgctaccatggaatgatgaattggaagtgccggattcaaaactcttttaacttataatattgctcaggttttttctatgaactcctaccttaaaaagttatccttttcttgttttcttatcaaatgttcttaatatatagtgctatgtttaagaagcataccatagatggtgaatagttgaatactgtatgttttgggtgatagtttttgaagtactactttctcgtaagtcttgtgtggtttgttttttaaactaatttactgtttactcaaatgctaacattatgctatagttttctctggagagtgatgttatgcataattcttatgccagcagtgacatatctgtgtaatctaacatgtgctatgatacttgcaggaattgcttgctcaagagaagactcaaggatcaag

SEQ ID NO: 20976 - DNA, 386 bp, Glycine max
  Intron number 2 from transcript Glyma01g00790.1 (locus Gly ma01g00790) derived from phytozome v7.0 (chr-ID Gm01; pos 448654 to 449039)
cccttgcaacatttgaagaaggtatgatatgttttcgttgaggaaaaaacttagatattgttcctttggtgctgtttgtattgttctctaatcaaaattagagtcttacctcgacaattttcttaataaaagtttgcattaaagaattatgaggatatcaaggtgaaaaaaaattctgattggagaacaacacaaacacaacctaaacaactgtttctaagttttcttctttctttactaaaatttcatgtgcaaaaccaatgcgttactgcttagcccctctacttgaataagaacaaaatctggagcaaccgtaccaaacgattatgctttatagtttgaatgattatgctttaagttgattcaattatgtgtaaacacagttg

SEQ ID NO: 20977 - DNA, 918 bp, Glycine max
  Intron number 2 from transcript Glyma03g02530.1 (locus Gly ma03g02530) derived from phytozome v7.0 (chr-ID Gm03; pos 2322590 to 2323507 reverse strand)
agcagctccgcggtaaaaaataggtggatttgaataatgaattaatgttctgttccatgtgaattcttcatcctgttaaattgtatacattccatttgttatcattccaataagttattttgtgtattatgtgtttgtgtctactaagttggaatatttgtaatctcttcttctctggatagaatttcttgaagagtcttaggaactagttttctaatctaccttgtgacacaagcatctaaagctttacacaatatctctgttgtcttcactttgaacttaattcgcattagtaattcctgtatgttcactttgagatttagtttagataaccaaggcttatatttcatctagatctgtatctttgatctgcaatgcagttttataacaagttatataatacatatccgcagctggatatgcatatatattttaagagtaaaatatatttttagttccgatactttttttgtgaaatttggttttgatctcgaaactttgatcaatttaatttctgaactttacaaaaatcgtagttttcgtccttcttcagggtgaaaactatttataagtagagacaaaaaccattgttttttgtacacttcaggaaccaaattgaagaaaattgaagtacaaggactaaaaccaatttttatccaaagtataaggactaaaaacatattttagtcatattttgatttgcaatggatgtgcttaaaaatctagaagtatatacatcatacatttttagcttcatgatttggctggttttggttgacaaatctaaacttgttaaccaatttttacaattatattcatatacaaactaagttttgtggaaacttgttcatggaaataattttttcatgtactgtaattgcaggacatcaattggggacataaggagtctgcgactga

SEQ ID NO: 20978 - DNA, 716 bp, Glycine max; identical to SEQ ID NO: 16736
  Intron number 3 from transcript Glyma0430s00200.1 (locus G lyma0430s00200) derived from phytozome v7.0 (chr-ID scaffo ld_430; pos 1163 to 1878)

SEQ ID NO: 20979 - DNA, 538 bp, Glycine max
  Intron number 1 from transcript Glyma04g08770.1 (locus Gly ma04g08770) derived from phytozome v7.0 (chr-ID Gm04; pos 6897899 to 6898436 reverse strand)
attgcttttggatctattgcaagtctactggtaattttctttcttttctcttgtaatgaaggttttaaattgtggtcacagttgcagttttgtcacaatttttagcattgcgagaaattggaaggaaatgtgactgatgcggccgcaattacgattctgatacattgtttgtcactttttagtcactggttttgggaatgtttggatgaacacctctataagcacttataagagaagaaataggaagaaaaaaattaaagaagtttctccataagctaaaattagtttacggaaaagcttatttcatgtttccttcttattttcttttctacaagtgcttgtatagaaatttatctaaacttcttcatctccattgctcggcttagaagcttttgttttgatttgttttgttaattttgtatgctaatatcatccatgacctgaaatgataagtaattaccagtactgtgtcgatatacataaaatcagtaattaaaattggtttttggcccttatttgtgttggggttgtgcagggg

SEQ ID NO: 20980 - DNA, 460 bp, Glycine max
  Intron number 1 from transcript Glyma04g38730.1 (locus Gly ma04g38730) derived from phytozome v7.0 (chr-ID Gm04; pos 45074487 to 45074946)
ttcgtttctattcctcctcgtctttctctctcactgtaagttccgcttctctctctctacctttctctctgttacatcaagtcaaagattcaaaggagtaaaataattgtaggtcagggaatgctattattaaccatgtttccagaaacctttctcatgataaatgaaattcattctccactttcagattcttcatttctaacttgtgttcaactctctttcttctgactcattctgcatctttttctttctttgctccaaacaatatctgcatcaaatgcactttttattttaatcattcgtttcatatctttcatttaactctctactttttctacactattgaatagatgtaaatatgttatgcttcatagttcataatgtgtgtgtttctttttctatttattatttatctacatgtacagtctcttggggttgtgagaaaagtgctcgggactct

SEQ ID NO: 20981 - DNA, 943 bp, Glycine max
  Intron number 2 from transcript Glyma04g38800.1 (locus Gly ma04g38800) derived from phytozome v7.0 (chr-ID Gm04; pos 45117126 to 45118068)
cgccattatcagaatatttggagttactaaggaaggtttgatcgtgtttttgttttcttctatactacaaaatttggctgcatagacaccagtagttgacgatgcatttgagggtttctgttgttggtttactatcagtaagtcaagtgttgtttatattagaagtgtttgaagtttggtttggtcagtttgagggggaaacctgtcctcaccaaaccagtcagtttgcttttaattggaggagtggattaaaccttttgtttttttatgtgatctactcatcaacaaatttgccccgaaaatcttattaaaagcatagtcaatagatagaaagaacaaattaatgtaaaaagtttcatacattagtagaaaactaataatctataaatatgtaaattgtaggctatatatgactatatggctaactacacaatttcagtctggtttcataactgaaaactgaaccaaactatatttacgcaaaggaaaccaaacttattcaggtttgtttggtctttcggttgccaaattaagatttatcaacctacacatctggtttgtttgagtccagatatgaagtgaccaatgcttcagaaaagggaaaactgatgctctgacaaacttgtgctgaatatattttgtattagctgaaatcaaacccaacatcatacttggattttactttcttgaatactcagttgccttcttacatagttcatgttatgattttccaattacattacatgtatgaatttaagtgcccagaaataatctcttttaataaaaccagtatttgaaaaagttggtgtaaaaataaatattatatatgattatcattgtacttgtacttatgattatggttctcaagtcaaccatgcagtgccttataagaattatataataaacatatttgtttgtttgtcaggacacagtgtttgttgca

SEQ ID NO: 20982 - DNA, 460 bp, Glycine max
  Intron number 2 from transcript Glyma05g01290.1 (locus Gly ma05g01290) derived from phytozome v7.0 (chr-ID Gm05; pos 827030 to 827489)
aaacaggcattcaggtgcatccctgtaatgaattatttgtcttgttcgcttaatattttattttgaaatatgtttcttttgttgcacgcataaagaactgctgcttagggacaattcagcatgatgtgctcaaggctgtattcttttattagttcctcacccttcatactatgaaatataaagtaactgagttattatgttattacttattagtaaccacccaccgcacctattttttgaataggagattcaagtttgaagcttcaacctctgcctgtgagacagagttctcatcattttgtaaaaaatgaaaagaaataaatttcaattcgaaggctatatatgagttggtacttgattggaattcaacagatggtttgagacagagatctttactaattttttccttttgtttgacttatcagccctttgtggaaagcttgtccagctgtcccaaaca

SEQ ID NO: 20983 - DNA, 727 bp, Glycine max
  Intron number 1 from transcript Glyma02g36990.1 (locus Gly ma02g36990) derived from phytozome v7.0 (chr-ID Gm02; pos 42332071 to 42332797)
cgcaacgagataaggtgaaacaccaacgttgtgaggtgtgaacaaagtgggctctgttatcaatatcatcgtaatctctttctctgttcacgcaaaacttgtttttcctttttacttgttcctgttttgtgggagtggtcttacctattcgggtgagttttctttatgttgttttcatcctgttgctaatataacgccgtcaagattttatttttttttgtccctttttcgcaattttcctaacatattggaacgaattggaagtacggcgttttatctggacttaacaagttctgcttttgttgcatgttgcatgtctgtcacatttgttgggagattaaaacgatgcactgttttatctcaatcttctcactaagttccggaattacactttctccggcttcaattttcgtacaagtgaaagaccttttaaatctagcatcatgatttcattttcgtaatttagttttggtttctttgtttctgagaaattattgtgatttattagtgtctttgatttcatcgatttcttgaaattttttcatttataattcttggtgaatgtcaaagctcaaaggccttattgatcgcatgtcaagattgttgttttttctttttatttaattttggtttctctgttattgaggaatctttatgattcaaaattgagtgattagcgtctctgatttcaggggtaattgaaactttttagtggggtttattggtc

SEQ ID NO: 20984 - DNA, 963 bp, Glycine max
  Intron number 1 from transcript Glyma03g42090.1 (locus Gly ma03g42090) derived from phytozome v7.0 (chr-ID Gm03; pos 47389189 to 47390151)
gagcccgaggtttccaagagggttcccagtgccaggtgaactctctgttcttcttaaccattcttttttagtagttcattacaccgtaacagaacatgaaattggctagttgaagttacgctgaagactctattttgttgaggttttttcggttcagatcagcgggtgttgattcacaattggcttaggattagatgcgtttgtttttccagtgcatgactaaatttgtaaatttatgaattgtaattcttttatgagtttaaatcacttcatcttctacagaaattacatgagaactttgataaaagtaaagtacataattagtacttacagagaaatttatccatacgtaacctttgtaatgaactaggctacataatgtcctcaatcaggaccacatctttgtgtgttcgttgatggagaaatgtttgtaatttttgcatccaacggggtgttctgaaacggagaagatattgggttttgtgttgaagttccaaattctagctaggaaactttggtttctaaagttgagatgccctgatattttatgagccttcccagcatgaagattttggctttgtcccttggttgacgtctgttcgaagttttattgttgaatgcattttcaattgaaacaagttgcttgatatctgcgaattaaaggtttgatgacttagagatggggaggaattaaacagtcgggtatggatttattgttgtaaactcaatacagcttagaaaggttctttgattggtcttgtggttgttggttgtaatctcttcaatgcctcttctctgctcagtggaggcaagaaaatgaaaaaactatgctgggagttgattgctttacctttcactttcatttatgtactaccctcttcctctcttttccttttaaatccatatttgaatgagttcatatgttcatgcagtgcaaaggtatttggagtttctgcaaagtca

SEQ ID NO: 20985 - DNA, 659 bp, Glycine max
  Intron number 1 from transcript Glyma02g46140.1 (locus Gly ma02g46140) derived from phytozome v7.0 (chr-ID Gm02; pos 50191601 to 50192259)
gtcttccattacaatcgcccaccctcaattccccggtaattttttaaccccttttcttctctttctatctgcttttgtattttagagatggggtgttatgtttatgtttggtttttggtaaagctttcacctttcagtgccccatgataaaattgaacttggtctgttctggggattaattgaaattgaaagactgttgacaaatcaatactaactctgaaatgcagtggttctttatttctgtcataattttaagtagaaaacttttttttttttaaaaaaacactacaacactcatttgggccttttattgcgattgttttctgctttcatcatgttgcctggttttgtggcaagtgctcattgtttaattaggttttgaccttagactctgtgttttgtatgactatattttgctgaaattatgaaactcagtttgagttttgcccctgaatagaatgactaaaatttgttttctttgaaggagacactatgcgggtgttagttgtgagaggtttaggtagtttaaaccttggtggcacggcaccatgcacgaattatttttttcataaacatgtgccacagaataggcattaacaaattatttgagaaatttttctgcaggattactgcctaagaaggcaaagcctctgagttta

SEQ ID NO: 20986 - DNA, 528 bp, Glycine max
  Intron number 1 from transcript Glyma02g07100.1 (locus Gly ma02g07100) derived from phytozome v7.0 (chr-ID Gm02; pos 5662349 to 5662876)
cattgtaacactagctttgggaagaactaagtaataatactctttccttttcacctcaaatatactccattctttattttcggaacttatggctttaatttgtcgatctgtctcaattcattgtctgcttcaataatggatgcagatgagacgcttgaagaagtgagaaaatgaaacaaagacaattgaatatcaattctataatggtaagacttcaaaatttcttgtctctacattcctacatattaattaatacaattttggcctacgcatttgctagttgccgaagttgataatgccaatgattccctactctgcgtttactttatgcaacgagacaaaacaccacatgtcacaagatcaaattaaaaattggcgtcatgcgtggaggtcgactttcatatagatttgataagatttttaggttttagatatattatcctttctcacgttttattaatatacttcctattatagtattattagataaatttcacataaatcaaactaaatagtaaatagtataaa

SEQ ID NO: 20987 - DNA, 848 bp, Glycine max
  Intron number 1 from transcript Glyma04g32470.1 (locus Gly ma04g32470) derived from phytozome v7.0 (chr-ID Gm04; pos 37274434 to 37275281)
catcgccatttcttttgtaagccattgattgcattaacaacttctttcgtttgcatgttacgcattgttagctttcatttttgtcaataaaaataagtaaagagtttctttaaacgagcgaaggatcgtatgaaccttctcttttattttcagcatttcaaattttccaacggagggtacaaaaattaagctccattaggattaggataaattcctaatttttttttatggcgaataaattcctaattccttgatgctgaaggcatattctttgctgtttgtagaaatttgcaattttatcaatgtgatgtaatgtgcttgattttcccccagtctcacgggaaattgagaattataatagaaatttcttgtatatgtttgtttgagtcatggcttctaggtattgacataaggtttttggtttagtgttgttattttacaattaattttttccactggaaagttgctttgtgtgagtttcaatattatggcccataatcttggcttaattggttcatggaatggattggctaggcttagcattatgtcaaaacaattgaatgcagattttaaaatgcacactaatatgatatgtctagactgagctgctcaattgtgttatgtatcattatctggatttttggtcggcagaggcacaacctatgagaaaattgagccttttctttggacacaaatcttatctctttgcattatacaccttttgttttgtcatataaccccccttttcattttctcattcatccctccctaacaaaactttattgtggcagaaaattgttcatttgtttttaaatttatgattagaactaatttgatattgttgaagt

SEQ ID NO: 20988 - DNA, 614 bp, Glycine max
  Intron number 1 from transcript Glyma04g37510.1 (locus Gly ma04g37510) derived from phytozome v7.0 (chr-ID Gm04; pos 43918218 to 43918831 reverse strand)
aaacttgggctttcattttcggtcttctaggtagatactagctctccatatccccatgccagtttatattatcacttttattttattttattcttaattaacttagttctacctctatcacctactatcatatttttcatcatttttagcatggcactatcctcctttgccatgcatctacttacggaagtttggtttgagcaaacttactgcagttgtacaacatggaaatacgtaaaattaactttagtttttaactatttggaactgtatataatatttattttattaatttataatatggtggaaactggaaccatatgtggcatgcagattgcatgacatttttccagtttacgaagaatgatcaattataatacttgaaagcgacactaatgaattaccatagcaacaatttaatttaactaaccggtgtgcttctctaatatagttataacttttggaattaattgtgtatggtgtgaattctaattttgcatattactgacggaatcaaaacctgttgatagaaataataataaaaattgattactatttgttccccactgctgatgaatgtttcttgtgttattataggcaacgtgatctccttt

SEQ ID NO: 20989 - DNA, 558 bp, Glycine max
  Intron number 1 from transcript Glyma01g30350.1 (locus Gly ma01g30350) derived from phytozome v7.0 (chr-ID Gm01; pos 41014710 to 41015267)
gccaagcttcttgtggcgtgtggagaagggttaaggtgagtacacggaagaaatttttgttttcagaaaatatggttaattggttatagcaaattatgattgtttatgtagcttagaatttttaatggacattaaaattttgtttccttttttgcacttaattgaaatggagttgttcctgttcttggtgagaaagtttggtaatttttatagttagcattctagtttatatcaaggaacttgaaactagatctaattaactttcctctagaaataatctatttatctttctagtttgttttccatgtaacactaagatttataagcttataaaaatgtcacacctgatttcatagttaataagctctaacattccttttttaatcaagaaaattattaatgactttgaattggagctttatattagtttgtattgtaggtatgactttttccaattcacaaaatcagaacttaaattcatcacagcaagaagaacaagttgattttgacaataaaggaaaatgttaacttgttggctttggtgagtgattcaggtca

SEQ ID NO: 20990 - DNA, 374 bp, Glycine max
  Intron number 1 from transcript Glyma01g38670.1 (locus Gly ma01g38670) derived from phytozome v7.0 (chr-ID Gm01; pos 50756126 to 50756499 reverse strand)
aatctgtggcattgtgggtcaaggtaaccataattcttttaatgatgaatgtttgctattctccctacattgggatttttggttgctcatgactctaccctagcttctttaatgttgtctatgtattaaactctgaattcactactctaactgatctggaatgtgtgatcatgagaaattattcattaatatctaggattacatttttctttatgccggaaacctcttcagacatatttcatttagaaacttagaaggtttcactctgttaaaaaatgtaaaatcaaaatgaaagcttttctaattttctattctttgtgacttctctgtcttttttagtggagagggaagtggcaggctggtatccggtgtgc

SEQ ID NO: 20991 - DNA, 839 bp, Glycine max
  Intron number 1 from transcript Glyma01g24100.1 (locus Gly ma01g24100) derived from phytozome v7.0 (chr-ID Gm01; pos 31276232 to 31277070 reverse strand)
acggtaggtatcaaacttattttttcatttgattttatcaaacttaataaaataactctttcaataactttttatcaaaaagtaaattttataaacgttgattttgaacttcatataaagtagatcatgtctacaaattaaatgaattaaagattaatttatactcgtatatatggctgtgatctgtttactgaaggacatcttgtgaaacttactccatttaataacttcttgtggccattggaacatcgacttcatagatagtgtgctgtatgctttatacaatattatcaaatgtttactaaaagataatcaacaatgaataatggttatggaagattatatatcatttgattaaataattaaatttgtcaaatccacattctataaaatgatatttagaggagtaaatatccaaaacttatgtatgattttatgtaatgttttcctctgacaaatctcccaagtaaaatcaggtgctgaaggaggggactagcttcgtattgatcctgattaattgtttttttcttatgtttgcaagctaagcattggtctctagtttgatgaaaatgatgacaatacttttactttattgagtgttgaactcaattcttcatgtttgttgttagtgttatttatagggcttttctttctggcaatatgttgagtggattgtggttttataatggttttgtgcaagacagttcttaaatttggagtctgatgtctccgccattgctggttaccgaagatgaagggcagtgccatgcctcgatggtagcatctgcatcttcaccatccctgaactgtttctccctaaatgaggccggatttaaaga

SEQ ID NO: 20992 - DNA, 406 bp, Glycine max
  Intron number 2 from transcript Glyma04g35390.1 (locus Gly ma04g35390) derived from phytozome v7.0 (chr-ID Gm04; pos 41768329 to 41768734)
tcatatacattgttttggctatattactaatcaatgtaggatctcaaacataaaccgatgatgctgtcagttaagtagagtaaataagaatcaatccatttaattacaaaatgaaaaaattgttcatcatcgaagaaactctgttttcttgaaaggagtggacttttgcgatgatttggtgatgggtcgttttggatccatggctatgcgttttgtaactcaaacatggccttgggtgttgttttgcatctgaaaatttatgtgattccagttgatggtattggatttctggggaatgctgactataatttaagtagaattattatgtcttgattgacatggtggtttgcttttctgtatttgactgaaaaatgttttgtgattatttaattaacgagcagttaaa

SEQ ID NO: 20993 - DNA, 446 bp, Glycine max
  Intron number 1 from transcript Glyma05g02000.1 (locus Gly ma05g02000) derived from phytozome v7.0 (chr-ID Gm05; pos 1446850 to 1447295)
ccctcctcttgaaggtattacctatcattattattacggactagcattattctctatcagaattgaagttttacctagataatctgcttaatagtagaagttttacctaggtcatcacttattgaagaaagaaaatacttaagagtctgtatttaaattttgtcttgtttaatatcaacaggtacgaatgtggggatgggagggacaagaaactttaagtgtgactaacaaagctctaaatcaaggatttgtcctatagtcggtcaaaaagactgaagcttgtgagggatatcttaggatcctgttagggtgtcaaaagccttacatacggtggttttttttttttttttttttttaaaataaaacaagtatgaatgtcaattaggactttgatttatatgattaatgggtttttatttatttgattttttttttttttatgtcag

SEQ ID NO: 20994 - DNA, 839 bp, Glycine max
  Intron number 5 from transcript Glyma0042s00200.1 (locus G lyma0042s00200) derived from phytozome v7.0 (chr-ID scaffo ld_42; pos 2509 to 3347)
aagatctttgttgacacagctttgatatctcaattaacccttcaaatcacctaaacttttatcttttaattaataataataataatataagattactagtttatcttatttttagaagaaaaatgtttcataaatatcttatatgttattctatatctagaaagaatatatatatatatatatataagtatagtaggttttatgatttgataagagaaatagaaaaaaaaaagtgttgataagatgattaagataatgagtattactccttttacaatccttttcctttggccatcgtaactactatttttgaatgagacaaatttcttggtaaaatgcagtacgtggagagtcactgctaatagctaattcagtttaaagatcaacttcatttgagttcacaaagaagatatcaataggagtattaatgcaattcctcttctagtgtagccctcaccaatcgttttgcaattccctacaatgataaaacttaccttttctcaccaattggctttgctatttccaaatgtttatttgtttatttatactaactttttaatttgtgcacataaatatactaagaaatagtgtaacactaaaccattaacttgagttgttacaaaaaaaaaaccattaacatgagtgtgcattttactagttttattgagaagcatatttaacattttaactggtgtgtgatggcaggtgttgatgttattcttgattgtatgggagcaacctactatcaaagaaatcttgatagcttgaattttgatggaaggctttttattattggctttcaaggtggggttagtacataaacagatctacacccttta

SEQ ID NO: 20995 - DNA, 747 bp, Glycine max
  Intron number 1 from transcript Glyma01g01900.2 (locus Gly ma01g01900) derived from phytozome v7.0 (chr-ID Gm01; pos 1494987 to 1495733 reverse strand)
cggagcctgtgacaaaaagtaataggtgactgcgggtgagcatatcaaatccctagtgtgaatcttgcgtgtgtttacttggaaaaggagtagcgagaaattgcaggcagaatctaggggtaacgcctccattatcagtcctttttcaggcgtggtttttacctaaccctacaattcgccgatccttccagttggggtttttcgctttcagcgaagagcggtgtatatagaaaccctattccccctatgcaccaggggaattgaatatagaaataagaaaaaggcaaaaaaaaaagaggttgaaaaagttgtatgttaaataggtaattctgttgtttttcgtgtttctggactcaggtaatttctaaagcttatctcgatttttccatgtgcttttcgtttcagaattttaacatctgccagtgtttaggactttcctctttttgtgtccgtttgactttgcgatttggggcttagatttagtagatcgggattgggtttgcttgtttttgctgtttggaacgattttctgtttatttgtattttttttaagctgactttgcttttagaagtgatattgatagagttttatttatctattttttttggagtggggagtgttttatttgttgatttttgatacggtgtctttggttgtggttataattatgcagtgtttttttttttaaagaatttttattcagttaaattctgtcatcaggagctgagctgtttccagggaaaagc

SEQ ID NO: 20996 - DNA, 310 bp, Glycine max
  Intron number 1 from transcript Glyma03g42370.3 (locus Gly ma03g42370) derived from phytozome v7.0 (chr-ID Gm03; pos 47621482 to 47621791 reverse strand)
tatgtatcctccctttcattccattaccaaattagggtttcttttcaccactctattattggctttcagctctgaattatatgtaattgaggttctgttgctgcctgcctagttattcaaattccaatcacacattgacctttttctgccatcacttctccttgtacttgatggatcaaaatatacacttttttttatgactgctcatctgtactgtctgtttaattaacaaaatccttttatgatagacttagactttggtttatgcaatgcagggtttggggccttattccaccagcataaaaaaagc

SEQ ID NO: 20997 - DNA, 885 bp, Glycine max
  Intron number 1 from transcript Glyma03g23860.1 (locus Gly ma03g23860) derived from phytozome v7.0 (chr-ID Gm03; pos 30500713 to 30501597 reverse strand)
gattttgcaaggtaactaatttcagtttttatttccaatgtagtatgtacatgcttggtcaaacagctaaatataacagttcttttcctctgttttgtatctcttccctttctctctttcagttacttctttttttgtcaaagagaatttatattgctgatataaaaagagattgaaccaatttctttgctgttttcttaatgtctttctgtttattagggtttgttaccctccctgcttttaccttctctccttttaatattttcttctatcgtaaaagattatttgatcaaaagtgattgtacggccttggatcttcttttgttttttaattagcaatgctagcttgtattagcatgtggtagtaatgatatcatttgttatgaggtttgcactgaggtgtaaagcattatttgtaaccttttcttcagctcttagagaaggtcagagatcatgatctagcattatagcatctggatatatgaaatatccttttatagttttatctgaaattacataagttgatttgtatgttggcatgctgtcctaaaagcataactttaattgaacttctgcttgatgaaatccatcaaattagagtagaatcaggtttgaaccactttaaaacttcaggtcaaatatataatttaactcaaaaaacagagtagtggcagtgcaactaatatgattcagaaccttattccttttctctttctttctctttgtgccatctatcatttactcaatacactcaaatgtatgtgaatgtttattttggcaatctagagtaatttgtcatatagactctttttatgcatgctcattgtaagaaaagactatatttttaaaaaaatattgataacatatgggatgcaggaaaagtat

SEQ ID NO: 20998 - DNA, 716 bp, Glycine max
  Intron number 4 from transcript Glyma04g35340.1 (locus Gly ma04g35340) derived from phytozome v7.0 (chr-ID Gm04; pos 41677794 to 41678509 reverse strand)
ggtttgtaagaccttccaatcttttactaacttttaaggttgttattgttttcttggaatgcttctaagttgaattgagatgggagagttaatataggaagcccaggtgaaattagaatgtgatgaaccgatgatataagactcatcgtgtttcagtattttttttgttgtaactaagaagattcttatacacgccataataatgtggcatcagcttataaattgttggtgtgataaatctacatgatactgttgtagctgtgtttaatatggatattgtatagcacttattacactagtgaaaggttgtagaggcagtatagtcatttgcgtgaattacattgggcagcacagcacttatggaatggcttaggttaaaacttataactgtaccgtggaagaggacaggagaatttcttgaaaatatagtcctctcatctgagattttgtgaatacttgttgttcatgtgtaaaattctgaaatacgatgtagtttccaaagtccatttctcttaaatttacttgactgccaagtgtcaacactcaagttcaagatcattcatgtctcaactgacttctttgatttcattaaataaaacttcacgaaatgcttcttctggtgctttagttatttttcaaatctcattactgattcagttgtttttattttccactatttttcaatgtttctagagattttgggtggccgcagagat

SEQ ID NO: 20999 - DNA, 1044 bp, Glycine max
  Intron number 1 from transcript Glyma02g05500.1 (locus Gly ma02g05500) derived from phytozome v7.0 (chr-ID Gm02; pos 4409848 to 4410891 reverse strand)
gtggctccctcgtattggcgattggatctgcaccggttagttactttgcccccaaccacctacaaatcaatcaatttcttttctttttcgtttattcatggttatgctttatgaattgggctttaggtcctgtttttgtgtttagtcatctcatctgttcccacatgacctagtcttgctgtttccttttggctcatatatggaacactcactagtcactaagcattcttttgcaaagtggatagatactatttttttaggcttttttaaatattatttgttcttaagcattacttcattacatgtattttcaggatcaagaacatatttatttaagcttactagttacttatatgcttctgagacgacctagtttcgcatgctctatgtggggtgtaggagaccttactgcaaaataagcctagtttcgacaaacttctaaataaatacttataagagaaggaaacaagaaggtaaatgaaataaacttcttccgtaagttaaaattaatttatgcacatcaacttttatagaaggtctttcatcttaatttctccaataactgaggtagataaatttaatttttagttatggaagaagttcggttcgttttgttttttattttgttcttctataagtgtttattgagaagtgtatttagattggttcatagtgagttttttattttgtaatttcattagtatttccagttttatgtgttctgtttcaaaacatttactaatctcaaggatagacatatgccaccatgcattgagttgcagacctgtttgggttttcccacctgattgatgttaaaaaggtgctcgactttagcatggcattttgattttggtttatgatcttctgtttcaaattgagatgaaaactcgctatcacctaggttgagatgtttgcgctttttgtatgtgtattttgtgtgggatggacgtgttggtgtgcgtatgcttggcttcctttccctctggctgctttgtggggctgggtatgtatgcattggaacaataggttgcactaacaacaatt

SEQ ID NO: 21000 - DNA, 611 bp, Glycine max
  Intron number 1 from transcript Glyma02g29050.1 (locus Gly ma02g29050) derived from phytozome v7.0 (chr-ID Gm02; pos 30455574 to 30456184 reverse strand)
aaacgaaggaaaaacctattctaatatatacaaaggtaagcgggctcatacttagcccatgggctcaaaatataccctaaggctcatgagaaccctagggccttcccttggatctttagcccaatctacttggagtcttctacccaatgcccttgcgggataggattacatcatacttgccccaagaaccatctaaagatgtattgtcggaagatggggacatacataaaagatgaggaactaatgatacatttcttccaagaaagtcttactggggaagctattacctggtacgctaacttggaaccttcccgagtccattcttggagggacctaatggttgtcttcgttaagcagtatcagtacaattttgatatggcttcggataggatgaaactatagaacatgtgcaaaaaagagcataaatctttcaaagaatacgcccaaaggtgaagaaacctggcagctcaagtggcacctccaatgacggagaaagagattatcacaataatagtagacacgttaccggtgttctactatgaaaaatggtgggttacacaccttcaagttttacagatttgttctttgccaacgaaaggatcgaagtgggt

SEQ ID NO: 21001 - DNA, 740 bp, Glycine max
  Intron number 2 from transcript Glyma05g06420.1 (locus Gly ma05g06420) derived from phytozome v7.0 (chr-ID Gm05; pos 6407597 to 6408336 reverse strand)
atcctttcatcacaactgattacgtacaataatatatttgtgtagttcatgtgggattggtgatgatgttcttttttcttctttttttatcatttaattgtgcattgtagtagttgaacatgcatggatcttgctaatgtgatgtttaatttcatcatgtttgttggaaaattccacctggcgggtctcaattaatgttttttttttttaatattagcagtgggactcgaattttggtattagggatttacaacaatctataaactgagcaagatctctttgatttattggtgtatgttttaaatatctcttgcaaaacttcacttaatttcaattaattttaagataaaatctaacataatattataataataatggtccatatttgtgcattgcattagaaagtctcgccgtgcctatctccatgccgattggttctaaagatgaaatccgacaatgctaatttgattactttggtcaaataaaaaagcacacgtatgtgatcatagactagagataatatcttattttgtttgataaaggtgttgtaaaaaatgagtacgggtaaatatacgagaataccagtttgtccaaatatgtactattttattgggattgaaaattgcaatctaggaagattcgtttgtttcaaatttgatttgcaatgtgttcattccagtaatcaaacattaatgaggtttgcccattaagaaatttggaattgtttcctgcagacttat

SEQ ID NO: 21002 - DNA, 884 bp, Glycine max
  Intron number 1 from transcript Glyma03g26100.1 (locus Gly ma03g26100) derived from phytozome v7.0 (chr-ID Gm03; pos 33446339 to 33447222 reverse strand)
gttgccgtcgaagccgcttcctccctctcaggctggttagttttcaaggcttcgttttttttgttcattctgttttttttttttcatttgtaatcgaaagtttgctttttgttcgtatatgtttatctgggtcgtaaaattttttgttctggtgatggggtttaaggtatttattgatcttgttgttttaaaaaaagacgtgggttttggttttagtttggttccttatttatttatttttaaaaaatttgcgttttttcatatttaatttatctatgttgtgaaatttggtgcttttgttgagatggggtttgtgaaatttgctttagaaaagatttttgttatttttggttgttaattgttgcgtgatggtggtagtttgttgttatgggctcatatgctttagtattttgggtatgaaaaagctatttcatataacaaatgtttatacgaatatttactttttattagtttttttgctagcgtatgagagataattgtgaatatgatgctagttctttgttttcatatgtggttgagcatgctttagcctttagttttttgttgtctgtctttttggaacatgcaataggtctccgattgctttaatctaaggtttttgggtagaagttgcagttcaaacaaatgcctccgcgagaaatctgttcaaatgaaattatttataatgtggtacatcataactagaattgaaagatgattagtattagtataatttatacttcgagtgtttgactgtttgttgagttttttggcatgtttttgttgctaccttgattcctgaatgtccattgctttgatggtattccttgtgttgcttttttgatgtatttttttttcttgtcttatagtaagggaggctaaaa

SEQ ID NO: 21003 - DNA, 283 bp, Glycine max
  Intron number 2 from transcript Glyma05g01480.1 (locus Gly ma05g01480) derived from phytozome v7.0 (chr-ID Gm05; pos 1005241 to 1005523)
tagtggaaagtgtaaaggtgataaatcaaatttaggtaaaggttttaagcatattccttcttctgggatggaaaagtcagtggtgtctccaaatattcctttaaataatcatgaacacagagcctttccacagagaacaacaacaaaatcaaatcacattgtgacaaattttggttcctacatgcgtgcttcaaacacacagatggtggaagtggttcctacaatcaaggaaagttttaataaacatcccagggatctgaaaatgtcagctagaactgctcca

SEQ ID NO: 21004 - DNA, 692 bp, Glycine max
  Intron number 1 from transcript Glyma05g02920.1 (locus Gly ma05g02920) derived from phytozome v7.0 (chr-ID Gm05; pos 2243662 to 2244353)
gcaagttcaatcaccccattaagaggaaaagtcaggtatttcttttgccttttttagatgctatgtttgttagtgatgcataggtttagatatatggtcggttggattgatttatcttagtgatccacgtacgggctttggttttgatattgcattgttgagagttaagctttagaatgattgacttgtgtaaaaggttgtcttttggtctgatatttcctttgtgtatggtgacattgtattattagtggaattgctggattgagaagaagggtatttttgcctttgctgaagttatacttttgattggagggactggtaattggtaataactgttacatcatggctggtacttgatattgaattgtaattttttggaggaattgctatctttggtaatgtgcttatctgcttttatattgtgtctgttttggtcggtcttttggctctacagcattgccaaatgacttattaagacttcaaaatttgcctatttttgtgaggtctcttgtattacttcttcagacttaataaggtgtgtggtgattgagtatatcaatgaggttctcttgaccattttatgactggaattatattatacaatgttcacttcttaaaacgtttttcttggtctttgtgtttttacgatgaactaaggctgttaaagagaaggcaggagaaagagaagaaac

SEQ ID NO: 21005 - DNA, 588 bp, Glycine max
  Intron number 1 from transcript Glyma02g35570.1 (locus Gly ma02g35570) derived from phytozome v7.0 (chr-ID Gm02; pos 40578584 to 40579171)
ggccggcgaagaccgccggcgaagccggcccttgaattctggaggcagttgtgttttgtttcgtttctctcttcaagaaagagaaagaattgtgcataagaaaaaaaaaaacaaggaggaagggttagtgatcacgtgcggaggggtatacgataagcgaaagagaggtataccttaaagttatgtgtttgacatttgattaattagtagtagttcttaggtgactatacgcataatagtatatagacgatcttgccctaaagggaagaagctaggggcttttaattattgagagggttgtttgggaatttcacttatgggttgggttgctttgttgcaacgtgaaaattggggtgcattgtagtagggtgtagggccttactatgagaggttgacatgtttgctcatcaaataaatgcttcctcttcatttggcattgcataatgcatgttcatcttgtacctcattaaagagtggaaatagatcatttactatgttatgctagaagcttcgtattattaagacgtgtttttttttttttttttgcaacaagcttattttcacactttggggcgtgaagcggtgaat

SEQ ID NO: 21006 - DNA, 979 bp, Glycine max
  Intron number 1 from transcript Glyma03g36430.1 (locus Gly ma03g36430) derived from phytozome v7.0 (chr-ID Gm03; pos 43390185 to 43391163)
gtcctggccccaccttgctcaatttcacttacgaggtgagatggtgactactatatgtaaatgtaaatatgtcaatgtagtgttgttgtgttgtgtagtgtctctttcaacccgaaagcctcatttatgcttttcagtgtttttggttttgagaaatggcttttgctaagtggttttgttaggcttgacggctgtactgattcatttaggatttaacttacctaaatttttcatataaaaatgagagcagacatgtattgattctagtactcaactcacttaaatttttctttataaaaaaacgatgacttttacttcttttacattctatttatctggcccaacttttacttgctgaaacaaaagaaacaattcttcaaacactagtttgtacttggaaaagatactactaagtaggggctcaggtaggtctggaaaatgtgaaagttttttttttttttcctttggttaagccaaaacttttcacatgtgaaaaatatggtagacgaaacattttctatattgagacaaactaccctatgattgtaggctacttctctttttctattttgtggcaaactttggaagacattttctaatacactttcttgtatatactactttgtattattagttgaaatttattggaaagtacaaaattttttgggtctcaatgcttataatgagttcacttataatttttgtagtttctaacaaattttaactaataatagaaaatgtattaaaagaagtgtgttacagggtgtattgtgcattcctattatacgttttcatacaactgccatgttattcattatgcactcatgatatctaatttgatagaaatgaggtggggagttgaaaaggataaatgggaacggttaagctgaagcttatgatagtatttggtgtgtatgtttctgtctttttgatttgctttctgtttttcagggtgaaaagaaggtggccaccattcaaa

SEQ ID NO: 21007 - DNA, 695 bp, Glycine max
  Intron number 1 from transcript Glyma04g34660.1 (locus Gly ma04g34660) derived from phytozome v7.0 (chr-ID Gm04; pos 40865072 to 40865766)
tcctctcctccaccaccactgccaacctatccaatgtaatcacatcattccattttagtcaaaatcatttttgtttgttaaaattagtgctcagcttattatttttatattattattaactattgtgctcgggcttttgattcgttcattgtatacgtcaattacagtccaatactttctcttttttggttattagagtccaattcgtctattaaagtccaatactttgagtgttttttcgcaattcccgaatgtttggaatttcgttaattatacctaacttatgtcgtcatcccatcaaacagtcacaattccaacttatatcaactgtttgagtctgtggtgttcagcaattgtaaactgtagtgtagggtttttactttgaatatgtttggtattttggtgaatttgattcgttttaatttgttcccgtttgctttaagggaaagaaatctaagagagattaaaattttttgaaatttgaatcaaagacgaagttggaaggaaaggaaagtttggatttttagtttttgaaagttaatttatcctttttttattgtttgtttgtcttctctttgaccaagtaaaagaaaattgtattattattcgtgtttctttttttttttcgtttctatttttgttttttagtgagtgtgaagctgagtgctgatggcatgtgtggaaatttgaacaga

SEQ ID NO: 21008 - DNA, 574 bp, Glycine max
  Intron number 1 from transcript Glyma01g45430.1 (locus Gly ma01g45430) derived from phytozome v7.0 (chr-ID Gm01; pos 55706503 to 55707076 reverse strand)
gtaagttataaaatttaaggactataataataataatagaatttaatatttatacactgagaaagtaaaataattttatattatcatttattcatatattaccgtttaaattattttaatattttaaaagttaacaaactcaccatatataataggatgtgattggataactgtgcaaaaaaatttacattttacatggtttgtgtacgacttttttttataataataataaattacttagtattcttattaaagaaaaataatttgtttccaaaaaaattaaaacaagttagtagatgcaaatattttataagcttgaatagattattgatgggtacctataatgtggtataaattaatttttcctatataatttcttgaaagaatttgttaaaataaaagttattaggattcacttaagacctttgaatttgaaaaaagaagacaaatattccatgtaaataaatagtgatgtaggaaatttgaatgaaagggtaatttagtaattggagagagaagaaggtagaaagtgaggatagaggctggggctgtggctgaggctgagttctgtaat

SEQ ID NO: 21009 - DNA, 877 bp, Glycine max
  Intron number 2 from transcript Glyma02g08610.1 (locus Gly ma02g08610) derived from phytozome v7.0 (chr-ID Gm02; pos 6701100 to 6701976 reverse strand)
tttgggtacctgaatttcaccaaagctggcttcctgtgagtcccttttgccatttcttttttctcttgttattattatgatggtgaattgatgatgctcatgttatggttgttcttctaatcaactcttgttattaatgaatgtgtggcttggctcaactaaattgattcgtcagatacagatcattgcaaataaattcaaaattctttttctcttgctttgagtagagcaaaatggtttttatttgttggattgatttatcagtgatcagtttttgtactattgaaataatcaatctggatttgaattgtgatcattttgtttaggatagaatgtgatttaagttccgcaagattttcccagaattagttttttagttcgtgcattttaaaaatggtggatttaatcctcgcatttctaaaatgccatggatttcgtcgctgaccttatacttcaattttggcttaatcagggacaaaatccaccacatttaaaaaatacgaggatttaaagccaccatttataaaatgtacagactaaaaccattttgataaaatattgagtgacctaaaacgcattttacccttttgtttatttccttgaattattggggaacttatgggattgaatagatgcatgtcactgagtcactgaccctggttttgagacatttcataattggagaacaaaagaaaatcagaaaaagagagtggagatgagaattggccactatttatcggttctgttgaaaagtagaatgatagaaaactggtagcattttgttagtgctgttgttatttggcctcattgtgttcttagctgttgtatgaatgaaattttttgtagtgatcattctaagaaattcaacccagaggac

SEQ ID NO: 21010 - DNA, 683 bp, Glycine max
  Intron number 2 from transcript Glyma02g02660.1 (locus Gly ma02g02660) derived from phytozome v7.0 (chr-ID Gm02; pos 2023983 to 2024665 reverse strand)
ttggaagtgaaaccaaacactcaatttgatttggatgaatatccctagtaaaaattgtacattattttttatagtcgcatcaaacgtgagtgcattcattcatatgaggattatgagccctcgctttcttggcgtagtgtcaagtgtccatggtgagaaataaaacaaaagccaggaacacgctatctctttctccccgtgtctccttgtccccctcttcacagtgagcaattaacaatgtgcgtaattacaaagtgtggataacataattgtgatcataataacaaacaatacactaacaaacagtaacacccttttctttctagtttctactccaagcattgttcgttgcttccttcgcagtctcactcttcgtactacacacccttttccccttttttttgttttttccatttccattctttcttgctcgcgctcatcactctttctctgtttctctctcgccgagtaactgttcgacgaaatgccccaaccatgcacttcctcaccgcaccctcctacctttcgctgctctcgccccatttgaccccttccctcgcccccccactccacttccccgcctcgaccgggcgggtgcgccggtttgcggttgaaaccggttcggttctccgttcttctctctggaaggtgaaccgctacaagggtttgtggttgtcctgcac

SEQ ID NO: 21011 - DNA, 591 bp, Glycine max
  Intron number 1 from transcript Glyma02g03860.1 (locus Gly ma02g03860) derived from phytozome v7.0 (chr-ID Gm02; pos 3093804 to 3094394 reverse strand)
tggcctggttagtaaaacccctttcttttcgtttcccttgttcactctctaacttcaatttttaaactttctcaaacccttttttgaggaaccgtgtgtttgattgttttatttatttggtgtaaaataatctcaaaccccttttgttgattgttacctgttggttattgtgtgaactgaatgttatataatctctgtgtgctttaatgctttttatttatttattgttttttcggttctgttttattagattctagagttgttgaacccttttctctcttggattttaaggatgctcttatatgtgtcatttcttaatgttcctaagaagcagctaggtggaagagtgttttggtattaactgattggttgtaggtttgtattcgttagagattttacgaggaagtgaactagtattggttaaagggtgcatttgttatcagtaacaacagtgaatctttgagtttttgttgttgtattgtattcttggctcggaatatttgtactatctttttgtaatgattctcatgagttggaatctgattgtgatttgcaggggaggcgcactccttgaaggtggaaaagattttg

SEQ ID NO: 21012 - DNA, 559 bp, Glycine max
  Intron number 2 from transcript Glyma04g03220.1 (locus Gly ma04g03220) derived from phytozome v7.0 (chr-ID Gm04; pos 2353121 to 2353679)
ctccacctgtttttgtgggtatttcagtcattatgtcaatttacaactttttcttttcacatttctctattattaattctaaaagtttccaatagatatatattactacatgttcccgcaagggtttggtggtggttgttgttgttgtgtttattgataaattatagaaactaattttttaattaaccattaatttcattcttaaagtattactctctcctaaataatctcttcagtaagcaaattatataactaattctcaagtattagaattcatactaaatagtgcccaaagtattaaaaaatccttcaaattagtcaaaatatatcaatgtaaagactaaatcgatggatattatcaatattttaggactacttaaataattttagtattttaaggactatttaggggagagagtaatatttgagggactaatttgatggtttactcaataatttttacacttttccatgttgttaacctggttgttttgttttatgtgtcttctttctgtttttcatagaatatagacggtgtgaactacttccacgtaaaggt

SEQ ID NO: 21013 - DNA, 751 bp, Glycine max
  Intron number 1 from transcript Glyma01g01220.1 (locus Gly ma01g01220) derived from phytozome v7.0 (chr-ID Gm01; pos 861857 to 862607)
gaagtggagcttccatttcatagccggcggtgaaggtacgatttccgtatccattgtttccttttggttagttccactgtgattgaaaatgggaataaggtagcggcgatggcttgagtggttgtgacattttcacaaacaccaaaagggcaatatgagttctgatgatagtgtggatatctttgtaccaaccagttggttttttttattcagttatttttagttactatgagttggtgcagttatcatcatctccaataattgcgttatcatgatcgcaagttttaatactcttctgagtagcatgaagagcaattcagatgtgtttgttgttttgtgtagtatctgtgctagtttactttttatatatagttttggttgggggtaggggtgtaaatgagtcaagctattcgttagctactcgagctcgacttgttaaatgaaacgatcaagctcgcttgtatgacctagcggacctacagtagcttggttgggggatgctattgatgtctatgtttcttatgtttttgtaacttctcaattaatctttgttacatcttgcaccgaaggttagtaatcaataaataaaattcatttgtctacaaaaaaaaaaaaaacaattatagtgacatttgttctcattatatttgattatataattgaaagatggtattagcaattcatttgttgctatatgatgcatttcatgcagatagatagttagcagacttggctgaccctgagcaggagg

SEQ ID NO: 21014 - DNA, 511 bp, Glycine max
  Intron number 3 from transcript Glyma01g01780.1 (locus Gly ma01g01780) derived from phytozome v7.0 (chr-ID Gm01; pos 1345916 to 1346426 reverse strand)
ttgagtatttctgctgcaattctcagtccttatcggtatgagactctcttcctcaagatttctgttttcctgaattttttgcaatgcatgggtgagattgaattttaagatttctgtctatgcaataatttgttctatattattccatgttattgatgatatcatgataactttaactcaagttggtatctccattatatgacattcaatttgaatcagttttctttgcaaatgaatgtcccccttcccccctttttgaggaattggtttatttcgtaaacaactacttcatataaaatgggagaaaattattatgttatagaaaatgtgcttgtatgccgattcataattttgacttttttcttgttatcgttatcattaatgttatttgtctagcttctggaattgatcactgtgtgaaatatggtctagtactctcgtctagcgtggcagtagcagtatttgaatcaacatattaatttgtaatcttgttgttttgactttcaggctc

SEQ ID NO: 21015 - DNA, 853 bp, Glycine max
  Intron number 1 from transcript Glyma02g44400.1 (locus Gly ma02g44400) derived from phytozome v7.0 (chr-ID Gm02; pos 48991949 to 48992801 reverse strand)
ggtttgtttcaatttatctactgcttaagctttacgttatgaaaaacaaattgtttgcgttgtctttgcgaaaatggtatatgaaaatttatgaagtcaatggtaactatgcgtgtttactatgcaatactctattgggattattggagagattctgttgggctaggttgaacttgaaaacaacttaaagattaggtttttagaactcttaattcttgatcatgtagctattaattatcaatcagaaaattttatcagtggagaaatcatcatagttatcttttgttgggtgcttcgaggtttaattgctgtgtgtctctcttcttttttttttttttaaaaaaaaaacaataatttattggttccaaggttttaaattgcagtcatggttatggtttcaatggcgatccttgatattgtgggaaattatagacaaatgtggctgatgcagctacaattgtggttgtgatgtggttgcagagacccctaaaaccttggcattgtggctgcaattgcagttacttgtcatttaaaaccttgattggttctttatggtttatttggctgcttatcttgtgcaatttggtgtcttgtcctcttgtctgtttctgaagtagtactttttgccacattggtttcttctttggacctagttccaaactccatcacacctttaaaatgttgtctagttttagctttgttcatagcaatgcaatttttttatccctttatgttccttaagctcttgttttgaatttacagtcagagaaaaaaaaatcttgtttcattgctgatactttctcaagtgagctgatctataccttcatatatttatccttgcagtcaggtttac

SEQ ID NO: 21016 - DNA, 523 bp, Glycine max
  Intron number 1 from transcript Glyma04g35650.1 (locus Gly ma04g35650) derived from phytozome v7.0 (chr-ID Gm04; pos 42050506 to 42051028 reverse strand)
gattcatcagatcattggttgcaggtatagtatgtatacatataccatggcacatgcacacatgaaaatgtacaatgtttggctctgacgtatatgattttctttgtcacaagagagaatgaagcacattgattaattcttcatgcttctcaattctaactcactaatgaaatcactactgggtaaaatagcagtttgggagagttttcgttcaaggttgatttctagttattagttaaagtaataaacaatgtgtcttgcactgcaccctgcaaacccttttgtttttcattttgagttggaccaaagggaaattaaaggggtgaaaaaagaagagaaagctagccaaaggaaaaggaaattaggaagaagagaacaaaaagaatgaaaagaaaaagacattttaaaatccaacgaagacaaattttacagtacataacaccacattttgatttctattaaatagttgttttgctttatacaatttataaaatgtcagggcacaattcacgaggagtctggg

SEQ ID NO: 21017 - DNA, 835 bp, Glycine max
  Intron number 2 from transcript Glyma01g36670.1 (locus Gly ma01g36670) derived from phytozome v7.0 (chr-ID Gm01; pos 49126421 to 49127255 reverse strand)
ccaattattttgcaggccgattctccaccgagaaggtaaaccccataatcctcttagattatggtaatcatcataatcaaatatttctgatgcacgatcatcatgtcgcatttgacatgatcttcgtctgcgttcatgttttttgtaattctaacgcacaatgaattgaaacattgaaaatgatttgctaatgaatttgtttcagtctacgtttagcctcgtaggtaggtcctgaagatagtctatgcctgaagcatttagttgtgctgtgttcggtgttttccctagccccctaggtaggtcaccttgtggtagtattgccctaggctgttgatctgggatttgatctcctcaatctcggcgagaaaacagggacgatcaccggagatccactggggatcccagaattccggctgagttatgggtgctattgaacctagatttaactcgacctaaatttgggagggtccacagccttcccagtctcgagccataggtgaaagaactgtggagaaatactaagggttacatgtagtcgactacacattttggcctttgtccggaaggatccacaaccgagatctagctcagatgcttggcccagattcaggatggtccagaattaaaattcttaattagtttatcccaaacaagttttgtgcaataatttgtttgtaaacgagatgtttctttgtgttgttgttgtaatatgagattctaaatccgaactcacggttaaaggaatgtggagggcactctgagattattggttattgaagtcatttgtccctttggtgatgattgaatatttcaggaattcaaggtccccttcccc

SEQ ID NO: 21018 - DNA, 1022 bp, Glycine max
  Intron number 1 from transcript Glyma04g41430.1 (locus Gly ma04g41430) derived from phytozome v7.0 (chr-ID Gm04; pos 47271445 to 47272466)
tgaggaacccaccattctatcatctgagacaccttgtgagtatcatgatccatcattgaatggtaaattcttgcagctttgctgttaaaattttgatttgtcttcggctaagaaccatcaaagtccttttacttaaccacgtttcttgtaattctatttcacctagttccattacgggcgttctctctggtttcaattaatgacttaatatgcttgtaaggtttgctaatcttttaatatacaatacagaataaaccaaagatctaaaacttcaatttcaaattcactggcttagtccttttagttaaacttagttactgatagttgattatgataaatgataatctattgaacttgtattaaaaaatatggctttggctttggctttgttgctcaatattagaacttgcaattggagcattgaagtattcaaatttgattcttccccatgtacacagttaacataaaccgtagacagcggtacttgcaatttgccagcgatagtttctaaactctgttttatgttttccgcaaaggataggtacacgcacacccctcttggatcaagagaaaaattttacttcataatgttgaatttaatgctcaagctgtggaaaacactaaaccacagattcgtttattttttctgtactcttttatcgaatatattttcagcaatgttattttaaaaacatgaaatgtcgttgcaatgcattgaactttctaattttaaatattttgttttttattccaaatgcaaaacatttagtttcattcaggacaagccaagacaataatgactgaaaaaaatttacaaaatacagactagtagtatttactgctgtagcacatgattgacaaggggccttgtaggctttcgctttatatattatctttctgtttgtagaaacctctaagtcgtgatttgcaattctcatgagctcgatattaagtttcaaaactgacaaaaataagctttctttctttcttcacagttactgttagtgaagtagaggccttgc

SEQ ID NO: 21019 - DNA, 845 bp, Glycine max
  Intron number 3 from transcript Glyma05g01380.1 (locus Gly ma05g01380) derived from phytozome v7.0 (chr-ID Gm05; pos 892660 to 893504 reverse strand)
ccctctatctcataagtgccggaatagaattcgtaagttaccatcatagttaagcttctatctttccctttaagtgtcaaagttagtatactttgcaggaaaaagcttcaacacttccacattaatcggaataagtgcttgaataacactcacgtgtcaataataaaaagtgaaaaaagaaaagagaagctaaatttagggtgaaaaactttttaccacctatagattgtgcttctaggtagataattgcccaggaagggaggaatctccactgtaatcaatgacaatattgattacgctcatgagacacactacatggtcaagattttgataaactttcacatatgtagtacagtacaagtatccccacatgatgggggatcctttttccatcctcaaccaactcaaaaattaaaatgacagaagagaagaaagacaaaagaaggcatgatcattatttattgcgattagatgccggtcacaaaactggaagcacgatccagtcatgcttaaccttgacataatcaaccagcttcttttgagttaccatatcactattcctcagtgtaaaaaagtgaaacgaatgaacctcaaattgagccaattttcgaaatagtttcatcatatcatataattatttcatcaaaggtcaaaacaacaactttaccaaagaagcatggatggatcaaatatatgttaagttttcacagataattggagatcaaatagaagcattttcctgctgcagttatcaagattataattacacaaacacacacacacacacatatatatatatatatattaaacgtgaaactacttgatggacacatcagggtttatta

SEQ ID NO: 21020 - DNA, 462 bp, Glycine max
  Intron number 2 from transcript Glyma01g38530.1 (locus Gly ma01g38530) derived from phytozome v7.0 (chr-ID Gm01; pos 50606356 to 50606817 reverse strand)
tcaacctccttggttgccatctggagccagccacggtatctgagtttttcagttaaccgtatacattaaaatattaatttgtttcgttccatcatccatgcctcttcttattccagttctttcgtggttttttcttctttttttatttgttagattgttagaatgctagtttggttactaaaggaggaaattaaatgtatgactttcggcctctcttttcttccttaagtcttaatcattcatctcatcttatatttatttacgattttttcatgctttaatctcacttgtctttgtggttttctgtatatgtaaaaatttcacattaacatgtgctatctgtacttattttgattgttgggccttactattttcttgtttttgtgttgtgtttttcttcttgctttttggatggctgcgaaactagttgccaacccagtactacacagctctggtaattac

SEQ ID NO: 21021 - DNA, 486 bp, Glycine max
  Intron number 1 from transcript Glyma02g41120.1 (locus Gly ma02g41120) derived from phytozome v7.0 (chr-ID Gm02; pos 46278614 to 46279099 reverse strand)
gacatcaccgataaggtgatcgccgagtacatgttagtgtctctgtcccccttcgttttttcctctgtttcccctgcacgtgaaaacaagcattgcaaatgtggcatgcatctatctgttccaatgtgcatggatatatgtaatatgtgagatggagcgattctatcaatgggtctgttttatttttgttcatcttctgtttgatcgatcgcagtgctctctttatcttatagtctctgtactactctgtttcccctgtttttctgtttttagcttgtgttgtgtttgtttgtttttcattcactgaagagtccaatgtgcattttgatttttgactccacgttagcattaactccttgctctgcttcatgtctaattcaactacatgatgacctatttgctaacttatttttcaattgttttctccacacttaatcagcacttacatatttttattttcattatgatagggttggtggatctggc

SEQ ID NO: 21022 - DNA, 643 bp, Glycine max
  Intron number 1 from transcript Glyma02g09300.1 (locus Gly ma02g09300) derived from phytozome v7.0 (chr-ID Gm02; pos 7273312 to 7273954 reverse strand)
ctcaatttcggtagagaccactttcatattttaaggtaaacatatatgttttaaaaaaagaaaagtgttctttgggctggttatggcatatgctttaattttagtttaggtggttaattatttattggtttggccatcatagttatattgtgcatgcaaggtgtttgagttgagaactctgtgacagactgtgatatccaaatggtattggagatgaacctaggcatgatttataccttttcttctattccatatttgatgctatggggaccaagggcctctttgaatgaactttttatataagtacttatgatagaagaaaataagaataaaatgaaatgactttttccaaaagttaaaattagtttatgcataaactaattttagcttataaagaaactagtttcattttcctttcttattttcttcttctataagtgattatagagaagtttatccaaactgactttaagtcaataaagtttctctatctttggtttaagtggcaatggtaattcttgcacaatattttttttttaaaattccttcttgttgtgaaggaaacatgatttgcacagaagttattttgaaaatgactttgttctcagattcttgtctcgaaaagatataggagttactgtgg

SEQ ID NO: 21023 - DNA, 457 bp, Glycine max
  Intron number 1 from transcript Glyma03g03090.1 (locus Gly ma03g03090) derived from phytozome v7.0 (chr-ID Gm03; pos 2889020 to 2889476 reverse strand)
cagccttacaagcttacatagacacggttaaatcagtaagcacccttatcaaatcaattaatcacatagtttctttctttattttctttccttctttctttattatctctgaaactctggtctttaaccaaactcaatgacgtcgtgtgattcatgtagcaaactcagtgaccgactcagataaggctatgttgttgtttttggtgtcgttgtttgtttattatgtaaattgcttcttagctctactttctttcttgtgtatgtacggttatgcaaaaaattaatagatgtataaatttgattaattatgctagttttcattgaagacgattcgaaattaataaataccaaacctagttgaattttgggtatgatgaatttgactctttttttcttttttctttctttgttttgtattgcagtgtgagaaattcaaggaaaccggggtaccagagtt

SEQ ID NO: 21024 - DNA, 381 bp, Glycine max
  Intron number 4 from transcript Glyma02g11860.1 (locus Gly ma02g11860) derived from phytozome v7.0 (chr-ID Gm02; pos 10075654 to 10076034)
tgctaagaaacacaaggtatcttaaatggaacaggtcatgatatcatatatagatgattgaaaaatataatgttgaatatattaagagtggttgcataagaatggcaacattattaggtagtttagagtatttgattttccaaagcggtttgcaactgcaattgtggtcacaatgttatagtttttgggtttttgtgatggtactgtgtccacaattgtagccacgttaactgtattcttctgcaattttccttaaaaatcaaggattgtgaggtattaaagacttgagtgtgacatgaactgttcttttgcattggttaaagctgtgattgtgtttgttttgcagcttaaagtagataaacttaagttaattgagctctg

SEQ ID NO: 21025 - DNA, 495 bp, Glycine max
  Intron number 3 from transcript Glyma04g00790.1 (locus Gly ma04g00790) derived from phytozome v7.0 (chr-ID Gm04; pos 437324 to 437818 reverse strand)
atccaactttgggtaagatgtttgttcttttcaatttgatgcttactgcaccacttctaactactcaaaaagtttaggtagcttttaaagttatcgatagttcaattcgttttttattcttcacaagtgttgggcaaaattgcaatggattgtgtttttaattaggtttatgatgtattgattatttggaagaaattagatgagctgggaataatgaatgggttgctatcccaatcaaaaccgttacgaccaaatatatatataaaagtttctgctaagcttaatgaagcctaaactttctttgtttcctgattttgttgcatggggggtggtttgaatgtgtgttagaataactataacatgcccctactacacgtcgtcaaggaacaaaaataaagaaagtggtattttttttttattgttagttttcatttggtgagtcctggtccatttcctccaggggttgatagtataggcacgataccatctgctctt

SEQ ID NO: 21026 - DNA, 639 bp, Glycine max
  Intron number 1 from transcript Glyma01g35990.1 (locus Gly ma01g35990) derived from phytozome v7.0 (chr-ID Gm01; pos 48440263 to 48440901)
aatcgtatccaatcgtgcgatacgtatcgtgactcgtacgatactaactaccatgctttggagactaaattgatggtttactctttttatgcattatataatttgcaaaaaactaggtcatggaagaccaagtgatgaacatgtgtctggtgtttgtttcattccaactaataattatgctaacgcatagaaatttaattgaggcaaccatttgaaaaggccaatcaagcagttttattagaagtgaaagtttttgcattgatgtggaattggaatttttagtatttacattcacggtggatcaaatttactttaaaatctttctgaggtcatacgggtcttgcaatgccattatatatttttttgatgctcgtaacatagttttaacttcactacttgtatatagttgttcacttggaagataaggttggttgggatcttaagaaaaaaagaaaaggggaaagataaaaagaaatggggaaagatagtgggttcgatccctattgacaaaaattaacaaactaacaattaatgttttcctataaaaaaaaatagttgttcacttcaactggcttcaagatgtatgtgttgatatcatttttgttttcgttcttattctgcagttattattggttggca

SEQ ID NO: 21027 - DNA, 923 bp, Glycine max
  Intron number 1 from transcript Glyma02g00220.1 (locus Gly ma02g00220) derived from phytozome v7.0 (chr-ID Gm02; pos 21099 to 22021 reverse strand)
gctctctccgcacgctttggctcctctgatctcaggtacatacaacttcacatcttcactttatctcttttttcgattatttgttaagatctgtttgcatctgcctgtgtacaataattttgtttgatacgtgttttctaggttttcaattattctgtttgtgattttacgatatgttatcgcttgtgtcccggtttagcataccatccatagacacagatatatgaaaaccttgggaataataatttatgtgcttggttttccattgacctgatatgtctgtctgtgtgtgtgtgataataatttatgtgcttcgtttttcattgacctgatatatgtgtgtgtgataataatttatgtgcatggttttccattgacctgatatgtgtgtgtgagataataacctaagtgcttggttttccattgaccatatatatatgtttgtgtgtgtgcgtgatttggttgttgatgactaggtttttttattgtgtttaggatctgctttgaggttcactgttgtaattttaattattttttagtttctggttttgaattgtaggtgttgttggcttggtatccgtgcaagttctgctgtagccgatttgaaggtgaaggtgtcaccttaaagtttctttcatgtttgatcaggctactatccatttgggagcaactgagctgcttggagagtatttttcttcttctagaaaaaattacagaccctcatcccagagagttagctgtatgcattgcgagacatatcagaaattcattcagttttctggttgcggttggccaccttccattatacttgagggagattcttcaagggcacaagctaccttagaggctgaaattgcggctgcgtataatttgaattctggcatttgctgcatctgaatatctctgaaactttgtaagtcaac

SEQ ID NO: 21028 - DNA, 678 bp, Glycine max
  Intron number 1 from transcript Glyma03g16600.1 (locus Gly ma03g16600) derived from phytozome v7.0 (chr-ID Gm03; pos 21084150 to 21084827 reverse strand)
acaaggttagcaattaatcttgttttttgttcttttcttccactactttgattattgcatatttggattagtggttttttttttttgacagaatgtttgggttagtagattttaggtaaatatttgtatatttagtttctcatccaagaattgggtgttagtttaaaattgattgttagttgaattaatttaagcagtctttgtgttggataagaaatatgcaactttcaaaaagagaaaattcaagtacagattttggaagtgtttttttattgtattttaaatcaaaattagatattaaccgataatttaaacaataaaaattaatataggttattagataaaattttaaatactaagagtctagtttagatgattgagtagggtgtgtgagtattgtaaacttcttggtattcaattcttataggaaaaaaaaagttaaaactttaaatttgattagatgataacattaaaaacactaaaatgcatgtaagtttagcacttttgaagaactaaaagtgtctctttttagcaacaaatatctggaaaacaaagttcatgaggacattgtgttttaaagagaagtgaaaaagaaaagtatggctaaagcaagcactactacagggtagagtttttaattaagttgtgtcttttttggttttagatcttgccagctat

SEQ ID NO: 21029 - DNA, 726 bp, Glycine max
  Intron number 2 from transcript Glyma03g09410.1 (locus Gly ma03g09410) derived from phytozome v7.0 (chr-ID Gm03; pos 11023365 to 11024090 reverse strand)
tctttgtcatatttaaaaaatgtcagtggttgtagcactttttttggattaacttttcacattcgtaatggttcaaatggctttaagaaatatagatttgttctagttgtgcaaaacttgccatcattttgaacttttcctcaacataattacatactgatattaatattttattcatgattgaaaaaggaataccgaatacatattatcttcaatgccttgacttaaagttgcttatccctgtactttctgttagatgtatcttttctgttgttagactacagaatcatccttgatgaaatttggaaaatgattttaccattttgttttgtcacctccttccaccgattcagctgtgaatggagacttattcactattccactgtacatatactgtaagcacatgatggctcaatgtcaacatagaatactgttaacgtaaacatttgggatgactgttaaccctatgtggtaccagagtatgtcaaaaagttgtttgcttgaaatctttttatcttgtttctagtaatcattatttaaggtagatttctgttttttgtgaatcctctttttgactaatggtatttgtccctaaataatcggaagactctgtgttggcttgatcaacaatcttgattcttttcttgtggatttgacttaatttatgactgttaattcattacatatacaggggaaggaagacccagttaaggagatttttccaga

SEQ ID NO: 21030 - DNA, 712 bp, Glycine max
  Intron number 2 from transcript Glyma02g09790.1 (locus Gly ma02g09790) derived from phytozome v7.0 (chr-ID Gm02; pos 7751335 to 7752046 reverse strand)
aactaaagggtatttttcttgttttttaagacaatgttttttttctcttgtcaatttggccttctatgtcatacattttttacattaatatgtatggttatgttgaaggcctttacttatggcaatttttcggctttttgccatctgccattaattacataatccagcattgaaagagtattcaactgagttacttaatggattgttttcatatagtgtaagaaacggtagtctacattcaaaagattgtaacatatgacttgtgaaacaaatgacagtgggctggtgcaagctttggaagaacaaatgaaattttcacaaggcttagtgacttgcaattcccccaaatatttttttctgttgcaaatgatactgccatacttctgagtatctgttctagtttaatcttgtttaatatattcccaaaatctaaatattgtgcagaatcaaacccatttatagtttgttgacacccactaccttttggctaataatgcaatttggttttgtagaaggatattttacatgctctgctcctgcacttctttctttttcctcttttggaaattcttcttcttttatactacttaaaagtagtacagcactacagcttggaatacttaagattttctccagtggttacttctttatgcccaatattgtaattcttatgtgcttctattttttgatgcagctgaaaagataagtggag

SEQ ID NO: 21031 - DNA, 392 bp, Glycine max
  Intron number 4 from transcript Glyma02g10680.1 (locus Gly ma02g10680) derived from phytozome v7.0 (chr-ID Gm02; pos 8591872 to 8592263 reverse strand)
tcacaacgtatgttcaacaatttttctacacatttgatgtaagagctcagttattcagcacttttatgtcaaacaatactgaaatgatagtttgtatgaatggaatatctactggcaatatgatctcagcatttcaagtgttttacaaagctggaattgctacagaaggaagaggatagggtacagagagaaggatagggagaggttttgcggtttaacaacacaataatcgcaatgcttgataggattggacattctgttacaaaaaggacctttatgtaaaaatagagaacttcccttttgtaatagcaaaaaggaagaaaagatctccaaaatccttggaaaattaaactatataaactgtggaccgtgtgaaattacataaacacagg

SEQ ID NO: 21032 - DNA, 1044 bp, Glycine max
  Intron number 1 from transcript Glyma01g27970.1 (locus Gly ma01g27970) derived from phytozome v7.0 (chr-ID Gm01; pos 37459331 to 37460374 reverse strand)
atttgctcttgtttattgcactgctggcatctcgggtaaaattcacagattaatttatatgttttattgtttttagataacatctccctgcggttaatcgttttagtattttataaataaaaggtaagtatatttaatatattaaaaaatatttcatatttgttttatttaataagaaattaaggatggaatttggcttttttaaagtaagtaatctcggtgggcaatgagaaagataatggttgatattttaacatatttataataattgattttcttgtgaataactacgttaatttattttatcttgcaaagtgaattgcccaatttagaggatccaaatttaaaagaatacgttgcattcaaactcatatgctagtgttcaatgaaataggcatatgtaccaatgagagttgtcatgagtgtttctctcatgtgaggttatgggaaattttcatattataaagtagtcaaagttcttctatattttatcttaataaataattaaataggtaaatttttatcaaaatttgtggcaaatgtattaaaaaggaataaacaaaataatttggcatgattaagtcatgtatgtagctgtaaaaaaaaagtcatgtatgtgaagatctaacataaagaaatacatttccatatcctaggaaagcaatgagttgtaatgtttatttaatagattcaactaacaaatagtagacattccagacctcaattaccagaacaacaataacaaaatcttactctactagactagatcgattacttgaattacaggaggataacattatttcatttgaataaagatgaaaaattcaagatgattatttatatcataagatctctcatgacgatcttctctgacgtccttcttgatctctctttcctcctttttataggactaattactaatatctatgaaaaaatatggatgatgaagtaatctctctaattttttttttttttgcctaatgtagcttgtgtgaatttgctaatgcagggggtcatattaacccagcagtgacgtttgggctg

SEQ ID NO: 21033 - DNA, 372 bp, Glycine max
  Intron number 1 from transcript Glyma05g02190.1 (locus Gly ma05g02190) derived from phytozome v7.0 (chr-ID Gm05; pos 1601944 to 1602315)
cttcaagtctaactgcctcacagcaaaattctcaggtcttttcttcatctcttcattctcgctattcttccttcattgtgtgttctgggaaaagtcaaaagccaacgactttatagagaaacccccctccccatttgaattattgttattttttgtccctgaaattatgccattttttggttctaccatgttatgagctgctttgttgatgatgttacggtgttgtgtgctatgatgttttgttctgtggaaaggcaatatttgttgtgttgtgttttgatgtcaattattacatggagcatacaaggtttgactttgatggtgctttgattctcaggtgggtttgcttttaagagaaaagagcgtagagca

SEQ ID NO: 21034 - DNA, 949 bp, Glycine max
  Intron number 2 from transcript Glyma03g04000.1 (locus Gly ma03g04000) derived from phytozome v7.0 (chr-ID Gm03; pos 3952154 to 3953102 reverse strand)
acgaccgtgattccattagccaccgtatatcgcaggtaaggctcttgatataattttgctttgtagttgaaatatacactaaattagctcataatttgtgagtaaaaatcaatttattttttttaattgtaaaaatataatttcaatactaaaattatataaagacagttatttcattgattttataattttttattgatttaaatgatatttttataatttcaaataagtagtttaatttcactcaaatcttttcttagtaacaactactacttaatgacttacatatttattttcattcacgtaaacgtgtcatttttttctaccatttcttttcttgtagattttgtgttgtttttgttaagttcaaacttctcggtttgtttgccttctaattagttaacattacaaaattgcttacatggaagcattttttaatttgtggtgtcatcacatgccaataattgattgagtcacatgagtgtttttggaagggaaaagaacaaaaaggtttaaatattgtaaagatatataattgaataaaaggtactggaacattgaataattaagaaattaaaaaatatttattataaaaattataagaaagtgtacaaatagatatatatggatataataattttgttaatttcaataaaaaaaatttcttttagttctttgacaagtgtcattatcttaaatactcattaacttttgttttaaataaattagtgtatttgaatgttattgtttttaccaacttttaatacccattgaaaaactaatatgttttttcataattaatccgaaggaatcatacaccacattgttaagatacttaaagtatacttctaacagaatttgaatgtgttttatttaatgccactcttgcattttatgctaatttggtgatttaatttttgtgttggaaaaatttagggtgaggtaccgg

SEQ ID NO: 21035 - DNA, 438 bp, Glycine max
  Intron number 1 from transcript Glyma04g41220.1 (locus Gly ma04g41220) derived from phytozome v7.0 (chr-ID Gm04; pos 47105831 to 47106268)
accgcacgtgccaagtattttcttcactattctctgttctctcttcttatatttgctttctccacacaactgacattgtggaggaaaagaaaaaagaaaacagtgtgagttagggatcttttgtgctcttcgtgtgtttatatagcaatgtgtgatatgtgggattggcgatcattgagcttgttttggatgtatttgtagtttgtactattaaagctgagactgatactacaactacatatcctcttcgtctttttcttttttgtttttttctttttgtataggtaatagtgacttcttttttctttttctgcagcttaatggtttgaggaatatcttatgatattattgaatattgtatgcaaatgttcaaacaaagttttttcattgcctgtctcgtcatccttttgtaggcaagcgtggcagaaattgggtgct

SEQ ID NO: 21036 - DNA, 546 bp, Glycine max
  Intron number 5 from transcript Glyma03g03540.1 (locus Gly ma03g03540) derived from phytozome v7.0 (chr-ID Gm03; pos 3320343 to 3320888 reverse strand)
ataacatcaaagggttgctcgtttgaatttccattcccgtaattccttctctttactttgtctatttcaattctaacaaaaaacttacatcactcttattcatagattatataatttctctgtgtatttgtttttattcaaaaaaaaaactcatgcgaaagtgatttttttttagaagctgattgatgttcacaagtgtcatattgaaattctcaaccatcattgatatatcaaaaatagacggttatcatctagattagaattgtaaatcaatacttgcatttgagtaagaaattggtcacctttgcaataactgatgcaggtcaatttaattttgttattaaactttttattaaaaactaatcttggaattatagctagtatagatagtgcatcaattaatttaacagacagaagaaaatgaagtcttatttaacactaacaaaagaaaaaagttatgtgcaaatttattttcttcctattattaattactgctgatttttttcaacagaacatactcttaggagcaacagaaacaactgctct

SEQ ID NO: 21037 - DNA, 841 bp, Glycine max
  Intron number 1 from transcript Glyma04g32130.1 (locus Gly ma04g32130) derived from phytozome v7.0 (chr-ID Gm04; pos 36535731 to 36536571 reverse strand)
gttactgttttctttctccactttctcttctacaggtattggctgtctcattgtttccattgagctcaattttagttcctacaactctgatacttttcttgttctgcttctatgatttaatgagttcccattttccattttctaaaaaggtctggctcttttgatagaattgttattaaggaggttgaaggcaacttgcattgatctctagatttgaatagatgggtcatgggtggatgctggtttgttattgttctaacaataatatccttgaagtcaatttggatcctcactttttttctgtcggttcatagttttttgtttggcattttcactgatcaaagcagaaagtgcaagaaggaatcaatgtatttctttttgaatgtatttttatttaaatttaaatttaaatacttagctgttgcatagtgatttggtttatagcagtagagctgtagattcatacagttacacccattaatggatatgataactaatttagataagttaacagtttctttattttttgttattatttggatgtaataataaatctctcttcaaaatctttaaaacgaagagggaaaatgaaaataagaaaaagtataggctcttaagtcctaactgtttctttattgaagctggagaaagtgtgaggttgcacatgaatataaattacattctttttattttatattttactatatctgtttggttctctaattccatctgggaagcaattgagtgagaaaaatagagctctgatttgttataagttttactccataaagattaattcaaaattcatcaatatttttttcttgttcatttgcagaagcct

SEQ ID NO: 21038 - DNA, 867 bp, Glycine max
  Intron number 3 from transcript Glyma04g12150.1 (locus Gly ma04g12150) derived from phytozome v7.0 (chr-ID Gm04; pos 11126349 to 11127215)
ctgggtctcctccgtaagcaagtatgatatcttcaatttgaaatacaaaatgttccttatttctaaatgaagtggcacatctaaatgaggtggcaagaaggaaaaataaccttgtcataacacctaggttaatgatgcttaagaatatgtgctttggttatgcttttgtgatggagatgctttagtgttctgatctcaaatcacttgtccaaagtaaatggggtatgtgatttcaatctgttttctactatacacttactataagtcaagatatcatatcatcgaaataaactactagaaaggggcacaagagacatgtcatgacctgcatgacaaaactaggagcattaatcaaaccaaagggcataactaacccacatacaaaccatctttagttttaaatgcagcttttttgctcatcactgaaacttaatccaactatgctgggcaatatgtaaaaccattttttttaccttaaaaagaaagtccgtaaaaacaaccaggccctatatcatatatatatcatatcctcaagcctaggtatgggaaaactatactttattggattagccagggttgagcaattggtggcttcttgtaatcttcattgatcatagtgaattttctttgtttcattcatgggtggggcctatagtttaaaataggttgaatgatatcaaactctgcctatttctgttctcttttctgttactcatttgtgcacttggttacagaaaacatactgtgctttggatttttgtgcatttgtttcaacttgcttagtttatgtacagtgtgaattttacatccaaatattaacattgagtgctgttcaatttttgaacgaaaaaataatgttcatgcaga

SEQ ID NO: 21039 - DNA, 722 bp, Glycine max
  Intron number 1 from transcript Glyma05g06070.1 (locus Gly ma05g06070) derived from phytozome v7.0 (chr-ID Gm05; pos 5630902 to 5631623)
ccaaggtacttaaaatggtttcacagggagcatttttcttcttctaaatatgcttttttttttttttttatgtgcatgctaatgctctctctcttggatcaagttcaagtgttcatcttttttgcttctttgaattttgtactttttagattaaatatgtgcatgcatgtctacccttttgagccttctgcttgttttctggattcatggttatgagttgcttgcctgacccgttttttgttgtaaagttttctacttttgttttgctaccattcatgatagctgagcttttctttttggtcttcatgagatctcaattactgggatgggataattgtctgtttgctgttttgtgaaagtggcatctgccatcgaaatgagatctttgaaatacaaaagtggtggcttttgattctgtattgtgtagaaaatgtttcctgaaaaattggtgggaatatatgttttttgtgatttaccagctgtttcattggtgataaaagggcatggctgttttgatctgaaccttgttttgggggttgatcttcagatggcatgccagtgttctgtattacgtgttagttatttgggccatttaaacaaatttaagcatgcaatcattggagtttgtttttgtttttgtttttttagcgttcttaatctcatgctgcattctagcttactgaatcaagcttgtaatctcatggttgtgcagaaggaattgg

SEQ ID NO: 21040 - DNA, 815 bp, Glycine max
  Intron number 2 from transcript Glyma05g06070.1 (locus Gly ma05g06070) derived from phytozome v7.0 (chr-ID Gm05; pos 5631816 to 5632630)
gactacagtttgactttttggattccttctttttgtattggcatgtctcacttctttatctacatctaacaattcccacttctggcccatagtgggtaaagttggtcccatctttctgtcctatggcatcttgcagagccacattgctttagaatccttatatggttatttgcaaaattgtggtctcagatttttgttgctctgtggagcctaaaaattttgaaagactttagttgctcttgggagcctagaaattttaacgaatgccttttttcataatttttttttccaaactctgttttcttgtatggtatttctttgcatcttatgaagctgctaaagtttacatttatgcttcaactataagtgttttcaaaactgaatatggtctacattgtaaagatatgaagtataaaagaattatcagatacctgactcatatgttctaaattggaagatatgaagtttaaaagaattgtcccttgtctgactctgaactaccgaccgagtctacactgtttttgttcattgggtgtcctttctgttgcctagccaatatggattatttggctgtaggagacaggaatttattattgaaaacagaagtttccatgaacacaagtttaaacaaaattatatcttatatcttaaggttcaacctaagtataatttgattatattgaagtcacatggttctcttactctactcctagtctcccacatcaccattcttgtttcctttacatgcttgtcctctattaatttatttagtaagcttttgagtttctgtacagtttctacattctgtgaggaga

SEQ ID NO: 21041 - DNA, 451 bp, Glycine max
  Intron number 3 from transcript Glyma03g00390.1 (locus Gly ma03g00390) derived from phytozome v7.0 (chr-ID Gm03; pos 178452 to 178902 reverse strand)
aacgtcttattttgaggtatgtgggcatagttgagtgttctattctacctctcttctttcatatattcttttttattagttaaaattaacttagatctcattaattaatttgagaaagagattgaacaaatgggagaatgaaactcaaatatttaccaataccaacttgaattttacttctattaaattaatgcatcaaacaaaatctaaaatacatattcactgacttaatggctcttttaatttctcaaatataataggaactgattatcaaatgtaaggcttattccataaaataaaaataaaaattactagctatattaaaatgacttctcttttaatccgtctgtggatatgaaaatttaaccattgaagagtgaaggcatattaaaactaatagaactatctggatcaaatttgcaggagttcagcatataaagggaaaagtgca

SEQ ID NO: 21042 - DNA, 643 bp, Glycine max
  Intron number 1 from transcript Glyma04g06360.1 (locus Gly ma04g06360) derived from phytozome v7.0 (chr-ID Gm04; pos 4867517 to 4868159 reverse strand)
agcgcattagtgtctctctctctctctctctctctctctctctctctttctaagtcatgattcttgagcaataagcatgcattatactctgactgattagttagtacaaagtatatatctatgacttatctgtgttttatgattttgagacttcatagaaaaaaggaagaaaaaaaacatagaaaaagcgagaggatataccaataaccaattgctttgtactctttgcaattccgggcaaggttttactgctcagtagtagattgctcattttacctagcattgatcattagctagaagcttaatctgttaaaggttctgttccttacgacattcagattgaaatgtatgacttctaagaaaagtataacgaatcatatatctgttggctttgctgaaatagagactttgctttattttttttttccatgagaaaattgatagtttaccctgccaatctccttttgataagaacatgaagaaatcatggtattgctgcatcatttgctatctttacctgctatgaccattaataagaaaaatttcaaaacgatgtagcattttataatacctaaactcaagtctacgtattgtgtttgccgtgacagtaactaccatggctgtttggtttctacttgcagtt

SEQ ID NO: 21043 - DNA, 594 bp, Glycine max
  Intron number 3 from transcript Glyma01g37490.1 (locus Gly ma01g37490) derived from phytozome v7.0 (chr-ID Gm01; pos 49847254 to 49847847 reverse strand)
aataagatcatatctttcgacaaggtagaccatttactgcatttgttatgagttatgagctgcctccttccctgtgtatttatcttggtgtctctagttctgtttggaatttttgttaattgttttgtgaacttagtattatttttgttttgcactgtactgcatttgcacataaaaaatagaatcattaatatatttcttatatcgatttattgacagattagtgctttcttatcttttagccttttttctgtaaaaaaaatgtagcttattttgctttcagaaagctttataatcaagatgctgcagatagagcttgtagctgaaaagtagtttctgcataaaaattaagcaaaactatgtgaattatcattcacaaacacccatatgcagtacatcttaatgcagtcgtttctcctcttgagggcaaacgacatctaattctgctagtcactctgcaacacccatttgcataaaattttcattaattatctcaatggaataaaagtcaattcaaacgttaaaatggcaggtttgtatacttaactctgaagtttctgtcaatgtctttttttaggttagtggaatattggt

SEQ ID NO: 21044 - DNA, 1015 bp, Glycine max
  Intron number 1 from transcript Glyma05g01900.2 (locus Gly ma05g01900) derived from phytozome v7.0 (chr-ID Gm05; pos 1366435 to 1367449 reverse strand)
gcgttagtttttttctcttttttctttcatcatagattctgtttctctgtgctcctactttgaacctgattcttctgttatctttaccgatatggtatttctaaaagcatgttttgtgattctgacatatttgtttgcgcgtgctgtcccttttttttttaaatcaaattattgaaagtggctttcgggtaaattctttccttttaggtgctttgatgataacaaaaatatgctgctgaaaaataaaacttactcttaaaccgatttttaattttatgtttaagaaggcatgtggaggaaattaagggagatcaggggaaagagttattggttgtttaattcactagccatgcctcaaaatttttcattttcaatttaatcatgtttttttgtttgtttatcttagggacttgggttctaatttatgaaagtgcaatcgaaggttttttttttttttttcctgtggtactaatttaattggaaccaattcgatgccctatttgtatttggctagttccaatttattaaacttatttgaaattaaacttctggtttttcccatctgtaagttttgactattctcattatttccagatccgggttgggtactttatagactttttgctagttcttttaattctatttatggctcctgatgttataattttaaaatattttactgattaaaaatacgtttttttcttttttgattaaaaaactattactcatttattaaattttggagcgttttgtaacaccgcctgcagtcaacactcaacaacttttgattgaacaatgtgggttttatggataaattaaatgctgtattctgacatcatgccaagtagttgaaattttaaaatttaagccactgctagtagtacttccctgggcttatggcgttgaaaatatgactaagatagtacggttctcttcatcttctttaatttgatgagaaatttggtgcaattctgatgcagctgaggccatacttcttggttttcaacattatctt

SEQ ID NO: 21045 - DNA, 274 bp, Glycine max
  Intron number 3 from transcript Glyma02g04520.1 (locus Gly ma02g04520) derived from phytozome v7.0 (chr-ID Gm02; pos 3685232 to 3685505)
ttttagcagctgcattgctaggattgcaagcacaggtgctgagaaaaaaacctaagaacctgtcttatttattgtttacagttttcctcttttttgattggcaaatatcaatttattagatacagtttttcttcttagataatgacttgaggcgcttttctagctcccatgttttggtaaaagaataaaatgcacttacgtacatttgatttgattaaagtgatgagtgatgactatagggtgtggcacttgggaaggtgaacaagatcaagtt

SEQ ID NO: 21046 - DNA, 415 bp, Glycine max
  Intron number 4 from transcript Glyma02g04520.1 (locus Gly ma02g04520) derived from phytozome v7.0 (chr-ID Gm02; pos 3685591 to 3686005)
gattgcccgtctcttcactttataggtacttaaaaaaaacaaacacaaatcccttataattctctgtttcaacaacttttccttcgacttaactttaataatttgtgttgtttcttccattaatattagtgtagtagtattgaattgcagcttaaatatcttttgaatccttaaactttcaacacagttttcgtccaccagtttccaaaatttaaaaagtgattatttttgtctctctaatttgtagtaaaaactaagtatgcaaaataatcacaatttagaagtaaaaaaagaaacatggctcacatttgataaaccagaaagatatataagccttcaactgattaattaatacactttgttggtgttatatgatgaaggggagaaggattttgcgaagccagacagcattgct

SEQ ID NO: 21047 - DNA, 984 bp, Glycine max
  Intron number 1 from transcript Glyma01g32380.1 (locus Gly ma01g32380) derived from phytozome v7.0 (chr-ID Gm01; pos 43870658 to 43871641)
acggtcttagtaacaagcattttgcggccactgaggtaacccattttgttttttctctttaaagcattgtgattcctgtagtgacggcattgctcgattgaaaaggttggagctttctggtttttgaaagttttaaaaataaaaattgggtgtttgtgttgtttttacttctgggaagtgtgtggtgttgtgagaggaaatcgggttttatttatttatttttattggtttttttatgatttatgtaatggtgttttgtcgcactggagttcaaggtttccattttttttttgtttttattatttggttgtttgtattctgctgagtacttgggtggcttggatctgaagaacaacaatcatttatttgtaaagtcaaaataatgtattttatttgtttgcttgtttattttctggtgctatgctaactcctaaaaaccctttgccgtgcgtgataatgaaggtcatatatatgatatcttcgctgggttacattttttcagtctaatattttggtaggatttttctttttagatgaggacaaaacttgaatgcagttctttaagtgttttttttttgtgttgttctctgattagaattgaagtttcatctcgataatctgcctaattaatgtttgcgttaaaggtcaatacaggatctcaaagtgaaactctaattttgtttcgaaatcaacactgaatgcacataaaaaattgcatctaagttctctccttcacataattttgaagacaatatcattttctaatgcagagttctaacatgtctcaatttaagacctctcactggagtgaaatttggcatagacacgtagtatagatactatagaactcatttttgtgtgtggatgtttactttcagttctttttaagcatttgtataattgtattgagttaatttctcggtgaaagtttttctgctcttcttttcagccgcatcacacagaagagcttgaccctgaaaaact

SEQ ID NO: 21048 - DNA, 1015 bp, Glycine max
  Intron number 2 from transcript Glyma02g08170.1 (locus Gly ma02g08170) derived from phytozome v7.0 (chr-ID Gm02; pos 6392149 to 6393163)
gaagtcattaaatctgaaggagttcacttctttacgtatccttactataactgttttgtttacagtctttttgtttacagtagctgaatatatgcttttcttattccttttgactataataatttatgaacaattcatgtgggtttcttccatacttttcactaaaaagggaaaatagcatggtaagctattttctttgcttttgaacttggtggtgaaaatgtgaaatgaaagaatgtcagaggaggatatgaattgcccatagaaatttattcctacaacaacaaccaagcctgtttttgctaggtaggatctggtaaatggatgaaacaatgcaataatgttctgctgtgaatcatgtttatttctaactcagaattttaaaacctttaatttggtaaaaaaaaattgttgcttcacatgatttacttgttctattcttctcccatgctatttcttatattatatgaaccaaatcttcgtaaacagggagaattctcttgttcctttaatttcccctcagtattcttgcgttgtacataacatataaacagtgtacatttgccaaactgcttgtggaaaattatctctgcatgataaggcatataaagatgttgacaggctcccatctggaattccctttgtccccttgccctttttttcttcataaaatcctatgcatggttgctttgagtttatcaatgaagactgcgtttatgctcagcttgttagccatgctcaaatgcttgtgcatggacacattcaaaatgataattattaagacaatgtaatactgtaaccatgttattctccaattacattcattgaccaggtgagagaagggtatctctttatgatttacattgtagacattataaggcacagttgactaggctttacctaaaataaagctactcatcatggcagtgtattttcatggtcatactctctatccatatcaatttatatattagatgctgttttccttaacatttagcagtgttcaatagctgtg

SEQ ID NO: 21049 - DNA, 905 bp, Glycine max
  Intron number 2 from transcript Glyma04g34840.1 (locus Gly ma04g34840) derived from phytozome v7.0 (chr-ID Gm04; pos 41095323 to 41096227)
ctggttcgtaatatctgcatcaaccctgaagtcaggtctctctctccctcattttctgaattgaatttggtttctttttcttttaggttttgatctttgaaattagttttcatgctgtgagggttttttgttgtttggatgggatcgtaatgaatgattagggatttgggattaatacttgttgcgtttttttgttaaatttctcagttgttagtcttcgactccttgtgaattgttattacctgaattgtttactttttttataataaaaaaatgataaattggtatgtgcattgaagataaaatggtgaaggaaagggggaaaagaggataggaaagtggggaggtgttgactattaattagaattcttccttgaccagccaagtcaaaaagcacgtcgaagaatcagggtgaatattgatttttattaattcaattcggaatctttggaatcagaatgatatacaatttggtccttcaatgtgttaatcatgttttagacttttcagagactaattagtcctcaaaagtgtaaatatgtacaatttaattcttaatgtattaattttgctcacaatttattcacattttgattatatatttgtgatgaaaggactaacaatgtgatttgaggacttaattgcacacaccaacacttttgggacaaaaaataaataggatatcactttcaaagatcaaattgtatattaactctttttaacaataagttggatcaaatattttgtatgcattgagtttttcgtcatcataagaggtgtttctgttagttaatttaattaatttgtattagtgttttggttattaatgggaaacaatggatgattcatttgttcttgtcatgtatttagggtgaacaaggagggaaggaaggcaggagttttgg

SEQ ID NO: 21050 - DNA, 870 bp, Glycine max
  Intron number 1 from transcript Glyma02g15770.1 (locus Gly ma02g15770) derived from phytozome v7.0 (chr-ID Gm02; pos 14281403 to 14282272 reverse strand)
ctttagctggtaccgttgcattcaaggtccatttctttttttattattttttccaaattaaattgtgggttttgtaagttacaggtttataaattttgggtgctgattatttttattgaaacctattcaaagctccttttttttttcttcttttttaatgttctgctaattgctaattgctaattgctaattgccaagatgtttagttctaataaatggggttgagtctaactgacgagttaatcccccacaatgttgtgaattaagatttgaatatctgtaagggaaatcgtccacaattagtgtcagaatgtgtcctacaacaaaattgtctttaaggatgtaccatcagtctatcaccataaaacatttaagtaataaggcttgtttaggtaaatttcgccgtaagcaataacaaggaaaaatgaaaaaaaaatttcataagttgaaattaacttatgcataaggttataagctaatttgtagaagttcagtttctcaaaaaactgattttaagataaaaatttcatgagttaattttatcttataaaagatcttttctcattttcttcttatttttatttcctacaagtgttcctgaataaatttatccaaacaagtccctaagaaaaatacatgtggggaaaccaaatagaaatctatactgtgagggttatgctggtcgtggatgaagaatttaacaatcaaatattacgtacacatgcatattaaatacaaaatgtattgaaatatccagagtttgatgttttcattaagaaatgcgttgcttacagtacttataaagatttttttgtatatatgagttttggatattgaagtttatttcctcttttgagcagcactgttcta

SEQ ID NO: 21051 - DNA, 468 bp, Glycine max
  Intron number 1 from transcript Glyma02g43630.1 (locus Gly ma02g43630) derived from phytozome v7.0 (chr-ID Gm02; pos 48382465 to 48382932)
ggccaaattcctggttgggagtccaaacattatcagtaagtttttcctgcattattttttcttttagcaactatacttcttctgtttccttttgcttaattacattttttttcattttaattttgataatgtaaaatattagtctcttcaattttttctccagcaaattaagtctttctatttttaaaattcagcaaacttcatctcttattattagtttacattataaaatacatacttttgaacgaaccaaatatatctttagtaaaatttcttaaataaatatttattctacttacaatcaattatacatcgattattgaaataatttaattttagtatttgtctcagtcacaaccttgatagatgtctgttgtatatatacattgttttagtgaaacatacatatgaaaacttcatccacactctgcaggcatcaaacagagctcattgaaaatattgttgaat

SEQ ID NO: 21052 - DNA, 650 bp, Glycine max
  Intron number 1 from transcript Glyma01g35940.1 (locus Gly ma01g35940) derived from phytozome v7.0 (chr-ID Gm01; pos 48381656 to 48382305 reverse strand)
ctggggcctctcgctctgctgcttctttgattcaggtgatgcaagtttttagtgtatgaatgatttgcaatgtctttaaagattaaatccttttgtttagaattagattgtgttggttaagccagttgagtcttgtgtagaatctgtaccttacatgatgattcgattttggttttctggtgagtatgaatacaaaagttaaatgaacactatccatattgatattaagcataataatgatatgtttaaggtgattgttctaacctacccttcagtggttttggttctcattcatctgcgtgtttagtagtcaatagcacgctatggttgagcagagcagtcctagactgctatgggattcaaatagcggccattgtggcttttcagaagctatattggcgctaccatgatataaccttcaaaaacccatttttgtacccctggaacacaattgtttatactttataccatttagtttgggttatataccatttaaaataacggtcatcccgcagcctattatctcactatagcgtttttagtgttggttgctacgtttcactatatgaggttgataactatgattgaaagtttgaacttattttttcttcacaggcttcaaccaggagctgtttctttgctggttttgc

SEQ ID NO: 21053 - DNA, 392 bp, Glycine max
  Intron number 2 from transcript Glyma03g31600.1 (locus Gly ma03g31600) derived from phytozome v7.0 (chr-ID Gm03; pos 39476295 to 39476686)
aggtacctttgatgttgatagagtactagaaaaatcagaattagcgacaaaaaaatctgtatggaattcttaaaaaatccgtgactagtatttagtgacagaataacttctctgtcactaaattcttttattagttcattcattgatttttaatttataatgatatgtctctcattttgaatgatcttatttggataaatttttccaaaagcaataagaagataaataaatgaaataaagttctcccataagcctttagaatcaaaataggaccaatggtactgtttgttctttgagagcttacaagtgatgcagtggaaatggaatcggttttcagttttggcaggttgtgttgtttgtgcttggtaatgcaggtgttactaagagaccca

SEQ ID NO: 21054 - DNA, 1027 bp, Glycine max
  Intron number 2 from transcript Glyma03g41750.1 (locus Gly ma03g41750) derived from phytozome v7.0 (chr-ID Gm03; pos 47156352 to 47157378 reverse strand)
ggccaaaaggatattctcggagctaagtttccaaggttagattgaagctctttttctcatttaactttttcttgtcataaattaaacaagtttaattagcatttttttttgtaggataagtttatatagtaattgccatttgatttcaatgtgacagaatggttcacccctctaactttatgacatagaagcatgagaacatagtttagttagtgccagaggccttaggtacctgctaactgaacaaccactggccaattagctaatgatgtttaatgagggaactaaatatgcatgtacgatgctctctttccttgttttaatggttatagtccctccagtgttttaaaatgacttgcaatctgtaaacttatccaaaggatcacgtcagctagtttcaaatgtatccaaattagtgctttttgttaaatgtgtcgtgttatattaatgaggttatgcgagtggtgcaagagggatgcatgcatccgtacactggagaaacctgacactcttataaagcggaacaacttgttgcaaagtgtcatgttggatgtgggtttggcagctcatgtgctccaattcagaagtaaatgcagtaacatgctatttggcaaattgcaatcgaattcataatgagataagaatagatcattaatatccatttttctgattttttttatttctggaagtaaactgtactataaccttcactgcaactaacaaactatttaatataaaaattataaaagaatataaaaaatacataaataatacaattttatgtattttaataattgttttttaattttaattctttaaccgtgcctatttgcccaaaaaaatacaggtttcttgtcccacttccaaatcaagccataaaacaaaaggggtttttatttggcattcggattcggaccataataactttgccaatctaatatttatattaataacataaaaataagttattttctagttttaccgaaaaattgacaactagtggtttgcattgcagaggatattacag

SEQ ID NO: 21055 - DNA, 522 bp, Glycine max
  Intron number 4 from transcript Glyma02g37280.1 (locus Gly ma02g37280) derived from phytozome v7.0 (chr-ID Gm02; pos 42613615 to 42614136 reverse strand)
cattagaaaaggtttaaaattaatctctatctggatgacatatagacaaattatctctatttggatgacatataaacaaattgtggcgggatagttagatatgaattgaattatgtgattggtttttatgatttgacttagtctcttaatgtcaatgttagaagttttctattaatattggataaattctcttagacaataaattagactttaataaataacgaaactacttgtttaatcttcaacacgcaagttggctgattcagttttcggtccaattgcgttgttcagaatttcctacctagctagagccaataagaataagtatataacttgttaatcgctgttattgcttattgcagaattatatatataactttagttatcttttgaaggacaattgtacaagtttatacttaatttgataagttttggtcttatagatttgaataagacattatgaacaagatttgagtaattaagacatgatgaccaatttggattaacgtgtaggtggagaac

SEQ ID NO: 21056 - DNA, 847 bp, Glycine max
  Intron number 1 from transcript Glyma02g13240.1 (locus Gly ma02g13240) derived from phytozome v7.0 (chr-ID Gm02; pos 11498372 to 11499218)
tactttccttcgctccttctctcaccatttcccaggttctttctctctcccttcatctttttactgtaaaaataaaatctttaatggcatattagttatgggttggtttcaatgagtagttggttttgaagcttggaaggaataccgtgaaaactttagcccatgtttgttttgaatttagaacagttactttgactagtttcagagatgcttagttttggttttgtacttttgtttgctttctattgtttgtcaggagtttaatgctaataatttcaataaattctttcttacttgcctcttaatctcatgtggaattggattctcttgatatggctttgcttttggagctgttttgtagatggtttctacttctattaagggaatatcctaaatagttgtgaagaagctgtaaaatgaagcttctttgctttgttactttaatgcccctttttccatcctcatttgttctctctactaaaatttcttccctttgatatttactagcaactcaatgattaagataataagatcctatagtaacacacttgtcattgttggagatataaggttggatgggtggttaagaaagaagggaaggagggaaaggtcccaggtttgatccctcatgctaacaaaaaactaacaaactattaacattttcctataaaagaaaaattgttgcaattagtcgttggcattgttgattgttttgttttgtttcacgatatctaatctaggtgtttattaattcttctctagaggctatgtgaagttatagttctcaaattttaggtgtttttataaaactattatctcaaaagattcaagtatgttgaatttacag

SEQ ID NO: 21057 - DNA, 558 bp, Glycine max
  Intron number 1 from transcript Glyma01g26900.1 (locus Gly ma01g26900) derived from phytozome v7.0 (chr-ID Gm01; pos 35719617 to 35720174)
catcttctctctttgccacttcgtcaatcaaccaggtttcttgaccacctttctgcgtttttggcaaccttcttttctttttccttattttttgttgttgttaccagcgtattagagtccaccacacacaaacacaagaatttaacgtagggatttaatcaatcaacctaatttgattcttactgacaatcatcaagatgaataaaacttcattgtgttgttcccatgtctaaaatcatgatgaaaactaagcgcggaagcgtatttggattagacataatgaaataatgaaaaagattaatgaagatcatgattgattttatgatctttgagatgtagagatttattttttctaaggcatcataacctctttgggccggttattgaactaatggttgagtctttgccctccttgaaaatatattatgtgaaaattgaattcaagtatttccaaaaacttaaatacattgggtttctcaaaatatggtttgtcatattgtctcttgacccaatttttttactttgttttttgcatagttgccgaagactttggaggag

SEQ ID NO: 21058 - DNA, 917 bp, Glycine max
  Intron number 2 from transcript Glyma04g31190.1 (locus Gly ma04g31190) derived from phytozome v7.0 (chr-ID Gm04; pos 35427010 to 35427926 reverse strand)
gtcagctttgatttatttcttcttttgttgataaagtaagttctatttgatacaatactcaattttcttgcacctaaatgttaaattgaatgtgtgaaaagagaacacacactttttgatttggttctgccgttttggacttttagtgctccttatgccttcaaatgcaagtagtactcttattaggaagcaccaaaccacaaaaatgtaaagcatttcaaaagctccaagtgcatcatgggttttgatgtaagttttttaaagttcaactgaacaaacatgatcatatacagtttcaattgcaggttctttgacagagaaactattacttttaggcaatctcacccatgattaatctgtgttgttcaatctataccctggaagttcaacaaaaaaaatctatacgctggaaaacaaacattttttttcactcctagcatgatagccacattttctgtaggctccacaaaacccatgaactaagcaaccattagaaattgcttgcaacaaaacataccatttttctataacactatttagactatacactcggactttaccatcacaatccaatttcaactttctctgcggcaccgtgccataatcagatttaacaaaaagtgaagttatgtgatgagttaaaatgcccaagagaattcaaaacatcaattctacaactattgaaataggacctgccaacatcccaacttagtaactaaggctttggccagtaagatcttgaaacatcaggaccatcataggacctgccaacatcccaacttagtaactatgaacgttggcatcctcgaacaacaaattatagaaaccggatgagtggttactctagcttcatgaagacactagttttgtgtatcttattagaggttaataaggaagtagtgtcaattgggaaatca

SEQ ID NO: 21059 - DNA, 982 bp, Glycine max
  Intron number 1 from transcript Glyma04g31190.1 (locus Gly ma04g31190) derived from phytozome v7.0 (chr-ID Gm04; pos 35427970 to 35428951 reverse strand)
tttttctagtggtcgccgcatcgttgacgctgactgtacgtacttcatctccttcagaattcggaaggatgccataaacaagccacattatggtatagaaatttttgggagtaagggtacgtcccgtcagtgtcaaagatgtggcgaatactagaaaaccttttgtcatttgaaagcatttgaatggttgtcagtatgtccaatcagacctcatttgtcactttgactgttcatctatttttttccacagatatcctcttcagaaacaatttaacttgaggtatgatccaacaatgaatgtgggtgtcttttttttttttaggattttcagatgttgatttttcatgttgtggaactaactcctttcattagacctaactccattggtggtttgtttgtgttcatgatgaatcaacgaacttgtagcctcgccctactaaaaataagtgtgggattttctcgcccaaccacaggtattctcttataagcatactatctctatgatctgcaatctacatgattcagacatgggaacaggggacttaataaagttcctattttcttttcagttatttcttagttttaatccacattttaagaagggatacttttcaattatcattttcagtttatgtgttttcgtttataattctgaaatgctatcttgttttcattttaattcttaattttcaccatttccttactaaacttgaatacaagaaacacaacgaaaacaaggtgacattttgtagttaattactgaattttataatgaaaaacacaaaaaagaacaccccagaaagttccaaagtaattttgggatgctggattttgaatataaattggccaccatgatcctagaatgcaatacttgttcttcaactcactgtaagtacctatatgttttatatctgtggctaatatattttttttgttttggatagcaggatcctggttgttgaaatcgaggtgtttgacctgc

SEQ ID NO: 21060 - DNA, 896 bp, Glycine max
  Intron number 2 from transcript Glyma02g46510.1 (locus Gly ma02g46510) derived from phytozome v7.0 (chr-ID Gm02; pos 50444782 to 50445677 reverse strand)
cggttgaaacgtttctgcttctgctcgctcttaaggtgattatctattcttctcttatgttaaaactgcaagttagaaacatcttgtgtggtttgtatgttttttttatgctttttctgtttgttagatctgttttggccaccttgcaacaatttaaaaaatgtttcagtgagtttaatctatgattacaacagaaatgtggttggtctctgagccatgggcttggtggtcatgcatatattgtctttgagttaactttttaatctttttcttttttgggaacacattgtgctattgttggaatgaaattctacaagtttttggtgtgagataatgtgagtaatataaggatgctttgttattggtgatgttttgttaatctggtctggtattaaggttttatcagtgaaaaggagaataaaattttgaatttgttcttttggttattgttttgtgcatttgaattgagtgaaatttgctcagcagttttgtcctttcactctcttgtcagacaggattttatttgcaatctcattgcttgctcaagggactcctttgtctataaaatacaaggactactctttgcttttgagcttatgttcttttgtctatgctgttttctttaatctattttctaagaggatgcacagtcctcattctttctactttgtctcttgatgaattctttttcttatcattttttttaaaagatctaaagaagaaaaacaaatgataaaggtttttttgactttgacaactaggttctgtcagatgttgaactactcattctttttgtgctcttaatgatgcttctttcattttgttcgttattgttgtaactaattaatgacatacaatcaggtgaggtatccagatcggataacacttattagggg

SEQ ID NO: 21061 - DNA, 528 bp, Glycine max
  Intron number 2 from transcript Glyma01g03400.1 (locus Gly ma01g03400) derived from phytozome v7.0 (chr-ID Gm01; pos 2898089 to 2898616 reverse strand)
tacaaggcccttgtatatctgaccttactcttcaggttgtctttcacttctcactcttttattggttttaagtactaggtctttttagataaatttatccataaattttttttattcataggaatcaaagatatatactaagtaatttataaacattctgctcaatcaattaagttagacctttggattatttataaatatttatagaaaaagaaaataaaaaaaaatgaaatgaacttattcataaattaaaaatatttttagagaaactcaaattaacttatgaattgccattaacttatagaagaatattattttttgttttcttcttctgcaactacttataaagaagttgattcgaacataaggtaattagtctcaaaataatagtttgcacgagctttagaataaaatgtataatttgtatttgcatagcataatatacacgcacacacaaacaatatcttatgtggcattttgaaagttgtatgtttaacatgttagtgcaaattaaattctaacagatag

SEQ ID NO: 21062 - DNA, 507 bp, Glycine max
  Intron number 1 from transcript Glyma02g43020.1 (locus Gly ma02g43020) derived from phytozome v7.0 (chr-ID Gm02; pos 47900408 to 47900914)
gtgttaaggtactaagtaattattactacttgttgcttatgtatgatattcactttagctttgaaattggctgatttttttttgagaagtatttagaaaagagaataagaagataaaatagattgaaccggcatcaaatatgagagctcagagctggctgatagtataaccacagttgtaagctttaaaaatgtgataagttattttaattttgcattaaccggtgctggttaaggtcaatcataagcttctagagttggtttagtttaactgatcagagattagtagaaggtaaatctaaccattgtcaaatgtttattgccatattatttgttgccaaatgttttaatcaggataaccagataattcattttctttacctgactaaattcgaattaaataagcatcacattatttattgctaaatgttttatggctcttgaactttctttgttgtaattgtaccctaaatctcttaggtgctggggactttcatcactgaagggg

SEQ ID NO: 21063 - DNA, 767 bp, Glycine max
  Intron number 1 from transcript Glyma01g35320.1 (locus Gly ma01g35320) derived from phytozome v7.0 (chr-ID Gm01; pos 47845373 to 47846139 reverse strand)
cttcaccaccctgacgggatagcaaatctttcgttcgttcattaaccattttcactctcatttctcaaattcctttttttccccttatatccctagtttcattttaatcgggtcacatatattgaagcttttcacgaatagggtatcgcttgttcttcctaattctcttttgttatctgaggtcggtgttccaagatctggtcttcttatgatgcgtgcgtgtttgtttcaactttaaatgtttgaaattcatgtaagcctagatagacgcatctctgtaatcgatatatttttttttccctttcattttactgtgtggtgtaaattggttgttaattctgttaagggatgagagcttttgttttttttctggtaaaattgacgaatccggtgtatttttctgacttttatttgatagcttgagacttaaagtactcgaaactatgtttttggtccttgtataaacttctgagaaaaatgctaacaccaccctcaaagacactcttttttaacacacacactctattattgtatgaaatttattcaaaattacataaatttatatgtatcacttcttatttaatgagtctcactaatggtttttataattttcaataaatttaaccaatagtaataagtgtgttagaagaagtttatcagagtgtactcggcaattttaaattttgttattcttgggaaagaattaaataaaaccctttttgctgggtgcagaaattgagaattgctgctgctaatagacaagcttc

SEQ ID NO: 21064 - DNA, 478 bp, Glycine max; identical to SEQ ID NO: 16699
  Intron number 1 from transcript Glyma04g18940.2 (locus Gly ma04g18940) derived from phytozome v7.0 (chr-ID Gm04; pos 20683604 to 20684081 reverse strand)

SEQ ID NO: 21065 - DNA, 679 bp, Glycine max
  Intron number 1 from transcript Glyma04g06460.1 (locus Gly ma04g06460) derived from phytozome v7.0 (chr-ID Gm04; pos 4932085 to 4932763 reverse strand)
gctgacgaacgaacttaaaggaagcgacgattcgagtaagaacatgtggttatttacaatttaattttgtttattaactaatttaatattcttaacctcaaaatatacctaactgttactgcgtgtgcttaactcgtttctgttgtctctatagtaaggtctgatttcctgattagttcttaattgtactagtgtttgaccgtgctgtttggatttgctcttgattattggaattgattgtatctggagtgctatgtgattcgtgtattgtctcgaatgtctcacttgttctcttccaaataatgttatatcttattcagacatcacttatgtattatatcagcttcagcaattactaagcttgtatgcgtatgacaatagaattcttcccatagttatgattttccttttactactgaatttcttttctatctttttgtttttggaatatcaattctacagatacacgagaaactaatgtttgtttctctgttagggtcttagggatgaaaaagacaaaatatttttacacttttactctttcgttggctttgctcctttctttctctccacagttccacagctttttataactctcccctggtttttgtaattaactatatgatgttgttgatgttctgcagcaggacagttacatcagagtgatacatcttttaag

SEQ ID NO: 21066 - DNA, 726 bp, Glycine max
  Intron number 1 from transcript Glyma03g41980.2 (locus Gly ma03g41980) derived from phytozome v7.0 (chr-ID Gm03; pos 47319832 to 47320557)
tttcttgcactaaagagcagctgcagacaaacaaggtgagttctctctcacatatccatctttgttgcttttgactgtcttttcttctccgaaatattcatgcatggctactaccgctcactgggcaaacatggtgttcgatttttttctcttgtcttttctttgatgcacaaattccgagctgttcattctgaggtttggtttggtttgtttaaaagctgacacaaatatgaagttccactagatttaagatttgtttgtatctttgttttaattttctagctatatcaaggatatatatgatattcgtggcaaatatagtagaaaactcgatccaccgtatattggtctcctatcttctccttttgtaccaaaaaaatttatgatcatgatcctaaacacaaaaagcactgccacagctttaacttttactctttaattaccttcttgctcgtgtgatgattattatcaaatatataacaggaaaaagaaaaggattaattattgatttgttattattgttgattcttaaagtttactcattcctcttgttttgactgtcttgtaaattacctccttaatctgttcgcgtaatgaagttaattattaccaagtcatatgcatggtcttgaaattttaatttttatctgtgtggattcttatcacgtacatgtgaacattacgtaattatagcctcttttggggttggattagctggtgagatcc

SEQ ID NO: 21067 - DNA, 926 bp, Glycine max
  Intron number 1 from transcript Glyma03g22190.1 (locus Gly ma03g22190) derived from phytozome v7.0 (chr-ID Gm03; pos 28177015 to 28177940)
agtttccctgaggatttctttctttctcctgataggtaatagatcagtctctcaaaataaagttaagcgttaaagtagaaacctcttccaattttctttttcacacatatataaatcagatattgaatgtaaaaccacacgcttaacgcttaagtaagccaaacctttacacacagttcaatacatcttagtactcattattacaattttcaagaaaatagttttgctaacttaggaaaatgattaaggaataagaaaatattatttttattaaaaaatggtagaatgtgtattagtagcattaaatgttataatttttcataaaaatagtttaaatcttttaaccattaccatattagagcaatgaaaagttgaagtactgtttgtttgtttatattaaactaaattcttcacattcatttttttgagtattttaattggcacgtgttattaatgtaaaatttttcacacatcgatcaaagggcatggattattatatgatgagtttctctttaaatgattctagctataatatttttctctctttgtcatttttttgtgctgaattattattcaattgtgggacatgaatatatatatatatatataggaaatgtggacaaccaattggaaggataagccaaatttcttgacctacaaagatggaaatttataagtatttatagaagaaaaaataaaataaagttctttcaaaaattaaaattatttggttttatttaagaagattatttggttttgtttttttttttgttttttttctcctattataagaagtttattcaaacttagcgtagttagtctcaaaataatagcttacaagagctttagaataaaatgtataattaatttgtgcatagttttaaattatagaatctggctcaagtcccacagcaggaggcaaaggt

SEQ ID NO: 21068 - DNA, 555 bp, Glycine max
  Intron number 1 from transcript Glyma04g41540.1 (locus Gly ma04g41540) derived from phytozome v7.0 (chr-ID Gm04; pos 47414154 to 47414708)
cctcacaagtggcccaccacctggctgtcaaccaagttactcataggacttctttgtaattacgcattactattttaaattatttaattaatattttaatatcctcgtggcccccactcctctcttcaagtcagccgccccaccttttcctttttttttttttttaagataaaaaagttccatcgccaaacggaaaaaacactcactccctccctccctctctataaattcatcctttacttctcttgaaaccactgatctcaaaccatcacttacctggcggcggcgcagttcagttttctcatcacttcttcttcttccgtttgcatctgaaactgttggccttgttttgattcaacagaatatgactttgtgaattactataaaaaagccagatctgttgcttttcatccattaacgagggaaaaaaacattaatataacgagcaatttctcgtttttttctctcttctaattaaccagtttcctgaagcgatgtcgtgttctctctcgttttcaaggctttcggctcggtcagcgagaactcttccgcgcg

SEQ ID NO: 21069 - DNA, 913 bp, Glycine max
  Intron number 2 from transcript Glyma03g00590.1 (locus Gly ma03g00590) derived from phytozome v7.0 (chr-ID Gm03; pos 322951 to 323863 reverse strand)
ccattacacaacttggtggaccagatagtgggtatttcttttcaatattgagaattttgagtttaaagaacttcttcctctagggaattttcttttcttggaaatttattattgtcttgcaaaagcatgttggaaagagaaagtaataggggaattgtttatctcattttcaagtatatgcaatgttgtatgtaagctttacttagtttagcacatgaacgctgcttgtgtgattttatcgaagactgatcaatttattcctgtaactgttgagatacttgtttattttgttacttgcattccaaggattgcactgagttgcataccaatagacaatagtcacaataccatgtttggactgtgtgaattgaattgaacgtatccgtaaatgagttataatcctactacctttgaaattataaatgactcagaagttttattttgcctcaaacacagttcacctttttaatgattttgaaagttcttcaggaagtgccatttttttcttgtatagaaaaaatagtcatatcgatggtcatttgagtgaaaaaaaaactagcaatggtaagttacattggaatagttcctattatttcttttttctgtggaatcaattatttggcagcaaagattgttatttgaaactgctgtcttcaactttgtgtgcatgccaggcaaagcagacactgcactttccattcacttgaatttttaatactttcagtggctgattatttttatttgatgtagattcattcatgaaaaatgctactctttttcttcccttttttattttggcttttacttctttagcttgatgatctgcaaaatttagctatattcctggaaatttttaaatttttttaattaattatttatggcaggagcaacaccaaaaggtgttcttagagtg

SEQ ID NO: 21070 - DNA, 208 bp, Glycine max
  Intron number 1 from transcript Glyma04g35230.1 (locus Gly ma04g35230) derived from phytozome v7.0 (chr-ID Gm04; pos 41571450 to 41571657)
gttattctttgtttcttttcgttcttccacagccggtaggtactgttttcactctcattgtttgaattcttctctgtttgttttaatggcactgccacaccgtatcattaccctctatcaaacctaatttcgccccttctctttatgaatgaattcattgaatatacgaacttagggtttttaaataactgcagattcggctttgtcc

SEQ ID NO: 21071 - DNA, 1028 bp, Glycine max
  Intron number 1 from transcript Glyma01g00850.1 (locus Gly ma01g00850) derived from phytozome v7.0 (chr-ID Gm01; pos 512284 to 513311)
atcctttgtgctatcgtggctatcacaagtcagttccctcctattttctttctatgggacttttctgattttatatttattttgccgtatgctcttaattctgaaatacatgaagatgttgtttatagtgaatcaattggatgtttatagcatcttagttcttgcaattcaacaccagattgggcttagaatcaaaatatataatcacccacttgcttccgttcacactgttcactatattcatgccagggaatgtcaaaaaggatggagtgatttagatacatgaattttcaagtgattaattttgggtaaaataaaaaacaaagaacttcattagaagcacggtagtgtaaaagtttttaatactgttgttaaagttttaaaaaacagtaagtaaccgcgatttgggctgcaacatcaaagacttctttggctctccatgactgcatcacaaccgcaactgaagctgcatttgtctgtaatttttgtaatgtcaaagatcgtgaggaaactgtaataatttaaaaccttgtgtcatgtaatcatgaatttttttttgggtaacaatgtaatcatgaattggtgtataattggaaattattgactttttttttatatatctaaggtaatttgtaattggttgagagtctaaatttttttacacggatggtgtatcaaaattaaacaaaaagaataagtttacaaaccccaaagataacttcgaagaacaaaatttgaagtatagttcaaatctactaattttctggatgaagattgtgtgaactgaacatatacttagaaagataaacttttttgaacagctgccaaaaagaataagaaacataaaatctggtatagatcctagaaaatgtacatcttagggagggtattgaacttttgtgccgcaacatctgcttgacactgatgcaatttgatcatcatattaatattgataaaccatatctaataatgcttagcacaattcttttccagttgttggactagtagtcagaggcaacactagctat

SEQ ID NO: 21072 - DNA, 653 bp, Glycine max
  Intron number 2 from transcript Glyma01g38860.1 (locus Gly ma01g38860) derived from phytozome v7.0 (chr-ID Gm01; pos 50859443 to 50860095)
gactccgtccttggcaaaacttgccaccagtgcaggttaccctccctctctctcactctgctatgtgaaatcaaaattatcacaccctctaatacactctttattattagttcacattttttcttaaagaaatcactatatcactagcagtagccatggtgtagaaagtaaattagtagcattttcaattgttaatgagtggttggtgaaggtatattggctgtctgccatgaacttgtgtttagtatttgtttaaaatgtttgaataccattttcgagacatgctttacgggtaacatgcgcaccctttttgtgttagaataaaataccacttacgtatattgcgcacttgtgtatgattgtggtactttcaacagtaagagcacgtttctttacttactgcatgccagaaaacacacacacacacactctgcgcacctaattgagtttgatatacttttgataaactttggcttttttcttttttataatcttcgcaaataaccatttttttaccgcggcctcatttatgtgatgaatttaattttatgatctatcagtcttttatgattttgttgattttcttttctcaacaatctttctcattggatgaaaataatgttttataggcaaaaaactcttggttatcggac

SEQ ID NO: 21073 - DNA, 834 bp, Glycine max
  Intron number 1 from transcript Glyma02g38840.1 (locus Gly ma02g38840) derived from phytozome v7.0 (chr-ID Gm02; pos 44193428 to 44194261 reverse strand)
cagcccgaagaaacggcaactaaggtgggccaagggtgactacaattaagatgactttccagcacccctcctcatgtccagggctaccaacttggagtgtggcaaatgtaggcgttccaacaatgaatctatgataagctttgataccattttagaatttgggcttagggcctaactcaacgccacaaaattttcttgtaaggtgagaattcccttaaattaatggattttttagagctaaataggcaattacttactatattaggatagattctgtttccttttttttttatctccgtgtatcatattataaattttcgatgttagtactagccttttgaatcaaggcatttcttcacaagatctcagttgacttaggagttagatcatgtacttcgctgttaaaatattttattcttgtgttagaattacctttcctgtatccttccgtttgctgattcagaaaagtaaagaattagcttgatggattaacatgttgataagattgcagaagtaaatgctgcattaaaccataacaatcactgttcttgatgttagctacattaatcatgagtttttgtttttaagaaaaaatacttggaactgtgttcatgtttctcttcaacattttatgtaatctaaggatactttctcattatgcatttttactatcaaatagtctctttcacagtaatataaattctgcatggttcaaaatctaccttttgatattaatgttcaaaatcatgttttcttaatatattttactctagtttagaatgaataacggatctgggcagtctgctttctcaggaaagtcagctactagtgttg

SEQ ID NO: 21074 - DNA, 277 bp, Glycine max
  Intron number 1 from transcript Glyma03g41080.1 (locus Gly ma03g41080) derived from phytozome v7.0 (chr-ID Gm03; pos 46621676 to 46621952 reverse strand)
aactgggatcccaaccgctctctcgccctcgccaggtctttgattcttgtttcctctctttccttatttcatgccaccacaccaatcgtattctgttcttttccttcgtatttcttattttgtttttctttctctgttattctacttgctcaatcctctttgtgtctttaatttaggttttacaacgtttttttctccttctgtatgcggttataattcgagaagttttgtttaatgaacaggtgctgagtggctttaattgtaaatcttggcgctc

SEQ ID NO: 21075 - DNA, 428 bp, Glycine max
  Intron number 2 from transcript Glyma01g04900.1 (locus Gly ma01g04900) derived from phytozome v7.0 (chr-ID Gm01; pos 4581836 to 4582263)
cttgcagcctccttcgttctgggtcagtctcaaaatcatttttttttctttttcaacaaaaaataaaatcattttcacacacatactattggagtatcttaagccaaattcaatgctgtctcgatttctttttcatgtacaatgaccaaattgagaatcaaacctaaattttcatgcatattttttaaattctccacaactaaattcggttttgactttcgacccaagtcctttttcttaatgttaaagaagaagaaaaagtagtttaagataaacatataagatgttcatacttcataccataataattgaatagctagtacgagacaaattcattgtgatatgtcaagtattgatttccgaggttgttgtgttgtgttttgttaattttagtggcggagatattggagaatctggcgtttttggcc

SEQ ID NO: 21076 - DNA, 436 bp, Glycine max
  Intron number 1 from transcript Glyma02g38690.1 (locus Gly ma02g38690) derived from phytozome v7.0 (chr-ID Gm02; pos 44042894 to 44043329)
ggcaggtaaagctaagtgtgtaggggcaattttgtgtgttggtggagcattagttaatagtctttacaaagggaaggagttttatcttggtcaccatagtcatcacgctcaaactgctactgcagcacacaaaaccaacatgcttcgtggcactttgtttttgatttgcagttgcttctctttaacggcctggtttattgcgcaagtatgcatctcattctttatagtattagtctactatatatattgttgcatctaatatagttaacaaatgttaaattaaaaaagttaatgaacaattatcttctcgatcactctaaaaatgcaatgtgattattattattattattattattatatattcatcttgaatagctattttcaattgaaaaaggtgaagttgcttagaatatttccactgaggttttggggaaca

SEQ ID NO: 21077 - DNA, 724 bp, Glycine max; identical to SEQ ID NO: 16791
  Intron number 2 from transcript Glyma04g10750.2 (locus Gly ma04g10750) derived from phytozome v7.0 (chr-ID Gm04; pos 8999831 to 9000554 reverse strand)

SEQ ID NO: 21078 - DNA, 600 bp, Glycine max
  Intron number 1 from transcript Glyma01g02820.1 (locus Gly ma01g02820) derived from phytozome v7.0 (chr-ID Gm01; pos 2309488 to 2310087 reverse strand)
tttgggggaattcttgattttgacctaaagcaaaggtctttactcaaaagttttactggattttgtgtttttatttttattttctatttttttttttttttgcgttgagtagaccgagcatgagtgagtgtcattgtgtttgagatttggggttgatattttttggtaaataaaaaacaagataaaatttattcttttaagattctgataactatcttatcctttttttttaatatactcttgtgcttttctgggagtgtaaatgtcagaaattttttgctaacatttaattttgggaaatgggtcagtgaatctaatctaggctaagttcttcaacttgctaatttgggtttgatatttggaaaaaccttggtaaattcactgcatctgtttaatccgttcttgtgctgttttatcaaaaagtttttttttttttttttgttgattgttattgatgttaatgagtttgttgggttgaatttatttgtgtgccccattttccaattgatctccttttgttaatgaatcaacggatcatttcctaatatagtggtttctgcaacaggcaggaaccactggccattccgtttctcaaatttt

SEQ ID NO: 21079 - DNA, 840 bp, Glycine max
  Intron number 1 from transcript Glyma03g30870.2 (locus Gly ma03g30870) derived from phytozome v7.0 (chr-ID Gm03; pos 38727504 to 38728343 reverse strand)
agctatcacgtagattcatccttttccagaaccataatcgttactttctacatatatttttgtttttacttctttacttgttcgttactcgctttgaaacttcaatctaggtttattaccaaacatcacgattcgtgacttgtacgaaaaatcaacaacgcgttatttcttctctgctaaaccaatgctattcttttcctagaatcaaggacaccgtgttttctctctgttttttgttttcttgccggattattgttattgatagatgaaatgcatcatgtgatgtcacattttaaaaaattaatgtaaacggtttctcaaattcaccgacacatgaatggttgaattttgaatccacctcgattatgttgtggctttcaatgaacttcactgtgcataattatgtgcaccttttgcttgttctcatatacacgtgtgttaccaacaagtggttgttgtgagtgatactagacttggttatgttaagcaaggtcttaagtgcaaactttgtggatgaaaaaaatgtggttggaagacgagaattccactaaaggttttcagttaggttcttcgacggatattagtcatcggcaatcggcaaagtcagtggatgtttcgtaccaaatatttcgtaacaataacatgctaaccccaaaaaatatacacgtgtgcttggaagcataagtattgctcttcagctatgctcgttcaagtcattttactcctggcaatcttacgtgatgcattttatcagataattgttgaattgtaacttttgtcatttttgttgagatagctcctgtgctgtttcttactatgagttctttatgcagcataata

SEQ ID NO: 21080 - DNA, 514 bp, Glycine max
  Intron number 1 from transcript Glyma03g16630.1 (locus Gly ma03g16630) derived from phytozome v7.0 (chr-ID Gm03; pos 21131618 to 21132131 reverse strand)
tttttggctccattttttctcctccatcgtctaaggtgtgtgtgtgtgtgtgtttaatttcgacaccttgttctgttttgattcttttgcttttttttgttgctcaaaatcaatccctttgtttttgttttttctgcatttcatggtgaagtttacgattggtttctgttatgtgtttggttttgttgtgttaaaagtctgagctttcttttaggccttgtttttcaccaaaaaaaaaatatatatatatcttcatttttgcaattcagtttctacttgaaggtcaaatctgacaatcaatgagcatttacacctgaacgattgaattttgctatctgttgaagtattttttggatcattagttttttggttgaatttgaattatataccatgtggtccatgtccatgttcattgcatatctaactaatgctgaaacggttctgagatctttttttggattggtttggttcaattttaggtgttagggagagagtctctgcgctctgaattgag

SEQ ID NO: 21081 - DNA, 883 bp, Glycine max
  Intron number 1 from transcript Glyma04g42480.2 (locus Gly ma04g42480) derived from phytozome v7.0 (chr-ID Gm04; pos 48238643 to 48239525)
gaactgaaaccgctgcttccgatctgaggtatgctcctttgtttttctatttcttcacttctcttattctttccttgttttctgtgaaaatgcgagagttagagggaattaaattgatggatttgatctcgaattccccgatgcttctgttgtgcttgtttgtagggcgaattgttgtttatatttgatgaaattcggctcgcgtagcttggagttagggtttttggtcagttgttatatttacccttgggatcggtgtgccttcataacattgttggattcatcgagctttagttgttgacatttagtttttcgcgaacttcgtagcttagctacttataaatattgaatatccgtcactttagtctagctgatttgttacagtaaattttaggaaccaatttgaagggtttttaatattttggggactacatagtacttagcatgatttctcatagttttaggactattcaagtaatttttatgctgtaaggactacttaatagagtgagtaataattcaagaataaaattggtggtttactagtttgaaacttatcaagcctgacttacttgctattcctgtttttcgtgaagagaagcttgccgtattgcactgtaaagagcgttttcatgtcatggatgaaaacatttaagtggatttttttaatcaaaatatgttttattggattatacttgtagccactagagatctgtggctgcttggatccacggcaagcatatgttgtaattttggtataatgtgctttatatacttaagtgctgtttcagcttgcaactcagtgatggatgatagtactttttcctgttattctcacaattgtttctgtgttcacgattgctgaacttgcaatgagaaggcc

SEQ ID NO: 21082 - DNA, 686 bp, Glycine max
  Intron number 2 from transcript Glyma02g41080.1 (locus Gly ma02g41080) derived from phytozome v7.0 (chr-ID Gm02; pos 46255599 to 46256284 reverse strand)
ggattggcaagcttcttcttgtagactttgaccaggttttttttctcagactgactctctccttgatagatgtttaattgccatgatagaagattttgttatcaccaacaaacaggaaaattttaactgtctacattgcgaaatgaaaatgttacatctcttaatattatccagagcttccttttgcttggaaaattttaactattatagtttaagtaagaaaattttaactgtctacattgggaaatataatagatataagtgctggaatatattactttgaagataaaaaatgcaaatttatcaagtatcaactattatagtttaagtaagaaactgatgttttgattggaaaaaaaattgttacttggttcttttgctttttagttatcatgaatagtattttactagttattctaatcacattaaatgtcattctatacaactatacaagcctttattgttaattactgtagtgcatggcttaagaacctcaagctaaaatcttgttaacaatattattaagcttcatttggtaaaacaaagtaataaaagataaagtagttatatcttctagtgtcatatttgcccagctctagaatttttataggctttcgccttccatacaatatctgtacttatttatttgttaaatgaaaaggtttctctttcatcactaaatcgac

SEQ ID NO: 21083 - DNA, 461 bp, Glycine max
  Intron number 3 from transcript Glyma01g41380.2 (locus Gly ma01g41380) derived from phytozome v7.0 (chr-ID Gm01; pos 52894808 to 52895268 reverse strand)
cccttgatagatttggctattcaaatcgatccaaggtatgtgttgtgttgtgttgtgatcaatggattgtgtgagggttcgtatgaagcattcaatatgccctttgacccttggttggattgaaattaaattattaatgtttggataaacttttcaataagaagaggaaatgaaatcagtctattaaatgagaaaggttctataaaaatggaagtgcattagttgattttattttataggaaaaacttaattcattttattttaccttaatatttttctcctataaatactttttgaaaaatttattcacacagggcctaaaggtttttgtttatatttgatgtgcttcgggacaatggctagtgcattttgtgaatgttttcaagttttggataactatgtgacattattctttttttgttgcagccttatctttagtgcatttgtgggaacatccttgg

SEQ ID NO: 21084 - DNA, 906 bp, Glycine max
  Intron number 2 from transcript Glyma03g37540.1 (locus Gly ma03g37540) derived from phytozome v7.0 (chr-ID Gm03; pos 44137800 to 44138705)
ttcaggtaattttgttataaaaatgttttatactatcaatatatcttatgctgtgcaaattaatttgtttagactttaacttttttcagttgaggttgactgtttttgacttcttgttcttaaggttgatataggttcttgcaaaataatttgttccagtgcaagattgaaagtaataggtaggttagtggaaattcttcaatccaaatatcactaacaagccttattgttgaattgtacctttagcctcccccatccttttaaagcccaatcgcctctattctaatttctccttgtctttcatgtattactgaatgtaagtttatatcctatcctcatttggattttgttgtttaggggtgtgtttgagagttggaagggaaaggaatagaagggaaaatgtagggtaaacccttatttttgtttggatgttactaattcacaaggcaaaagaaatagacggatagttaaattaaaaagattagcaaatacaaatttattatctcccacctgtattcgtgaagaaaaaaaatgtaaattaacttaatacttttttgaccaacctgtcctccaatttaggggaacccagaaaactaagggagggtttattaaaaatccccattcccttcctccttctagaatacccccaaacaagagaatggctaatcataagcctttcccttccctctctttccctcttataatccctcatccaaatataccattagtttcattataatgattttatgccatttcttttgaaaagtggtttgtaaatagacaagaatttacttgcatcttggttacttgcttcaaattttaggcaatttatgatatgctatttcttgcttttatcttgagattggtatgactgacttttttgtatctacttttggcagcgttccc

SEQ ID NO: 21085 - DNA, 754 bp, Glycine max
  Intron number 1 from transcript Glyma02g11890.1 (locus Gly ma02g11890) derived from phytozome v7.0 (chr-ID Gm02; pos 10100269 to 10101022 reverse strand)
attggtaagatatttccctcattttaatttcttctctcttttttttttttttctgttttcatatttttcttgctttattttgttattttttcttctgggtgttttcaaagtttggttttttaatatccatgttgtgcccccatgtaaatttttctagtaaggtttcgtgggtattaggagatataaggctgatctagttgtcaagggacaagggacaagggaaagggctgaggtcgttagtttgaatcatcccgctaacacatactaacaattaatatttgcccataaaaaaaagtttccgtgggtattcttcattcataactctgaattcgtttgcgtgtgcatcttgcatcgcatatgcctcaagctggatcccatatgattcacctagtttttttgttagttcataagtgtgtttcatgtttttgttttgtcttttaatgtttggcagtacacaaatgcataaatctctctccttaaccatgtggttgccgtgagaaacatgtgtttccaatggagcgagctcaagtttcatgctgttgggaagatctgaagttccttttgcatccactaacttttacaatatgttacagacaataattgcctcatgatgtcgattgaaacttgctaattgttgtcaatcttgctttgattaaagattttttttgtcttggatcttgctttgttgatcatgcgagttatcattcatgtaatttttaataagaattaggaactggtatttctcaggttctag

SEQ ID NO: 21086 - DNA, 965 bp, Glycine max
  Intron number 1 from transcript Glyma04g15250.1 (locus Gly ma04g15250) derived from phytozome v7.0 (chr-ID Gm04; pos 15895435 to 15896399)
gactggtacaccaataggttgtgaagttgtaacatgtaagtaagctttgagttaggcagtttgaggttgcagaaacacagcacaaagagggccagctctgtactctgaactatattagatttatacccaaagtgtgtgtacccaggcacaaattgaaaaatgaaatatgactgatatatgtttaacaaacggtgatctttttttgcaactatttgtgtttcaattactattatactacccaaaaaattgcagttcgaacttggaatttaattgatattatatggttttggataataattagatgaaaatatatctcaatgcaaataacaaaaagaaaatacatttttaatctttaaggaggtaagtacctctttttttgttacagaatatcaactttggcgatccattaggatcctgagatttatattggaaaataaagtaaattgtattgactaaaataaagtataacaaagccaatattctggcagatgtaaacactgaccagcctagagtttcagagtaatgcactatgcattctctgctaagcacaaactgcttgacaacaaactactactgttctttttctcataataccccttctctccttatcacttgacatgccacacacactgtcccctatgcaaccaacttgcacattccctcaatttgggcctgggccctttttgtctggtccctatcatagtatcattgtcatttgtcaccctcttgtaaggtctaccagccttgtatagtaattctagcatacagtggattgacactttattccaaccaaatacatgtgatatttcatgggatcgtctttttgcaccttttcttcacactttcttccagatctacaattaatactgtctatgttttactttctctttgtgtgcttatatgtatactaattggactgttgtcttatctgtcattggtctaaggtcagacaccagagctatcag

SEQ ID NO: 21087 - DNA, 590 bp, Glycine max
  Intron number 2 from transcript Glyma04g15250.1 (locus Gly ma04g15250) derived from phytozome v7.0 (chr-ID Gm04; pos 15896415 to 15897004)
aaggtatttttttttcctatttccaaaattatgcagtaactaggatttgtctgtttaaattattccgagtttctaattactgttttaaatggaggacattacagggtgctcacataattgggggtcagatttttggccattcacttttaatcaatatgtagaagttgcgacatgcgtttagcagtggctatgctgttgatttctgctggcactttacttttttccaccgacaaatgcccctagatatatatacctattctcttatcatgtagtaaccaattctcctacaaactaagtttaaaacaatttcttctctaatgttttagtgacaaagtctcaacattaatttgttttcttgataaaagtttgaatattctaagattagatttatttgaacaaaatgccatctcatgtggatcaattttccattggcaatcttgttgaatgtgcatagaaatagaagagttaaactaagcttgtaaggaaaaagtagtaaggtagatcgttatattgatttatgaatgcgaattttgacccttgctgttgtttagatcttacattgaatttttaagtatcattcataattgaca

SEQ ID NO: 21088 - DNA, 586 bp, Glycine max; identical to SEQ ID NO: 20750
  Intron number 3 from transcript Glyma02g06510.1 (locus Gly ma02g06510) derived from phytozome v7.0 (chr-ID Gm02; pos 5186065 to 5186650 reverse strand)

SEQ ID NO: 21089 - DNA, 932 bp, Glycine max
  Intron number 1 from transcript Glyma04g07100.1 (locus Gly ma04g07100) derived from phytozome v7.0 (chr-ID Gm04; pos 5515604 to 5516535)
ccattcggctcttgacagtgacacctcaggtgacaatttctgggaactcgtcaaaatctcttttttctttctctccccgtgtcaagtcttgggcttcagttaagatggtagtgaagtagttgttgttgttggtcttgatttgttttctgctgcaaaatggagttttcttaattgttcctcattgggtggcactcttttgggatgaaagttttgttcttggaaatggtagtgctgtggagaatgccaatcttgcttgtttcactatcccctgatttgatttgctcagttccactcttcctattttgatgatgttagttcatagctaagtattttttttttttcaatttggttgcttagacgttagacctaagaagtgctttataagcaagtcaatttggtccctctttctaatttgtcttcatgcacttggccaccaagtggagattagatgcatttttttatctacctagagtgttccacattattccctaatgtccatgactttgatgtgccctgtttataatctttattgtatattgcatttcatcttgtgttatgttgctttcaccattttgactggtatgtaaactcatgacaccacctgactggtatgctgtttttacatatcactcccatctttctttcttcaagtgggtaagttgccttgccgttagatacaaaggctggaaaattttgttttcagaaacattggaaacaatcccttttggttctttggatagtaaagaaaattatgaggattttctagatatttttttaaatcattctggctaacaaggctaaagatgaaattttcaaataaacaacatatgaagggtaaaacttgttctgtaagattacaaatttttgtttcactcgtgttagattatctaagttgctgatcattggttccatgtaaattgtagcttagcttg

SEQ ID NO: 21090 - DNA, 366 bp, Glycine max
  Intron number 2 from transcript Glyma02g16430.1 (locus Gly ma02g16430) derived from phytozome v7.0 (chr-ID Gm02; pos 14831788 to 14832153)
tcctctacgcaggtgattggtcaattttctcatgattttaatgtaattaagtatgaggattggttttgtttgaatgagatttctcttgcctcataaattttctgtgttctgaataataaacaaacttccattcttcttctggaacttgtgttgtcttcgtgtaacagtttctgtttgaacgagtctgcaactcaaaaccaaagatctgaactcttcagctcgttttcctacttccctggtttccaccttttgttataatttttttttctggtttttgtgtgtttgattcattctgtggtttgataaaattaacagtgcaaagagtgtgactttattaactctatggtttttctttttcaggtgtca

SEQ ID NO: 21091 - DNA, 723 bp, Glycine max
  Intron number 1 from transcript Glyma02g44470.1 (locus Gly ma02g44470) derived from phytozome v7.0 (chr-ID Gm02; pos 49040841 to 49041563)
tctctctccttttccctcaagctcagaatctcccggtactaagctctgagttcttgcttttaacttttaattttttcttttccttttgtaacttcactgcgatgaatcctgaacctttctagttctgctttcatgcaattttttttttattttttttgcggttgattgtgtatgtatgatttcgagcttaatttggcccttggagtaaatgggtattgattaattgaaaccccatttgaaaaacaaattttgctttattgacaatttctttgctttcgtcttagttttcagttggggtatagtcatgtcctctctttactgttactgtctccgtggcgatgattcatgataagtgctcttggcatcatgcatgaattttgttaatcccttattcatctttgataaaaaaaaatttaatccttttgggagaaaaaagttgatttcatttttcaattcgtctattatgatgaatctgcagagaatccccccctccccacctgatttgaactgttctttgctgtgctgatgactaattaatgttggttaaaattgatcgaaaatcaccagattatgaatgaaactcattaaatagaaggtgaaaccaacatcattttgtgaggcacagatataactctgtagcaacagctccaaatttaagtaataggatggtttaatgtgctatacatagccatcagtcacttttggtggtttaaatttaattga

SEQ ID NO: 21092 - DNA, 293 bp, Glycine max
  Intron number 2 from transcript Glyma03g31010.1 (locus Gly ma03g31010) derived from phytozome v7.0 (chr-ID Gm03; pos 38895179 to 38895471 reverse strand)
ctcgtcaatccgaaacctcaactcactctcctacggttagtgtcctccactactttcttgtacaattggagatataagatttattgagtgagtggttaagaaaaaaaaagaaagagaaaaggtcttcggttcgatccctattaacaaaaactaactattaacatttgttaataaaaaaattatcttgtaccatcaatttttttttttcattttgattggaattggattaattccccaagatttagattaattacttagtggaatttattttatttcttttttatatttataga

SEQ ID NO: 21093 - DNA, 876 bp, Glycine max
  Intron number 2 from transcript Glyma01g06750.1 (locus Gly ma01g06750) derived from phytozome v7.0 (chr-ID Gm01; pos 7151242 to 7152117 reverse strand)
gagtgtggagatagtggagactctattgagcaaaggtaggtcaatgctctttattttttttattactatttttgttattcatgatctcaatcagcatctttttttatttcccttcaaatttgattgaactgtatactttggggataagtaattggtgtctgattcccgactgatatgtttgattgatttgagcttaatcgtaagacttggtactaagaattgttatacgatggttttaaaaaacggtctgcaactgcgattgttgcgactgtgatgccaaggttgttggggtctctacaaccgatcatgattgcaattgcagctgcatcagctgcatttgtttgcagtcatccacttgatattgcaacaaaactgtaactgtgaccgtgaccacaatttgaaaccttaggaactggtaatttatatgtttataattagatatttatattaatcttttcatggggtatgcaatgctgatgcctgattttaatttcttattaaacttaaatagagttgaggtatatctttcccatttttaaactgcaatcagattatgggttagtgttgaaaagcttttaaattggtgtagcttgtgattgaaaaaggtgataaccgatagttgagccctttcaagtgtgaattgtggttttctattaattttcattttatacatatgttgactgaatatgtaggctgctattttgtgttgtctgtattctgtaaattgtggaatttttcttggaagattcacaagtctagtaataaaatgcagctccaatgatggcctatgcctttcatgactacgtttcgtttacaatgtagaaagattcatcaattatctcaaatgttcttgttcttcatgtttgctaggagctg

SEQ ID NO: 21094 - DNA, 968 bp, Glycine max
  Intron number 1 from transcript Glyma04g03080.1 (locus Gly ma04g03080) derived from phytozome v7.0 (chr-ID Gm04; pos 2249213 to 2250180 reverse strand)
gacctggatcctcgccaatacgaaaaccttgtatgtttcaatttcttatctcattaataataataataataataataataataataatactctttcgtttttcttctccgtgcccttctgttgccactccagtttctgctttattttatttttttcttgtgacgtttaattaaactttaaagatagcgctgttgcgttgtgaatttgtcatatcctgattccatcttaggccactaaactatccaattattttgtttctcctttcactttcgtttggtttcttaaccaagttgttgattgatgattgaggactctactagaatgcagaccctcgtgcgtaattggccggtggatattaataatatgttgttgcgataaaatattcctcactcttagcgaaaccctttagccgtgtcgcatctatttcaattaattttctcctcaaagatatttcccaaccctaatttctgatgggcaaaattgagcaaaggagggattgggacacatgaaaaatataatatttctcgtgctctgctgcatactctatttagctctcacatgaattaccactaatctgcgttttgtttccggtggtggtgattacaattttttgccctcatttttatttttgaaagagaacataattcaaccccaaggggttggttgagtggagtaagacaggtctttaggtttgaaacctcgctcttctcctcgaggtgaaataaatgtaagtttctttgtaagtgttctttaagcccagagacttttcttttcctggattgaggcaccatctccttttcctaaattttatctgccaaaagaaaatttgagctgagattgaacccttttagtacgctttgttgggtttccaattgtaaattgttgatttcctggttccattgattctcttgccatagttaatgaggttccatatttttttcttggctacatgaattttcaggctgtaa

SEQ ID NO: 21095 - DNA, 781 bp, Glycine max
  Intron number 2 from transcript Glyma02g45350.1 (locus Gly ma02g45350) derived from phytozome v7.0 (chr-ID Gm02; pos 49648305 to 49649085)
tttttagtccctcaaattttaaacatgttatttctagtggttcaataataaaaaaatataaaaaaaagtcaagtttaaaccataaaaaaaagtcaaaaagaaacttaaaaagtattttacaaatttaagacctcaaacttgagaaattaaaaatatacttaagtctttaaaacttaatgaccatgcatggaccctctacaatgttaaacaataaaaaactattgttgatataatttttaaattaaaataattattataaaagaaaaaaacctcccttgtatctaaaaaaaagagtaaaagaaatgatcatagattagataacttgtgattgggagtgtaaaaatattttatattatttatgcataatctattttttattttatttattgatatactgtatttttattagatgaatattttattatatatattttttatttttaggattaatacttgtaatctatatttataaataataaatgcatatagtcaatttatctaatattcttaaattgaatgaaatatcattttagttcttcatgatcaaggtgtataatattgtcttattaatctttgaaactaaaattttcaaataattccttaataatgtaatttctaaatcactcggttatagtaatttgttaataaggtatttatagttgaaagtgattgatatattattattcaatttttttttgtaataacggttatttcagtgcttaaaactataatgaaataaattatgctatcgatcgaacaatgtgttgtgcaccttgcaggt

SEQ ID NO: 21096 - DNA, 596 bp, Glycine max
  Intron number 4 from transcript Glyma04g43200.1 (locus Gly ma04g43200) derived from phytozome v7.0 (chr-ID Gm04; pos 48798322 to 48798917 reverse strand)
ggacaactacaacttggtggaggcattagtggctcgtatcctttttattactatttttactgaaagtttaatgaaattaacttagagtgtgtttggatggagaaatttaaaattatgaaaaattttaaattctaagaatttcaaatacttcaattgaaattcttttattttcaaaattttgtatttggataaaaaaattaaaattatgaggatgaaaaaaatgaatgaaaaaaaagagaagatatggttgatgtgctagttatatgtgttcctctatgctcacactcgatcaatattttaggagctcacacaatgtttcttgaagaaaactgtaagaagaaaatttcaatttttcatcttttagaaggaaattgaaattccagatttttagttgtttaaaattctattttaaaattccaaaattttaaattcttcataaaaagcatccaaacaatgaattctaaattacaaaaattcaaattctctgataaatttctttcctcagttaaaattctctatccaaacgcattcttagagttttgtccattttcttttctatgataattgttctttctaacattcacttccatgaagac

SEQ ID NO: 21097 - DNA, 482 bp, Glycine max
  Intron number 2 from transcript Glyma01g17580.1 (locus Gly ma01g17580) derived from phytozome v7.0 (chr-ID Gm01; pos 21886970 to 21887451)
ctgcaaagttaattgactgcaattccgttcaagttagtttcttcttctccttcgtttgtttgtttttttttttcttctaattttgaaaatacatgttcagttcagcataattgaacaaggatatgaaactttattataaaacatacagaaaaatattcgggctgggtctaattgcattcttgcaccttctacctttaaaattggctttcttgtaatgattgaaattagagtttccgtgtatcattattttttatttcccttctctgtaatttacatgctagttaattttcaattcgttatgggtgagtgggagttgcttgcacaattgatagaaggagaaaagtggggggtgttgacatgttggtgtgttttatgaattggtattctgaattttgagctcattcactcacccacatggttggtttctctctctctctctctctccagtcctacacaaccaacagcgcaaaagtggtattttt

SEQ ID NO: 21098 - DNA, 1002 bp, Glycine max; identical to SEQ ID NO: 20200
  Intron number 1 from transcript Glyma02g05670.3 (locus Gly ma02g05670) derived from phytozome v7.0 (chr-ID Gm02; pos 4546499 to 4547500 reverse strand)

SEQ ID NO: 21099 - DNA, 1052 bp, Glycine max
  Intron number 2 from transcript Glyma02g38340.1 (locus Gly ma02g38340) derived from phytozome v7.0 (chr-ID Gm02; pos 43768681 to 43769732)
tgcgaaatcccttgaagcaactgtgccaacgcctggtactcactttctctattcacttttaacacattagggtgaaaaatatgtacgacagttcataatattagtatctgattgatagcccttttttttttttttgctttctacttaagttcttagtaaaacaattgtgtttagtatatatctataagcacttgagaggaagttgaatgaaaagagtttctacaaaagttaaatgcttaagtagttgattttagcttatgcaataggtttggataattttagtacctatggagaagtttatccaaacaagattataaggttatttttaactatttttgaattgggatttacataatttttttttattggcaaatgtcagttgttagtattcttagtttttgttaggggaggatttgaacccatgacctctcctcctttccttcttccttcaccactagaccaaccttatatctcctcggatttacatgtttataatttttgacatttaaaaaaagtattaaattttaaatgatagattaaaaggaattgacggttaatgatatcaatgatactgataaagataaaaagatgttagtttgaaatgattagagaaattttttgactagttttttttttggaaggtattttttgactagttatgtgaacagtttgtgcattgcactgccaaaggagagaagactaagaatgtttaattgagagactttctaatttatagcataagagtaatttaacaatgtggagtagatttaacatgatgaagtgacaatgctacatacttgatatgtccatccaagtgccaggtcaacttgataacagaattagatagctttagttagagtttgttataattagttagttaatggtacaaaatcttgacccctattgtatttatgtattgtagtggtgtaatgatctaattagaatgaattttatgtgaattattcacttggtttgttgaggtgtggtgtcttacccatctgatgccactcagcgtgtttcaggtggaattattcttgcaccggaagggatca

SEQ ID NO: 21100 - DNA, 386 bp, Glycine max
  Intron number 3 from transcript Glyma01g40870.1 (locus Gly ma01g40870) derived from phytozome v7.0 (chr-ID Gm01; pos 52517453 to 52517838 reverse strand)
aggcctcgacatagaagacttggtaactctatctggtatatttattattttgacaagatttatatacaactttctaaattgctgttagtactattttctaatcaaaattagtgtcccacgtcttcataaaaaaaaaagtagtgacccacctttatgaattattgaaatgaaactaattttaattgaaaaataacacaaccaaaatcccaactctaattgatgaataacacaaacaatacctataaaaactctaattttgtccttataatttgttcaaagttcaatcaaatgttaatattttggggctctcacaaaggaagaagagattaagcacgtagagttcctgcttgacaaaatacaggtagccatactataggaagagcaag

SEQ ID NO: 21101 - DNA, 978 bp, Glycine max
  Intron number 1 from transcript Glyma02g45980.2 (locus Gly ma02g45980) derived from phytozome v7.0 (chr-ID Gm02; pos 50084688 to 50085665)
gccaacttgaccgccttctgtttctccagtactgggtatgtacatgtaacttccataatcattgggtcttatgtggaggagattagtaatatggctatcaatcagtttatttagaatcttcttaatgagtgtttgctaatacattgattaacaaacaaacaaaatatttattgtgacaaaaaaattataagtaacataattttacacgttttaatgaaaataattgcttttggttccttaatcattcatcaacactaaatagtattgatcatttatttatagacaaatctaggtataacatcttttaatcaaaagcaaaatttcgtctagtaacttatgcctattgtttttgcgcaagtcatgcaaacttccattttaattgtaacacaccaccaacatttgtgatattgtattaagttttttccttgatttatataccttattattttttagagtgaaaatgcttttggcatccaaacaacactataatgtttgacaatgaatgaatttgcttcgaagtggcattagaaactttgattgcctattcaaaaaaccatcacattaaaatttatggtacaagtacgagtctgattggtttgatggagggaagattgtttaggtaggaagaggagaggaaaaataaatcttttcttgtttagttcacaagggaagaagagaaattttaaaattcaattttcctgttaatattagacttcaaaatataaatgaagatatcttagtcaatatagctaaaatgtttttaaatcccctcccctgcatttccccatccaaacactatggtaagcaacatcagcaaagttaaggtttcgtttcaagtttcagtgtaattttgtattttgtgtcacgatctttatatcgtgcagattgattactcggtcttaattttgtcatactagtaatcaagaattctgatcaagactgtacatgaatgcctggtacctttttgtagggaccaat

SEQ ID NO: 21102 - DNA, 725 bp, Glycine max
  Intron number 1 from transcript Glyma04g42550.4 (locus Gly ma04g42550) derived from phytozome v7.0 (chr-ID Gm04; pos 48279708 to 48280432)
ttccagtgaagagttccattttagtcctacaccctgtatttgctttcttctctcattctcttaatcttccaattcgaatgttattattagcatttatttcttacttttcattcaatatccccgtccttgtcttcatagctgtttgttgaattgacacatggcctacaattttgtctacacaaatttaacatgcgacactaatgaagggtctaactaatgattttatctgaaaatgtaaaaggctttcgttttgcaaggataaatagttgtggcaagtttatatacttgtttaggtgtgtgatgtattgataccattgacactaatcagtaagtttgctttcacggttgtggaattcaagttgaagttagctagctacaaacacgaaggaaaaggaaacatgaacacctgcttggtaaacaatataacattatgcagtaataactatttatttgggctggatttggccatttgggtataaaaaaatttcatactttgggctgtttgaacaaggaagggttttgaacctcaacatataagttgctggtgttctgtgctgagattattttcagtctgaagtgtttttgactgatttgtgttttgctttcatggttttactgcaatttcatcatttgttttgctgcaagaagacttgaatcgagggtccacttcttaatttttggatcctattgtttttgtttgaggttggtgtgcagtgctcactgat

SEQ ID NO: 21103 - DNA, 954 bp, Glycine max
  Intron number 1 from transcript Glyma01g04950.1 (locus Gly ma01g04950) derived from phytozome v7.0 (chr-ID Gm01; pos 4628433 to 4629386)
ttcgttgtgaaaccaagacaaaggttcgattcttccactttcccactagcactttcttagggtatgtttgagtatcctatcaatgtattttggtgatgttcattaatcacaatttaaagttttaattttgtaatccttgatctttattatgtgaaatatcaggatgatattctaattcttatagaaaaataaaccaaaagcaccaaccgattcctcctccttaaaatgtgtctttatcattttataataattactttataagttatcttttagatgataaaaaaaacctctttatcctatgaatgtacataaattaataaattatatatcaatagacattttagtatacttccatctactattaaaggattaaagtgtttcacatttattgtcttgagcgaccattatttttagaggcaaaaattgaaattatttggtctacttttatttaacaaaattctttctttgttattagttagatctgctaggataattttgttttagtgtttctgcacgtttttgcacgttaatttttgttgaattgtttcagtttaatttatccttaattttaggagtttgttacctcatgtagaacatgggtttgttatggatttgtggcctagagtttaggaatgaatcttttatgtataagcctataaaaaggttttatccttaattaataaagtctctttctgctttacgctttcctcttaatatattttttctaacaagatcaatataaaatatgttcatatcatacaattatccgcacttggcacgagcaaggatattatagatgaaatttaagattattgatatgttgacatatcttacaatatttttgtttggtcattgcttttcctacaaatgattgcgcgtatttgtatcctgattaatgacttgatgaactatttgaaagatcatggctaatttaatgcaaatcccggcaggaca

SEQ ID NO: 21104 - DNA, 281 bp, Glycine max
  Intron number 1 from transcript Glyma01g40380.1 (locus Gly ma01g40380) derived from phytozome v7.0 (chr-ID Gm01; pos 52104188 to 52104468)
gggcaaagaacatctcaatatagaggtgtaacaaggtttgttctcttctgctcatttctaaatcttactagtacttctggcacattacaagtattattgaaaaataaggctataatgatgttcgctaatttgcttaataatttctacctcttctaaagtgctccttgctcaagaagttaagggttcatgtaagattaatgtcaacaacatatttgactgtttattttttgctttgatttccaaagaatatttgttcaacaggcataggtggactggtagat

SEQ ID NO: 21105 - DNA, 599 bp, Glycine max
  Intron number 3 from transcript Glyma02g39180.1 (locus Gly ma02g39180) derived from phytozome v7.0 (chr-ID Gm02; pos 44435813 to 44436411)
gagtggattttgcttcttctaataacaagtaaatgttttaaactaggggcggttggtaggggagaaattttttgcatgcctgtgaatcatgaatcctgggagtggagaaaatttgtttggttaaccattgagaatctttaaataagttttttaggaatcaaaaagttgtgtaatatttttaccaggaactttaattatttaccacattaaataatttaataagagtagtatgatgtttttattatagtaaaacaaaaattaaacttgggaaagtatgattctcaccctcctccacaggaatatttttgtggaaatgtgagttaaaaccgactcccaggaatcatagttttctgggaatatgtttcttaaaaatgcgtataaaaataggaaactaagtttcctcccaagttaggattcatgggaaagtgaaaatttcttcccaaccaaacgccccctaagttgttttaactgcttttcttgtgtcttatcattatttctttagtattttgtcttaatcaaatacatttggattggttgaattcagagttatgtgttgttttgcaggattcacattttggactgttatactgatcctcttg

SEQ ID NO: 21106 - DNA, 762 bp, Glycine max
  Intron number 1 from transcript Glyma02g44860.1 (locus Gly ma02g44860) derived from phytozome v7.0 (chr-ID Gm02; pos 49305203 to 49305964 reverse strand)
gaagagatatgtgaaggaaggaagaagatgatgatatgaagagagagagaaaaaaaaatatagatatatatatagagagagaagagaagcacagtaagtaacaagtcgttattgcattttctcatccactgcccactctgcactttctgctggctggaccctttcagaaactaattttctttctctctctctcactcaaaccaaaactttttcttcctgtggaaaaaagccaaagtgacagtagtagtagccacaatagcagcagaagaagcagaaacagaagaagaagcagagaagttgttcgttttcccttccttttcagagagagaaaaatccaagtccactccactcaactccccctcctcaccccacctcaccctaacaacacaacaagatctcctctcaacaacaaactccatcaaaagagaaaaaaacttctctcttttcttttcctccaccaacaaaaaattctttccctgccacaagaccccacaccaagaagaataacacccacattagatacaccctcacactaataagatatatacaccaccacttagacaatagaagatctatgcttctatagttctacagttagttctgtctatcaacctacatacactccactttatttttatttttattattattattaacagaagaaaaagcaaactatatattgtgtttagtttgtctcttgatttgagaagtaatcaaggattttcagttgtggctactacaaggaggttaccttcagattct

SEQ ID NO: 21107 - DNA, 639 bp, Glycine max
  Intron number 1 from transcript Glyma02g46890.1 (locus Gly ma02g46890) derived from phytozome v7.0 (chr-ID Gm02; pos 50710808 to 50711446)
agggtcaaaatttacatttatccaggaatttacaggtcagcaatttaattgcatacttttcatactacttttactgttattctcttataagaattagagtttcattttgattaactgtgtgtttggatacgcggcacggtgaagcaaaatcaattttcttttccactgtcacactgaagcaaccctttgttgcttctgatttttcaaggtcacgccatgattttagctgtcaaaaatcaattctgaaggttatccaaacacgcactaaattgtcaacttgaattattgaattgaaactctaattctggttgaagaataatatcaaaatctgagttttgtctttttttcaattagattttgtctttgactttcacaacctctgtcattattattcagttccaatcaaaagtagttgttatattctttgccttaatttggaaacatattttttttttgtttttagggtaacgcaggttggtttggttcgtgtttttgatccaacagttacatttatttggtttcctaaaatttcatgtgtcataagggccttgtccttgcgggtattttttttatcataaaaaactcgacttatgtttgcttaccctttgtttatatgcaatttgtgcagagaaaaagtgt

SEQ ID NO: 21108 - DNA, 842 bp, Glycine max
  Intron number 1 from transcript Glyma04g43490.1 (locus Gly ma04g43490) derived from phytozome v7.0 (chr-ID Gm04; pos 49057132 to 49057973 reverse strand)
ccttaggtacacttctataccaattgtttatctatgatatcttcattgcatgcttaagctagtgataaataatatgagtacttggccagcatttaattatcatgtagaatatatagcacttgagttattactaattagaattatgttgatattcaatttacataatagtgttagctctcttgatgttacactcactgggaccagtctagtggtggggacaagattttaaatagcagtcgcggttttgtcacatttcttgatattacaggaaattgcagataaatgcaatcaatgtggccacagcggtcacgttgtgatcgtaaacactaaagaaacattgactttttggctaagatcatagtcgtggaccattgtttaaaaccttgaatgtggttttttggtagtttgcatgaagttataggtttaaacctcatttcactgttgtacaaaaagaaaagaaaaaatctctttgatgttacatagcttaaatttttattaatagtacaaagaaaatgttccatacttctctcctatgcttacccccaccatatggatttattttgtaacaaacaactatagaatagcataacatgccaagtttttcttataacgtgtttggttctaagttatatttcatttgacgtgcattgcagcaaaagctaaaaatagtattatggtaacttctgtattatttgcgccattttacatagttttatttttgctgaaagacatacgtaccacttaacaataaaaacctatatgtacgtagctattattacttaagactacaacaattgacaactgcagctcagcttctgggctttccaacatatattgctcca

SEQ ID NO: 21109 - DNA, 580 bp, Glycine max
  Intron number 1 from transcript Glyma02g09170.1 (locus Gly ma02g09170) derived from phytozome v7.0 (chr-ID Gm02; pos 7162881 to 7163460)
aacaagaggcaaaagaggtaacaaattaattgaactgggttacttttgatacactgccggtataacaaatttacaatgtcagtgtcaactaattagaatcattatgacttttaaaataggtttaattatgtttttagtctcttagaagatttgtttttttcagtccctcaaataaaaacatgtatgctttagtctgtgtatgttttagacttttagtctttgaaatttgaaatttagtctttcctctcaaataataatttgcatcttttagcctttgacagagagactaaaaggaacaattttttgaatttgagaaactaaaaaatacaaatttttatttggaggaccaagaaagaaacacacttagtttgaggaactaaaaatataactaaagccttcaaaataattactgacaagtcaacaagtttcaattacatgacagtccatgactacatgatatgacactgtaaaaaatccttcgactgttgatgcattccgattaaatttataattacatgctaggtgctaaagaattcctaggattttctttttctttgataacttctattttctcacagat

SEQ ID NO: 21110 - DNA, 832 bp, Glycine max
  Intron number 4 from transcript Glyma01g37470.2 (locus Gly ma01g37470) derived from phytozome v7.0 (chr-ID Gm01; pos 49822602 to 49823433 reverse strand)
tggtttcatccatagggaaaatacgcgaacgaaaggtacaaaattctttcacacttgcttcagttaatcagtttttgtttatgagctaaaataatactgtatagcttcttcaaacgctgtaaaggattaacacagcagcatgttaaaatggaaaagatttccctaactacaaagtttgaagacagtcaatcatgatttaaaccttaataaggtccaataatcggattaagtcaaactttccttcttaaaaagtattgcatttctatgaatccaaacacaccatgtgactaccaatcatattgtcatccacaactgctccagacttttccctttcactaattaagatgacttcttaaatggcctctaaaattggaagctggaaaaacgtaagtacaggaccaaacctgtgaagaaattaattaattatgcagaagaagaaaggtgccaagatatttaccatactagttactaaaagaaaaaagagcacaacttatctagcgggacaaagataatgtttctttagttaaatagtggaatggtaaaggagtttagggttaatgtggtttgacttcgttcaattcagtagtttcccatttcttcatcctttttttataaactattaattttcctttcttttcaattttatctagcaatatttttgtgttgtttcttctcaataaaaaggaatcgtaaaccaactctttaagtgagattgctgatttagctgcgtgactatttgtccttaggctataaactgacatgttgtgtttttttgtgcatgcacttttatttcacagtttcacgtgatcaaaactcggactgatacctgtag

SEQ ID NO: 21111 - DNA, 899 bp, Glycine max
  Intron number 1 from transcript Glyma04g04150.2 (locus Gly ma04g04150) derived from phytozome v7.0 (chr-ID Gm04; pos 3038920 to 3039818 reverse strand)
ctatccagaaattacgaggagaggcgcgttttggggtaacgggatttttctcatctctctttgtttatgctgccatatgtttggctctatttgcattttgtttttattattattcttggctgtagatttctataaccatattatttccatgcacactgatttagaataagtgacattttgttgatatttttcaagtgtagcctagctggtgtcttctgtatcaaagcttttcttaatgaaattttagagtttcaatagatggctctggtgactgttgaattcttcccatcattgttggccctacctttttataggatttatttatgtcaatccttaggagaaagttgatttttgtgatgtctaactagttttattatgttagcatatattctagtagtggttcgaagcttgcttttaaatttgcactttgtgtaccgagattatatgataaatatttgatgtttggattctaaaagaaacttaatggatttgagtgtacaaatcatcatcttatcctggagaaattgttaggtagtcttggaccatcatggtccctattaatctccatatggcatgtaatcaagtgttattaattccttttttgtaaattataaaacttaaacacgtgtcacatagatagagattgaccataatcatggacacatgaggtccaggactacctaataatttctgcttatcccggctttgtatatattactgttgaattcagaataattattatttttttgttgttttcattctttgtatttgttaacagatatacttatgaattattaggtactctccagagcaattatttgatgttgtttctgctgttgacttctatcatggttttgtcccatggtgtcaaaggtcggagatacttagacactatccag

SEQ ID NO: 21112 - DNA, 1060 bp, Glycine max
  Intron number 2 from transcript Glyma04g16270.1 (locus Gly ma04g16270) derived from phytozome v7.0 (chr-ID Gm04; pos 17361419 to 17362478 reverse strand)
ctatcaaagttgctggtaatataaaggtaagtacattcagtgacggggcatctatacattccaaaataatcacattaaaaatccatcaaaacaagaaatgtcttttagagcatcatgtcacaaaaaccatctataaaaaccatctataaatagttaagtctatactaatacaagaaattaaaataattaaattagtcttttaagatttattttgctttacaaaaaataactattagtatgagaaattaaaataattatgcttcttcacacttgcaacatacaaacacacattaacacatgtaaattaatgaaaaacaaataataaaacctttatttatgatataggaaacaaaattttaatttgtagacttctgcagttcattctaattactattttggatattcataatagattaaaatatcaagttaatttcaaattcatgaatcataacattttattttggtagaaataaatcataatatgttaatcattagagagacccatgggtaatttaacaaatcccaaaagaaggaataaaatgtgatggtgtaataagttaatagctaactttctatttttttttataaaaaaaaaactttctattagttttgtaattttacaaaaaaaggtaaggggtacaaggcccccaccctcccacatagctcctttcctgtgtacattttcatcaatcaaattattttccagcatatatatatatattaactggctagtgcatatttacgtacaaaataatttttatgtaattaaatatgtttttaagtctttgcagtaaagataaagaaaactattttacattgttagtatataaaataaatttttaaaaattattatcccctgaagtaaattgaattaaacacacttttgatctccacccctctaaaaaaaatgtttatcttgattgttattatgttaagactagtagactatcacgacaattttgtattgtggaactacgtacttatattagttattaatagttattttcttaatattggtgttgcagagattccttccatcagattttggggtggaagaaga

SEQ ID NO: 21113 - DNA, 792 bp, Glycine max
  Intron number 2 from transcript Glyma02g06490.1 (locus Gly ma02g06490) derived from phytozome v7.0 (chr-ID Gm02; pos 5164419 to 5165210)
ttgataaactttacgggctctgtgatccaggtgaagggttttttttatctattttttcgttaatttttagtttgatttccgttaaatgtacaaaaatggacttttttttttgttggaattcattttgttttgcacatttgtattttttttttccctctgaggtgtgtgaatgcttgctggacttaataaggtagagtttatatggaacaaatgaggaaaacaaaatggatgtgcagtaatgaggaaaaaaaaaagagagttcatgcatggttcttgtgcaatttagttatcctggaaatgtcaaataatatcattgagtttgctctatgttttctgtttcggatactaaagggtcacatcaatgctcactttgctaggttttaatttcactttactccctctgctatctgttataaataaaaaaagacatactttacctttattaaaaaaataagttaatttcgttaaattatgctatttttaataaaaaataatttttttcttaaattatctttcattgtaacttgatatcaaacttaaaaaaattaaatttggatcatgaaagatatttttagaaatgatatcattaaataaaatatagataattgaaatttatttatatatgaaaacaaaaaaataaaaaaaattgttgtttatatttgagaacagagaaagttatagagattatttatttgtctgactatgtaatgattgaacatattatgttgtgtccttccattaaatttgaagacttatgggtgtttctttaaggaaaggagaatttgtgcctct

SEQ ID NO: 21114 - DNA, 1010 bp, Glycine max
  Intron number 1 from transcript Glyma02g45180.1 (locus Gly ma02g45180) derived from phytozome v7.0 (chr-ID Gm02; pos 49536383 to 49537392 reverse strand)
agctacttcgcttctaccctccattccattctctggtttgtgcacgaaaaccattcctttttctgttttaattaattcatgtttctgcttctgctttgatgctggctgttttgcttttcttgttttcgtttctctactctgttttggtgaattcactgaacagttctgtactagttagggatttgcacgtgtgcttaaacttttgaatttcttcgcatgtcaaatgcgcgtcttttatgcttctcagttgggttgaaaaaaacttgcgctaccccttttttcttttctgctttcccagtttatattttttaacataagagaaaagaaagttacattttagaaagaaaaaaaatccaaataattctctctttggtcgcttttttccaccctaacaaacatagtaaattgaggtgttagtctgtgttgtgtcccaatcactcagagactcattataacatattttatagagtattgtgcactgactcaccgtgctctccatataatcctttaaatttcaaccccatattcaggccttgtaatgactatgacagtaatggaaaaaggcataaaaataataattaaaatgatcgagaaagctattagttcactgaagacactatgaagttaagaccaatttgcagcaataacaatctaaagcaacagacactaaaaagacttaatgcggttgaagtagtaaacttgatgaagtttaaatacagacaggataagttaattaattgccagagatgtttcttctaatgaccatagaccaattagatttattccattttagatgagataagtttttgtctttgtgaatgtatgacttgatgtctgtggtatgttcttctcttttgtcaatggtacgggaaaaagaaaattgtaccttatattcatttcatatgtgattgtcattaatggtgtgattgatgctgcagtggttttaggcatgatagctactttcatgcaacattttgtgatgttctttttcttatagaagtgcaggaaca

SEQ ID NO: 21115 - DNA, 558 bp, Glycine max
  Intron number 1 from transcript Glyma05g00640.1 (locus Gly ma05g00640) derived from phytozome v7.0 (chr-ID Gm05; pos 345580 to 346137)
caagtctttctgaacattccgtttccttcctccaggtaccatcttgctttctcttttacaagttttgattttgatgattccgttgctgagagaggcactttaatccatttgggtctttccagatttttgctttcttgtgttttcctctatccttggaaatcttgtgattccctctatcctagtaaatcttgtgtttgttgatctttctataggcttatgaaaaatgttctttcaggttctatcgggaatttttgtactttttttcttttcctttttagtttctcttagggtccttgtcaatggttggtggtttttccttatgttgctttacatttgatcgcttttgttccttttatctttgccctttttattaacatgtagtttttgtcaagttatgatgcatttggtttgttgataaaattaatgcttttgtgataagcggattaataatttgatatttgggtttcttttgcttgttgtggtacatttatagtgactgattagcacttgcttgtcttttcagggaaaagttagcgtgtccttaggtcacataggatt

SEQ ID NO: 21116 - DNA, 268 bp, Glycine max
  Intron number 1 from transcript Glyma04g41730.2 (locus Gly ma04g41730) derived from phytozome v7.0 (chr-ID Gm04; pos 47586591 to 47586858 reverse strand)
acaaacgtggcgcgcttcttaacataagcacttgcgtacgcatctctctccttctcctcttccctcccacatattcggcaccctgcttttctttttttattaaatatatgcaatattttttctgttcatctgcttccccattcaacgcccataaaataataaatcctattttttgagggcattttactaataatcattaatttctattaataaaaaaaaacacataaccatttgagtcttctttggtcgttgcatcgaaaaaaccaga

SEQ ID NO: 21117 - DNA, 564 bp, Glycine max
  Intron number 1 from transcript Glyma03g03290.1 (locus Gly ma03g03290) derived from phytozome v7.0 (chr-ID Gm03; pos 3072066 to 3072629 reverse strand)
aggtcatccagttgtatgactagtgcacaagttaaatctcttgattatgtcggttcaggagtttctaaagttgctctcgctgcattcttttacaaaaccacgttctgccagaagcaatgctgtccaagcttcttcagttttggtcaaccttgtttaactttcagtttcaagtaagtcagtggcagtttatgctttataacattctatcctgcagagaatctaggcatataatgagataactttagatatgtgttgcatagttggaggttctgtaatgaataaaagctaacatggaattcagatacgtagttatatttaatacaggattatattataaacttgtctttgttgttacttgttaaacagttctactagtgttttgttgggttacagattttccaattatttggtcaggtgtaattgagtatttacagtaatgatgtgttgtattgcaaaaatcatgatcgacttaatttgatgtgaaagtcataaagtaatatttgagttctttcaaagttgggtaggctaggattgttttatcattcagagaagctgatatttttt

SEQ ID NO: 21118 - DNA, 417 bp, Glycine max
  Intron number 2 from transcript Glyma03g02080.1 (locus Gly ma03g02080) derived from phytozome v7.0 (chr-ID Gm03; pos 1854366 to 1854782)
acggttttctgaatcagagattggacctgaagcaggtattgtgaattttttataactttgggctacatcttttgagtttcattgttattttcggccagagtagaagctttgatgtccaattacttgttcatgttgatcttgaaaatactaactagctaattaaaataaatttactttgcaaagccatgtgtatccctaacctagtttacctgttgcaaatttcaaaagtcatgttaacattcttctagtttacctatattttctttaaaatttaacaacttttaattgccctcgctatttctttaattatttttctactactatatttggcttatgatatagaaatttgtgccttgctgagaagatctatgatttcatgcagtaacaaccattctgggaatcatcacagctctcaat

SEQ ID NO: 21119 - DNA, 883 bp, Glycine max
  Intron number 1 from transcript Glyma02g42230.1 (locus Gly ma02g42230) derived from phytozome v7.0 (chr-ID Gm02; pos 47307506 to 47308388)
acgccgcctccacctcctcgcttccccgattccaggtcctatttctttctcttttatatttccattcaattacttaatatgtactccactcgataattccataaataataaatttttaataattaagattcgttcgtttttggtaacagattctttttcggaaagcctgtttcctttgagggatttccatataggtgctagattctgtttgattttctttgtcgttttcttgtttcttgcatatatgaaaagaaaaaaaaaaagataaagaaagggatatttatgtgtataggtttttatttgctaggttaattttgttaccaaatgtttattagctatcatcgttttggaaacaatcggtgcttttgttttgatggaattttcgcaagattaaacggtcgaataagttttttggctcttgggatcttgaaaatatttttgtttgggaattctgatgtcactattattattaatattgtttattttataatcaagtgatgagatcatttaatggtatttgggttgataattatgtatctgatggactgtttgatattacgaggttcatcacttcttgatgagctttctaagtcacacgatcatctagaattggaaaacaggtgaaccaaacgaatttgggctttggtggtgtagattattaacctagaaccttgctcagaggaatgtttaattcgaatgttaatgactccgccctcctttatcatatactcttgatttataacctagtggtatgtagtttggagattgtttttttcactctaaattttgttttcttgaagagtaatgagcttatgttgcttgtgatgttagaggactcattctcattttatattttgttcacaggaaagggtattctatagta

SEQ ID NO: 21120 - DNA, 549 bp, Glycine max
  Intron number 1 from transcript Glyma04g41990.1 (locus Gly ma04g41990) derived from phytozome v7.0 (chr-ID Gm04; pos 47778520 to 47779068 reverse strand)
caaaggtgacttcttctcagtgtcatcttattttgatctcttttcatttttgatgctatacatagcatatcatattagcattccctgctgaagaggttttttttttaaaagtttgttaatctgttatttatgcatcgatgtctaaccttgttatgatcacttcgaattttacgaataaaccaatcttagtcttaacacttttttttgtggggtgcataaagttggttctattttgctatttttatttctgtaatttagaaaattataatgatccttttcctgggtcgttatttttcttcgtattaaaaaatgttaattgccctccattctagtcatatttttgaaagtgcttacttcttaatgatattcaagtttgtttaccagacggattatcattttttttcgttattaaaaagtgtaaatttggtttttaaattttgttgtgcctaattataatactcgatagacaccacatcatgatcagagatattgtatatactaactaaatgggttgattgaaatgaatgtattactactagctgcggtttc

SEQ ID NO: 21121 - DNA, 544 bp, Glycine max
  Intron number 2 from transcript Glyma02g38930.1 (locus Gly ma02g38930) derived from phytozome v7.0 (chr-ID Gm02; pos 44255453 to 44255996 reverse strand)
acgggtggagccgcgccttcgccggaatcgttcaggttctcgcacaccaagtgtttgatgaattgactctgctaaattcctgtttttagctgttggattttgtgagtttaatcgagatgcagtttttctgtaaaagttattacactctcaactaatcagaaatcatttttggtgtaatttttaagagaaaataagttatgcacccgactgtattaggtggttttacacttttattcaatcacaaatcaccctatgataagcttgttgacttttataataactatcttaaaaattatacttactttgatttctaattagttgacattgtaaaactacttaacaatttctgtgcatgaccattaaacataatttttaatagttataatagaagataacaaacttaccatatgagagtttataattggatcacagcttaaaacctttacagtgcaagtgcatgtattgttatttattctgattttggtgttgtatggtttgtggtagtgcagtcgtcttttctgtgggggtatctggtttcccctat

SEQ ID NO: 21122 - DNA, 909 bp, Glycine max
  Intron number 2 from transcript Glyma04g40720.1 (locus Gly ma04g40720) derived from phytozome v7.0 (chr-ID Gm04; pos 46675795 to 46676703)
ctgctgcagccgcacccgccgccgaggaaaagaaggtatttttctgatgccgtttacggatgttctgttttccgtttgatgtttgcgaatgattaattttttgtggtgtcttggtgaacctaataatgatgaaaatgtttcaagactttattgacgtgtgaatgtgatgtaaaatgtatggatataatcataagaatcaaccacacggacatagtcagcttctttaagagaatacctcgatcctcccattgtttaggagaaaaatagttgcatcttaaaaattatatattcaagcttgaaactaatcgacgtgcatgcaattgggctcaaataattgttttctgcattatcattatatattaaaacctaaaaaaggcatcgtgtattgttgggtcatagtcagcttgttgatttttgtgactgggtttgaggtagccccaattgcagtaaattgaatttcttcatgattgtaatttggtattttttacttgtaaataaatatgtacccgagttagcaagtagggttttatgtctcaaggtgatagggaaaaaatgcttgtgattttgtccataattgcgaatgagagttaatttgatattgagttaataggatgtgtttttttcattgagacttttgaataatgaatggtcaaaaacagtaggcacatttgaagtaacttgatgctgtgtggacttcaactattgtttttctaccgtttgtatagtaagaatgactaggattgaattatctttgtgttagcagcatgcactacgcagacattttatacctttttttggttctagtgttgtgttcctcttttctatttgttatttatgcaaggcttctgtttatgtattttgttcctttcaatgtgtgtttacaggaagaagtgaaggaagaaagtgacg

SEQ ID NO: 21123 - DNA, 830 bp, Glycine max
  Intron number 1 from transcript Glyma04g18730.1 (locus Gly ma04g18730) derived from phytozome v7.0 (chr-ID Gm04; pos 20326013 to 20326842)
caaccagggaaacgcttcaccatctcatccaccaagtatgacattatttctaccactttttgttttcaaaaaatttatttaaaataattttgagtaatgatgcatggacatttttagatataacatttcatttttttaattacatcatattacttattgcttattacatttctttgttttctttctctctctatatgttaatttgattagtgttcatcaatcttttttccaaatattttatgttattcattgcctaattttcattcaaaatatatgttaagttttaaaaattatttttaaacaactattttaaagataaaagtaaaaatagttagaagattttttttttatattttcttcttgtatctggtgatctaattctgggtgtaaatctcctggagtgatgtttcatatagtgaggcattaacttagtttggataaagcatacgtttttttttctttgtttttgttttttaagaaaattaagagtgaaacacttttttaaaatagaaattaacaacatcctaaatttctctttttcttatataaacaaatccttactttggtatttcattttattatataatgtttacaaggttaaaacaaacaataaggtttttcaaaaatataaataatgttttataaagttttgttagtcttgaagcagagttgactaccttcttttctagaaggctaaacactttcccaaattaatacgaaaaggcctcgttttttatgaaaacttttggaggaaagtgcttttatattgtatggttttaattattcaattcttaactaagatgtaaatgggaaaaaaaattgcaggtttt

SEQ ID NO: 21124 - DNA, 769 bp, Glycine max
  Intron number 1 from transcript Glyma01g34940.1 (locus Gly ma01g34940) derived from phytozome v7.0 (chr-ID Gm01; pos 47421747 to 47422515 reverse strand)
actgaggtaaacgcgttaatcaccccaattttttatatcatagagttttcacgattattctgacgcactctttaattttcacaacttattttcctgcactataattatatcagttgtttatttcttgggcgttctgacccgttcataaccgaaattaccacccaagattcatgttcaaggttttgtctattatgaatttatgcgttatgatacttaaaccgaattaatgtaatttttttttgcttttctgataatttattccggaatcagaaggttggagtccaccaagtgcgtgtttagttcagcttattttggagaaatgatcgcatattttagttacaagagaaaccttttgaaaaaaaataagtgattcatttcttctgaagtaatctatgccaaacatgtactattagtgtctttggttcccgttttgaatgtgattttccacgtttcagatgtgattttcagaagctaacagttataggctaatagctttcacattctaaacctgattcctccatcttaaacaaatttccaagcacgctatatgtatctagaagaattgttgatgtgtgcatttagaccatcgttagagaaggatgcagaggtgcattattgagaagccgtgatatgtttaattttctgatatgtgaaagttaggtttgttggttgtgactaattgattgtttggacgcacttatttgttggcaggttttcttaattaactgtttttttcatggttttagtactgggtcagccagggcaacaa

SEQ ID NO: 21125 - DNA, 990 bp, Glycine max
  Intron number 1 from transcript Glyma02g06460.1 (locus Gly ma02g06460) derived from phytozome v7.0 (chr-ID Gm02; pos 5140463 to 5141452 reverse strand)
gtatccatcatatctggctgtaatattgcattctctctcgctcctttttctattatttttataaattttaagatattaattatatttcttaatatcatgcgattaatttcgatttttaggtttatgcatatataaaataatatttattgaaatagttcaactctttaattaaatatttgatagtttaagaaattaatattttgttttttttttttggaaaaatgtaaattatattaaacccaaaatgatacaacaataaacggggcataccccgcagttagagaaaatcaaaagtctccccaatacaagaaagtctatatcaagatgctaaaacaaatgtaacaggtgcgtttatctatacataagaaacttaatcttgctaataacctttattacaaaaaattgataatctttaaaaatcagcttgttcctaaacagccagatgcagtagactgtaattgctatagccagaaaacctaattttccttgaacatctgatgtggatctgtccttaattaaagagtcagtaatgtgcggtgcggtaaagaagtgaaacgcctgtggaaaggagtcaaatcacacatatgagtccaaacttggagagatttcctgcaagaaaagaacaaatgaatatttaactcagtttgaacataattataacttgtacatacattttgttagccaaaatatattatatacttacatgaagacatttacacatgtttttagtgttattttataaacaaaattagaattttatctcaacaacaataataataaaagtactccgtatttaaaatcaacacacaccattgatacaaagtgaaactttaattctaataacaaaagcatctaaaaaattgcgtctaattttttttcttagtttcaaatgattatattttattttatacaataaatgattggatgcacatgcttaaaagtttttaactttatctacccacatgcatgatttcaccagacacgggtgtt

SEQ ID NO: 21126 - DNA, 728 bp, Glycine max
  Intron number 1 from transcript Glyma03g04410.1 (locus Gly ma03g04410) derived from phytozome v7.0 (chr-ID Gm03; pos 4530534 to 4531261 reverse strand)
aaggaaggtcagtgtggcaaagccttgaatgtattgcctgacttaaatttttcaatttttttatattattttatttatttatttattattttgagtttgtgaattcatgtgaagagtttggtcagaaaaccagttaaagatgttcatttttcttgcatgtaaagcccagtagtagtgtgagaattgtgtatggttttcagtgaaaaccatcactgtatctataatggaagagagcttttcacaattgtgtatgcaatcagctcagctaactcttagtcataactgtatgacaatatctactggtattattgcactcactttgtggataacatctgcgatgtcagtttttgctatggttttactcatctaagagtggttgatgtggtttttcatgtctaatgagaaacaagtagttatagcatccgtgacatgatttctggttttgtatcgggtttccaaacacacattaagttccaaataaatatggagattttacttataaatttcaacttttaactcttaatttgacttttggtccaatgaggtcattatttgtggttactgtttaaaagacaatattgttatggagtcattggaatcgtcgattcaattgtataattttgtatataccccaagtggtttgctggcagctggagtcctggtttatgtagttgtaggttaataattttccaggtatagagatcggattgttgcgattaaagttctgc

SEQ ID NO: 21127 - DNA, 490 bp, Glycine max
  Intron number 1 from transcript Glyma02g44180.1 (locus Gly ma02g44180) derived from phytozome v7.0 (chr-ID Gm02; pos 48807452 to 48807941)
gactctctccaccactctcatcgtcagtacgttaccttcttctctctctctctaattgctatgtttcttgcgtttagggattgtgcttttctctcttctgtttcgatgtgagtcagcagacagaaaaaaataaaaaatgttctaataataaattacttgagttctgtttaaagatgaaatctagtgattcgattatgaatttccatatcctcttgctacctctcttctcgaataaatctatattatagttttgaaaacgttaggttcagaatcgttatatattgaaactttacaaatttaaatcatttgctattaacttgcttaataatacttcaattatgctcgcattctgaccaactacaaaccaagctcgataaattctttgtacctgtcctcattgccattgaaagctctttgaatttcctacttaaccttattcattttatttcatgcagctgcacttggagcaattttgcacgtaatatccact

SEQ ID NO: 21128 - DNA, 784 bp, Glycine max
  Intron number 1 from transcript Glyma02g11930.1 (locus Gly ma02g11930) derived from phytozome v7.0 (chr-ID Gm02; pos 10134349 to 10135132 reverse strand)
cacgcattaggtgagaactaaattaacttcttcaatgttaaactcttgctgtggaacatttcagatttgaacgatttcaatgtttttggtcaatttttcagcatgttgcttaaagttcaaaacatgaaatcttaagtcttcaatcttcaccatactgatcctttatgcttaattagaagttctatttttcacacttgcaaaactgcatattgaagtttcttctagttcaacttcaccatcttttatgatttataattttattttatttttatgaattttggtcacattcaatcaacgggaagaattttttttgagaacgctcctggatacaatcatgacatagtgggccattacatatcttacacctatcatattttgctaatcatgtgtgcataaagctattcatgtcttgtttatttttttccaataataaacccaaagatagtgaccagtctgcatcataaatttcaattccattctctaccaatccttttcctactttccttagaactctactttatgcattaaaatatcagcgaatgagattgattctcctcgctctactgtacaaagcattcaataaagtcgaaggaaccttcaatatcacttttattagagttttgactatggttgaaaccttggattaattaatggtttctaatattatactctaagcaaagaaaacttgtttatttagcaatgatcatgtttgtttatgactaaatcattttctttgtcatcatttggaggtcttcttcaactaaaagaccctctaaaattaatt

SEQ ID NO: 21129 - DNA, 829 bp, Glycine max
  Intron number 2 from transcript Glyma01g36600.1 (locus Gly ma01g36600) derived from phytozome v7.0 (chr-ID Gm01; pos 49064810 to 49065638 reverse strand)
ctcgctacattcggccgcttcctctttaacgctgggtatatatgcatccttcactattttttttaacaaataataataattattattatccatcgtagatccactagtatatagtatatattacagattcactagtttattttatcattcaggaatagttgtgaaatcgtggctcaccgcaatgattcaatgcatgcattccgcacaatttaggaattactcctcttcacctctaatttctgactgcatatttgtagttgctcagcctgttataatttctaaattaaaatatacaaattaaaaaaataatctctctcactctcttcattattaattggacattttaatagtattttttttaagaatatgtatcctatctggcaaacctgaaaaaaatctaactcaattatttcaaaatactatctctttttatctattttttttcttcctaaattgagttttaaatttttagtaataaatttaaaatatgattatatatttaaggatatttatttatggaccccaaaaaagatatttatgagtttaatttttattttaatataaatcaattacttaatcatcattaatttgatttctaaaattgttattgtgaattaacaattatgataatgcatacattatttattataaattttaattatataaaaataaatagtagtacagtacttaattttgaaatgcgaagcacagactactaaaatactagtttcaataaattgattataaccgttaatttgcgtgttgtaagtttcattactctgttattttgatggctcatgatggggtttgattgcgtgtgataggctgt

SEQ ID NO: 21130 - DNA, 450 bp, Glycine max
  Intron number 3 from transcript Glyma03g09880.1 (locus Gly ma03g09880) derived from phytozome v7.0 (chr-ID Gm03; pos 11921734 to 11922183 reverse strand)
ctgacagtattgcagaggacaggtatgccatgaatgataataatcttgccataagtaaagtgagtaatgggaagatgtttatgcattttgaaattaggtttcttatgctctttagattatcagacaaggttctataaaataactattagcaaatggcataagcattccagcagtaatattctcctaatcctcattagaatcaattattcaattttcagttttatgaaattataatttcttgtctagaaattaattaagtgacttatctgacttcatcaaatgtatatgaaagaagttggatagaaattaggtcaaatttaaatccaatattgatttgggaagatttgaattgtatttgaatttttaagttctgtatggtgcatgacatttggaactctttgttgttgtgaagtagctgaaaattcttacttttctttttgtagattacac

SEQ ID NO: 21131 - DNA, 659 bp, Glycine max
  Intron number 2 from transcript Glyma02g43110.1 (locus Gly ma02g43110) derived from phytozome v7.0 (chr-ID Gm02; pos 47986872 to 47987530 reverse strand)
gggttgaccattatattaagttcatagagaaggtatgctgtcatctgaattcacataatttaccataattatgatattcgctttaatcttttattcttcatgtgtgactgttctagatacagagaaactataatcaactattgaaaaacaaaattgggaggacatggagactgactcagtaggaaccttactactgtttggatcttgtttggcattgatatatggacacatcaaaaagctcagggattataattaggagtgttagatgtagtgctttgttgcttctctctaggattgatggaacactgaggttgaatttttttttgcttagtgctgttagatgtattgctttgttgcttctctctaggattgatggaaatgtttaagatctcacataaagagttgacatctttaactcacagtagttggtgtccctttattgttttattcgataaaaataatgtcattttgttaaattttgttttaataagtgccaaacaatgtttcattttgatttctgcatgacttaaaccagtacgttacatatgttatactcgcaggactaatttttgagtgcttacttcattttgtggtttgctgatttttttattttttttaaactagacattacctgcaattaagtggggaaagcataccag

SEQ ID NO: 21132 - DNA, 383 bp, Glycine max
  Intron number 3 from transcript Glyma03g08160.1 (locus Gly ma03g08160) derived from phytozome v7.0 (chr-ID Gm03; pos 8992815 to 8993197 reverse strand)
aagcttccgggtaggacacaaaagttaatattgacactaactatgacagattataacattaatgatttagagcctctttacataaggagaattgaaaacctttgaagaaattaaaagagcttttataaaataaaataaaaagagagtttttataaaagttatctgcataaaataatttcaatttttgtaaaaaaaaaactcaattcatgttacatttttgtttttatttcccctcttatggagaagttcatgtaatattgtacataaaaacatgtgttctattatatgaacttgaattgaaatgagaacacttgtgattgtgtttgtgggtttaataatattttttaggattgtggagagtgtgggtgaaggtgtaagttgtt

SEQ ID NO: 21133 - DNA, 764 bp, Glycine max
  Intron number 1 from transcript Glyma03g01480.1 (locus Gly ma03g01480) derived from phytozome v7.0 (chr-ID Gm03; pos 1272602 to 1273365 reverse strand)
gacattgtattccctgattggtccttctggggttggtaaagcttctatacctttcaaaactaaaaacaacattaacaagacattttttaaagtgcgtttgtcacctgttttgaatgtgcataatataagaaatgataaatgggaggacaacatgtgggaagtaaaaatcaaggatgcatttgcaatttgttacattgtcaatttttaccatttcctttggttccactattattaataatttatttttctatgcacatttctttgagaagtggtgaatttgaattctctcatgttattaaaagtgtgtttggtgtggtataatgaaagagaaataactaatttttatgtccaatctcatcacaactctttgtagcttccaaatttttacataaaaaatattatttttgtggtcatcacaaaaccaaaacactcattaaataacatgataatattatgagagaaagatctagaaatagttatagtaaaagttattattattattattattattattatcattattattattattattattattaggttttataattttgtttgaaatgacctaaatcttggtggaaacctttttttaatcttcttatagatttttattttatttcttctattatgttttgtctcaaatgtgtatgtttgaagatacaatgtgatttcattattttccttaattaaaatgaaaaaaaggaaaataaagttacacttttacatttttttcatacaaggcctgagatcaacataggacc

SEQ ID NO: 21134 - DNA, 852 bp, Glycine max
  Intron number 1 from transcript Glyma02g35240.1 (locus Gly ma02g35240) derived from phytozome v7.0 (chr-ID Gm02; pos 39963693 to 39964544)
ggcgcgccgagcgcctgaggcaacaacaagctgaggtaaattcaaatgcaaagttcaaaacaaaataaaaaaattaaatttttgataatgtacaaagcttattagtagtagtagtagtattttcttttggctaaaaaaaaaatacttattatagttctttaggtgctgctgaatgtgttgttcttcaattggaattgaatcttcacttgtataatcctttaacgcgaacttttattatgtggattatcgtgatgaaactctaattctgataggagaacgacacaaggaactgcatttaagtttttttttgtgtgtgtttgataatgtgctctgccactgcatgttctgtggtgactttggttaatttttttttttttttgttacactagtttgaatagggggaaagatgaaattacaccggtgtaacttttaacaactattacaccattctataacttttaaatgaataatgttttcttaaaacttactgttgaattagaagtttctttcagatagatcacatttgtaaaatttcatattaatataaaatcatttgatatctcgttcatatagattaaaatcgacgtaatataaacatttcaaaatatattgaaatatgaatcatttgattactttcttgtttttcaattttgataaaatttgacacaacgatattaccttcttggttatatgtaaatataattcaacggttatatcaataaaaatcgcgttctatatcaagttataaaaattgtgtaatagttgtcaaagttacacgggtataatttgatccctcctctttgaataattttatcaatattttttttttaattttgcagaaggaggtgttgg

SEQ ID NO: 21135 - DNA, 658 bp, Glycine max
  Intron number 1 from transcript Glyma02g33780.1 (locus Gly ma02g33780) derived from phytozome v7.0 (chr-ID Gm02; pos 37582890 to 37583547 reverse strand)
agaaggtaccgacaacacaatatgatccttttattacccttctccatttacttgtttctttgtagcaattcttatgtgagggcttgtagccacaactaatcaaaggcataagattatatgttaaggaaatttcagcacagaatttaacagagtttaatttaaatttaaagaatggagaaaaaaaattttggtacaattaagaatggataaattttggttcaagtccttattaggtcaaaattaattttagtctctatattttaataacaatagttttaatcctcgtatttctgaaatgtgatggatatggttcatgactttcattttgacccgatgaaggaccaaattcaccatatttcaaaaaatacaaagaccaatatcttctattctaaaatgtaaggactaaaattaatttggacaaagaggaacctaaaatacatttaacctttgttgcttgtactgatgtgttgttattttgaggttgggcttaatatcccatgagaaatcataggcttttacctcaaccttaaactaataattgtttgggtcacaactcaacattatgaaaagttattgctcaatttggtagtgctaaatacattaagctgtagctatctgatattagcttattttcttggacacagtgtgtgttagctgt

SEQ ID NO: 21136 - DNA, 524 bp, Glycine max
  Intron number 2 from transcript Glyma03g28480.1 (locus Gly ma03g28480) derived from phytozome v7.0 (chr-ID Gm03; pos 36410303 to 36410826 reverse strand)
cggtcgctgctggtaccaaattgaaagatcttcaggttatcgaatgcagcatattttttttccttccttttaatttatgtatttgtgctgcttttggactacaatttgagtaagaacaacataaacaaaacagaaaataataaaagaatttaatcaaacgcacttatagggtgtgcatgattccccgaaaaataagggagttgattgtacaaaaatatttgttcaacattgattttaaagaatacaatgatggacattacaaaatataagattgattttaaagaatacaatgatggactcatggacattacaaaatatataagaatgatggaggataatgtctaacaaagtaaaagtaaaatacaatattatccttattttttaactttttattatttaatacttttttttatatgggctttcttctctaaacctctctcaccaaacattaacaacttcaccgccctcctctctactgtgtcatgtcagagttttcccaattcacctccctcctcgccttcgcc

SEQ ID NO: 21137 - DNA, 734 bp, Glycine max
  Intron number 1 from transcript Glyma02g14930.2 (locus Gly ma02g14930) derived from phytozome v7.0 (chr-ID Gm02; pos 13521090 to 13521823)
cattcttaaaattacctaccaagaaccctggttcagtaacacgaaattatacttcaatgactggccaaatcatgagttgaagtaagtatttcatgtagcaagatgaaataaatcagtccagtcggtaacaaatgtttttcccagatattgagtggcttgcatttatcttgttgaaccgatctatttgtgtttcttaggaaaacctccacattgacattgacccttattttcttcatcgactttctttactttacatcttaaattttgttatatggttatgatcttaacttaattcataatttacagacctgagttcacattgaatttgagtaagaggttttcagaatccaagaattggtccttgggcgtttttggtttgaaaacttcaagagacctaaatttagtcttttttttattttttatggacaactaggtatgtgactacaaatttcaagagtttccaaagcaatatacagatatattcctccctttgttaacaatgcatataactatttgttatggtttatattatataggctatgactaatttagctccttgcttcttctggcttgatgccattggttgcaacttgccatttggttctagtcagacaagtctaactcaaatggggagaacttgtaattgtccttaggaagttgtttataaggctattgtactcatgattttgtggtaaacagaaattggcatattaaaatttatattacgccctgtt

SEQ ID NO: 21138 - DNA, 1035 bp, Glycine max
  Intron number 1 from transcript Glyma02g05120.1 (locus Gly ma02g05120) derived from phytozome v7.0 (chr-ID Gm02; pos 4152410 to 4153444 reverse strand)
aggttgatcaggccacactctttgatctcattctggtgaggatttctcttctttatttctttttcttttctttttttggcttcttttgatggttagggattagggtttttgcgattgggggtttcggtgtttgttagggttacgtgttgtcgtggcctgaaggtttggtttgtattcgatttttgttatgtaatgttttatttcttgaaacttaggattttcttttgatgttgtttgtttaatacgttggtgttgggtaacgagagtggagttgtggaaccgcaagaatcatttgggataaatgtggccccagtgtgactttagaggctaggaacttgtgtagggttcgttgaaatttgtattgttgtactgatgtatttgtgtgatatggattgtaaaattgattctaaaattgagttttttggttcttttggtatacaagacaaggttcttttggtatacaagacaatcttctaaagtaaacaaagagaatgatttctttatgaatttcaggatatatgtatgtatcttgctttggcaaatttgcatcagagaagagttttttttttctttatcaatgattgattatagcatgttttatgttggttcgggaaaagtgtggctacattaattgctcatgatgattgctttggtctatggctgtctctgcctatgaagcaccgacatggacgccggacacggacacgtggacacctatgatgtccaaaatataaaacgtagtatggatgtcatgtcgacgtcggatattgacacagacatgtgtcggacaccggacatgggaaggagctggagtgtccgtacttcataggtctccacacattagattttatttggattgtccctaatgaaaatcactaccatggtaaattgctgtagatggcctgtgtgtgcaatatttgtatgttttaatatcaggtttactctttattatgtcaattaacactggcattcctttgttttatgaaaattttctatccaggctgcaaattacttgaatatcaagagccttttgga

SEQ ID NO: 21139 - DNA, 357 bp, Glycine max
  Intron number 2 from transcript Glyma01g01820.1 (locus Gly ma01g01820) derived from phytozome v7.0 (chr-ID Gm01; pos 1391720 to 1392076 reverse strand)
ggatccaagtgaataaagagaacaaggaattcaaggtaaaaaaaaaaattcttgtctattttgatctgtgtgttgatatattaaaattgaaacctgcaattacccatgtgagttgcaacccaaaatatttgtaggtttgctttgttttattcatctattatatttcaacaatctggctaaatgatgtagtttcaaacttagatccctagctacatctttaacatgacaaatcaaagcaagaagaaaatgatttcatattctgcgtgttggtttattcgcttgatatatttttgcagatatttgactttccatcctgctgcaggatcttgcacctgagcgcgcttttgcagattttgt

SEQ ID NO: 21140 - DNA, 702 bp, Glycine max
  Intron number 4 from transcript Glyma05g03900.1 (locus Gly ma05g03900) derived from phytozome v7.0 (chr-ID Gm05; pos 3003587 to 3004288 reverse strand)
aagaagactaagaagctcccaccagtctggaagtagtaagtaccttcccacccctcaccctactatgactttcttgctattattttatcaatggatttttagttgaatagctgattattatgttgtatttctatgcttgagatgtggcctttgtgaaatggagtggaaatgaagggaagtggtttggttcatttttcccctgcctatccaaacacagtattattaataaatttttccataggattattaagttatttaaattctgtattctgtatacttctattctgtttcggaagcatgttttaagtatttattttagatggaccacattggtaagtatttgttttagatctattttttacctgctgaatgtgttgtataatagtcaaaataagattgtcatgtagatagacatactttcctagaggtgttgttattcaataggtaatgcatacgttatattatttggatgttacataagatgatcttctaaatgaaattctattgattttcactggtagttatgtattttttgttttgagtgcacatgtgtatgatgcttgctgaagtctttgtgcatttgtaatttgaatgccaaccttgtaactttttttttatccatgtgcactgtccctttcttgctattaatgacttgtgaattttgcagcgaatcaacaactgctagcactctggttgcttaga

SEQ ID NO: 21141 - DNA, 851 bp, Glycine max
  Intron number 1 from transcript Glyma01g40910.1 (locus Gly ma01g40910) derived from phytozome v7.0 (chr-ID Gm01; pos 52574950 to 52575800 reverse strand)
cgaccccaacctccactctccggattacttttccggtctctctctctctctctctctctctctctatttcattcatttgcttctctaatttccctcactttctttttgtgctgtgaatgtcatgcatttgatgtgactgtgttatgtgttaagtctagtggtgtggtgacttattgttctgccatgtactgttacaactcaacaagccactccactaggtctaggttgttcaattgaactttgatttagcaaatttcagtctgccactgaacgatgaatgacaagtgccaagtctccatttattctcaggacgattttattctattttgtatcattttccctattttttggtttatttgtttctcgttggcggttttgtgcatttgagttttcttgcaatgatggccaattcaatatactcgttaaattgaaattttattctattaaataagaaagcatattaggaagagggaatgaataccgtgaaaaggaaatttagaataagatagccttctttcaggactgaatactataaggataaagagttaaatagctgttacaaacgaaaatgaacaaattcatctgttttccttttttctttgtaagatgctatggttttatgcatggttgttgctattcttatgtattttgatgattgttttcaaatgttatacattgttttgttcttttatttaatttggtggggatagtgatgactttctaatgcaagcctcaccccactgtttcatattgtagtctcattgtgtatgagtctgcaaattatttgtttcttgtgtatagtttctcctgacttggaattgttacagatatttgtgaaccttgtccaagta

SEQ ID NO: 21142 - DNA, 502 bp, Glycine max
  Intron number 4 from transcript Glyma04g34240.1 (locus Gly ma04g34240) derived from phytozome v7.0 (chr-ID Gm04; pos 40367050 to 40367551)
tttgttcaaggtttgacaaaaattactctcttatttatttctaaaaaatcaataattgttttgaatccacctgattgctaatttgtatttgggaagaccgagagagaaatattttctctctcattatatataggtattattatgatattatctattacttggttgggagtatatcaaagaactagaaagatagggactttttccttcttgatattaatatcttcagacgggggtcaaagatattgtaatgtgtccacttatattcatggactctattgttatccgctaagcaaataaggatatcctaattggcaattagcaagttcaaagggttagattgtacagtacactgcaaataacataaccattaaaaatcaaccaaaagtgaaagcattaataaacatacacaaatcatatttggtgactattttgatccttttgtgagaaagagaagatctagctggccatacaacttaacaaaatcttgtctagtagctaattc

SEQ ID NO: 21143 - DNA, 934 bp, Glycine max
  Intron number 1 from transcript Glyma03g00750.1 (locus Gly ma03g00750) derived from phytozome v7.0 (chr-ID Gm03; pos 462536 to 463469 reverse strand)
gtattctggtatgttatgttcttactcacaatttctttttttcctaggccagaatttgagagtgcttataaagcattttgttatttttaagaactgttcatctgttaaactcataggcaatgaatatgatacataattttgtcaacaatatttgtgaatccttgtatatattaaggaaaatgtttgatagacagccaaaagctttccaatacctagagagaaagaaaaaagagatttttttttggtacaataggattttcaaatggactaattaaaaacaagaaaaataatataggaactaaaactatatatatatatatatatatatatatatatatatatatatatatatatatatatatatatatatatcaagaatcaaaaccaaaagtagtaatttttttaaaaatataggctaaattttctttttccttatgaaattgacaacaaggtttggatttctcgtttgtgcataaattttcatcttcataaatataaaattataaggtgtcatttttttagccctaagcacaactgaacctattatgataacttttacatcatcgaatattttttttataaatgtcatgttttttatatgtcatatatatatatatatatatacataaattcggatatcagaaccttagctacggatcataaaatgatacattataatttatttagggttgaagatggataaaatttttgctggaacaagatccgaactttgcaaattctaaaagaaagatgagccaaaaacatattacaaaattacattgttgttgatcagtgcagctttcatcatgttatatgtatatataattcaacttcatatggctattggccaacaatactatttattcagtggagaagtataggcaaggaataacacaaattatttgtgggtgtgaactggcgattgtagttagga

SEQ ID NO: 21144 - DNA, 568 bp, Glycine max
  Intron number 2 from transcript Glyma04g40310.1 (locus Gly ma04g40310) derived from phytozome v7.0 (chr-ID Gm04; pos 46416672 to 46417239 reverse strand)
ctaaggtgaaaatcagtttcagtggttaactgtttttccaagtttacttgtttttatgtagctttacaccattatagaacggatgaattcttgcatttgtaccaggtttgttttgatatgtgcaaaaaatgttcgtagatcaagtcattcatgagtggttcaagaaatatcaatatcatatttattttttctccatacttcgagatggaaggatacataatacataaaatgaatttagcaacaaaaaaagtgattagttttcttcgaactttgcctcattgcaatatttgcaaatttattggggttgtcttgggatttcagttattaacatgataactcaaagtaacatgtatattttgacatgctttgtttcttcatccaaatgatcaatatttgttgtggtgcaaatgaatttttagggatgtgttgatgtaggttgttgtggcaaaggatatagatgctgtaagaattatttactgttgtgttgtcatatcaaaccacacaaaatactcttatttaattatagtttcagttcttcttttagtaatttactattttggcctcaggc

SEQ ID NO: 21145 - DNA, 855 bp, Glycine max
  Intron number 1 from transcript Glyma02g03870.1 (locus Gly ma02g03870) derived from phytozome v7.0 (chr-ID Gm02; pos 3107559 to 3108413)
ttctgcttccactactactcctttgttttctagaggtacttgctgtttatcatcacttccaagattttggggtggtgatcttgttattttttctgcttggttcttaaggacacgtagaacatgaaaatgaagtgactcaattttgcacttttttttatttgattaacttggtttgtgagggatttgaatgataggatcattttttattttaggaatgttttttatattggcaaatgttactttgttatttttgttaaaaatatcactgagatattctgagaattcaaactcgcaacctttcttcctttgtttttaagcttcttttccatccattagaccaaccttatatctactcttatccttaggaatgatagttaccaatttgtttggagatggttggattgatcagtttttttttttttttgtgaagagagaaaatgaggggtgccataaaaaattatatgatcattgaccaagtgagggggagagggatataaaaagcttggaactttaaaaggatccataactaagtgctatttacggtgaggcattatgaagtctgaactgtactttattggctggcccctgttccttttcagctaccacctgtttttttcacagtttcactgccctttcaagtacatgttttttctttcacaattggaggctactttctgggaccatttcaatatatgccccctgccaagatgatgaatgatcatgccttttgattggtgtttttaggctttgcttttgctttggggctttcattaatggtcttattttttttaataaattgaccctttcttctgatattcaggcggaagtggtgctcttggtgcagggctcagtaaa

SEQ ID NO: 21146 - DNA, 618 bp, Glycine max
  Intron number 2 from transcript Glyma03g41600.1 (locus Gly ma03g41600) derived from phytozome v7.0 (chr-ID Gm03; pos 47029471 to 47030088)
ttagacttggaattcctgattcaggattgttctaagtaagtacacttactagtgcttggttaatgggatttcatttcagtatttgctttttcttccatgagttgcattttcataaagatactattgttgtttttttgcttatattcttaaaggaaaattttattactgttgttatatatatatatatatatatatatatatatatatgtatatctcggttttatttatttatttataattataaattataaatgataattatagagtttttgaatctgtccgagtttgttcactatataattgtctttttctgctgtaaatctgacgagattcaaggacatgcttagatgtttgccaggtagattggtatgcagttgccaaatgtttaaagtgtaacgttttctgctcttggctttgtgaggttttaatggaattttctcatacaaccctaattcttgttttaaaaagaggtttacggttctttagatctgaatcacatcactgaggagagattttgtgggttaaattggctgttagtattttggctttaactgataaggctaattcacttgttttgttacagtataggtgtgagctggataccccttcaatcctctg

SEQ ID NO: 21147 - DNA, 450 bp, Glycine max
  Intron number 1 from transcript Glyma01g27240.1 (locus Gly ma01g27240) derived from phytozome v7.0 (chr-ID Gm01; pos 36332760 to 36333209)
tgagtcttctccttcctcgtcgattgcttcctcgggttagtgaattttgactcttccccgcccttgcttttttaaagttgacgcttccgagaattttgatgtgtgagagttttgattctgctttagtgttgttgctcctaggagcttggaggatgtgagagaaaacgaagcaaggtgggattttcgtgtttttttttaaactgtgaaaattggtgtttgggtaattagtgttttttggaagaagcttgaattttgggttatttttattaattttgttgattttcatgattgcttgagcatttcttagttgatgccattttgcattttttgttgtagactataagctggtaaagttttgaatggtggaaattgtggcttgctggtttaatgggattgttgattttgaatggtgcaggctaaaggattgttgtaatcactgacacacaaacc

SEQ ID NO: 21148 - DNA, 959 bp, Glycine max
  Intron number 2 from transcript Glyma03g27570.1 (locus Gly ma03g27570) derived from phytozome v7.0 (chr-ID Gm03; pos 35304568 to 35305526 reverse strand)
ccgacggtaagttggtaaatgagattaactgaagagtgctcatgagccatgacttgctcactttcattcttgtatttggcaaaggtttagtagcactccttcgataatttggttggaattatatcgtcagtgaaaatagtatacatggttaatgagattaatttggcttgtcctaagaaatgagctcttgccaattttagtcagtgcatcaattttgtttcgttttatttggatccgtggcttatgaggtgctaataatcatgttgtgcaaataagttaaatactgttttttattcaaacttttatcatcaagaatttgaatttttttttcttcctatatagactataataagttctttcatctgtttagattcagaaatcaccaccaatattagtgtgatcattcacatgatttaatgatgcaaattgaattttcaggcactgcaaatacactaagttgtagtttgcccatttatacttttattttttaaacttatataccaatacatataaagtgtatcacaataatttgatgaattgtagcattttatcgtatcatcaatgactcatgttcatttttaaaacactgattctctcatttgatttaagatctatattttattttaattttatacattgtacaatttttaaatttgttctgtgtcttcgagttgtatcactgtcccatgtcatgtctatacatttcaggattgttctgtattttagacttgagttgagagttgtaatatatcatgcctatgtcacaaataggttgggtggatggatctttgtatctggtatcagaataaaaatgaacatgcgtggagatcataacaagtctatgttctgtctgaatgagttaatattgttattttctttctgcatgaactgaagccacatggacagatccaattcacaatcttagaggaatttgtgttctattgcaggactagaaggtg

SEQ ID NO: 21149 - DNA, 817 bp, Glycine max
  Intron number 2 from transcript Glyma02g12710.1 (locus Gly ma02g12710) derived from phytozome v7.0 (chr-ID Gm02; pos 10986819 to 10987635 reverse strand)
ttgcattgcaatttaggtagttcacattatgcatgacctattaaacatgaggaatacaaatttcatagttgtcttcaattctgatctaccaatacttattctttttactatactatcgattttatgtcgcacctattcaattgcacattaagaatatattctacattcaacaagctagtgacttcccaacacaattgacccaattaaaaattacaaatagaataagtaaaagtttactacatcagcacaaaacacacaaccacttgcttcattttgtcaaccaaacatcaaaaccaatttcagtttctctatggaaatgggttacttgggaattatattctcatttggccttctctatactgcattggagagcagaagagcgaggtcctggttatacgggacagatcaaacctcgagacaaaatcaattgtgaattcttaatcaacaatgtttaattaaaacatgtatcgatgaatattcaatatgtataggatcgcacataccatgagaaaaagaaagataaaaaagcaaagatatttcctccattcctatttatgaaatccatgatgtttattcatttttataagattcatcctataatatttcttgtattaattatttttagactagaaatatgcttcattaaaaaaaagataatgtattgataaatagttaagaaaatgggaaatattaatgataagaataatttaaaaaaattataaatttaagataaatttatcgttatcaattaaattaattaggtaattgattcttgtaaataggggcagagctagttccgatccaaagagaacaaggt

SEQ ID NO: 21150 - DNA, 601 bp, Glycine max
  Intron number 2 from transcript Glyma04g07720.1 (locus Gly ma04g07720) derived from phytozome v7.0 (chr-ID Gm04; pos 6037737 to 6038337 reverse strand)
tccatagcacagagagaaaactgggtgggttagttttcttttcctttccctcagatttttcttctttttcactctctggttttcatacctcatctcactgattgtgccctttagcttctttttttttttttcactctggattagttagtgtggtggcttcatttgggagttggtacattcactcactcactcatctttcaatggcataaaaaaagttttgttttttggggtttttttaattcactttttgcatttggagtatatgggttggaatgaataatgaaaggctttggcttccattattggtttcttcatttgcatgttttttctcttctgggtttctagagaatcttgcacttgcagtgtaaaatgcatttaaagttttgattttttttcctctggggtgtggctaattgatttgaaattggttggttgtgtgtgtttgtgttgtgcaggtgttttgagataataatgctgaggaagaggaacaggtcagtgcagaaggatcaacaccacatgtgtgaagccaattcggagcactattctcaatctcatcatgctttggtggggcgcaacaacatcaagggacactcaattttca

SEQ ID NO: 21151 - DNA, 192 bp, Glycine max
  Intron number 3 from transcript Glyma02g10600.1 (locus Gly ma02g10600) derived from phytozome v7.0 (chr-ID Gm02; pos 8510576 to 8510767 reverse strand)
caggtggtacctaattattaaccctaatttttcttcctgatatgtaatgctattggttcataagctttttgatttacacgttgattgatcgatttcctgatcttttttatgcatttaaattggctatttacaagtgtttgtttatcttttgacccaggttttgtcaaaagaagacaccgagaccttaaacct

SEQ ID NO: 21152 - DNA, 755 bp, Glycine max
  Intron number 2 from transcript Glyma01g37410.1 (locus Gly ma01g37410) derived from phytozome v7.0 (chr-ID Gm01; pos 49766987 to 49767741)
gaattgcggtatgttgctttttaaactgtgttctttctttacgtgtatctgtgtatgtgtgttattttgctggaataacctattaacatgcatttggatcggatttcgcttgctctaagtgttttgtgaaactggatgaataatatgtatggttgattatacttgcatatgttgtgttttctgtacctagtgaatagtgattaatgtaaactgaggagttctaattaaaatttgaagttacagaatcttatgcttgttttcctagtatgagataagagatatttgaattaattcaaaattttgaaactgaaagtttcattatcgcctaaatgcaatctgatcatgctgtgaatgaaattggaatttgaaattttgaaaattaaagcataattgaatatagggttgattaactgatgacacaattgtgtcgagggaatgctaatttggacggggaaattcatgaacaagtgacattggttcctcttgcatggatttctttatatagatttcctatgcatgtgtctcttccgttctttatagagaaacaactcaatgtccttcaatgatattcacttattatctcttttaaaagatttttgcaattattacatttcccaatcagtgcacgttcactcctcatttttgagaaatcaatcccctttatttgtattggttttaatattttagtatgtattaaatggcttatcgttcgtttaataaacatttccttttttgcactacttaggttggcatat

SEQ ID NO: 21153 - DNA, 1000 bp, Glycine max
  Intron number 1 from transcript Glyma04g38390.1 (locus Gly ma04g38390) derived from phytozome v7.0 (chr-ID Gm04; pos 44787669 to 44788668)
cccactcccaaacccaagaaagatcaaaacaaaaggtaaccaatcataaccattcttttatttgcctggattttatcttaactataacaatttttcattaattgtacatttcatatttcatcagtacggcactcctccaatttcaaacttgtgctatgagatatgtagtttcacaagtgagtagtttaatcaaaacaatgcctaacacttctcactgtctaggattatcctttttaaagaatatacaaggattttggtactgcaattaaaacttgattttgagttataggtcttttagctagatgcttcttaattaatcaattcccatctttagtctttacacatgataagagatttacttttaaaatgcaacaggttaatttcattcttctctattggctttgctgaaggaagttccacttgttaaatatcatgaacactgactgcctccattatctcatcttgctctagaaaatttgttagagaggtatgccttgtcagcatagtaagctcacattttccatggatgaactggctagaaacataataagcaaaaattgaaaatgaagcatgatttatgaatttatctatttttctccttatagaaattaatagatcaaattacaacaatatctcttgaggtttggtataattacacataaccctaacctttttttttcctacacttatccctttaagtttgaaaatattacactaacacccctttatatgtttgaaaacattatactaaccctccctcaaaccttacattaacaccccctacaggggagacaaaagtaatggttaaaatagcaggaggtgcttgtgtaattacacaaaatcttagggggtgttgctataatttgctcaaattaatatgacttgtttagttgcttgtgcatctttcttttttcattaatggtcattaatttatgttctccgacttcaatgtttacattggatagcaagcgtcaacacgaggaagagttgaaactattgg

SEQ ID NO: 21154 - DNA, 972 bp, Glycine max
  Intron number 1 from transcript Glyma03g03670.1 (locus Gly ma03g03670) derived from phytozome v7.0 (chr-ID Gm03; pos 3461279 to 3462250)
atcacatcaaaggggtcctcgtaatttcatgtttgtctgttttaattcctactttcattcctctaatttttctatctgttttaatgacttttcattttctttatgttacttttgttaactaattaatatctttactatattacttgaaaaataataaatagaaaaaattactcaaaataagggtaggatgcgttggtaataccttattttttttcataaaacctgttttttgtttaatttgattcctttacccatacaatatcctctttttgtttttatatacaagaccggtaaatacgaagtagataaggggcaaattcatgttagaagtagcaattaaagtagataggaaaggatggtaggatgaagaaaaagtttgtgtgggacctcagaaaaacaaaaatctcttaattaattggtcttggtggaaatgatgatgggatctaaatcaagtgaaaataagaggttgtacagtcctttcattatcggaaaggcgtgttgtaaaattattttcagtcgtgctgttttggtttgttttgtggcattattctttgtatctgtttgtggtgaacgcggttcttctggtgccttcttttcttttagtcgtataataataataataataataatttactggatgtgaattattaaggtaatagtgcccctatactgtgctgcaaatttattgtttctgctttctagtgacagactagataataatgtaatatttatattaaacttaagaaccaaaaataagtaataaaaaaaataaaaagtattttgtaaatatatgacacaggatattaagctaccaaatttcttatagagcgatttttcgcacaagagctttacattggtgtacagtaactatagcagatttcaaaactctagcaaaatttattttccactaatagtcaaatactgattttcttttcagaacatacttgcagcaggtacagataccactgcagc

SEQ ID NO: 21155 - DNA, 596 bp, Glycine max
  Intron number 2 from transcript Glyma04g07920.1 (locus Gly ma04g07920) derived from phytozome v7.0 (chr-ID Gm04; pos 6185089 to 6185684)
tggcgttgagcaaggtagttgaatctctgttatgttgtgcttggtttagggcttttttttttgtttattctagaaagtagttattttcaataggttttgttggtttgtaatgcatacgcataaattatgaatgtcagttttccttggtgggaaattgatttgcttttacttactatgcatgcaatgcatgttgatgcatgccctcacatgtaggttgcagagacatggcattgttcttaatattttctctcaggcaacttgttccactaacttatgggcctttggtaattttagaagacttcatccctagtccttcctcttagacaacttatttgttccacaaacttatgagtttttggtaactttctgaagcattaatcatttttaaaaatgcctgggcttttgacagcactgtagattatgttttcattcagttacagttttgatcgatagtttcttgtcttcatgagtccccttgtttcgtctaatagcattacacatttttattgatatctgtgatgaaaggatgggacttcgaaactgatcaatttttctgtgaaggggctccagccttttgtcaggaatagcaaaaacaa

SEQ ID NO: 21156 - DNA, 486 bp, Glycine max
  Intron number 1 from transcript Glyma04g29250.2 (locus Gly ma04g29250) derived from phytozome v7.0 (chr-ID Gm04; pos 33371032 to 33371517 reverse strand)
cgaattcagagtgtgttctcaagtgagttataattattgaattcaataattttgtctttaaccataaaaaaaagggtcaaatagaataataataataataataataataatagtaatgaacaagtcagattttgagtttggtacaataagagcacctttctttgcttgtttttcaattcaaaaatcaaccccagaagatccgccagattcttgatgaaatctgtcggatcttgctttccaaactgtcagatttccttggtggcattttgtatccttctcgactatgatgtgtgctcccccttttaaaatgtgcatgccaccctccttcatcttcatctcacatcactttcttcatccttgtattctattcttttcctattcatatctcttccttcttttttctgttattattccttgcctcttttgtttttggcttgcactttcacatcatcagaatcatgggtatggctgcagaggctcagtttc

SEQ ID NO: 21157 - DNA, 502 bp, Glycine max
  Intron number 1 from transcript Glyma02g34760.1 (locus Gly ma02g34760) derived from phytozome v7.0 (chr-ID Gm02; pos 39264261 to 39264762 reverse strand)
gcttctcttcttctcactgtgagtctcttactctttctctccctaattcgaaacatgtcgttataataatgctaatgcatctaagtttgtaatttttttttaatgaagcaggaataaaattatataataataatatctataatgcgtcgcggtttcattcctgatctgcaaatcctaacagttttggttttatttgtctttgaatcatttcattttaaatgaataatttgtggactgttcctaactcttagactctggttatggtcatacttgaattatgaatggcatatatgaggtaaataaatgtatagctattattacttaggaagatgaatggcagatatgatggaaaggaatgtcaagtttatcacaagggtgtgtgagtctgtcactttgtaatttcctttttcttaatttcccaatcagaatgtctggctgtgttggtttattttggtagttttcgattgtggtaatgtttgctttgcagggttaatatatactg

SEQ ID NO: 21158 - DNA, 645 bp, Glycine max
  Intron number 2 from transcript Glyma02g12500.1 (locus Gly ma02g12500) derived from phytozome v7.0 (chr-ID Gm02; pos 10802921 to 10803565)
gagcaggttccttcagttcattctttttgtcttgaagtagtagtagtaataataataatacactgacaggagaaaggctttttgcgctgtcatctaatcatagtttgtcatatatggtaagtttgttgatttttacattacaactttaaaagtcatacctggcatgatttctgattggttgacggtgtaagaatttttgtactgatagtgcatgaaagttaaactctaaaaatgtttggaaagttagttttttttcaatatttcaatgttgtatatttttttggtgaaaattcaatgtcgtatatactaaggaatgagcatacaacattacattggtcttccaattattaatgataccaaattaatcctccaatgataattaatgtcattcgaattgtccttcaaggaccaatttgatggcacatatatatttggagaatcaatttgatgtatttgtaaatggaagaccaatttgatgtttgtaatctattaattgttataaattatttttaaaaaaaaactgttatagatatgatattctctgttgccttggatggatggagttaacaaaattaacaattttttgttcttaaacctgtggtgctctcaggttcttttgggcacttccaagctagcaaatctggt

SEQ ID NO: 21159 - DNA, 826 bp, Glycine max
  Intron number 1 from transcript Glyma05g05730.1 (locus Gly ma05g05730) derived from phytozome v7.0 (chr-ID Gm05; pos 5137476 to 5138301)
ttgctatcaaaaggctcaacactcgtggcttccaggtatatactccgtccgtccctatttataataagacagacatacccaacaaatttttttgtccctgttataagacttcattttatttctcttctattaattttttttttttttactgaaacttcataaattgtctttttttccgtcttatgatgattgaagaagatgagtaggttgtcaataaagttaaggataaatttgaaaaaatattactcttggaaagttaaagattggagtataattattgacaaatttaattttaaaaactaaattaattaactttcttaataaacgtaaattaatcaactgtgtcttattagtagggacggaggtaatatatgatatacttgttttgcttcttttttttccctcttcaatttctcttcttttttgcggttaaataaacgtaaattaatcattgggagttgtttgatgaaaatttcctgctcctatgatcgttactgttgcttttggaccattgtgaagcttattttattgatcgcgggtaaatagtattcattgtttgtttgtcttccagtactttgatctcgtgaaggaaacatttcatgctttgggatccataattgatagttacttaagtggctaatttacagttctgttcaatgggcatgagaaatgtcggaagttattcactattacatttctgcgtatgatttaaatgatccagaagcacatcaaattcttggcattgttatttttgtttgtcactgaattgtcaaaatatacctgcaatcttatggttgttctcttttgttgtaaagggtcataaaga

SEQ ID NO: 21160 - DNA, 598 bp, Glycine max
  Intron number 3 from transcript Glyma02g01700.1 (locus Gly ma02g01700) derived from phytozome v7.0 (chr-ID Gm02; pos 1237198 to 1237795 reverse strand)
tcgcagttgaaaagcgcatcacttcgccgctcctggtccgtttttttttactttttaattttgttactgattttttaataatctcactctgacatttatactaatttttaactatcagtttacaatttgatggaattaaccaagaaacttgagcaaaatattgatcgctaacacttgacacatgtgcttcacataaaattgatttttggggccaagctgttggtttttggacacacttctgaattttgatcgttggtgttcattttagatacaatgcgttctctgcatatagtcatatattatgaaaaataatgctgttcattttactgtgatattgttctgtacaggtattcttcatttttgtttttgggtgagacgagatcctttttttttttatcatttattgtcaggttgtcttctctgcatacgataaacgtctaatatacttataaccacatttatagtttataattttatatggcttttatttgagagaaagaaacacaattatcttgtactgattacttttgctttgcactttcattgatttgcttgcatgaaacttccctttcaggagcctagtagtgttgagaaaatt

SEQ ID NO: 21161 - DNA, 849 bp, Glycine max
  Intron number 1 from transcript Glyma02g02140.1 (locus Gly ma02g02140) derived from phytozome v7.0 (chr-ID Gm02; pos 1538821 to 1539669 reverse strand)
atcaccgtcacctccgacagcaacttctctaaacggtactctcttcaccatgctcctcttgtatgctgccatttttttctcataggaggggatttttttttttattatcgattatagcatttctcaaaatcagggtgatttaccttttccgtatggttattcatcgttaattgatgttattttttctgtaggctgagatatttcggagaatagatctaggaccctgttactgacactgagatcagcatgatagaaagctgtttgaaaacttaagctaaatctgtttgaaaacttaagctaacatattcgtgaataattttgtactattggattggctgataggtataagattaaatgtggtaatctggcagaatatgattccatttttttaatagtagacgattctttagttatgttatctgagatggctagttgttgctaaagctgtatatgtatgttcattcatgcttgttttatgaaaatatggccttcagttttttcttatctctccgtaagggttaatagtatgattgtgatagagaattagggaaaatgcatataagggttgccgtgttgggcttgacataggatgtattcatgcatgagaaaactagtatctcttaacttttaatttacgtaggaaaagttcgaacattcctcactgtttccctagtaatctattctgtgattttttttgtttaaaccctcacatgaaattaaatttgtttattttcagcccaatttcctgtgggtactactgtactattctttttgctagtattttgattttctttgcgtattacacctttctcaggtatctgaaatatttgaccaagaagtacttgaaaa

SEQ ID NO: 21162 - DNA, 591 bp, Glycine max
  Intron number 1 from transcript Glyma04g36360.1 (locus Gly ma04g36360) derived from phytozome v7.0 (chr-ID Gm04; pos 42906075 to 42906665 reverse strand)
cgcgtttgggctgggacatcgctgaggcccccaaggtaaacattctccatcctaaaatcttagacctcatattttttgaggtttttttgtgtctcttgttgtagatctggtggattttgtgtattttaggtttgtttggttcaagtaacgttgcttctttttgtctctaatgcagatacaggtttcaggttttatcttatcaatttttgtttaatttaattgatctgttaggtttttttattttttttttgttaatttatcagttttttactaacgatttttctgcaatttttattcctggtgaagaaaatttattttaaattaatcattaataattagtgatatctgtctatcctgacaatgatgttgctgtgattgtttggttatatgttatattttatgtctggtgtgatgatttgatgtttgatttagtgtactagaattcttgtttatcttaacccttgttgtttttctgtgatgatttgtgattggggcaagtgcataggttatttttcttttaactttaagtggtgcatgtatggatgactgtgtgtaggctcaggtaggattgttttgtggacaagaggttga

SEQ ID NO: 21163 - DNA, 495 bp, Glycine max
  Intron number 3 from transcript Glyma01g22910.1 (locus Gly ma01g22910) derived from phytozome v7.0 (chr-ID Gm01; pos 29193960 to 29194454)
tactaaatagaaggggtaaggaggaaaacttgcctgttagggatatactgacaaaaagatagatttgtttaacataataattatatttttaaagcatacatgattattgatttagaatctttctattttcttaaacataattaccatttatctattttatattaaactatgttatcttcataagaaggaagaaacataagaaattaccttttcaatcaaacattttaatttattcacactatttttctaagaaagcacttcttccaaagtcttaaactttgactggctcaccattttatcctttctaactaaattctaataattgattagcccaattttactattttacataattttccgaataagaacaacagacatttcaatttttacggcgaaaattgaaagaaaaagaaaaatcaatcatcaaattatcaataataataaaattggcgtttttgtgaacatgcagggattccgaaaaattgtgccagacat

SEQ ID NO: 21164 - DNA, 812 bp, Glycine max
  Intron number 1 from transcript Glyma01g07860.1 (locus Gly ma01g07860) derived from phytozome v7.0 (chr-ID Gm01; pos 8668734 to 8669545)
gacacagtatcaggtatagttcatagcttattcgtaatgtaaaaaaaatttacattatcaattaatggatgtaaatgtttataacctcttcagtaatataatttaagtcatttgaattttattgatgaataatttataaatatttttattagcattcttttgagtcttattatctcagttaacttttcggccgacatatttaattcacctatttttttttcttttttttattataaaaaaacgcctaaaattcctctaaatagattaatagaataaaatgagtaatttaagtagttcataaaaaaaatcaataactgatattccaactcatcaaaacatgaaacaagtgaaattaaactgcggaaaagtgaaacccggtactttttaaaaacataaaaagaattcataaactctcccctttcggtggaagggcaagcttatgatatctcctttgattaacgagatcccgcaattaatatgattttatctggtctttcttgttaaagctgagttgttagaagcataaattaattaattatttttttgttaaattttttttccaggtaataagttgcagttttgctatatagttgaactataaacttaaattagctttagttaattcaatatttataacttaaagatagaacaattcatttagcgactatgaaggctcaaattaaaaattattcaaaggaatttcgtattaggttataagttattaactttcacattcttattgttcattcatacttgttattaatggttcgtgttgttcagctgggccaattggaagttccacataggttttg

SEQ ID NO: 21165 - DNA, 966 bp, Glycine max
  Intron number 3 from transcript Glyma02g06330.1 (locus Gly ma02g06330) derived from phytozome v7.0 (chr-ID Gm02; pos 5038675 to 5039640 reverse strand)
gcattagctgaggcaaaggtatggattcctcggtttcctattattatttattttaattatgtggatacaaatcttacaatcacttcctcttgggatgctgtgggataactggttaagaaattaagaattacaccccaagaatagttatgatttgtgttggttgttcttgacatgattgactccatcaatcttctcagagttcttatttgactttgtgaaatccttggggtactgttgtgttgtcccttttccttttaaaaacaattaaactggtttcttttattgataaattagtcttcattggagtctttatctctatagtaaatgttttgcatttgacagttataggtatcctatgcacggtaattcattgtgcattatctccatgatactaaaagatttaagaatgctggtattttgtgtaaacactcagggtttgcttatttgagatgaaaaaatgagaagttgaaaagtagggtgaggagtggagatggggtgggatgaaatgattttgattttctctaatagtctcttcttagtgggtggaaaatctattttagctcatttcatgttacactgcagtttctatcttcctaaacttcttctgtcacaagttcgttctgaattttaatatatccttaaacaagctcaccgttgagcatgagaggcagttaacacaagatcgtgtctttactcttttgcttgatttgtaacaatatttatttctgaagaatacaaaacttatttaaggtctctgcatcagattgttgtgattgaatatgcagaatgatttcaggttgtcacgggcctttccagaaatttctctaaaagctaaataaataaaatagtagaaaaacatatcataaagttgagaggttgtaccaacgagcaatttgaaatcctcctcatctattgattatttcaaggtacatttagtgctctaaccttgatattcttattaggctg

SEQ ID NO: 21166 - DNA, 670 bp, Glycine max
  Intron number 2 from transcript Glyma01g26010.1 (locus Gly ma01g26010) derived from phytozome v7.0 (chr-ID Gm01; pos 34355382 to 34356051 reverse strand)
gaagcaaacttgaggtacaagtagcttcaggaacaatttgaatgtccatttatgtagctgtatgatgcatgttttgttaataaatatttcctccttttgcccttcaacccttttgagataactttcatttggcatttgagacacaagattttcagaggaaaaaaacaatccctcttcagttttcccgatggtttgtgaatggctgaattgtctggcattcatttgattaatattgtaatgtcagttagatataatatgaaattttaggattgtaaattgaagttgaaagctttttagtaatttttgctagatgatacgtctgttttgaaaacaagcataaagtttaaaatgcaaattgatatgatctagctgagtaaggtacaatcatgattttttttaagcgtttatgattagatttacatgtatgtgctacaaatgtgatccaccctttaactgtaagatagtcatcatcatgaacatgcattgcatgcacaatgcaatattgcagggtctggcacttgcagtatataagaacaatgagtgatgcaggagaaaagatctaatatccatgctttcttcattttagattgattaaactttctaccaaataaagtatatatagatagttcttgatatttagtactgtttcttttcacatgtgaatcaggtc

SEQ ID NO: 21167 - DNA, 390 bp, Glycine max
  Intron number 3 from transcript Glyma02g32980.1 (locus Gly ma02g32980) derived from phytozome v7.0 (chr-ID Gm02; pos 36301046 to 36301435 reverse strand)
gttcctgctcaggaaacccccatcacatctttcctgtaagttctttccattaccaacccatttcatcttcttttattcaaccctccaatttttctatgaagtttcagtttttattttcactccacaattcattgcttctctctgctctagaatgtggtgctcgggtggacatgggtcaaaggattcaacaatagcttagatttttgtattcttatcatgatttggaaacctacccatttcaggaacaaaaaaagtgaagaaagttcacattttgatttcgctttccaatttttttttaaaaactattttacttctgttattattatgtctatgaaattgattggtttggttattgtcaaattgtgattaggactgcaagcggaacattcc
